United States Patent Application Publication US 2012/0017338 A1 - sequence listing, part 9

SEQ ID NO: 32192 - DNA, 795 bp, Zea mays
  Peptide Sequence Number=SeqID_73971
tccccactctcccccgcccccctcgccccacgcatgagaggagagcggccggacctggaagcttctccgcggcgctgcgtcgccagctcgcagcggtgactgtcaaacgccgtgctcggagctttggattcgctagctgcgtctcacgattcccggggaggtttctcggcggcctgttctgcgcagggagctcggggtcatggtgtggcacgaagggggtcctcgtggatctagctctgcacaccgaggaagtagatgaccaccggaaggaaatcctgggaatctgtagcagtcgctgtggaccaccgacctgggctgccgttgtcgctgccgtggccctagctcggcgccacagatcttggcgccgagctagggttttagcgggtgccgtgttcttccttcttcccacttgcttccccaccgtgccgccttccccgaaagctccgccttgtcgtcaagccgccgcggcccgccccgccttgctgccgcagcccgccctagcgagccgccccgccacgccgccaagccaccacggctcgcaccgccaggccactgcgcctcggcgagccttcccgccgcgcagccgcgctccgccgcgccgctacggcgccgtgcctcgccgtgccgtcgctctccaccgcgcccagccgaccctgcaccgccgccgccgtgcaaaagtccgccccgcccgtcgcgcccaaccggccgagccccgcaccgctgccgagctctgctccccgaggtccacgacgagccctacagtcgaacctcctccccgcggagccctacgcctag

SEQ ID NO: 32193 - DNA, 330 bp, Zea mays
  Peptide Sequence Number=SeqID_73972
atggagctgctcgccgaccaccgcccacagtcgtgcctaggtccgcccgttcttgccaaattctccctcagtcatgctgttggtcgccttcctgctccccacgccaacgtcctgtgcatcgccgccggagttcgacttgctgcttgtgcgagctgtatcgagctcgtccgaccatggcgctcactccccagccgttctcttgctcctcgcaccgtgattgccatgttcactagcaaccgcagtttcgtcgtgtcgcaaaccgtgagctgggactccaccgtcttcggccgtcgactagctcgccaaggcgtttttcacattgaagcatag

SEQ ID NO: 32194 - DNA, 843 bp, Zea mays
  Peptide Sequence Number=SeqID_73973
atggtcgatagaagagttcgtgctacgtgcttcaaccttcagggaattggtgagaaggttcctttcggaatcattgttcgctgtccaacctgcatgatagcagttgctgttgtgcagcctcaggatggaactcaggttgtttcctgttcaaagtgtcgatatcaatatgaattattttctggagacattacgagtattgaatccgaagaagttagtgattatgcagcctttatcgattttgctactctatttatctcagataatagattgtttgaatgttgcccactttctcaatgcatggatatttcagccctggagaaagccttgagatttattaatatgaggaaagatggtattccagctgctgtccactctattgtgatccgctcaccttcaggaacagcacgtacttacagatttgctacccagaatgtaactcttcctgctcaagaaggagaaagggttaccatttccttggcggccccagttaacgtttaccgtgacatgggacccctcaaggttgctgcgcgctcacaaggatttaaacctggagaacctatgtgtctcactaatcacatcaatgggcaagtctcgaagttgctaagagctccatcaaagaacaagggaacatttttccttagcccatatttattggtcggtgctcttgccttccttgcatctacagatgctgcttccgcattcattgacccaagtcttcctagacttgttacagcaactgccattgcatcagctgccataggaacaacactaaatggagtggtcctgccaaaaattcaaaaggcaagtccaattttgacaagaaaatgtttctccatcatgtaa

SEQ ID NO: 32195 - DNA, 336 bp, Zea mays
  Peptide Sequence Number=SeqID_73974
atgggggataattcggcgcactggggctggcatgggctcggcagaagggtggggaaaggttccttacctagagatggcactcgaggcagcttggcacggcgcgagggactccggttggccggacgacgagaaatcgcggtggcggcgaactctggtctacgcagaggaggggttagacgtggactgggcagaggggtcgatgaaagggaaaaccaccacgggttcctgatgcgcaaagctcttgcaaagctcaccgtggccgaggcgatggcagagacccgacgaggacggcggaatggcggagcaacattgggggtggcactgccggttgagtga

SEQ ID NO: 32196 - DNA, 576 bp, Zea mays
  Peptide Sequence Number=SeqID_73975
atggcgctcgctctcctatccccctccacgccatcccatcgtatactgcttcgtcctattccatttccatctctgccagtcgcgcgcgccactagtgccggtagcttcggcctcgcgttcttctgccccctctctcgcggttcctcctcgctgcagaggaccggcgcggcaggcggcgttattgatagtgccggagagggctcatcggaagaaccggtcgctggatggctcagcgcagacctgctcaggcggatatcaggcgcggcggacgcggaccgggtcctggacattgttgccgagtcagttgaaggcgcgggtgccgctctgggcgcgcccgagtgcaacgcgatcgtctccgccgcttttgaccgtggcaacatcgcgctcgctctctcggtcttcgaagccatgcggtccggtttcgcgggaggtgcttcttctatggatgaggtgatttttcaagttcgcacctgtgtttatcttttagtacgcttcattcagaatactgtatcagccatcttgacattggatgttgtagcttcaaccatcctgcacagcagcagctggtttaagtaa

SEQ ID NO: 32197 - DNA, 438 bp, Zea mays
  Peptide Sequence Number=SeqID_73976
atgtcgtcgatgccacaacgagggggtcgtggccgtagccactggccaacatgtctctatgtcctcgtccgacctgggcgtgtcatggcaagcagtcggacaccagtaccagactgcgtgacacgagtctctgaagagcccgccacctcgggagattcgagctctgctgctgatggtgataaccatttttactgcgctgacgtggagagccagaggccagaaatttataacaacgatgatcgtggcaggcacgctatcggaggttgcggcgtggcgggtcactcgaagcggagttcacggggcctatcctcgcatcgctcggcacggagtttgcggggacttatcctcacgacatgctccgaggttgcgacaacgggcggagaaaggcgcgtggcgtgcggagacggtttctgcgtgtggcgggagttcgtttcatag

SEQ ID NO: 32198 - DNA, 468 bp, Zea mays
  Peptide Sequence Number=SeqID_73977
atgggtaagaacaacaagcgcaagcgtgagccgactcctccatcggaggagtttggtgactcggaatactcagaggaggagttctcctctgagttcgaggggtctccggctcccatccccctgcgtgagtcgtctgatgactcagacgactcccaggggcttgcggcggaggtctggacgtacatccgggccgtcgagtgctccgggctcgagggctcggatgagtctgagttctcctcggacgaggaggactcggacggcggcgaggacgaagatgacgacgacgacgacggcgacgacgacgacggtggcgacggcgatggtgacggcagcaacggcggtggaggcagcggcggcaagggcgacaccagaggcggcagcagcacgggcaacaccagaggcggcagcggcgcgagcagctccagaggcggcggcggcaagggcagcggcagcaaggccagtggctaa

SEQ ID NO: 32199 - DNA, 429 bp, Zea mays
  Peptide Sequence Number=SeqID_73978
atgactggcgcttacacgattgtgggcgttctgaaaagagatgctagatcggcggagcatcggacgaccgcacgccggtctactgctcctgttctgcacaccacgcttggcgtcagcttggagaagacgaggctgatgcaggctagaatcgatggctttgttcagcaaatgaccggccttcttcggctagaacgagatgcggagctggaactggcccaggatcatgaggtgagtgccgccggtacagtgatggatggaatgccgaaaaagccagtggtagctcatggtcaggcccaagaggatggtgacaccatttgcaatttgagagtcatcagcagctcaaccggattaactggtcaacatctagtatccaccccacattcattgccatccaagttttcccacttctcaaccacttacaagagctag

SEQ ID NO: 32200 - DNA, 402 bp, Zea mays
  Peptide Sequence Number=SeqID_73979
atgaacaattcgttgtctcttggcaagggaggatttggtgaggttcacaaagggactttacctgacaagaccgaggtggctgttaaggcctcaaacgaggtcactcaaggggagggggctgtaccggtggctgctgcgaggtggggtggagtgagggttgtcccgctcgccgccaggaggggggtcacctcgccctatacggtcagatctagacagagcttggttgggcagcgcaccgggggcgctcgcccgcgcgcgacattggacgccgactacccacgtacatgcgttggccgccgcgccttgccagttctgcgttcgccgaagctcgttggctgcaagagaggggtgaccggctacctaggggcactcaaccgcagcgaccgtagggggagctcgtag

SEQ ID NO: 32201 - DNA, 270 bp, Zea mays
  Peptide Sequence Number=SeqID_73980
atgaagaggtatccttggacaaagtttggaacttggctcgaggtggagggcttggctctccctgttcctgcgaaattgctcctcgatgcccaactaggaaatgtgagttgtggagctgccatgctcatggacagtctccatgaggtccaacgaaatgttgttgaagcgtcagtacacgacaatgcaatccatgcgactccaggcacgaacactaacaccaacaacggtggagagcacacaatgcgagaacacatattggttgagcattag

SEQ ID NO: 32202 - DNA, 309 bp, Zea mays
  Peptide Sequence Number=SeqID_73981
atggggctatccaccgcagtccgggcatactggcgtgccatcgagcgtgctgggctcggtgggtcggatgagtcaggggtctcctcggatgaggcggactcctccgaggagtggagcggcggcgacggtgacgacaaggatgatggcagcagtggcgacgacgacggaggcgatagcagcaagggcgacgatagcaagggcgacgacggtgacggcagcagcgacggcggcaagggcgatggcggcgacaacgacggcaggggcggcggcggcaacggcaaggccagtggcgcaatgccactggtttaa

SEQ ID NO: 32203 - DNA, 477 bp, Zea mays
  Peptide Sequence Number=SeqID_73982
atggcctgcctgcgcgccttttcagcgcttctcaagtcgcatgcatggccctttggcctttggccttgggcctgcagcggcggacacagtgaactgaatggatccagcggcatttatgcaaaaagctgtggctctgagaaaatgatgaaggatagccacatgcgcgccaccatttctgtctcaccttatgcgagcacagagagtgtgggagagcaggcctctgaaatcgccgtccacagagcgacacttgcacagatgtgcgggcgatcaggtttttgcaccgccaccaacgtgggcacgtggcgagctgtacgcgcgcagcaggtggcactctctcgatgcaaatgcaaatatgcaatgcgaggtggtaaggtcgaggaaggcatgcatggcatgggctgccggtcactcctcgctcgagccaggcacacacggcccatgatagagatgaaaacgatacgatacctgaaatactag

SEQ ID NO: 32204 - DNA, 246 bp, Zea mays
  Peptide Sequence Number=SeqID_73983
atggaggccccaggcccccatgacagcaaccggcgccccgtttgtactggggagcaatgccccccccactcggggccatacccgggcttcttgaatggggaaaccagtaccgtgactcgaggcacccttgggtatgacccaacagtgccagccagggatcgggaaaggggataccccgaaagggatccttctccgcgaaggaaacgggccccgagcccccctactgatcagaggttcgaaggctga

SEQ ID NO: 32205 - DNA, 603 bp, Zea mays
  Peptide Sequence Number=SeqID_73984
atgggtcggcgcgagacggagcgcgaagaggggaagaagccggagggagataggcatacaaaggggaaacccgcggccttcgagtttgtcccgcgcccaggtcggggtaatcatggcgcctcctgtgacgtggtcggtccgagcccagagttcggcgaggtggaggctcctccgaggtcgaggtcgagtctgtcttccaaggccgaggccgagtccgagcccctgggtcgggcgaggcggagaccgtcggctgaggccagggctgagtccgagccctggggtcgggcgaagcggagtttgtcgtcttccggggctgagcccgagtccgagccctggggtcgggagaagcggagttcgtcatcttccggggctaagcccgagtccgagccctggggtcgggcgatgcggagttcgtcgtcttccgaggctgagcccgagtccgagccctggggtcgggcgaagcggagttcgtcgtcttccggggctgagcctgagtccgagccctggggtcgggcgatgcggagtttcctatggcgcctgtggccggacttggctgctgtcagcctcactctgtcgagtggcacagcagtcggagcggcgtag

SEQ ID NO: 32206 - DNA, 984 bp, Zea mays
  Peptide Sequence Number=SeqID_73985
atgcccggcataccgagggatgtcgccgagcactcgctggatatccgagctggagcccgacccgtgaagcaacctctgcgccgatttgacgaagaaaagtgcagagccataggcgaggagatccacaagctaatggcggcaggattcatcaaagaggtattccatcccgaatggcttgccaaccctgtgcttgtgataaagaaaggagggaaatggcggatgtgtgtagactacactggtctaaacaaagcatgtctgaaagttccctaccctctgcctcgcatcgatcaaatcatggattccactgctgggtgcgaaaccctgtctttcctcgatgcctactcggggtatcaccagatcaggatgaaagagtccgaccagctcgcgacttctttcatcacacccttcggcatgtactgctatgttaccatgtcgtttggtttgaggaatacgggtgcaacgtaccaacggtgcatgaaccacgtgttcggcgaacacattggccgaacggtcgaggcctacgtcgatgacatcgtagtcaagacgaggaaagcctccgacctcctttccgaccttgaagcgaaattccgatgtctcaaggcaaaagacgtgaagctcaatgccgagaagtgtgtcttcggggttccccgaggcatgctcttggggttcatcgtctccgagcggggcatcgaggccaacccagagaagatcgtagccatcaccagcatggggcccatcaaggacttgaaaggcttacagagggtcacgagatgccttgcggctctgagccgtttcatctcgcgcctcggcgaaagaggcgtgcctctgtaccgcctcttaaggaaggccgagtgcttcacttggacctctgaggccgaagaagccctcgggaacctgaaggcgctcctcacgaacgcgcccatcttggtgccccccgctgccggagaagccctcttgatctacgtcgtcgcgaccactcaggtg

SEQ ID NO: 32207 - DNA, 387 bp, Zea mays
  Peptide Sequence Number=SeqID_73986
atgtcgtgggcctcgttccctcatgtacacagtggtggccacaccacaatcacggttgatgaggtctcgcaagacgatgcctcactcgacgttgcctacctcatggccttagagctcacctccagctctgccaccaggctggtacttcgtcgcctcttcacgatctgtgacacgctaccactgctcgattacgactatgacgacgaccagtgcatctatgacttcaagatgctactgctacgctgcgacggtggtggcggagaggaagatcggtggttgggggaggcagtggcgggtggggatggtggtggtgcgttggagggggcgacaacatgtaggataatgaggagtcggtggcatatgatgggatcacgggtggaggtgtga

SEQ ID NO: 32208 - DNA, 285 bp, Zea mays
  Peptide Sequence Number=SeqID_73987
atgtcaaggctggtgttggacgaatatagtgaggaggcgcctgctcccacgctctttgccgagaatggggtgacggaggcggagacacgaggggagagagaaaagaagcaggatggtgaacgaggtggagggcgtgggttcgaaccccacgtccctagcgggcccgtaccaagccgccgtttgccatctatatgtggaggtgtggtttgggacgtggaggttggttgcgcggaggggacaggggcgaaagagtttgtccatgataatggaactctccatctctag

SEQ ID NO: 32209 - DNA, 687 bp, Zea mays
  Peptide Sequence Number=SeqID_73988
atggcgagagtggcacgtaccctcctggcaaaggaccgcctaaaaggggtggtgttctctcgagtggcgcagatctgtccatgcagtagaggatccgtgggaatggtagacatatgcaagagttacgagaaacatatgtcgttacgagtcactttgattgtgattggtgttaagcgccgaaattccactgcaaaaatgttggtgtgtgatttgtgtttacttaatcttgtgatcctggttccgtctgaggtctttgagacaaggtcaggtgcatgtgggcccaataacttgggagcttctgccacagctagcgacgacgctaatgggaagggcaaggtgaccggcgagaaggagacaattaacaacgagcccaagggagacaagcccgttgactcgggttcgaacatcaagaacaaagatgggaagaagaagaagaaatgcattaagaagatcatctactacgacagtgatgtttcttcttcttcttctccaaaggacgatgattcatcttcttcaaacaaaaatatgcttaagtgcccaagtcttgccttagaggcaacgacacacttaaatcggaataaactgtcaatccctcggatcagggttaaggatgctgggaaggccttgctgtctagatttggacagattcaggctccaaacttcaaacaactacaacttgacttttag

SEQ ID NO: 32210 - DNA, 631 bp, Zea mays
  Peptide Sequence Number=SeqID_73989
atggccacctcaccagagcagttcttcgtgaaggacgtttcttccacacagcaaggtggaggaaccctttgctcaaatcctctcctccccttccctttggtgggcatcagtgaggatgtgttgcaaggtggtggtagtgatgcgggggcgttcctagagctagaggatgatgtgttgcccggagacgacagtggcttcatggtgggcagggaaagtagtgtcctttcgaagaagaggtacgctagcagagatgatggttctttagaagaggaggtggtaacaaggaggagcaaagccgacaaggatacctgtgcccatgacatgctagaggatatgatgttaagtggccatgagacgtacattagagacatggagaagctgcgcatcgccatggcgaacgagaagagcaggagcaacggcaagggcggcggcggtagtaaaaaggcgtcgttctgtaatgtggtggacatacgctcactgttgatcttgtgcgcccatgcggtggcagcaaacgatggcgcgagggcacgcgagctactgaagcagatcaaccaacacgcatcagaaacaggggatgccacacagcggctagcccagtgtttcgccagggggctggaagcacggctactgg

SEQ ID NO: 32211 - DNA, 108 bp, Zea mays
  Peptide Sequence Number=SeqID_73990
atggcgtatcaaatactgccggtgtggggttcctatttatatgcctcgcgctttgcaactaggcgggcgtcgtcggtcattgactatagctattctagtgaagggaag

SEQ ID NO: 32212 - DNA, 3228 bp, Zea mays
  Peptide Sequence Number=SeqID_73991
atgaggccttcgccacctttgctcctgttcgtgctcctgcacttcgcgctcctgtccaccattgccgccgccgatgggaatgggaatgggaatgggaacggcgacctgcgcggcgacgcgatggcgctgctcgccctcaaggccgcgctcggctgccggccgggcgcgctgcggtcgtggtcggagggcaatgccgggtccgtgtgcgcgtggacgggcgtccggtgcgcggccggacgcgttgtcgccgtcgacatcgccaacatgaacgtgtccagcggcgcgcccgtctcggcacgggtgacggggctcagcgcgctcgagaccatctcgctcgccgggaacggcatcgtgggcgccgtcgccgcgtcgtcgctcccggcgctgcgccacgtcaacgtgtcggggaaccagctcggcggcggcctcgacggctgggacttcgcgtcgctgcccggcctcgaggtgctggacgcctacgacaacaacttctcggctccgctcccgctcggcgtcgccgcgctcccgaggctccgctacctggacctcggcggcaactacttcacgggcgagatcccggcggcgtacggcgcgatgcccgcggtggagtacctgtcccttaacggcaacaacctgcaaggccgcatcccaccggagctcggcaacctcaccaccctccgggagctctacctcggttactacaacgtgttcgacggcggcatccccccggcgcttggccggttgcgcagcctcaccgtgctggacgtctccaaccgcggcctcacggggcgcgtccccgcggagcttgcatcgctcgcctccatcgagacgctcttactccacaccaaccaactctccgcgcccatcccgccggagctcggcaacctcacgtcgctcaccgcgctggacctctccaacaatgcgctcaccggcgaggtccctcgctcgctggcgtccctcacctcgctcaagttgctcaacctgttcctgaaccggctccacggaccggtgcccgacttcatcgccgcgctgccgcgtctggagacggtgcagctgttcatgaacaacctcaccggccgcgtccccgcagggctcggcgccaacgccgcgctccggctcgtcgacctgtcctcgaaccgcctcaccggcgtcatcccggaggcgctgtgcgcgtccggcgatctccacacggtcatcctcatgaacaatttcctcttcgggcccatccccggctcgttcggctcgtgcacgagcctcacccgcgtccggctcggccagaactacctcaacggcagcatccccgccggcctgctgtacctgccgcggctgagcctgctggagctccacaacaacctgctctcaggcgccgtgccgtcgaacccgagcccgagcgcgtccagttcgcagctggcgcagctcaacctgtccaacaacctgctggcggggccgctgccgagcacgctggccaacctcaccgcgctgcagacgctgcttgcgagcaacaaccggatcggcggcgccgtgccgccggaggtcggggagctccggcggctcgtgaagctcgacctcagcggcaacgagctgtcggggccgattcccggggcggtcgggcagtgcggcgagctgacgtatctcgatctcagcaggaacaacctgtccggggcgatcccagaggcgatcgcgggcgtccgggtgctgaattacctcaacctgtcgcggaacgcgctggaggacgcgatcccgacggcgatcggggccatgagcagcctgacggcggcggacttctcgtacaacgacctgtcagggcagctcccggacacggggcagctggggtacatgaacgcgacggcgttcgcgggcaacccgaggctgtgcggctctgtggtgagccggccgtgcaactacacgggaggaggcggagtcgcgggcgcggcgacgacgcggctcggcgggctgaagctggtgcttgcgctgggactgctcgcctgctcggttgtgttcgccgtggcggccgtgctccgggcgcggtcgttccgcgtggacgtcggcgcgggcaggtggcggttgacggcgttccacaaggtggactttggcgtggcggaggtgatcgagtgcatgaaggacggcaacgtggtgggccgcggcggcgccggggtggtgtacgcggggcgcacccggtcgggcggcgcgatcgcggtgaagcggctgcaggcccagggcggcgccggcgcgcagcagggcgacgaccgcgggttccgcgcggaggtccggacgctcggcagcatccggcaccggaacatcgtgcgcctgctggccttctgcacgaaccgggaggcgaacgtgctggtgtacgagtacatgggcggcggcagcctcggggtggtgctgcacggcaagggcggcgcgttcctggcgtgggagcggcggtaccggatcgcgctggaggcggcgcgcgggctgtgctacctccaccacgactgcacgcccatgatcgtgcaccgggacgtcaagtccaacaacatcctcctcggcgacaacctggaggcccgcgtcgcggacttcggcctcgccaagttcctccggtgcggcgccacctccgagtccatgtccgccgtcgctggatcctacggctacatcgcccctgtgtcctgcatggtctcatgcatagtggtgcggtccagatgtgagatgtcttggccagccagcggttccaaattggagctcttttctgacccccccaaaaaaaaaacaaaaaacattccagagtacgcgtacacgctgcgggtggacgagaagagcgacgtgtacagatacggcgtggtcctgctggagctcatcacgggccgccgccccgtgggggacttcggggaaggtgtggacatcgtgcagtgggcgaagcgggccacggccggccgccgggaggccgtgccggggatcgtggaccgccggctcgtcggcggcgcgccggccgacgaggtggcgcacctattcttcgtctccatgctctgcgtgcaggacaatagcgtggagcgccccaccatgcgcgaggtggtgcagatgctcgccgagctcccgcgccacgagtcgtcgccgtccacctcctcctcctcctcgtcgtcgtcggcggtggaaccgccaccaccgcaggccggcgaggagagcagccccgacgacgggaaggagccgccggccaactgctacaagctgttcccggacctgctggcctga

SEQ ID NO: 32213 - DNA, 306 bp, Zea mays
  Peptide Sequence Number=SeqID_73992
atggctcgtagaagatcccaaaagaacaagaagacaactccgaaggagaacaaggaggcgcagctccgctataattcaccggactgtccggtgtgccaccgaactgtccggtgcaccagcggagcaacgactatctgcgcgcaacagtcgactctgacggatgaacagtgcaacacagtgtcacggcagaagtcagagcagcaggatgacgtggcggcgcactggacactgtccggtggcgcactggacactgtccggtggcgcaccggactgtccggtgcgcccatcgtcagcagccttctctaa

SEQ ID NO: 32214 - DNA, 147 bp, Zea mays
  Peptide Sequence Number=SeqID_73993
atgactgcacttgtacccaccatatccggaatgggtgacaccatctcagagcaagtggggagacagggcatcctcatggatccgtgtccacaggccatcatattaccattatcaaaagagatacaaccaattcctgacctcacgtga

SEQ ID NO: 32215 - DNA, 216 bp, Zea mays
  Peptide Sequence Number=SeqID_73994
atgaggtccatcgaggaggataaaaagaaaaagctacccaaaaaaccaaaggtttctggagaaactgaaatttctaagttgaaatcgaaaccttcggtgctcaagaaacgagaatctgtgggatcaaaccgcagtgaggaagaaaagtctataccgccgaagcatactgtcgaaaccccttcggcatcttccattggcatgacagaaattctagag

SEQ ID NO: 32216 - DNA, 174 bp, Zea mays
  Peptide Sequence Number=SeqID_73995
atggcgccaccgcatcacgacgggtgcgccgccgcacctcgcgttggtttggggtcgctcactcctgaccgttggattccagtcgacggtcccgatcattatgttaatgggaacatggagaaccacccgggaaaacagtgctaccacaagggtttatgggacgcccttggctga

SEQ ID NO: 32217 - DNA, 1500 bp, Zea mays
  Peptide Sequence Number=SeqID_73996
atgccaaataatattgataaccttttggatgaatctgaattcctcatttcccagctcaatattcagcaaaggaatgcttttgatacaattgttcagactgtcttttccaacaaatctggtttctactttgtttctagatatggaggcacaggaaaaacctttctatggaatgctatagttagtcatctaagagcaagagagaaaattgttttaactgtggcttcatctggggttgcctcacttttgcttccaggaggacgcactgcacattcacgttttaaaattccatgtgaactacacgaaaccatcacctgcaacattaaacgaggaacaatgctagccgagttaatcaaatcaacttcattgattatttgggatgaagctttaatgactcatagatttgcttttgaggctttggacaaaactttcagtgaccttctagctccacattttgaacaagctgaaaaaacaccttttggtggaaaggtagtagttcttggaggtgatgcacgacaaatattgcctgttatagaaggtggcacacgctcccaaattattgatgcaactgtctctaactcttatttatggggttctgttactgttataagtctgactcaaaacatgaggctcctctcaagtagcacatctattgaaacaaaaaaggaaattgctgaattcagtaaatggttgcttgatattggtgaaggaaatgtaccagcaacaaaaagaaatgctgaaactgaaagttcctggatacagttgcccaaagatattttattacttcctcaaactggtaatatagaatatattgtcgactcaacatatccagatttgcagcaaagatatacagatattgaatatcttaaggaaagagctatactaagcactacaaatgaaactgttgatgctctaaatgaatttattgtctcttctattcctggaaatacacatgaatatttcagttgtgataaaattggaaagaccccatacagccatgaatcctatgacctattatatcccattgagttcttaaattcaattaatggcaataactttccacaacatcgattatgtctgaaaaaagatctatcgcctcaggataaagatgcggcattgcaagtgcaagtgaatagaaaatgggagtttaggggaatcaaagatgatggcccaatacttcacattgatatggtgctcacagatgcaatggtgtacattataaggcgctttcgagtcatctatgcaaaatcatcttacaaagttgttgatgctccttttatgatatgcttcacaaaattcactataattgagctatgtcgtgaaccaccaacaacatttcctcaatatgtttatcgattgacaccatacaatgaaattgacccatttggtccaaaagcttggaggttactaaaatcaacccgatatattatggacccactcaatcaacctctaagattagaaatgtattcatcacagatctcaggtgccaaagttcacacttag

SEQ ID NO: 32218 - DNA, 513 bp, Zea mays
  Peptide Sequence Number=SeqID_73997
atggcagcgccaggctccctgcgacttctccaggccccgtccttcgctgcggccaagtgccagccggtgggtggccgggcatccgcgcggcgagcgccacggccactgttcgccgtgcgcgcctcggctgctgacgccgccaacagggatgccgtgctcaaggccttccgcgagaacagggctctcaagataatttccggtcttcagaactttgacaggagcagtgttgcatctgttgtcacagctgcagataagacttctttgagactatatgatgtgaaaaagagaggtctctgttacactgcttttgtctgttgttttcttctagagggaggtgcaacacatgttgacatagcatgtgacaaggacttagtaaagcttgccatggatcttaccaaccttccggttgagattggaaactatgattctttttatgagatgggcattgagttctcctctgagcaggtgctaactaacccgtcctattcagagctgctaaatttactattttaa

SEQ ID NO: 32219 - DNA, 507 bp, Zea mays
  Peptide Sequence Number=SeqID_73998
atgccgttcaggcgctcaacggcggtgatcagtccctacaagctcaagtcgccgtcgccattggccaccatcgccgagaacatctgccggtacagcgccgctccaggcagcacgttggactcctccccgccgtccccgacctcgagcgccatgccgaggtctttgacgatgtacggcacgctgccacccacctctgacaccacgaactcgccgaggcccaccgcgatctggatggcgatcttgctgctctgccagctgccccatgcgggtcgccctgccgaggaaggtgaagagcggctcgagccaagcgactacggcctcgtcgccgcatgggcgaagagcgtgccgtcctgggcgccgacgtcgcccccggatgtcggcgcttcgatggcgaggcccgcgagggcaccatatcggcataccgtgctccaggaccaccgcacggacgtcgccggggttaccgaccatggtgaacaccacgtcggatgctgcggccacggcgcgtag

SEQ ID NO: 32220 - DNA, 564 bp, Zea mays
  Peptide Sequence Number=SeqID_73999
atgaccccaaattcaatttccaccccaactcccaactacctcttcgcagatgcaccagtgtccttccagatcccgccgcgcgtctccttccgcgacacgctctcagtctcacgccacagctcgtcgcgttcgtcaacggtcgacccatcgcctatggaaggaaggcgcgagccggaggcggacggcggaaaggccgggggcctcccgccgtcggagccgccgcacctgcagggccagccgccgcaggagtacgggtacggcacgttccagggtcctcgacatcctcccgtcgggttcccgcagcctgccccgcctcccgggctcggcagcggcggctatcacaaccagcagcagccgtacgcgcctgcggagacgtactacgcccaggggtaccaggccgtaccaggtatgctgaggtcttctcggtcgctgagattgtttgctcctgctctgctgcttagcttagctgtgcagtggggaaaagctgcagctgggggcgcggctgcgctttcaagtacttacgaggctgtcaaagtggaatcgtctgatcgattcatgatctag

SEQ ID NO: 32221 - DNA, 873 bp, Zea mays
  Peptide Sequence Number=SeqID_74000
atggcgattggagcaccggatgattcccgtcagcggcggcctgctgaccacgccgcaaacatcctcgagaatgtgtgggctaccatcatgacaggctccgccaccccagcgtcgtcgtcgacggccgcgtcgtcgtcggaggttggcgaagagaggccgccggacgaggcgatcttggagaggcttcccagcctggggaggtggatttccatgggagccgaggagtgggacgagctcctgctcggtggcgcggcgcgcgcgtcggacgccgccgcttccggccgtgagctgcccgccgcctcgccggcgaaccaagaagcagaccggctcggccatcatcgggccagcagctccaaggcggcgtcggcggcggcggcgtgcaagagctacaggggcgtgaggcggcggccgtggggcaagttcgcggcggagatacgggacacgcggaggagaggcgcgcgggtgtggctgggcacgttcgcgaccgccgacgacgccgcgctggcctacgacaaggcggcgctgcgcatgcgcggcccgcgcgcgtgcctcaacttcccgctcgacgtggtgcagcgcgcgctggcggacggcggcggccgagccgagacgacgccccgcgtgctgcgccggaagagaaggagagccaatcacgacgacgctgctggtggtgatgatacgagaagcgatgggagtgtggcggcggcaactgcccgtgatccgacgacgaccatggtgtcgttcgcttgtgcgaagaaagatgaccaggtcatgacgccgttgatggcgcaagaacgctcggtcagcgatccaggagcggtgatcgagttcgaggacatcggtggcgagtactgggactacttgttcacctaa

SEQ ID NO: 32222 - DNA, 336 bp, Zea mays
  Peptide Sequence Number=SeqID_74001
atggcacggcaggccagtaaatctacacgcagatcagaagaaggtttgttccccgcgcacgtctggacgatgcaatcacgcgcgaccgagagaccgatggattcacaccgaactagaaatcctggtcgatctatctccagcatggatactgcgatgcaacgtcttctggccgtaatgacgcaaatggaggagcgcttgaccgatgtgctgactggtcgtggtcgcgagcaggccacccacggatgtacttcctccttcaacgacgattcgggcgccgactgcatactcatcaacgtcggcaccgactgtaccgcggaagacgaccccccctactga

SEQ ID NO: 32223 - DNA, 513 bp, Zea mays
  Peptide Sequence Number=SeqID_74002
catgaacatgattttggagttttccttgctcggtttgctcacgttcaaaagttcggtctcttctctccggctgtcgatgttaagatgccttatacacttccattcaccttttataacttgaagaaattgcagttatgtgtggatttcaatgaaattcactccattttgtccatgtttaccatgctaaggagctgtcacaaccttcaaaacttaaaaatagagtcgcggcacgacagttatgagagttttgaggcagattgggagttcttaaatgctctgtggactgatggcatgtgtgccaatcttcaaattgtgcgcatgattgatatcatttcgcttccgaatgaaacttcatttatgaagcttatactttctaaagcaactcttcttcacacattatatgttggcgcacacccatatgattttgatgatcacataattgacatgctaaaatgcgaaagagcttcagctcaagctcgtgtacagtttgaaggttcggagcaacagtggtag

SEQ ID NO: 32224 - DNA, 795 bp, Zea mays
  Peptide Sequence Number=SeqID_74003
atgtccatatccaagggccagggcccaaaaacacaagaagggaaggacgacgatgatgcaaaaggctgcctgcctgcctgtgctggctgcgtggctctcatgcttctcatcacaccaacacatggtgactccgattcggagcagaggagctacaagatggctcggccattggagctcacgcccaagctctcgctgcagctcaagctccacgccatccttctctggtcctcggtcgccttcctgatgcccgtcggggtcctgctcatcagagtctccgccaacgtcaagagcgccagcaccgtcaggctcctcttctactgccacgtcgcttcccaggtcgtcgccgtcgtgctagccaccgccggcgcggtgctgtcgataagcaacttcgagaacgccttcgacaacacgcaccagagggtcgggctggcgctgtacgccttcatctggctccagccgctcgtcggcttcctccggccggacaggggggccagggcgcggggcgcgtggtacctggcgcactggctgctgggcgtcggcgtctgcgtcgtcggcgtcgccaacgtctacgtcggcctgcacacgtaccaggagcggactggccgcagcgcgcggccctggacgctgctcctcaccgtcgaggtggcggccttggcgttcgtgtacctcgtccaggatcgctggagctacgtgctgcggcagcgggaggaggcggccgccgccgccgccctcggcgacgggcggagccaagggtccaccatgtacccggcgaacgatcacaaggaggtcgtcgtg

SEQ ID NO: 32225 - DNA, 885 bp, Zea mays
  Peptide Sequence Number=SeqID_74004
atggggtcgacgctgatccacgcgccgtacctcctgatctacagccccggaacgacgctgacctggagcagcagcgtgaggccgactacgtccgagtgttgcttcgtctacctcgagcgccgcctcgtgcggaacctcacgttcgcgtttgattggctcgatggcgacgccgagcccgccgtggctacggaccccatcgtgttcgacgcgttcggaaggacggcttccacaccagctgaggccaccggtgggaagcgacgctggacgtactacaagctgctcggcgtctacctcaggaagcagcaaaggagacctgcgccgcccctccggccacgcgagctcgccgaaatggtcgcccacaggttccatcagtaccaggtggtgggtcgcgcgctgccgaccccgaccgatgagcaccccaagatctaccgcatgaagctctgggccactaacgaggttcgcgccaagtcgaagttctggtacttcctgagaaagctgaagaaggtgaagaagagcaatggccagatgctcgccatcaacgagatcttcgagcgcaacccaaccaccatcaagaactacggcatctggctgcggtaccagagcaggacggggtaccacaacatgtacaaggagtaccgcgacacgaccctgaacggcgccgtggagcagatgtacaacgagatggcctcgcgccaccgcgtgaggtccccctgcatccagatcatcaagacggcgacggtccacttcaagctgtgcaagagggacaacacgaagcagttccacaactcggcgatcaagttcccactcgtgtaccgcaaggtgaggccgcccaccaggaagctcaggaccaccttcaagtcgtccaggcccaacctgttcatgtga

SEQ ID NO: 32226 - DNA, 420 bp, Zea mays
  Peptide Sequence Number=SeqID_74005
atggaggcctgcaaaaaagagagacctggtgatacaagatctgcaagagctataatggttgttgagctgaagaagatgattgaagatgtagccaagcactatgttctagcttctgcacgcacaagttctgggagagcagacctgcaaaataaccgtcgtcgtgtcagtgacatggccgctcaacttcttcctcttactgcattgtatctgaactacatcgacctaccaactacatcactgcaccgactgctatactgcatcaaccaaccgaacggctatatgaaacgacacaatcagaccgaagtaattgcagcagctgcagctggtgttgcagctgagggtttgtctcctgaagaagcaaaaattcaagcaaagaatgctgctcatctctcagtagcactagcagagaatgcacaatag

SEQ ID NO: 32227 - DNA, 1227 bp, Zea mays
  Peptide Sequence Number=SeqID_74006
atgtcgggagccaggcatgaccaccacatgctgtccggggacttcgtgtcccacgacgagctggcggcgatgttcgagcaccagcgggccgacgcggcaccaccagcgacgcagcagccgtggttcatggactacctgcacgcggtggcgtcgcctctggactgcgacgccttcgtttcgggcttcgacgacgtgccgccgaccgttgacgagatagtcaagagggagcttcttgtggacaccgcggccaccggcggcgccggagcgacgacgacggcgccgctgacgcccaacagcatgtcgatgtcgtccacgtccagcgaggcctgtggcgccggggcgggcgaggagttggcgaccgccggcaagtccaagaaggaggaaggcgacggggaggggttcgagagcaaggacggagacgcggcggcggccaagggagacgcgcaagggcaggagaagagcaagaaaggggcggccaacaaggggaaggtgaagggcgagaagcggccgcggcagccacggttcgcgttcatgaccaagagcgaggtcgatcacctcgaggacggctaccggtggcgcaagtacggccagaaagccgtcaagaacagcccgtttccgaggagctactaccggtgcacgacgcagaagtgcccggtgaagaagcgggtggagcggtcgtaccaggacgcggcggtggtgatcaccacgtacgagggcaagcatacgcaccccatccccgccacgctgcgcgggagcacgcacctcctcgccgcctccgcgcaccacccgatgagcggcctccaccaccaccaccacctccgggtgccggcggcgctcggcggcgccaatgacgccttcgacgcgctcgggctcctgcagcagcaggcccaccaccacggcgccgtcatgcagcagctgatggcggccgtcggcggcgacggcggcgccgggctgcagcaggtgaacgctgccgccatgtcgggccacgtggcgctggcggcggacgaccagcacggctgggctgccgccatcgcaggtgtgggagcggcggccggcggtagtaccactgctactgccaccgctgcggcggcaactcctgctgctgctgctagcgctccgctccggatgcagcacttcatggcgcaggactacgctgggctcctgcaggacatgttcccacccttcgttcacagcagcgacggtggccaccatcatcaccaccactga

SEQ ID NO: 32228 - DNA, 1407 bp, Zea mays
  Peptide Sequence Number=SeqID_74007
atgacgccttttaaccgcaacgtcattcatcacaataaatatgaaagtcttcatgaggagggtatgtttggttctatacctaaggtgccaaaaaaatctacatattatatgccacacttgtctaagttttacaacagtttcaatcaaacaactttcagttttttcacatccgtcagctcacaacaacacaacctaagggcggcggctgcggtcgaccggctctcctccctcccggcggagctgcaggacgagatcctcgtccgcctcgacctccgggacgccgtgcgcacctctgcgctctcccgcacctggcgggacctctggaagtcgctctcggtgctctccctctccttccccgtcggcacgcagccctcagtcgtcgacagtatcctcctcccctacataggccctcgcgtctccctattcgacttctgcgtcaacgaggcgtctgtcggccgcatcgacgactggctcgtcgcgctctcccgctgccgcgttgagtccatccacatatctaacagactcggatcatgcgactacttcaacctccactcctcaatcttctcattaggtgatctcgtgtccctgcggctggaaggctgcaacatcccacccctccctgtaggattcgccggctttcctgcgctccaggagctagacctcgcctttgttaacttcccatcgaacgaggacaaacagttggaggctatcattcgtcggtcgcccttgcttcataccctgtttatgtgtaatgtgtgcatccctgatggttacccagactcagtgattgaggcgcccaatctccgtgtgctgtcattcgtttcagagtatgactatggatgccgatttggagagctgccgtgtctcgagtatgccgacattgatgcgttattctgtccgcagcatgaacatgattatggatttttccttgctcggtttgctcacgttcaaaggctcaccatcttctgtccagctgccgatgttaacatgccgtacacacttccattcaccttttataacctgaagaacttggagttatgtctgaacttcggtgaaatggactccattttgttcatgtttaccttgctaaggagctgtcgcaaccttcagggcatagaaatagaggacatcgatcagagttttgaggcagattgggagttcttaaatgctctgtggactcatgacatgtgttccgatcttcaaactgtgcacatgatgtgtatcagttggcttccaaatgaaatttcatttatgaagcttatgctctctaaagcaactgttcttcgcacattagatgttgatagacaccctgctgattttgatgatcccataattgacatgctaacatgcaaaagagcttcagctcaagctcgtgtcctgtttggaggtttggagcaacagtggtag

SEQ ID NO: 32229 - DNA, 300 bp, Zea mays
  Peptide Sequence Number=SeqID_74008
atggcaagcaacaagttctggaggtccggagaagtttggaggaagaaaaggagcgtggggaagccggcgaatcctgtggagaggggtggggtgttgcagccttccagccccagggacacgagatggcctaaggagaagattgagcggaggttgaggctctcgagtgatccgagaaagcaacacaggatgatggactcgacgcggctcgtcgacgtcgatgaggaagagggagacgcgggggcctatgtaggggtggaggatgctatattgctatcgatgaccgagggctgcgtgccgtag

SEQ ID NO: 32230 - DNA, 330 bp, Zea mays
  Peptide Sequence Number=SeqID_74009
agaaagagagaggaggggcagatctgggggtctttgcttcgaatcgtcggtgttgacgcctctgttttcttccggatgccggtgaagaagaccggcatgggagcggccggtgaatttacctacgcttcattggagaagaccgacgtgggtttggagggaggcatcgcgcgctccgtcggtggacgagggggcgggcacggcggtgggatgggtggggtgcgggtgagatttgctggggaggctggcgcgagggggcagggctggggctgcgggtgcggggcgggggcaaacgggggctcggagctatggaccccctccttagcttcttaa

SEQ ID NO: 32231 - DNA, 348 bp, Zea mays
  Peptide Sequence Number=SeqID_74010
atgggcatgggcaattgggaaatgggccctggccgcctggacgacccacccgaccaggactccaggaggctctgcatcaatcagtcagtcagtcagtcaggctctgccggtctagccctgcccgtccgtgagagggatgcatccaaaaccggcgatttttccacggagctggagctgacgcagtctttgctcccttttcatgcggtgcgcagctgcgcccgttacggggcgagagcgcgtgctcccaggtccccatcgcgctcccctctgcgctctccggtcggcgccggtcccgggacgcggttgccattcctgcgtacctctaccaccgcagccgcagggatgtga

SEQ ID NO: 32232 - DNA, 363 bp, Zea mays
  Peptide Sequence Number=SeqID_74011
atgagcgcggctgcggaggacgcggctgcggccgaagggggatccggaggcgggagcagcggcgcggggtcgtcggaagggggcgcgcggcgccggttcgacgacaagggcctcgtcgcccgcacctcgctcatcctgtggcacacgcaccagaacgacgtcggcgccgtgcggaagctgctggaggaggacgccgcgctcgtcaacgcccgggactacgacagccgcacgccgctccacgtcgccgcgctccacggctggcacgacgtcgccgagtgcctcgtcgccaacggcgccgacgtcaacgcccaggaccgctggcagaacacggttgtcttggttaatggattgcaaagtttttag

SEQ ID NO: 32233 - DNA, 822 bp, Zea mays
  Peptide Sequence Number=SeqID_74012
atgtcggcgcaggcgggtccagggacgtactccccggcggcggccgcaggagacaggcggcgggagaggaaggaggagctgcggcgccacctcgccgaagacgccgactggccgcgggccgacggccgctccttccacgactgccggccagcgtttatgcagacaggaccaactactgctgcatcacggtctgcttatgcagaatttgggaagacgaaggtcattgtatcactgtacttgcaacattctttgatcccacccttttcatattttggaccaagggaaagtaagaaagcaatgatgtacagtgacgttggtaggctcaattgcaatgtgagctatacaacctttgccactccagtgcgtggacagggagcagacaacaaagagtattcatcgatgcttcataaagctctggaaggcgcagtaatgctgcacacttttccaaagaccactgttgatgtttttgccttggttcttgagtctggtggcagtgatcttcccatcattatatcatgcgctagtcttgcattggcagatgctggaatcatgatgtatgaccttgttacatctgtatccgtgtcctgtttcagaaagaacatcatcatcgatccaacctcagacgaggaagcatggcaagacggaagccttgtggtggctttcatgccagcccgcaaggagatcacgcagctcacgctcactggagagtggagcgatggcagaataaccaatgcagtagagctctgtatggatgcttgcagcaagctgggtgacatattgcgtgaccgcttgaaagataccgctaccttgacgtgtgaatga

SEQ ID NO: 32234 - DNA, 648 bp, Zea mays
  Peptide Sequence Number=SeqID_74013
atggctacgatcggcctcgcggcggccgggaaaggcgagggcctcgcggccgccatgggccgcgacgaggtgtccgcgctcttcgacgccgacgagcccagcttcgccgaggtgcggggcgccttcgccgtcttcgacgccgaccgcgacggcttcatcggcgccgaggacctgcagtgcgccctggcgcggctcggcgtcaggcaggacgccgccgcgtgccgcgccatggtcgtcgcggccggcggcggccgggacgcccggatgagcctgttccagttcgtcaggtcaatccatgtgggggcgaatttgaaactcactattcgtagtccaccacgcgcgcctggagtttctgcaaacttcggtcaaaaatccaagcgcaatggtttcaaccttcaaagcatcccaccgaattcgccgaatctggcccgatccgtttcgtcagggtcgcagctttcatgtgttcctgttgttagttggcgtcgatgccggcctgacccagatgctgctgtggcggcgcccttcccttccacgaagtttcgcaggggtctccttcatttcagacttcagaggcacagagaacttgggtggcgttggaaacttgccggcatgacaccgacgtgcccggaacggtccaagccggggtag

SEQ ID NO: 32235 - DNA, 108 bp, Zea mays
  Peptide Sequence Number=SeqID_74014
atggcgttggcgttgtttgatgaacttggactggtgctggtgcatttgcatcgcaagagctgtcggcaggccgacagaggaaacgggcctcaaagtttggcgttttga

SEQ ID NO: 32236 - DNA, 225 bp, Zea mays
  Peptide Sequence Number=SeqID_74015
atggccatgtcttgtgtccagggaagaggaaatgcaggacctgaacaggcgaacaaactcaaggatggcttggttagggttcctctcccttggcgtctgcttatcggtggcaggtgggctagaaagagctatgaaaagcacgaagctgaagctcctgcgaaggggctcacggcgcaacagtggcatagaccactagcgggaagcgctccctcccagggtgattga

SEQ ID NO: 32237 - DNA, 207 bp, Zea mays
  Peptide Sequence Number=SeqID_74016
atggtcgtcgtcttcaacatcgtctttaactttaccaccgggaagatcttccactttggatccctctcctgcgtcgccgatcgaaggggcgctctgcatcgcatcgtggacatacagaaagacgctctggggcctcgcaacatcagcttcaaggagaagaggtcatcgccaagatccgggatagttgtgaagcatctaggcccctaa

SEQ ID NO: 32238 - DNA, 897 bp, Zea mays
  Peptide Sequence Number=SeqID_74017
atgagatcggcgtcaggaatctgtcaggtactcaggaatgttattgcagaatcggccgatgatataaatgctgcagttaatggtctaagtaaaaatggatttatcaattactatggcttacagcgctttggcagcggttctgtacctacccactttgttggtgctgctttgctcagaggagaatggagacatgctgttagcttgattcttggtacaagggtacattataaatggcatgttgatgttgatgcagcacttaggggcatgccccgacatctcacagtggagagagctattcttcagagattgaagaactaccctggcaactatctacaagcactaatggctatacctaaagcactgaggctgatgtatgtacatagctaccagagttacttatggaatcatgctgcaagtatgagagtggaaaagtatggtatttcacaagttgtagaaggtgacttagtttacaaaactgggtcctcccttggagaagcaattaccacagatacatttgatgacgatgatagccacgttaattcacctgaaatggaaatgtcttgtgaaacacttactgaagaaatgatccaatctgtgaaggtagttgattctgaagatttattgaaggcagtctattcgtttgaggatgttgttctccctttgcctgggtcagaaacattgtttcctgggaatgaagttactatgatttatcatgaaatagccaagaaggtaatgggttttgtcatgaacttttcagttattcaagagggacctgatgccatgcactttacaatacgcttgacgagtagtgatctaatgactataacaaaccagatttttattaagtcaaatagctgggaatacaaaactggcgctggagtaattggggcggggaat

SEQ ID NO: 32239 - DNA, 189 bp, Zea mays
  Peptide Sequence Number=SeqID_74018
atggccagccagctagcttctgtgactgtgaggtcgggtgctagcggcagcggcgaggagttcggcagcagcccccggggtgtggaaaatatgcgtgcttttctttctacgggggtgtttggttacaccccgctaaaatttagtcactgtctcacccatcgaatgtttgaacctccgttccgggtatga

SEQ ID NO: 32240 - DNA, 1881 bp, Zea mays
  Peptide Sequence Number=SeqID_74019
atgggcgtgctcttctcatgccccgtggaggaggaggaggacgtgccggcaggagctgcagctgcccttccggcgccgtgcaatgccgccgtggagccgccggccctcaagccgtcgctgcagggctccgggaagctccggttcgagcgctcgctcggcagcctgatccggcgggagcagcagagccccagcgcgcgcctgcacgtggacgtcgacgtcgacgtcgacgccgccgccaagcaggtccccgccacgtccaccgtagcgcccgtgccgccggtcatgcccagggagctcgcgcggaccaggttcgccgacgccgcgcccgcgcccgcgccggagagccccaagcacgaggcggcggccgtcacggtgcagaaggtgtacaagagcttccgcacgcgccgccgcctcgccgactgcgccgtcgtcgtcgagcagagctggtgggagctgctggacttcgcgctgctcaggcggagctccgtctccttcttcgacatcgagaggcaggagtcggcggtgtccaagtgggcgagggcaagaaccagagctgccaagttccagttcttcccacaggagattactgacggcattcgcaacaaatcgcatcgagatcaggttggcaaagggctgtccaaggatgacaaggcccagaagcttgcgctgcagcactggctcgaagctattgacccgcgccaccggtacggacataacctccactactactacgactgctggctgcggtgcgagagcaaggagcccttcttctactggctggacgttggagaaggcaaggaaatcaatctcgagcggtgtccgcggttgaagcttctaagccagtgcatcaagtaccttggtccgaaagaaagagaagagtatgaggttgtgatcgaggatggcaagttcatgttcaagaaaagcaggcaaatcctagacacgtccgatggaccaagagattccaagtggatctttgttctaagtacatccaagaatctgctatttgggccacacagcgggcactaccgcccaacggaagagaacttccaggaattccagagcttcctcaaagacaacaatgtcgacctcactgatgtcaagatgagcccagatgagacgacgaggagttttggagcaggctcagaagcatcttcttccgactgctgcgccgtcgctgacaaacccgaagaagatcaacagccgcagctcaagaaacccagcacagttgccaggcacctcaagtcactgaatcgaccacacctgacgaagtctctccctccccgtccccagcaggaagaaaccagcaagagtctcagtcccactgcaactgtcacgaggcaagattcatcagaggacgccgagacctcaacgacaagccaccgtgccctgttcgaagatggtcaggaggaggaccacgctgccgcggccaccgccgccgacgacaatacagccgtgccgagggagaagatcctgcagaggatcagctccaagaaggagaccaagtcgtaccagctggggaagcaggtgtcgttcaagtggaccacgggcgcggggccccggatcgtgtgcgtccgtgactacccgtcggagctccagctccgggcactggagcaggtgcacctgtctccgcggagcggcggcgccgccgcagccgcaggggccggtagggcggcctcgtcccggttcgcctcgccgcagcggtgcggcagcccggttgcggcgagagggcgccgcgagcctctggcgtcggcggggtgcggcagggcggcctcgtcacggttcgcgtcgccgcagcggtccagcagcccgatggcgagagcgcgctgcgagcagctgacgccgagggaggcgttccggacgcacctgatggccagaggttaa

SEQ ID NO: 32241 - DNA, 1003 bp, Zea mays
  Peptide Sequence Number=SeqID_74020
gtggccaatgataatgttggcggtcagagggctgaacagtaaaatgctggagaaaagactgcacggatgcctgctcctgctcgtcttccttctggcagacgtatcagcaagtgtagttcaccgccacttatttgccagtaaagatgtacgtggagcctgcatgagggtgggtggtgttgtagacgagaacgctcttggctcttcatccgttgcagcttcacaccgtgctcggttcctacaacgtgcaggcagccgtgctgaaactgccgtcgatctgggtccagactcggaggacggcagcaagaggaggtcgctggccaccaccatgttctgtgtggcgaaacagggcgcggacgcgacggcgctgcaggcagggctcaactgggcgtgcgggcagggccgagcgaactgtgcgcccatccagcccggcgggccgtgctacaagcagaacgacctggaggcgctagcgtcctacgcctacaacgactactaccagaagaactttgctaccggcggctcctgcggcttcaacggcacagctacgaccaccaccagtgatcccagtcggcctgccgagcctagacaacacctaggatctctcctctccgacggggtccctcctgggagtgagatccaggcgccgccgccgaccttcgccgcccctgcgtacgcgtggaccgtccggcctagggcaccgccgacggttctggttatagtgattggcgcccgaaaaggtgtcaacatactttttggcgactccgctggggacaggctcggggcagtgcgtcttcacaggaaggtgagcgtcttgagctccatggcaggaggcggcacgccggctgcgagcgcccccagcggcctctccccgccgtcgtcgttcacgccgggcattgggagcccctccaacaccctgatccctctggacggcgccgagagcctggtgtccagcgtctggtcggcgatttgcgccccgctgctggcgttgccgctcttcttcctctga

SEQ ID NO: 32242 - DNA, 738 bp, Zea mays
  Peptide Sequence Number=SeqID_74021
atggccgccgcggcgaacacacctcagtgtcaccggccgtggcagctggtggtcccagcgagagcgagcgcgagcgcgagccgccgcactagccggccagccgcagcagcaggagtgggggctggcggtgcgccgaacgcatggacggggatgccaccgccacctgcagctcggcggaccgtgagggccaaggccggtgcggccgaggcgcggccgtcgtcgccgccggacgccgtgacctacagcgcgagcatctccacggacacgcccctccacgaaccccccggggtctccttcgacgagtacatccaggaccgcgcgcgcgtgttccgcgccatgttccccgacgagagcaggagccagcgggtcggcgacacggagtgggagctgagggggctggacgccagctacgcgccatccagcttcgacctcggcgtgagcgggtcgctgtacgccgaccggagcaggagccgcgggtgccggatgaggggccacctggagatcgccatcacctgcgtcctgccgccgcccctgcgcctcgtgccagagaccgtcctgcgcggcgtcgccgaatcggtcctgtcgacgctggcggagaagatgaagcgggacgtggacgtcggcctcgtcgccgacttcaggaggtttcgccgggagaaggcagcagcgtccagggccacgccgacgctgggcgcgacggcatcggacagagacgaagcctctgagtctgaatcctag

SEQ ID NO: 32243 - DNA, 753 bp, Zea mays
  Peptide Sequence Number=SeqID_74022
atggcggccgcgctcttctacacctcgctctcgccccgcttcctcgccctatcctctccgaagccggccgcgccagcggcctcggccttcctcccattcacgatgccgctgcgcgttgtgtcggcgccggcgccagcgaggcgggtcttagagcccgtagccgtcgcggtgtcgtcggagtacgggaccgagggcgcggagcagcaggacggggagttctccgaggacctcaagctgttcgtcggtaacctgccgttcagcgtagacagtgcgcagctggcccgggctcttcgagcaggctggctccgtcgagatggtcgagggttttcagattcagggtttgcatcaaagtttccattactcaataacctgaaatcagaatcgaagacctctgagggtgaactgcgggccaccgccacctatagatggatccgcaccaagagcatcaaggggtggcgggggtggcggaggcggcggcagctttgtcgattcagggaacaaggtgacgtggggaaccttgcatggggcgttgacaactcgactctggagaacctattcagtgagcaaggacaggtgctggatgctaaggtcatctacgacagggatagcggcaggtcaagggggtttggtttcgtcacctatggctctgccgaggaggtcaacaatgccatatcaaaccttgatggcatcgacttggatggtagacagatccgagtcacggttgcagaatcaaagcccaggcgtgaattttga

SEQ ID NO: 32244 - DNA, 564 bp, Zea mays
  Peptide Sequence Number=SeqID_74023
atgtccgcgacccgcgaggccgcgaacaaacgccccgcccgccgcgtgacgtggagagggcgtcctcatcctctctccgtgcgcatacgtgaagcggtgagacgaggacctccaggcacgccgtcttggtttggcggatgcgtcgaggccttcctccacaccggttcagcagctcccgatccgcacggccaaagcccgattcgcgctcctccagccttccttcgcgtccaacagcaagatctcctattttcgttgtactcatcattgtcatcctgcaaaatgatgatcaatgaacacatagtgaaattcaaagagaataacatgtttccaaaaataaggatcattgcgatcctctcccagccgctggtggtggccacgcgtggcctccacagcaaaatcaaaatatcaggtaaagacaataaaagaaatttggagctgtccagctgctcgaagcctgatggggcagccaacatctatagaatagaagtagatgataatgatgacataagtgaagctggatcaaatatagatcttgcaaatgacaacttgtgtgctattgtttag

SEQ ID NO: 32245 - DNA, 273 bp, Zea mays
  Peptide Sequence Number=SeqID_74024
atgtcaacatatatggataacacaacaagctacgctctgcacacaatctttgtggcctttacggctctaccgtcagctgcccaaccacaaggtcgccgtggtcacgccaacttgggatgggcaggccgggcagacagcaggccggacacaggctcagcggagcagatgcccgcatccataccagaggggacgctgctcacaggtaagcgtctagccatcctcgtgcacattctcgagcatgagggcggcgccttgctccgtttggtcgagtag

SEQ ID NO: 32246 - DNA, 339 bp, Zea mays
  Peptide Sequence Number=SeqID_74025
atggcgccctttgtaggagttgcatatcctaaaatcacaatttctggtacattaattatcaatgagagttggatgttgaaggatgtggatggttttgggacacaacaacaggaggagatccctccaacaaccttgcatatcccaatagcattctcccccaagacaacacatgctgctccacacaactgctcattgcaattgttagacgtggagcattgttcccctcctaagagggctcgaccgccttggcttgctggcatggtcgaagcaagaagagctaacaatattggaacaacgagaacaacaagagtcttcttcgagaacgccatggagctctag

SEQ ID NO: 32247 - DNA, 360 bp, Zea mays
  Peptide Sequence Number=SeqID_74026
atggcgttctctaagaagactcttgttgttctcattgttccaatattgttagctcttcttgcttcgaccatgccagcaagccaaggcggccgtgccctcttaggaggggaacaatgctccatgtctaacaattgtaatgagcagttgtgtggagcaacatgtgccgtcttaggggagaatgctattgggatatgcaagatcattgtaacctctagaaatcatacctcggttacacgtcttgatgccgactcgaggtcgattattggaaactcctttgatcttgagggaaatgtaaaaatggtttgtagaatacgttccaacaaagtgggtcatgggaaactcagtgatctatctatctaa

SEQ ID NO: 32248 - DNA, 240 bp, Zea mays
  Peptide Sequence Number=SeqID_74027
atggccgcggtgccgcactccgtcatggccagtaatatccgtactgcaatttacggtaataattccatccctaggatcagtttcttcttagctttgattagcatcagtccatgcgagtttttaggctcagggcggtcggattatgggggcgccgattattatgttaagtggaacatggagcgaccatccaggaaaacagtgctaccacaagggtggaatgggacacccttggctgaataa

SEQ ID NO: 32249 - DNA, 420 bp, Zea mays
  Peptide Sequence Number=SeqID_74028
gaaaacatcaccgctcgccctgctccgactgctgtgccacccaccagggtgaggctgacaacagccaagttcagcctcgggcgcaacaggaagcttcgcctcacccggcctcaggcctcaggcctcggcctcggaaggaggtctccgcctcgcccgaccccagggctcggcctcaacctcggcctcggaaggtggtctccgcctcgcccgaccccagggcttggcctcaacctcggcctcgggaggaatcgcgtcctcgcccgaccccagccttggcctcaggagaagtctccgcctcgcccgaccttgggctcggaccgaccgcgccacaggggatacatcattaccctacccctagctagctcaggctacgggggaacaagaccggcgtcccatctggctcgccctggtaacaagtaa

SEQ ID NO: 32250 - DNA, 324 bp, Zea mays
  Peptide Sequence Number=SeqID_74029
atggccatgttcctagtcatcgcgaggtgtgggcgggtaagcaactacctcaacgagcgtagcgttacagagctgagagcgcgcacggcggccgccaccatgggacctctccggcgtctgcgattggagggaaagatctggtctgggagcttcgggaggtcggactggtggtgcaaaagcacgggcggtgggacacttgggcgccgattcgtcgcgctccggcgatgcgtctccatgggggtcaccggcgccactgtgtctgggcgcgggattggggaagaaacgaggggcgccatcggatggcggctgatcggccaggattag

SEQ ID NO: 32251 - DNA, 138 bp, Zea mays
  Peptide Sequence Number=SeqID_74030
atggtgatcgtgcacgtgatatggtgccaaccacaagatgccgtggtggacgacctgaaggatggacataaccagtggatgctcgccaagcgagagttgcctgaaaccctagttgcattacctcaggatgtcctttga

SEQ ID NO: 32252 - DNA, 619 bp, Zea mays
  Peptide Sequence Number=SeqID_74031
atggggtggtggtggtggtgcctgccggtcgctgctctgctcgccgcgatcctgccgtcgtccgacgccacgctctcccctgccggcatcaactacgaagtggtggccctgatggccatcaagacggagctggaggacccctacaacgtgctcgacaactgggacattaactccgtcgacccctgcagctggaggatggtcacctgctcctccgacggctacgtctccgccttagggctgcctagccagaccttgtccgggaagctatcacccggcatcggcaacctcaccaggctgcaatctgtgctgttgcagaacaatgggatttccggccctattcccggtacgataggaaggctggggatgctgaagactcttgacatgtcagataaccagctcacggggactatcccaagttcgcttggaaagctcaagaacctcaattatttgaagttgaacaataatagcttgtctggagttctgcctgattcacttgccagcattgatggttttgctctcgtcatagctggaaatccaatgatttgtggtaataattctggagataagtgctcttctgtgtcacttgacccactctcttacccaccagatgatctgaaaa

SEQ ID NO: 32253 - DNA, 390 bp, Zea mays
  Peptide Sequence Number=SeqID_74032
atgccacccgccagggtgaggctgacagcaaccaagtgcagcctcgggcgccataggaatctccgcctcgcccgaccccagggctcagactcgacctcgcctcggacgacgatctccgcctcgcccagcccccgggctcggactcagcctcaactccggacgacggtctccgcctcgctcgacccccgggctcggactcgacctcgactccggaagaaggtctccgcctcgcccaacccccgggctcggactcagcctcaactccggaagacggtctccgcctcgcccgaccccagggctcggactcagcctcgacctcggaggagtcaccacctcgctcaggccgaccacgccacaaagggaggccatcattaccctacccctagctag

SEQ ID NO: 32254 - DNA, 963 bp, Zea mays
  Peptide Sequence Number=SeqID_74033
atgagctctgccataacgttgtatgtccatgtgatatattgctttcaagtccagttttggactacccaatctctatctgtcctcaactcaagccatgagctctgccataacgttgtatgtccatgtgatatattgctttcaagtccagttttggactacccaatctctatctgtcctcaactcaagccgtgtggtattaggttaattgatagcagcaaagcaccatacaagcctcgcccacaacatatcaatgccaagccggctctagactggtcaaggaggaagagggtagcgctaggcacagcgaggggtctgctctaccttcacgagcaatgcgacccgaagataatccaccgagacgtgaaggcctccaacgtactcctcgacgagtacttcgaagcgatcgtgggagacttcggactggcgaagctcctggaccacagggagtcccatgtcacgaccgcggtgcgcgggaccgtcgggcatatagcgccggagtacctgtcgaccgggcagtcgtcggagaagaccgacgtgtttgggttcggggttctgctagtcgagctggtcaccggacagaaggcgctggatttcggaagagtcgcgaaccagaagggcggagtgctggactgggtcaagaagctccatcaagagaagcagctaggcgtgatggtggacaaggacctgggcagcagctacgacggggtcgagctggaggaaatggtccagctggctctgctatgcacgcagtaccacccgtcccaccggcccagaatgtccgaggtgatcaggatgctggaaggcgagcccgggctcgcggagagatgggaagcgtcgcagagcaacgtggacacgccgaagtccgtctcgtcggagctcctgcctcccaagtacgtggatttcgccgccgcggacgagtcctcgcttggcctggaagccatggagctgtccgggccaaggtga

SEQ ID NO: 32255 - DNA, 249 bp, Zea mays
  Peptide Sequence Number=SeqID_74034
atgcgccagcctctcctgcgctcgctccccacaagctcactgatttgtggggccgggatgtcggcacctccgcgactcggcttgcacgcgcacctgaggcagctcctgcgtgccgactggtgggccatggagccctacattccctccagacccgtctcccctcttcctcgtcgcgaaaaccccgcgtcgtgggactccgacgtccgccgccttggtcccgtgcctgtgctgtcgattgggggccattaa

SEQ ID NO: 32256 - DNA, 249 bp, Zea mays
  Peptide Sequence Number=SeqID_74035
atggggctgccggcgactggtgcgccggaggagcaggaggacgcagcggcggaggaagaggagaagaaggcgggcgtggaggcggtggtctcggtggcggcgctccgccggagcgaggccgcgacggcgtccctcgccagccgccgacacgccatcatcgcgcagcggaagaggatgttgagcggcttcgcttcgtggagtcggactatcggagacgaagaggttgggtcgcgttgggctcagggttag

SEQ ID NO: 32257 - DNA, 573 bp, Zea mays
  Peptide Sequence Number=SeqID_74036
atggctcaaagcgacgtggtaaaaccgcctaaggcgtggcgtgaccaagggaacgacggcagccacgacgacgatcacgcggccatgtcgccgggcaagtgggtacggggctggctcccggtctcatccacggtgaagatcttttcaccccgagtcgttatccgtgcgccaatgggcatgaatcgcatcgccgacgcgaatctaggtgctaaaggttcaacacaaaccaataaaaagatcaaagttaagggttcaaaagaaaggagcaaaagaaaccgaagagaaccctggtctggcgcaccagatagtgtctggtgcaccaagggcgatcgactcaaactcttcacctttgggtttctggagagtcgctccgctataattcaccggactgtccggtgtgccaccggagcaacgactatcgagcgcaacggtcaactccaacggtcgactgcaaacgagaacagtgcgctgacagttcacgcagagtcagaacagcgccagaaggcgcaccggacagtgaacggtgactgtccggtgcggcaccggactatccggtgccccaagatgtcatag

SEQ ID NO: 32258 - DNA, 429 bp, Zea mays
  Peptide Sequence Number=SeqID_74037
atggtgtggtggttgctcaccggaatcgagaaccgaacgaagccacccgcgacgcacgacagagatgcagcaacaacgagaaatccagggcgcttgggcggtcgaccgagcgtaatacttcacgccaacaatccccaggcaccgatgaacgaacccgacacctcactagccaccaatcggcgatacagggctgggtcaacggtggcggatctctccctttccgcgaatgcagcaatggaggcggtggtggtgcgtttccggggaaaaggagctcgcgcgagaataaggcagggcagggacggatcatgggagcacattaccaggtcatttatcccctggcgcggtcaatcgcatcagcgacattcatggcggaggcggcgtggacttggtggtctttctgttgcgcagagtccgcggggaggaggttga

SEQ ID NO: 32259 - DNA, 285 bp, Zea mays
  Peptide Sequence Number=SeqID_74038
atgggtcaggcgacacatccctccggctactgctcctccgaaagctcagtgttgtggcctaagctgtctccattgtcgtctccgtcggggtctcctccagggcctccttcagtagccgaggcaccctatggtggtgcagggtgtgcctcctgctggggaacaggggatggcagtggtgcaacttctccaggtggtttgattgaccggacaccgtgcgacgaagtggaagctccacaaggcgagacggtaggaaagggatcaccaacttatgagcagtgtgcctaa

SEQ ID NO: 32260 - DNA, 201 bp, Zea mays
  Peptide Sequence Number=SeqID_74039
atggagcaggtgccacgcggcagcgggtgcgacagaggggatggtgttgctggcggtaatggcggtgggtgcgttgcaaaggggaagtggggcggtggtggtgcgcatggaggcgggcacgcgtgcggggggcacgaggctctagccaaagtgaagaaaaacttcactacccaatgcatggagaggactgggcatgactaa

SEQ ID NO: 32261 - DNA, 1245 bp, Zea mays
  Peptide Sequence Number=SeqID_74040
atgtctttcctcgatgcctactcagggtatcaccaaatcaggatgaaagagtccgaccagctcgcgacttctttcatcacacccttcggcatgtactactatgttaccatgccgttcggtttgaggaatgcgggtgcgacataccaaaggtgcatgaaccacgtgttcggcgaacacattggtcgaacggtcgaggcctatgtcgacgacatcgtagtcaagacgaggaaagtctccgacctcctttctgaccttgaaacgacattccggtgtctcaaggcaaaaggcgtaaagctcaatcccgagaagtgtgtctttggggtcccccgaggcatgctcttggggttcatcgtctccgagtggggcatcgaggccaacccggagaaaatcgcggccatcaccagcatggggcccatcaaggacttgaaaggcgtacagagggtcacgggatgccttgcggctctgagccgtttcatctcgcgcctcggcgaaagaggcttgcctctgtaccgcctcttaagaaaggccgagtgcttcacttggacccctgaggccgaggaagccctcgtgaacctgaaggcgctcctcacgaacgcgcccatcttggtgcccccccccccccgctgccgaagaagccctcttgatctacgtcgccgctaccactcaggagtaggcgcgggcctgctcttcatctcgcccctcgggaagcacctacgctacgtgctacgcctccatttcccggcgtccaataatgtggccgagtacgaggctctggtcaacgggttgcgcatcgccatcgagctaggggtccgacgcctcgacgctcgcggtgactcgcagctcgtcattgaccaagtcatgaagaactcccactgtcgtgacccgaagatggaagcctactgcgatgaggttcggcgcctggaagacaagttctacgggctcgagctcaaccacatcgcccgacgctacaatgaggctgcggacgagctggctaaaatagcctcggggcgaacaacggttcccccggacgtcttctctcgagacctgcatcaaccctccgtcaagaccgacgacacgcccgagcccgagaaggcctcggcccagcccgaggcaccctcggctcagcccgaggtaccctcggcccccgagggtgaggcactgcgcgtcgaggaggagcgaagcggggtcacgcctaatcgaaactggcagacccagtgcctgctgagagcacctagaggggggtga

SEQ ID NO: 32262 - DNA, 219 bp, Zea mays
  Peptide Sequence Number=SeqID_74041
atggcggcggcggccgcggcgcctcccatccccgcccctaaccccaccgatgactgggtggacggctcgtggacgcttgactattcctgctgcgtcacgttcgatgacgtcgaggagatggtcagctggccgcgcgcctcccggcccccatcactggcggctctagctcccacgacggcgacattccgccgtgcacctcctggcccccctcactggtga

SEQ ID NO: 32263 - DNA, 876 bp, Zea mays
  Peptide Sequence Number=SeqID_74042
atgactgttcagcgcttgatatttcttggagcagagcaagaacgctgggagttcgcagcggtgctccacaacggccatcaccggcgtcgagcaagaggcgatttagtgaggttgacctcaaacaacgcgacgacgagctggaataccagggtgaccgcggcgtgggaggaacggcgaactcacaatgggagggacttcgagctgtggccggcgggcaggaagcgggacgcggcaaaggaagagcgccggcgcgcggccatggctgaacagagaaacgcgcgggccgcgaggagcagggactggccgccagcagagcgcagaaggcgagcagggagctccggcagaggaccgcgcacgcaggggcttgacgacggacgtcgcgacgtccgctcggtggtcggcctcggtgaagaagagaggagacgtgagggagcgacgcggcagaggaatccacatccgaccagcaggcgccatggctgggagcttctgcaagctggagggagcagaggaggcgccgagctgaagaagcacgaggaggaagaagaccacggcgcgcagcagcggagcgcgcgacgcagagacccgaagggcgcgcaggcatggaggagcgcgcggcttagaggagccaccatggagagaaccttggctggctgggactgggatgagccggccggacccgagggagataagggagagaggagcacgagggagacaacgcactggagaagacaacctgagcacgacgatgcaaaatatcagaagagcggcagccaaaaaaatcagagggagggcggctactggatagaaacgaaaagatttatttttaaatatttccagatatttctatttttaaaaggaaagcgtagatatttttaa

SEQ ID NO: 32264 - DNA, 639 bp, Zea mays
  Peptide Sequence Number=SeqID_74043
atgctgcagcattcgaacagcgccaacgagctgctcttgcgccggaagctggaggagcagcagcaggctgccgaacttcatcacgccattgagctccagagccgccgcctcatgggtctccagctgctcgacctcaaggctcgcgcagctgcgacaacagcagcggcatcgacactgccaacaccagttgccaatgccttcgcgtccagccatcctttgagcaccatggcagtcgagtcgccactagagtccggagagcagctcaagctgagcagtgggtttgctctggaggggaagctcaacggtggcgataaggaagaatctgcttgcgaggcgagccctgacgccgctgatagcgaccaaagtggagatcacaacttgccggacagcccatttgcgtcccctaccaagtctgccgcgctcgtgcacgacagtttcgccgccacggagcctgagaacaccgcgtcccttgttgggagcaagatcgacggcggcagtaaccatctccgcccccttgcgctggaaatcccttcgcccagctcctacttcttccccatgcgcgggtgcgttggaaaggcctctactctacttttccgtggcgccgattatgtccgtgaacattctgtcatccacgagtga

SEQ ID NO: 32265 - DNA, 300 bp, Zea mays
  Peptide Sequence Number=SeqID_74044
atgggaaaagaaaaagaaaaaggatttcctttccttgtgggccggggggggggattttggcccacatgggcgcgggcgaggcaggcggcccagctggcccagctgtgcggggagacgacgggtgacggcgtggaggcgcgggcccaccagccagggagaggggagggggctgacggtgtcagcgacaacggagggggtgagggactcgaccggggccgaccggcggtgaggatccgcggcggttctccgccgtcggtccggttttgcgacggggaggcggtggcggagcaggagtggtag

SEQ ID NO: 32266 - DNA, 969 bp, Zea mays
  Peptide Sequence Number=SeqID_74045
atggcgctggtgtcagagtgctcggagacgaggactgcgaagcttcccatgtgtggcaatcagccaatggtgacttatttcaaatgtggaggcgtctcccttggtgttggcatgcaacaccatgcagcggatggcatgtctggcttgcacttcattaactcatggtctgacctctgccgtggagctcaaatttctgtcatgcccttcattgaccgcacccttcttcgtgctcgtgatccaccaactccatcttttcaacatatcgagtaccagtctgccccagctatgttgtcctccacaacccagttccttgcttccaagtcaaagccacctgccactgctgtggacattttcaagctcactcgctcagaccttggccggctgcgctcacagcttcctgcaggggaaggtgcaccccggttcagcacatatgcagtgctagcggcacatgtctggaaatgtgtctcccttgcacgcagcctacctcctgaacaacccaccaagttgtattgcgccactgatggccgacaacggctacagcctccactaccagatgggtactttggcaatgtcatcttcaccgcgacaccacttgctgaggcgggcaaggtgaccagtgagctggcagaaggagcagcagtcatccagggagcactggataggatggacaacgactactgccgctcagcgttagactacctggagcttcaaccggatctgtcagcacttgtgcgtggagcgcataccttccgctgcccgaacctagggctcaccagctgggtgcgccttcctatccatgatgctgacttcggatggggccggcctgtgttcatggggccaggtggcattgcgtatgaaggtctggcgtttgtcctcccaagtgcaaatggcgacggcagcctgtccattgctatctcgttgcaggctgagcacatggagaagttccggaagctaatcggcgaagcttaa

SEQ ID NO: 32267 - DNA, 378 bp, Zea mays
  Peptide Sequence Number=SeqID_74046
atggcaggtggcactgccagcagaagtgatccgttgacttcggctatgggcaacctgtgctgctgtgttcaagttgaccagttgactgtggccatcagggagcagtttggcaagtttgacagcgtgcttgagccaggatgccactgcatgccttggttcgtcggcaagcgtgtagctgggcatctcacacttagactgcagcaacaggatgtgccctgtgagacaaaaacaaaggacaatgtttttgtgaatgtggtggtatctattcagtactgcgctctggctgacaaagcaagtgacgctttctacaaactgagcaacacaaggtcccatctgcacttcaatacagaaagaagaccattctcatcttcaagataa

SEQ ID NO: 32268 - DNA, 321 bp, Zea mays
  Peptide Sequence Number=SeqID_74047
atgccgctcccgccgtcgctcgagctggacatgttccaccacgcggcggccgcgggcaccggcgccgccgccgtacacttccctttcggcagcatccccgttacgcactcatactatttcttcgggcaggctgcagccgccgcggaagcagggtgccatgtgctcaagctggcgtcggcagtcaccgtggcgcagagcgactcagactattcttcggtagtggatcggtcgccgtcgccaccggccgctgtgtcggcgaggaagcccgtcgtgttcgatatcgacctaaactgctcaccgccgacggaggcgggagcatag

SEQ ID NO: 32269 - DNA, 673 bp, Zea mays
  Peptide Sequence Number=SeqID_74048
ggccgtgacggtggagtgtggaccatgtcctatcaccttcgccctcccgtccccgtccctgtcccaccaacccccaaggcccaactccactcatcgccactgcgccgaaacccaaagcggggaggaggagcggaaaagaaaaggaaaatgggaggagcggaagcaagtccgagcaacttcgattgtttctcctgttggtggggaatttcgtgtggggtgcttattagctattcggcggaacggaatacagatggcgattactgtgaggcggtcgacgatggtgcgcccggcgcgggagacgccgcggcagcggctgtggaactccaacctcgacctcgtggtgccgcgcttccacacgcccagtgtctacttctaccgccgcgacggccccgtgccggatgcggaggggttcttcgacggcgagcggatgcggcgcgcgctggcagaggcgctcgtgccgttctatccaatggcgggccgcctcgcgcgggacgaggacggtagggtcgagatcgactgcaatggcgagggagtgctcttcgtcgaggccgacgcgcccgatgcctctgtcgatgactacggtgacttcgcgcccaccatggagctcaagcgcctcatcccgaccgtcgattacaccgacgacatctcggccttctcgctactcgtgctccag

SEQ ID NO: 32270 - DNA, 465 bp, Zea mays
  Peptide Sequence Number=SeqID_74049
atgggcgcgagtaatcgaactatggcttaccggatagtcgtggccatgcgcgccatcggaagaaacaactccggcgagggtgaaacgacgtctcttgtgagggtgcgttcggtttcttacttcgggaagctttacggggctcttgggaagctagtggatgcaccagatcagttggaggtggtcagggagaggtctggccacggtggccgagctctggcggtgttggcgggtcgcggggaggtcgccggagctacgagctggctctggggagttgggcgcggtgcggagggaggacggctgaggctgtgctgctcttataggcgcgggcgcagtgtagggtcgggcgtgaatcggtgcgggcgcgcgggcaggcgtgcaccgactgctccagagtcaggatgcgctggttcatttgttccacctataggtctttttccaccaattctaaagacaagtcaactatga

SEQ ID NO: 32271 - DNA, 351 bp, Zea mays
  Peptide Sequence Number=SeqID_74050
atggcttcacccacccccgccaatggaggagacacccgcttcagctttgactacctatcccgagagggctttccctatatcttgtgggaggtactctgcactgctgggtaccccacaccccctctgtacacggtgcagctatacgaggagcaccgggtgccacactgtagggtttggctaaccctggagtctcaccctctgtatcccgggtggcgttcacttgattcagaaactgtcggattcggggcggacgacaccaccgaggctgtggcaataaaggctttgacgaccttctgcggataccacccgctggagatgatgatgcacccacttggcctcttcccacgctaa

SEQ ID NO: 32272 - DNA, 393 bp, Zea mays
  Peptide Sequence Number=SeqID_74051
atggagctcgcccaaccaatcgtctccatcgcaggtgctgttttccccttccctttcctcaagtttggtccagggcgcccaagcttttgtgtcattgcagcacgcacgttgttgcccctacccccatggtcggcctacctcgccggtgaggccctggcgctacctctcagctcgccctcaagcctagagtcttgttgtcccccttctcacatcgatgctgcagtggggctacgcctctccctgtcgcagtacctcgccactgcttcgttcgttgccggagcaaaatcccatgtgtttgggtggagaagaagaaaggaactccagtgcagcaaacaccccgtgttcgatgaaatgtttaaatcagaatcattagcatatccgcagttggtttag

SEQ ID NO: 32273 - DNA, 216 bp, Zea mays
  Peptide Sequence Number=SeqID_74052
atggcggcttgcccgcggctcagtgtcccgccccggatagacgccctcggccctccgcgcgcggctgtaattatcgtccgccccgcctttgctaggagcttctctcctcgtgatgcctttcctataaggggagggaccccagacaagatcaagattaggtctttagcccacttgattctttttactggtcgccaatatggcgcaaatcataaataa

SEQ ID NO: 32274 - DNA, 960 bp, Zea mays
  Peptide Sequence Number=SeqID_74053
atgttctcgtacgccgcaccgcccattacttactcacctgtgccgccaccaccgccgtatgccgctggtttgctgtatccgccgccgtactacggcggacccgtcgtccccacgcccgccgttcatgttgtacaactacggtcagtgacagccaccaacttcgcagcagagctagatttgattggctcgctactccagaactacccctacatcgtcgtggatacggaatatcccggcaccgtccaccgccctcccgccggtcgacgtgacgacgacttgagccccgacgagtggtacgccatgctgaaggcgaatgttgatgagctgccccccgtgcagctcgggatcacgctctgcgactcccacggcaatctacccgtcgtcctcgactacggctacggctacaccgagggctgctgggaagtggagttatcggacttcgacatccgccgccaccgccacgcagcccagtccgtggcgttcctccgctctcagggcgtggacttcgacgcggtgcgcgcccgcggcgttggctcggcggcgttcggggcgaagctcgccgagatcctgttggcgtcgcgcggggccggcgtcggcctgacgtgggtggccttcggcggcgcctacgacctggcataccttgtcaagatgatcggcggcatcggacagccgctgccggagacgaggcagggtttcctggagcgggtcagggtccttctgggcggcagggtgttcgacgccaggtttatggcagagaactgcggtcgtgcggaccttcgcgacgtcggactcagaagcgtcgctataaacctcggtgcggtgatgcccgcggcggacctgccgtggctcgccggccccaagagtctcatcgtcagccgcatccatacaatcatgaagctgcacgtcctgtccgacgacgacaccacggccttccaagggataatcgacagactatactaa

SEQ ID NO: 32275 - DNA, 171 bp, Zea mays
  Peptide Sequence Number=SeqID_74054
atggccaggagcgccccaccatttaccggtcgtgagccggtgtcttcgggtgagtggcagcatggtggagaggggatttggcccttagtgtcgtgcctcctgccccttcctgaggtcaccgtcgtcaaggtggagtggaagcggaagacaaaccaggaggggaaaccttag

SEQ ID NO: 32276 - DNA, 432 bp, Zea mays
  Peptide Sequence Number=SeqID_74055
atgaagctgtggaaggagacttccaggagttccaagattacgacgagttctaggtgtgggttagcggcaacccccagtcggctgcctgtgaaggccgcgttatctacgtttcttttccgcactttgatttattcggagcagccgttgcagtttcccgaagctggcgagttcctgaggccgctcttccttggagcaccggacagtccggaactaggtgtaaccctaattccctttcacccgcgactgtgctgcaagagaacacagcgatactcgatagaccagggggcgcctccagcgggggcacaggagagcagcccctcacagactctacctcctgctaaagcgaggaagaagagccctgttgctccaactcctgtcgccgacgctcctgctcctcgtgcaggcggtggtgcagcctctccaaatagctag

SEQ ID NO: 32277 - DNA, 345 bp, Zea mays
  Peptide Sequence Number=SeqID_74056
atggggctcggtgtatgcggctcgctctaccaagggtggtttgccccttgggcaggagtggtgacgaggatgatggttatgataatgcttatggtaatgatggctcgtcttagacacaccgcatggaagtcagtcattcctttcttgccttctcgtctcacgaagcgttcgcttcgccgtctggaggtagagtctgtgaggggctgctctcctgtgcccccgctggaggcgccccctgcaccaccaataggtgtcccgaccactggagtagctgctggaggagaccccgacgatggaggtgatgacagcagctcgagccacaacaccgacctttcagaggaatag

SEQ ID NO: 32278 - DNA, 584 bp, Zea mays
  Peptide Sequence Number=SeqID_74057
atcacgccaagaaggagatggagaccggcgaaaagcccactacaagccacgggagcacttcatcggaagagtcccgcaccaagaggaaggagaagaagaaggactcctccaaagggaaggagaagagatcttcttcacaccacaaagagaagaaggagaaatcctcttcccacaagccgcatcggagtggggacaagaaaaggaggatgaggaaggtggtctactacgagaccgattcttcatcggcatccacctccggctccgacgcgacatccgtcacttctaagcgccaagagcgtaagaagtatactcacgcacgagccgcaacggcggccatgtccgtccgccccagtcctactcggcttgtacacgcggcgaagagtggtgccgccgtcgcccttcgcaggtgcagcctcacctccaggagcgccttcttcctcgaccaatttgccttcgtacaggctttggccgagctcgcgaacctcctcctaggcggccatcgcattgaatgtgattctcgcgaacctcctcccacgcgccaatccccttaccccgctgtgcctccgccccctcccagcatctag

SEQ ID NO: 32279 - DNA, 669 bp, Zea mays
  Peptide Sequence Number=SeqID_74058
atggccacaccccgcctccctgcactacgcctcccttccccaccgccggcgaggtgcaccgctgccatcagaggacgagcacgagcaacagaagaccttgaggagaagcccaccgtcgaggatctgtccgtcttctccgctaccactgtgccgcctcgcccagccatgcagatacgtggatttgatccaccaccagctcgagtttttgcttggcatgccctggagttggatgcattcaagtatttgcaaatagttgcttcatatggaggatgcacaggtgcaaacaatcttgataagaatgaggagattttgagtgggagagcgcgacagcgacatgttgacaggagacggtgggaagcgcccgacaagctaattaacctgaaagagcttgggcaacatctaggaagtgtcggggtcttctgccgggtctggccgctcttgaacaccgagtcaccagttaccgtcgagcaagagaggatcacggtcaagtcagtcgggatcaagaaagagttcgatgctgatagggtatttgggcaggagtatgcacaaggtagccttagtgataacttctgtgcgatcattgtgctgactgagtatggttgtttaacggccatcattaggaagaaggaaattgttgatgtcatagttaaggctatcaagagcacatga

SEQ ID NO: 32280 - DNA, 555 bp, Zea mays
  Peptide Sequence Number=SeqID_74059
atgctgtttcatggtgacctgcgtgccgccggtgagccgcatccgcctcctcccccacccaactccctccccctcgaaaaccccatctcctcaaacacctattacgtcgccgaaaaccccatctcctcaaacacctattcccgtcgagctgctcgccatgaggagccctatccccttcctcgatgtccgtgcaggtcgagctgcacgtcgtcgggagcccaatccactcaagcgtctcttcccgatgagctgcacgccgccaggatccccatctccatccccatccttcttgcgttcacaacgctattggactcttccaagttccatcctattgagcggcggtggaccttccactcattaaaacacaatcaaattaaggagaggaagaacagagctaataagatctatggtgtgaacaagacaactggctcgaattgcaacaaggtgaatcgtgcagtctgcaagttctattcgaaagaggttgtggataccacacctggaagagttggtggcagattcttcatcaagtatggaatacctgcgatgctgagctga

SEQ ID NO: 32281 - DNA, 237 bp, Zea mays
  Peptide Sequence Number=SeqID_74060
atggcgcgacgcgggttgggcggcgccgtcgcgtctgttctcgggatggggaagacaccgctgaggcattggtctgggaacagacggtctagtttagatcaggcgtatcgcttcaggagatctcgcctcggccgtcgatcggcgatcgtgtgggcaccgtcgtgtccaatgtcaggggttgggggagagtcttgggccgtcgatcttagatgggtagtcgggatcgcacgctcatag

SEQ ID NO: 32282 - DNA, 381 bp, Zea mays
  Peptide Sequence Number=SeqID_74061
atggcacgcagaggccgatctggatccctcacctggctggcttgccggaacagcagcgcctggtggactggacgagcacgagcgctggtcaccgctggcacacgagccgcgagagcgtggaatggcacgcacgccggtcacccctggcactggaaggcagggagggagtatatgcagcggcggcagccgctcaaaccaggcggtgctgtctgtactgcctgcgcttcgtacccaggtccgggccgcgcgcgcgtgtggacgcgtgggcgtgcagtacaaaaggcgagcgaaggctccgccctgcagtacaacgggtacggggtgcgggcagcggacgcgcgccggtgcgcgagtgtgagaaaggatggcagtggcaggtga

SEQ ID NO: 32283 - DNA, 1956 bp, Zea mays
  Peptide Sequence Number=SeqID_74062
atgaactcacatctacgcctccatactgcagcagcagccgccgccgccgccgtctcggagctcgagctcctagtcccccggggccgaggcgccggcgccatggaccagctccggcccgagccggccgcgggcgcgcacgagatcgagaagacggcggcgccggacgtggagtcggagcccgcggcggcggtgccggagccggagcgcgtgccgccgtggcgcgagcaggtcaccgcgcgcgggatggtggcggcgctgctcatcggcttcgtctacacggagaacaccgtcgtgcagacctgcgtcgtcgcctgctacaccatagggttcggcggtgggttcgggtcgttcctgctgggcctggacaagaagacgtacgagctctccggggtgagcacgccgggcaacgtgccggggagctacagggagcctgccatcggctggatgaccggattcctcctcgccgtcagcttcgtggggctcctcaccttgcttccactcagaaaggtgctcgtcatcgactacaaactcacttatccaagtggaacagccaccgcggttctcataaacggattccacacacctcaaggagataagaatgcaaaaattcaggtccgtggattcctcaagtacttcgggatcagcttcctgtggagcttcttccagtggttctacaccgccggcgaccactgcggattcgcccagttccctactttcgggctccaggcttttaaccagaccctgacgtacgttggtgctgggatgatctgctcgcacctcgtcaacctctcgttgctgttcggtgccgtcgtttcctggggcgtcatgtggccactcatcggcaagcagaagggcaactggtatccggcagatgcatctcagaatagcatgacaggcatctacgggtacaaggccttcctttgcattgcccttctcgtgggagacggtctctacaacttcgtcaaagtcatagctatcactgtcaagaacatacgcgagagatcacgtcgcaagaacctgaacagagtggcggacgcggacacgatggcgctggacgacatgcagcgcgacgaggtgttcaacagggacaacatcccgacgtggctgtcctacgcggggtacgcggcgctgagcctgatcgcggtgatcgccatcccgatcatgttccgggaggtgaggtggtactacgtggtggtggcgtacgcgctggcgccggcgctggggttctgcaacgcgtacgggaccgggctgacggacatgaacatggggtacaactacgggaaggtcgcgctgttcgtgctggcggcgtgggcggggaaggacagcggcgtggtggccgggctggtggggtgcgggctggtgaagcagctggtgctcgtgtcggccgacctgatgcacgacttcaagacggggcacctgacgctgacgtcgccgcggtcgatgctggtggggcaggccgtgggcacgctgatggggtgcgtcctggcgccgctcaccttcatgctcttctacagggcgttcgacgtgggcgagccggacgggtactggaaggccccctacgcgctcatctaccgcaacatggccatcctcggcgtggagggcttctcggcgctgcccaggcactgcctgcagctgtgcgcggggttcttcgcgttcgcggtgctggcgaacctggcgcgggacctgctgccgcgccggctcgcgcggctcgtgccgctgcccatggccatggccgtgccgttcctcgtgggcgccagcttcgccgtcgacatgtgcgtggggagcctcgtggtgttcgcgtggcacaagctcgacggcaagaaggccgcgctgctggtgccggccgtcgcctcggggctcatctgcggcgacgggatctggacgttcccgtcgtctctgctcgcgctggccaaggtcaagccgcccatctgcatgaagttcacgccagggagctag

SEQ ID NO: 32284 - DNA, 297 bp, Zea mays
  Peptide Sequence Number=SeqID_74063
atgccagccggcaccgtgactgcaataaacaaattccttgaggtgctcgcccgctctggcgtcgccacgcgcccgttcacccgccaggagaacaccgtcgtccagacatgcgtcgtcgcctgctacagcatgtcagcatcgccgtcggagaaccttggattggcaggtgggcttggctccttcttgcttgggctgaacaagaggacctacgagatggccggggaggagacggaaggtaatgtgccgggaagctacaaggagcccggcattggctggatgacgggcttcctctttgct

SEQ ID NO: 32285 - DNA, 720 bp, Zea mays
  Peptide Sequence Number=SeqID_74064
atggttgcatacacaaagattaaatttattgaaattcatccacctgacactctgacagtttcatgttggcctattcatggttcatgggatgatttaacagtccaaagtggtataaatgataattgtcaactaagatgcgcgccttcgtttgtttcatgcggcgacatttcactgatatcttcatacgagaaggttgagaattgtgtatacacatctactattttgagaaaatgtgctagatggggttccatgacactaaatccttggaatcgatgttccaagtggaaattagcacatgccgagaggttcgctgctgatttctacgtagcggatgcaaaatcaggtaggagggccttggtgaaagctgggcaccactcaaaggtcgtgccgctgatcgacgagaacctcctggtgacaacaagcaggggcaccgagttatcttccactctagagcactggctcgaagaaaaggaacctttcttccgaagaagcccagattatccgtctagaggaagggtatatcagagaagggatgcggttgagcgtggttggagtgctgagcaagaagaacggggatgccgtgatacttcctccgctggagcctcaatcgacgggctttgtgttgctgtcgtgtctcctcccgtcatatttcgacgggatagtgctgagactggccgccgtgccgaactcgggcgtctcatgaagagccgctatgggtag

SEQ ID NO: 32286 - DNA, 180 bp, Zea mays
  Peptide Sequence Number=SeqID_74065
atggagcctggcggggggcgggggcgcgggcgcctgcctccctgcggcggatcgaaggggcgtcctcctggacttgtggttgggagcaggccggcggcggcggcggtggtgggaggtcggggtgattgtgacaaggacgcgcttgccattgccaagacggggaaacacacgaagggatga

SEQ ID NO: 32287 - DNA, 1242 bp, Zea mays
  Peptide Sequence Number=SeqID_74066
atggatggatccgagcttgaaaatcctacttctagaagctcatcccagaaatctagccgacgttcgagtagtaggcgttctcaaaagtcagctggacagcattctttgaccggtgctcaagagaaaagaagcaaatcgaaatcttcaaggcagaaacacttggttattgacgacaaagaggctaaaaaagggaaaaaacatgaccacaaaattgacgtggcagatgagaggtccaattttctaggttatgaagtgtatgctggaaagctgattcttcaaaagaaaaatagaagtgcgagtgataataatcagttaccgtcaaacggaaaagctgatgcaattgatgctagactcacaagtaaagctctgatctggggcagctctgtactcctactggaggatgttgtctctgtatcatataattctggagtcaaacattttacattgcatgcatactcaactaaaaagtctttatttaaaaagacatgcagagttcagaaagatttctgctttatagcctctacccttgacgaggccattttgtgggtgacatgctttgctgaacaaagtatatatgttaacttactacctcgccttggagcatctagtatcaatcaagactcagaaaatcccctcagtgagtctttatttgaccagccaccgattaaatgcaaatctccgcaaagagtacttgttatattgaaccctcgatctggacatggtagatcaagtaaagttttccatgagaaagctgaacctatatttaagcttgcaggttttcagatggaagttgttaaaactactcatgctgggcatgcaaaatctcttgtatctacatttgatttcagtgcatgccctgatggaatcgtgtgcgtgggtggtgatggaattgtgaatgaggtgctcaatggtcttctcattaggagtgatagagcagaagctgtatcaattccagttggaataattcctgcagggtctgacaactcacttgtctggactgttttgggagttagagatcctatttctgcatcattattaattgttaagggtggtttcacagctctagatatcttggctgtcgagtgggttcaatctgggcaaatacattttggctcaactgtttcatactatggttttgttagtgatggtaacctctatgtcatttatttggttctttccagtgttttcagctctgaatctctgattattctgatgtgtgttgcaactgtttttactggttag

SEQ ID NO: 32288 - DNA, 366 bp, Zea mays
  Peptide Sequence Number=SeqID_74067
atggagaggctgacagaggctgacgacgttgtcttcctcctcgtccacataaggctgtctcaggtcggagatttccggttgtgctcattgcaaccaagacgaagaagacgacgacgatccgtccacaacggctgtctcctctgcgggcgtattgacgccacaacccactatgggtatcttgagttggccttcaagcagatggcagagaccgcagacgccagcaacgcactcgaccacaggcttcactaccttcggttgaccggcaatgcatgtgcggcgagggcgctggtatggtgggtatgggagaactctaatgctcatgctgcgaacatccactgctcgaaccaccatggcgctcggctatag

SEQ ID NO: 32289 - DNA, 375 bp, Zea mays
  Peptide Sequence Number=SeqID_74068
atggccctggcttgtgcgatcgacgctggccacgcggccgcgcgggcttttggtcctccacgccaacgacgccgacgcgcggtccagagcagccacgaggcccagggcacgacgctgaccctggacccacgccactcgcccgccgccatgtgctcggtgccgcgcggccaggcgtcgccgtccgggcagctgaactattggctagggtgtttggatggtatagttccacccttttgtggctgccagataaacttattcccgctgatgtaccaggtgaaacgcaagcaggtgtcttcgcaacctttggcgttcagattaaaagaatatcatggtcaaccggtacaaaagtttgcacaaatactgaatatatgttga

SEQ ID NO: 32290 - DNA, 789 bp, Zea mays
  Peptide Sequence Number=SeqID_74069
gcgtgcgagtccgggagcatcttcgaggggctcctgccgcccgacatcgccgtgtacgccaccacggcggcgaacgcggaggagagcagctggggcacctactgccccggcgacgacccgggcccgccgcccgagttcgacacctgcctcggggacctctacagcgtcgcgtggatggaggacagcgacgcgcgccgcgaccgccgcgccgagacactgaggcagcagtacctggcgatgaaggaccggacgtcggcgcacggcacctacagccctcggctcccacgccatggaggcctcggcgcgcagagcctgtacacgttcatgggcagcgacgacgccaccgccgcgagcttatccggccgtggccgtgggcagccagccgtgagccagcgcgacgctgacctcgtctacttctggcggaggtaccgcagggcggcggagaggacgcccgagaaggccgaggcccggacgcggctgctgcgggcggtgtcccgccggtcccgcgtcgacagcatcatggagctcatcggaggcctcctgttcggctcggagggaggtcccagggtgctcggtgccgtgcggccggcgggacagcccctggccgacgactgggactgcctcaagtccttggtgcgtgcgtacgagcgcagctgcgggccgctcgggcagtacgggatgaagcacatgcgtggcttcgccaacatctgcaatgccggcgtcggggaggacggcatggccaaggtggcgtccgaggcctgcgccgccgtcgcccgttctgacgactga

SEQ ID NO: 32291 - DNA, 315 bp, Zea mays
  Peptide Sequence Number=SeqID_74070
atggggaagcctgtcccatcactcctcatgctcctcctcagccgagtctcattagctgcgagaagcagacgattcgaatcgagtttttatcgttgcaaggaaaatcgaattggaaatgagatggcttttgttcagctaagtctgctgagtctggggagcactgggactgtccgggtggtgcacccggaaaatgaccggggctccaggctggctcgagtgaactgggccactcctcgggaaatccccccggcgaactaccgggttataaattcacccgaaactgtccggggggggccccagaaatggcccgggtga

SEQ ID NO: 32292 - DNA, 1368 bp, Zea mays
  Peptide Sequence Number=SeqID_74071
atgggagaggccaaggagaacgacgtttatgaggaggagctcctggactacgaggaggacgacgacaagacggtcgatggctccgctgctaagcccaccggagaggtcgcaaagaagggctacgtcgggatccacagttccggtttcagagacttcctgctcaagccagagctgctccgtgctatccaggattgtggttttgagcatccttccgaaggcaagcttctttttatctattgttgtcagttgacttcggtgttcccgtccgtgaaaactgcaaggtacactttcttctttggagcagaacatgtgcaacacgagtgtatccctcaagccattcttggaatggatgtcatctgtcaagctaaatctgggatggggaaaactgctgtttttgtcctttcatccctccaacaaattgaccctgttgcgggtcaggtagcagcacttgtactgtgccacacaagggaactggcttatcagatatgccacgaatttgagaggttcagcaaatatcttactgaagttaaagttgctgtcttctatggaggtgttcacatcaggaagcataaagatttgttgaagaatgaatgccctcatattgtggttggcacgcctggtaggatacttgctcttgccagggataaggatctctccttgaagaatgtgaggcacttcattcttgatgaatgtgacaaaatgctggaatcacttgacatgcggagagatgttcaggagatcttcaaaatgactcctcatgataagcaagtcatgatgttttcagcaacgctcagcaaggagatccgtcctccgatggaaatatatgttgatgatgaggcaaagttgaccctccatggtcttgtacagcactatataaaacttagcgaggcagagaagaaccggaaactgaatgatctcttggacgctcttgatttcaaccaagttgtgatattcgtgaagagtgttagcagagctgccgaactgaataagttactttgtgaatgcaacttcccatcaatctgcattcattctggaatgactcaggaagaaaggctaacaagatataagaacttcaaggaaggccacaagagaattcttgtggctacagatttagttggcaggggcattgacattgagcgtgtcaacattgtgataaactatgacatgccagactcagctgatacttatttgcacagggttggaagggctggacgttttggcacgaagggacttgcaattacctttgtttcctctgcttcggattctgatgttcttaaccaggtgcaagaaaggtttgaggtagacataaaggaactgcctgagcaaattgacacctcgacctacagattttgctttgtcgaaaactag

SEQ ID NO: 32293 - DNA, 360 bp, Zea mays
  Peptide Sequence Number=SeqID_74072
atggaggagaacctcaagaggcggctcttcgggctgccgtccaggtacagggattctgtgagggccatcaggcccggcctgcccctcttcctctacaactactccacccaccagctccacggcatctttgaggctgcaagcttcggaggatccaacatcgatccagcagcttgggaggacaagaagtgccccggcgagtcccgcttccctgctcaggtgagggttgcaacgcgcaagatctgttcgccgctggaggaggacgctttccgccccatcctccaccactacgacggccccaagttcaggctggagctcagtgtccctgaggctgctgaatacgactggctcatccgcatctga

SEQ ID NO: 32294 - DNA, 515 bp, Zea mays
  Peptide Sequence Number=SeqID_74073
actatgaagatcccgctattaacattaaaactagggagaaaaggaaaagggttgctaagggtgctggaaaaactttgaagaaaactattgaagctgacacagagaatgatgagtctgggggcgacgaagaaccatcttccaggcccaaaaagaagaaagcgaagacttcgaaaaaatctgctgctaggcaagaccaagggaaagggagtgttagaaccacctcttatatgggttgcacatggattctcgaggtaatgacacaaccgttaccatttccccctctaagtcccttaggactgacactgactcagtttatgccaactacgaagggaactgacgaaggagaccatccctcaaagatcaaagaaatttcgtctaaggaagaagtagacagcccacaaatttctggtcttggaggagctgccttcggaggttcaacatcctccgaagaagacgagatgaaaaccgctgaaggaggcgagtcttcggggcatgaaaaagcgaaaaagagctaa

SEQ ID NO: 32295 - DNA, 1095 bp, Zea mays
  Peptide Sequence Number=SeqID_74074
atgggtgaaacaatctcgttcgcccctcggaaggccatcaagtcccaagtcttggcggacttcgtggctgaatgggtcgacacccagctcccaacagttctgatccagccggaactctggaccatgttcttcgacgggtcgctgatgaagacaggagccggcgcaggcctactcttcatctcgcccctcgggaagcacctacgctacgtgctaagcctccatttctcggcgtccaacagtgtggctgagtacgaggctctggtcaacgggttgcggatcgccatcgagctaggggtccgacgcctcgacgctcgcggtgactcacagctcgtcatcgaccaagtcatgaagaactcccactgccgcgacctgaagatggaggcctactgcgatgaggttcggcgcctggaagacaagttctacgggctcgagctcaaccacatcgcccggcgctacaacgagactgcggacgagctggctaaaatagcctcggggcgaacaacggttcccccggacgtcttctcccgagatctgcatcaaccctccgttaagatcgacgacatgcccaagcccgaggcatcctcagttcagcccgaggtaccctcggaccccgagtgtgaggcactgcgcgttgaggaggagcgaagcggggtcacgcctaatcaaaactggcagaccccgtacctgcaatatctccaccgaggagagctacccctcgatcgagccgaagctcagcggttggcgcggcgcgccaagtcattcgtcttgatgggagatgggaaggagctctaccaccacagcccctcaggcatcctccagcgatgcatctccatcgccgaaggccaggagctcctacaagagatacactcgggggcttgcgaccgtcacgcagcacctcgagccgtcgtaggaaacgccttccgacaaggtttctactggccgacggcggtggccgacgccactagaattgtccgcacctgcgaagggtgtcagttctacgcaaggcagactcacctgcctgctcaggctctgcagacgatacccatcacctggccttttgttgtgtggggtctggacctcgtcggcctcttgtag

SEQ ID NO: 32296 - DNA, 114 bp, Zea mays
  Peptide Sequence Number=SeqID_74075
atgcccagctatgacttcgtcgagctcgtcaatttccccctcaatgtgttcgaagactgggcggagaagcttcgtgttaagttccaatatttttgcttcagcttccgccagtaa

SEQ ID NO: 32297 - DNA, 1070 bp, Zea mays
  Peptide Sequence Number=SeqID_74076
atggtgagcgagagcaaccgcggcggtgcggaccggacgacggcggcgggggaggagcgcgggcagctgctgttcgacgtgccggagatcaggttcaccaagctcttcatcaacggatccttcgtcgacgccgtctcaggccggacgttcgagacgagggacccgcgcacggggggcgtcatcgccagcgtggcagaagctgacaaagaagacgtggacttggcagaacgggggcggatcatggcgaggctggccgacctggtggaggagcgcgcggacgagctggcggccctggagagcctggacgccggcaagcacccggccgtgacccgggcggtggacgtcggcaacgccgccggcagcctgcgctacttcgccggcgcggccgacaagatccacggcgagacgctcaagatgccgggccagttccagggccacaccctgcgcgagccgctcggcgtcgccggcgtcatcatcccctggaacttcccgtccaccatgttcgccgtcaaggtggcgccggcgctggccgccggctgcgccctggtcgtcaagcccgccgagcagacgccgctcagcgccctgtacctcgcgcagctcgccaagcaggcaggggtcccagacggcgtgatcaacgtcgtgccaggcttcggcccgacggcaggagccgcgctggcgtctcacatggacgttgacatggcaagtaactaccgacagatcagcagccactacactaccggactcgccttcgtgagtttcaccggatccacggaggtcgggcgcctcataatgaaggcctccgcggagagcaacctgaagcccgtctacctggagctgggcggcaagtccccgctcatcgtcttcgacgacgccgacctcgacatggccgtggagctcgccgtcggcgccagctttctttcaacaagggagaggcctgcgtcgccgcgagccgcgtctactgtgcaggaacgcgtctacgacaggttcgaggagaggtttggcggagaggatgagggagctgggtcgtgggcgacccgttcagcgaccctatcgccgaccagggcccgcag

SEQ ID NO: 32298 - DNA, 471 bp, Zea mays
  Peptide Sequence Number=SeqID_74077
atgaccgaggtggctggcgacagggacaaggaggtccccactagagcggacgagcaccatgtgtctatttactggacatatgttcatgttcacgcggcgcttcataaaatctgcataggatacatcgcacttctatctgacctactcaggtctggtgttcagcggttgccacacctaggatatcaaatggattacatctccaaaacggaacctttctatgtctgcatgattctaaatgaaattcttggagatagagagcgtatccaatctctgtattctgagattcctgggagaaccacaagcaatgccagtacctccagaagaacttctaatttcagtgtggacgcaactggagatgaaagcctttctgttgaagcacacaattgtatactcgacaatactgcgtctattttatccatgaggagctgcgctgacaagctgtggaagagaagaaaaggttcaaaactttaa

SEQ ID NO: 32299 - DNA, 633 bp, Zea mays
  Peptide Sequence Number=SeqID_74078
gtggacaaggctcagtatgagagggttctgagctacattgaccatggcaagcgagaaggggccactcttctgactggaggaaggccatgcggtccggaagggaaaggctactacattgagcccacagttttcaccaacgtcaaggaggacatgatcatagcgaaggaggagatcttcggacccgtcatgtgcctgatgaagttcaagacggtggaggaggcgatcgcgagggcgaacgacacgcggtacgggctgggggcgggggtggtgacgcgggacctggacgtggcgaaccgggtggtgaggtcggtgcgcgccggggtggtgtgggtgaactgctacttcgccatgggcagcgactgccccttcggcggccgcaagatgagcggcttcggcaaggacgagggcatgcacgcgctcgacaagtacctggccgtcaagtgcctcgcgcttctcatcaccctcctcccggcgctcttcttcgtcctcccgaggatgccgcagcccgcgcacgaccgtcgtcgcgaggcggctgcgagggcgacgaccaggatctactggcaggccgtcgaccagatggtggcgtgcgcgctggtgctcaccgccctcctcgccacctacatataccactag

SEQ ID NO: 32300 - DNA, 366 bp, Zea mays
  Peptide Sequence Number=SeqID_74079
atggtttggaggacagagtgtggtgagaggatccagtggcgccacatcaataccttgtacgagcagctaaatgaacgatcctgtggcgccaacccaacccaagcatccaaaggtcactgtcgccgccggacaggcgtcactgtcgctaagcaaatctctcaacccgaccgttcaacgctgctctgtgaaagcttacttgctgcattgaatattgcacaaataaatggcagcgcgacaagcatgttggagaatctcttgggggaaaaactttggctattcttggacttcgaaaggttggatctcaagttacttgccgtgctaaaggcttgggaatttctactggctgcattaattcaaccattctag

SEQ ID NO: 32301 - DNA, 138 bp, Zea mays
  Peptide Sequence Number=SeqID_74080
atgccggggcgacaaggcatggagccggcctctgctgcggcgcgggcgccaaggccgccgagcttcgcgtcgcagaccaatgccctcctgcgcaaaaacctcatcttccagaattacattcccatcctatttgaatga

SEQ ID NO: 32302 - DNA, 1329 bp, Zea mays
  Peptide Sequence Number=SeqID_74081
ggtacagatgttccaggatcttctacgggattcgttgaacctgcttttatctcggctcgacccatatatgttcttcaaccacagtgcaagtccggtgattcagttacaatcccaattaccgtcggttctgttaatgcccagaaagcagagataaaatgtgttcaaggtttacccttgtggcggaacagttcaataacaattaatgaggaaacatttcggggctaccgaaaagggaaaactgctaaagggataaatgaaattgcgatgggctatgattttcaagactcaaacgagaatcattttaatgtccttactttgtataactcaacgtatgagaatgcctctttcattccaatgccatttgcacttctgcgcattccacactcattgaatgcggtatcaaacgcctatctccaactaatacaaggttcgggtgtaaaaatgttgctcgacttcacaaaagaaatgcctaagcaagccacccgtctgacatttgatttttctgctgtggctggtgtgaactttttcaagataaacgactacagtatacagtttgttttctttttcagcttcattaatctgcagattgtactggccttcctagcctcatcattcttttcgaaagttaacactgctcaggcaattgcgtacctgtacatatttgggtcagggttgatggctggatatcttattcgcaattttattgaaggggggaaattcccaagacactggatcacagttctggagataatacctgcattttctttatatcgaggactatatgagcttggccagtatgctgttagatcttcagaaacaggaagccctggcatgcgatggagtgatttaaatgaccacatgaatggcatgagagatgtgttaatcataattattttggaatggttggttttgcttcctgtcgcatattatttcgactatgcttcttcagttggacacagatctagtcccctttctataatcaaacatctcttaaagaaggaccccacctggagaaggataactgctaatgaaatagatggtaaggatgttcacatagagatggagaaggtagacattatcaaagaaagagaggctgttgatcaagtgctacagcagcaacaaactagtggctatgctgtagtctgtgatgacctaagaaaagtatatcatggaaaagatggtaatcctgataagtttgcagttcaaggagtatcacttgctttgccttatggagagtgccttggtattcttggtcctaatggcgctggcaaaagctcttttattagcatggtttgtcatcatgtcctctacatgacacaatttatataa

SEQ ID NO: 32303 - DNA, 600 bp, Zea mays
  Peptide Sequence Number=SeqID_74082
atggggcctgtagtatcaactgagaggactgtctactaccgggaacgtgctgctaaaatgtactcatcgttcccatatgctgcagcacagggtcttgtagagattccttacattgcagttcagacactgatatttggcctcatcacactaaacatttttgtcacaggaaagctgcttctgtatcttcttttcatgttccttactttcacctacttcacgttctacgggatggtggcggtaggcttgaccccaacacaacaagttgcagcagtagtgtcatctgctttttactccttgtggaatcttctctccgggttcctcatcccccagtctaggatccctggctggtggatctggttctattacatctgtccagtggcctggaccctgcgaggcatcattacatctcagctgggcgatgtgcaggccaggatagtcggccctggtttcgatgggaccgtgcaggagttccttgaggaaagcctggggttccaacaggggatggctggtgtcacggttgcggtgctcattggcttctcccttttcttcttcgccgtctacgcgacttctatcaaggttctgaatttccagagaagatga

SEQ ID NO: 32304 - DNA, 1212 bp, Zea mays
  Peptide Sequence Number=SeqID_74083
atggcggcgagcggcgccgtccaaccccacgtggcgttggatgtcaatgtggaggaggacgccaacgacgacgaggcggccgaccggctctgggcgaccatcgagcaggtcgcctcccctcagcggcgcaacctcgcgatcgtcgccctcgaccccggcagtgcatcacagaagaaggaggaggtcatggacgtgcggaggctcgaccgccgcggcgcccagcgcgtgctccagagggcgctggccaccgccgactgcgataacgcgaaactcctccgcggcatcagggaccgccttgacgcggcgggactggacgtgccacgggtggaggtgaggttccgcaacctgacggtgtccacggaggtccactacggccgccgggcgttgccaacgctcctcaactacgtccatgacattgccgagaggcttttaatttgctgccatcttttacgtcctaagaagaccaagctcactattctggatgatgttagtgggcttctacagcctgggagaaagaatgacactgttgctggggccaccatcatctgggaaatcgacgctcttgttggcccttgctgccagacagacaaccatattggagaattgacagtgagggaaactttagattttgctgcaaaatgccagggtgcaagcgaaaactggcaagagtgcttgaaggagctacgcgatcttgaagggaagagaggaataagaccaaatccagaaatagatgccttcatgaagacagcatcagttggaggacagaaacacaatcttgttacggactatgttcttagagtgcttggactggatctatgtgctgatactgctgttggtactgatatggacagaggtgtctctggtgggcagaagaaacgagtcacaacaggtgaaatggttgttggaccaagaaaaacccttcttatggatgaaatatctactggtcttgatagctcaacgacttatcaaatagttaaatgcatgaggaactttgttcatgagatggaggctactgtgctgatgtcacttctccaacctgcaccagagacatttgacctttttgatgatataattcttctctcagaaggacaaatcgtttatcaaggccccactgtgcaagttgtggattatttcaattcattaggattttcactgccgcctcgtaagggaattgcggattttctccaagaggtattgtatggtgactgctaa

SEQ ID NO: 32305 - DNA, 1344 bp, Zea mays
  Peptide Sequence Number=SeqID_74084
atgccaaagtacagaactacatatctaaggtatccttttgaggctataaaggttgttacttcagatgggtatgtcgtgttactggagagaattccaaggcgtgattcgcagaaggttgttttgttgcaacatggaatattggactcatctatgggctgggtgtcaaatggtgttgttggctcaccagcatttgcagcttatgatcaaggttatgatgttttccttggaaatcttcgtggcttggtctcaagggagcatatagataaaagtatttcctcctacaaatactggaaatattctgttaatgagcatgggactaaagatatgccagcaattattgaggaaattcacaagatcaaaatatcggaacttggcaaaagtcagcctcaatcagcagaggggacaggagatcaaaatgataagttaaaaagtttggaagtacaggcttcacaggaagacagtatagaagaccaaccctacaagctttgtgctgtatgtcacagcctgggtggtgcagttatgctgatgtatgtggttacttcaaggatcacacaaaagccccacagattgtctagactggtcctgctatctcctgcaggttttcatgaggattccaatgtggtattcagtatggtagagaagctcatcttgtttgttggtccagtgcttgcaccacttattcctggactttacataccaactcggttctttaggatgcttctgaacaaattagcaagggatttccacaattatccagctttgggtggacttgtccagacccttatgggctatgtcgttggcggtgacagttcaaattgggtaggagtgctcggtttgccccactacaacatggatgacatgcctggtgtgtcatttcatgttgcgcttcaccttgcccagataaagagggcaaagaagttccaaatgtatgactacggtagctctgcagcaaatattgaagcgtacggaacaccggaaccattggacttgggagctcattatggtctcattgacattcctgtggacttagtcgctgggcagagggacagagttatctcaccatccatggtaaagaagcactacaagctgatgcggaagtcaggggtggaggtttcatacaatgagtttgagtatgctcatttggatttcacattctcgcatagggaggagcttttgtcctatgttatgtcccgcctacttttagtgactgatccaggtaaaggccgtatcaagcagaccaccgtgcgactcaggaggcagaagaaagttcagtcagagattgaggagagcattgagtgcagagccaaggaggaatctgatgaactagctggacatttggagtga

SEQ ID NO: 32306 - DNA, 237 bp, Zea mays
  Peptide Sequence Number=SeqID_74085
atggctctaagcgccacggtcgtctgcaacgctacagtgaacagtgaacagtgcaactgcgcgcgcagaaatcagagcaggcgtcagaaggcgcaccagacagtgaacaagacctgtccggtgcaccaccggactgtccggtggccccgttgtcagaagctccaacggtcgaaacccaacggcctggtgacgtggctcgcgcaccggacagtgtctggtggcgcaccggactgttcg

SEQ ID NO: 32307 - DNA, 264 bp, Zea mays
  Peptide Sequence Number=SeqID_74086
atggcggaggctgtcgcgtctgcgggcaggctcgccatggactcctcgacctccgtctcgcccaaccagctgtgcggcaccccttgggggttcccgtggtttcgagactgttggagtggggttggtgacatgggtggctcaatttgggggcacgggaagcaggcagcgggggaaatcgaacggctgggtatgggttcgtgcgcggttgcgatgctgaatcacacgctggtttatgaacctttggtgatcgcggagaagcgctag

SEQ ID NO: 32308 - DNA, 615 bp, Zea mays
  Peptide Sequence Number=SeqID_74087
atggctgggaacttaagccagcactccgtgggccgcgtcttcctcgttggatggaaaggtaacatagttttactctgttctgacaacttcattccttcttttgaacatagtggggtatcttcgtttaatgagttcatccatgaactttctgttgattctgatgctgattcaattgctgactctgtcgctggggacgatgatcatgaagagtttgtctgccctccgtctccattgtcccaaagttcacggttatcacatgcaagcagctttggtagacatgatcgtcgactcaggagacatatcagatatgcagtttcttggatactatggccattgagattctttgtttctttaatattcattttgttcaatgccattaaatttcggatggatctgcatctggcaattgagattttcatcgaatcagtctttgacatcgttcacaaagcagcacattatattctttctccttcagaagtgtggcagaacctgttttgctggattcaaggaagtggtcatgatactagttctgtcgttgatgtattgactgctaatgttggcagtgataatcctgttccaacagagaggaagactgtggttatcgtcattctctga

SEQ ID NO: 32309 - DNA, 153 bp, Zea mays
  Peptide Sequence Number=SeqID_74088
atggcgtcgtcgcatggtctgggcggcgccgccgtggctcgaccgtgggagaggagacggattagcgcgtaccccttcagccctggtcgtttctctatagaacccctgctctgtttgcaaattaacccgccgttcatgcgggtgtggttctga

SEQ ID NO: 32310 - DNA, 1218 bp, Zea mays
  Peptide Sequence Number=SeqID_74089
atggctgaagtagttgtccagaaagtatgcaatgatatgccccattgggatgatgatgtggcatgtcctaatatggtgatgttcaaggatttaaggatggcgccaacttcttccactaagctgtttgatgaattgtcttcttgggatgatgtagctacactggaggaaatatatcctacagagcttgctatggaattgcagcatggttctgatccacatgtgctattgcagcagcatgaccaggcattgttcaaggtacccatgacatccatgagtgatgcccatggagtgtttgatgcaatttctagccatgttctatgggatgatgagttaccgcaaggtcttcagttacataactgtttattgaaactagtagctcaaggagagtgtatggttggcgagacagacatgaatgctgagctatgtgatgtggtgagctgggatgaggaagtggctactttgagcaaatgcatgcaatctcggccactcaccgggggtgaagagtacttagatagcaatgagttgattctagatacaaatcaaatcgctgtccatgttctaaatctcatccatgtgcatgatgtgccagttttctaccatgtattttttgataaaatatttgatgaggggtcggaccaagaatatgaagaaaggcatgtggtggtctcaaatgcggatgttcgtaggctgatgaccagtaaggctaatactgcacacattcataattctaggccattgtttctagatcattacatgataaataaaggccctaccaagctgtttctttttcaattgcttgctgagttcattgagacaatggagtcgcggttagccagacataaaagggacaacatgaacttcaagttaacagaaatggagcatcagcaacatgatctgcttgcacaattttgtcagcttctaagaaatatggttggtaagagttgtatcatttgggttgtcaagcaagtgttcactgccactacacaggtcttcaattcgatcccaccatggataagtgacattaactctgggatgtatagagtagaagctggttgcttatttctaggtgcagtatcatcttgtctacaaggtggcttcagtccatggattcaaatcaccaaaacaatgctggaggccactttaacatggaaacatggtgctcttgatcatggagtatgtgagaatcatcctgtattgcacattactgctacaggatag

SEQ ID NO: 32311 - DNA, 273 bp, Zea mays
  Peptide Sequence Number=SeqID_74090
atgatcccaaaggcccttgagttgatgacattaagtggggcgacacaggactcactagagcttgcgcctcctttgcaagctcaggattcaccaccagacgcctcgatggctggaggtgggcggcagctagaggtgggcgcctgggtagcgaccaaaggaggggctggcgtaggattcaccaccttgcagaggaggggaggcgaccagaggagagcggcgatcagaggtggggctagaggtgggcggtcggcgatggcccagaggtggggctag

SEQ ID NO: 32312 - DNA, 414 bp, Zea mays
  Peptide Sequence Number=SeqID_74091
atggctttgcgtggcgctgctcttaataagggagccgttgttgccgccatctgtgtggctctggtggtgtgcatggtggggaaaccagcggaagggtcgcgaacttgcggcatccatcgctgcatctccgaatgcccttccaagtgcaacaagaaagctgcgacctcttgcagcggcgccggtggtgcggatgaagggaagtgcaagatcaactgtggcatgggctgcaaagccagctgccctacatgcgactgcggcagcgaatgcgaccgtcactgcagcagcaccccgggacctacgtacactgcttgcatgtctatggtcttcgcagggtgcaaggactcctgcgtaaagggctgcaagggtgaaaagctaggcgttatatatggctgctggctgaagcttgcgatctga

SEQ ID NO: 32313 - DNA, 876 bp, Zea mays
  Peptide Sequence Number=SeqID_74092
atgggtcggcgcgagacggagcgcaaaggggggaaaaccagagggagacagggcaatgatggcccctcctgtgacgtggtcggtccgagccctgggtcgggcgaggcggaggctcctccgaggtcgaggtcgagtctgtcttccgaggtcgaggtcgagtccgagcccttgggtcgggcgaggcggagaccgtcggctaaggctagggccgagccctggggtcgggcgaggcggagttcatcgtcttccggggccgtggccgagtccgagccctggggtcgggcgaggcggagttcgtcgtcttcgagggccgaggccgagtccgagccctggggtcgggcgaggcggagttcgtcgtcttccggggccgaggccgagtccgagccctggggtcgggcgaggcggagttcgtcgtcttacgggggcgaggccgagtccgagccctggggtcgggcgaggcggagttcatcgtcttctggggccgaggccgagtccgagccctgggggcgggcgaggcggagttcgtcgtcttccggggccgaggccgagtccgagccttggggtcgggcgaggcggagcttcctatggcgcccgaggccggacttggctgctgtcagcctcactctatcgagtggcacagcagtcggagcggcgcaggcggcgctgtcctcttgtcaggccggtcagtggagcggcgaagccatccttgcattaaatgctcctgcgatacggtcggtcggcgtggcgatttggccaagtttgcttcttggcgaaggctgggcctcgggcgagccgaagctttgtgctgatgggggttaccagctgagattaggagtcttgtgggtacccctaattatggtccccgacagttcttaa

SEQ ID NO: 32314 - DNA, 630 bp, Zea mays
  Peptide Sequence Number=SeqID_74093
atgacgtttcaggttattgcaaagggtgaagcgcaaggaatggttagcaaatttgttggcatagggcttggcattgcattggctaatcacattggctcatctgtaccattagctcttatttcgtttgctggaattactgcagttcacatgtattgcaacctcaagtcatatcaatcgattcagctgagaacactgaatccttaccgcgcaagcttggtgtttagtgaatatttgttaagtggacaagttccatcggtcaaagaagttaatgatgaagaacctcttttcttcaatttgtcacttggtgcttcacgtcaaagtaagattttgtcagcggaagcaaaagatgctgcagatagaatatgccggcggttacaaatgggttctaagcttagtgagataattgagagtaaagaagatgcttgtgcattgtttgatctttacaaaaatgagcaatatctgcttatggattacaaaggaaaattttgtattgtacttaaagagggatcttctcccgaagacatgctcaaatctttgttccatgttaactatctatattggttggaaagagggaattcagccatgtcaaacatgatggttctgatggtggctgggttatggatggtctga

SEQ ID NO: 32315 - DNA, 252 bp, Zea mays
  Peptide Sequence Number=SeqID_74094
atggctggagcagtggcccctccctcctcggcctctcaggagagccgtaaagtccttcgtgcagcactaagggctgtcgaggctgaggtagagctactccagcctcggcttgtcaggtccaatggtcgcgtggtggtggagcatgtagacgacgtcccacaccgtgctcggggcactgtttctcctggtgctcaccgaggtgccgccacaacactgctcatcggggaactcagaactggatgtggcctttag

SEQ ID NO: 32316 - DNA, 210 bp, Zea mays
  Peptide Sequence Number=SeqID_74095
atgtggacctgcgtgttcgagaaaagaaaacaattgcagttacagcttaagtcaagtgtgccttatagcgagcattcaagtttcactgagcttagggattttgtgatgtttctgaaacctcaaaagataattcctactgttaatgttggcaatgccacaagccgagataaaatgcaagcacatttccgggaatggctgaagagcccgtga

SEQ ID NO: 32317 - DNA, 2220 bp, Zea mays
  Peptide Sequence Number=SeqID_74096
atgtctctagaagttgagaagccaccagaaacgaccaagcagctcaagcgacaggattcactctatggtgatgcagaaaaggtctccggcttcaagcaccatggctctgagggaggctggccgcggttgctgcagcttgcatttcagagcattggcatcatctatggggacgtcgggacatcaccactctatgcgatatccagcaccttccctgatggcatcaaggaccaggatgacctacttggcgtcctctccctcatcctctacaccctaatcctgataccaatggtcaagtacgtcttcattgtgctttatgcagatgacaatggagatggtggcacgttcgccctctactcacttatatcgcggcactccaaggtaaggctgataccaaatcagcaggctgaggatgccatggtgtcaaattatggcatcgaagcgcccagtccggaactgagggtggcacagtggctgaagcagaagctcgagtctagcaaggcggcaaagattagcctctttatcattacaatccttggcacatcaatggtgatgggggatggaaccttgacaccatcaatttctgtgagtgggatcagggagaaggtgccaagcttaactgaaacgcaggtagtctggatctcagtgccgattttgttcgcgctcttctcggtccagcgctatggtacagacaaggtcgggtattcctttgctccgatcatcacactatggttttttcttattgctggcattggaatgtataacctcattgtgcacgagatcggtgttctccgagccttcaatccaatgtacatagtggattacttcagaaggaatgggaaggatggatgggtttcactgggtggcgttatcttgtgtgtcacaggcacagaaggaatgtatgcagacctaagccatttcaatatcaaggccattcagatcagctttagcactgtcttgctcccctccgtggcactgtgttacatcggacagacagcttacctgaggaaattcccagagagtgtcgcagacactttctttagatccatcccagagctaatgttctggccaaccttcattatcgccatcctttcggctatcatcgcaagccaagccatgctgtcaggcgcattcgccatcctctccaaggctttgtctcttggctgtttccccagtgtccaggtgattcatacatccaagagctacgagggccaggtttacattcctgaagtgaactttttgatgggattagcaagcatcatcgtcacgatcaccttcagaaccaccaccgaaatcggcaacgcttatgggatctgtgtggtaaccgtgttctcgatcaccacccacctgacgaccattgtgatgttactcgtgtggaggaagaatttcatcatcgtcttgcttttctacgtggtgttcagctccatagagctggtctacctctcatccatactgaccaagttcatccaaggcgggtacctgccgttctgcttctcgcttgtcctcatggccttgatgatcacatggcactacgtccacgtgatgaagtactggtacgagctggaccacgtcgtgccagccaacgaagtgacaacgctgcttgagaagcatgaggtgcggcggatccccggggtgggcctcctttactcggacctggtccaaggcatcacccccgtgtttccacgtctggtgcagaggataccctccgtgcacgcggtcttcctgttcatgtccatcaagcacctgccgatcccacacgtggcccctgtggagcggttcctcttccggcaggtcggcccgagggagcaccggatgttccggtgtgtggcgaggtatgggtactgtgacaagctagaggagtcggggctgttcaaagggttcctcatggagagcctaaagacgttcatccaagatgaggctgcgtttaagacgaactctacagctggagataccaaggagctgaccgatcccaaggtgtctggccatgatttggctcgttgggtcgaaaaggaaaagcaaatgattgacaaggagatggagcgaggggtggtctaccttatgggggaagccaatgtcattgcaggaccagaatcatctgccgcaaagaagatagtggtagactatgtctacgcattcttgaggaagaacttgacggagggggagaaggtgctctccattccgaaagaccaactactcaaagtagggataacatacgagatatag

SEQ ID NO: 32318 - DNA, 219 bp, Zea mays
  Peptide Sequence Number=SeqID_74097
atgactctggaggaggtgcttgggaagtatcttagccatgagatgatgggagaggacaagaaagtggagaagaagtttgagaagaagaaattcttcaacaacaagaagaaaggtgaagcccacatcgataaggaggactcctctaacaatgatgaaggcatcaccaccctcgccttcaacaaaaccccatcttccccaagggcgaccacatgtgcgtaa

SEQ ID NO: 32319 - DNA, 753 bp, Zea mays
  Peptide Sequence Number=SeqID_74098
atggccaccgtcgactgccccctgccctctcccgcggacctcgacgacaacggattcccggctctaccctcctcccccgctgcctgtagcagcggcttcgcggaggacttctaccgcagcggcaccgactggtcctccttacgcgcccctccgccgctggggccgcccagaagggcacccggtgtgaaggagagaggaggcggctcggccgtgcagagcagcctcttccaggcgtgggggatcgagaagccgcggcgggacgggcgtggggctggggattcatcgcttgtgcagaggagcctcttccaggcatgggggatcgagagaccgcagagggagggtctcggggctggagattcctccccctcctcctccctttccggttctttgttggcaaggaagcggaggcgaggaagcaccgaggaggagcgggtggcggccaagaagcccctcgcgtgccccttctacaagaagattcctgcaacatgtattcaaatcaatgaatgcagctatatctgtcctttggagcttgataccgagtatgtcatagagggagtgacagttaccttgctggaggccaaccattgccctggtgcagctctaatccacttccgactaagtgatggaaagacctgtctccacactggggattttagagcatcaaaaactatgcaatcgcatccacttctccagagaggccgagtaaatttggtttacctggacacaacatattgcaatcccaagtacaagtag

SEQ ID NO: 32320 - DNA, 153 bp, Zea mays
  Peptide Sequence Number=SeqID_74099
atggcggtgcgaaccggcactccacacctctacgagcactctcccatcctcgcggaggaaaggccagtcgaggatgtagtggttgaagctctgggggcgaaagcaactgtagtgcaattagggttggaaaccctaactgtcgctcttatatag

SEQ ID NO: 32321 - DNA, 237 bp, Zea mays
  Peptide Sequence Number=SeqID_74100
atggcgtgctttatcacattgtgtgaggcgttcatggggatcgacccgcactggggctgtagcaatacctctttagcgtgcaagtgtctttgggccacggcgactagtcgcatgttggatcggtcaacattcaagtctgaaccggatggaaaaataagtacctcaaggtgccccttccctcctccattcgatatgaagacttttagattagcactcatgtcctacataagtcaatga

SEQ ID NO: 32322 - DNA, 654 bp, Zea mays
  Peptide Sequence Number=SeqID_74101
atgacgattgctctgttaatacagcctctcaagggcactgtatggggagggcgaagggtggaccccgccggtcgttttgcctccgttggtgtagcgagatcgacgaaggttgaagcgaagggtagcgtcttcaccttcgccacaacacaatgcacctccaagtatgctaatgatgcacggatacgctcagatgcttcgtttcccgccggccatgctcccctgaggcaggccatgggcgttcgcccaaccaatcagctggagactgaacgtagatgggagacgaagcctccggtccgcgtctcttcgtcccgagatcttgtgcccgcgctcgatggaaggctggcctccggttcgcgcctacacccgcaccctcgcccgtgcccaagatgtcgcccctcccccaccattgtcctcgcttcctccctccagcacctgctgtctttctcactccatgacgtggatcgggatggtctcgcggcggaagccacccgagacagccgcatgccccggcactcgcccccgcctcgcccgctcgatctgacgcaggtcactggcacacactttgcatttgttgttgtgtgtcttggtgtatgtgttcgttgctgccactgcccaaggcttcatgttcgtgttgcgccactagctaagctctag

SEQ ID NO: 32323 - DNA, 177 bp, Zea mays
  Peptide Sequence Number=SeqID_74102
atggccattttgtcatttcaattaagcagttgtgtgaaggacatgtctcttacggtgggtaattgtatcgactccaccctgtctgctgagaccctgttcgctgttgaagttggagaagctcaaagcacatcaattcaagcatgcctagcaggtgacgttggagccctacgagcatga

SEQ ID NO: 32324 - DNA, 567 bp, Zea mays
  Peptide Sequence Number=SeqID_74103
atggctggtggtggctcgatcggcgtcgccggcacgaagtttcatgcgggttttcactgcggctgcgtgaacctgggtatcccggcatggaggacggcggcgtttgggctctacggcttcaaccatttcacaaaatctggtttcctggagcatgcgaagaaattcagagaggaggatatgcagatccggttggatggaaaaaattgcctagtaactggagcgaattctggcattggttttgctacggctgagggtttggcttcacatggtgctaccgtctatatggtctgtcgtaacaaggagagaggggaggcagctctcaaccaaataagatccaaaactggcaatgcaaatgttcatctggaggtaaacaatgctggcttactagagcacaagcatgagattacagcagaagggttggagctcaattttgctgtcaatgtagctgcgacatacactttaacagagctagttatgccgtcattggagaaagcggcaccagatgctcgtgtcatcacagttgcatcaggaggcatgtacaccgagccactgaacaaagacttacag

SEQ ID NO: 32325 - DNA, 102 bp, Zea mays
  Peptide Sequence Number=SeqID_74104
atgagtgagctgagattaaaagtgttgctgccatggggcctcaaagccctaagtctatatgagaatgccttcaccggtaaggatagcctcatacagtcgtag

SEQ ID NO: 32326 - DNA, 243 bp, Zea mays
  Peptide Sequence Number=SeqID_74105
atgtcgatttatgaagctatgaaagcaataactaagacaggggttgctgaggaagaagatgtttcggaggaaagtgtcttagatgttgaagaagaggacagtgaccttcgaccaacaaagctgagttacattgatattagggaatccactatcaagcctagtgattttgatgttattaagaagcttggttatattgatgagaaggatggggttcgctttgatggtaacgaaaccaccccgtag

SEQ ID NO: 32327 - DNA, 660 bp, Zea mays
  Peptide Sequence Number=SeqID_74106
atggtggtcaatgatcacaatgtagtcggaggaaggcaattgaatggcgtcgaaaggaattttggagatacagtcgacgacaacactctgcaaatgctaccacgagatgaaatgaaacccgaaaggtgtagggacgatggccacggacgaggtgtaccgtggacggacgacaacgtggtacggtggaggggcgacagctgctgcctggtggccgactccgcgcctgggcgaccccagcacgccgcacctgggaatcccacagccctagccaccagagcgcgtgggattgccgatgattgggaaggagaagaacaactggcggctcatttaggagtcctgccccgtgtggttgatcttccaattgaaccgccagccgttgtgaagccccgcacgcgctcgcccttatcgcaaaatggaatgggatcgatgcgttgcggcaatagaagggcgcagattgcaggcttccatcgaaggtcgcgggggcgagaggatcgaggggcggaggtgagaatggaggggagctggcgcgggcgcgagaatggcggcaacaatggcgagatgcagaggcgagaggatccctgggaggcagggctgcgggcgcgacaatctcgggggcggagccatgatgaagttgtggacgcccacattagagccttatag

SEQ ID NO: 32328 - DNA, 357 bp, Zea mays
  Peptide Sequence Number=SeqID_74107
atgggcagctccctggctggccggcgtgcttgctggttgctgcagttgcagacttgcagtcgcacagagctcacgtgccgacgtgcgaacttcgaggatttcgttgctggccatttccgccagcatgggcgcaacatccttgtcgcttgcagagcctacctggacggtgcccaggttggatgcctatcgggcgatggagtgcaggacgttgatgaaggcgacacgagctgctcggtgaggttcaagcagtcactgaagaaactcgttgaggagctgttgacggagttcactgtgaagggcgcggactgcggcaagttcctcaccgaggagaaggcaaagaggtcgtctggagcttga

SEQ ID NO: 32329 - DNA, 402 bp, Zea mays
  Peptide Sequence Number=SeqID_74108
atgaaacccagacggagtgcctcccaagcaggagtgcaaggccaagctaaccgaggcctccgtgagcctaaaggtatatctgcggaaaacagcaagcagatggaagcccccgaccggggaggaggacagatgatgcacagagcgcctaaactttttgacgatgttgtcttggaagtcgattccatgaccgaaccagctcggcgaggggctgatcctcttccagctctagcagatggcccgggtcggcgaagcgcggccaggcctggacgtctttcataccgccccgccttatattaccagttcataattcatattgccttccttgatggctcaacaggccttcccgaggatctcatgcttaacctgttgttatatttatacatctggaatgttggtggttga

SEQ ID NO: 32330 - DNA, 210 bp, Zea mays
  Peptide Sequence Number=SeqID_74109
atgggcgtgcctgccctctgcgcccgctggcgtgcatttaatgcgctgcagtcgtcacccatccatgacgagattgaactacgggctccggttttacttgtcgcagctccttcaccgtgtggttctgttgccacactccagacacaggctaaaacgaaatgcagcaataggaagcgaccggagtccatcatcacttatcaagtgttgtaa

SEQ ID NO: 32331 - DNA, 231 bp, Zea mays
  Peptide Sequence Number=SeqID_74110
atggcgtacaaaccggcaaagagcctgctaaggaggttcccaaggaaccatcttttacctgcccaatatgttggaataagatggaggagccttccacaacgacttgtggccatatcttctgcgacacgtcgattggctttgtcaaaggaacttctggtaacacaaggctgtgcaatgtacagtgaggatcagaagttcttgggtgaacagcagatagatgtttcatcctag

SEQ ID NO: 32332 - DNA, 828 bp, Zea mays
  Peptide Sequence Number=SeqID_74111
atggccgccaacttctggacgtcgtcgcactgcaagcagctgctggaccccgaggacgtggacctggtgccggcggcggaccgggagcgaggcatcacgccggaagagttccgcctcatcaagatccatatgtcgttccatatctggaggctagcacagcaggttaaagttaggcaaagagttgtagctacagcaatagcttacttcaggcgtgtgtatacaaggaagagcatgtcagactatgatcctcgtttggttgcacctacttgtttgtatttggcatctaaggtggaggagagtacagtgcaagcccgacttcttgtattttatataaaaaagatgtgtggttccgatgataagtatcggtttgaaattaaggatattcttgaaatggaaatgaagctcctggaagctctcgactattatttggttgttttccatccatatcgtcctctcttacactttcatttatttgttctagcggaactccaagttgatagatgtcctatctgcaggttgttgcaggatgctggcataacagacctgacacaatttgcctggggccttgttaatgatacatacaagatggaccttatcctcatataccctccctacatgattgcactggcctgcatatacatagcgagtgttttgaaagataaggacaccacagcatggtttgaagagctccgtgttgacatgaacatagttaagaatatctctatggaaatattagacttctatgacacctacaagattgatcctcaaaggggcatccctgaggataagataagccccgtgatgaacaagttgccggcaaaggcttaa

SEQ ID NO: 32333 - DNA, 201 bp, Zea mays
  Peptide Sequence Number=SeqID_74112
atggaggcgatgactggaagactgaaggaagttgagcgggtgcaacaacaattgttgatgcagtctgagttggtggctgtggttgctgaacaagctgcaaccgagaggaatgatttgtaccgcaaattggaagagactggtcgggaggctggcatctgcgaacttgctgctctcgggacttcgtcggtggcgtatgactaa

SEQ ID NO: 32334 - DNA, 1854 bp, Zea mays
  Peptide Sequence Number=SeqID_74113
atgagctccacagcccccttcagcgctccaccctcgtctactgcgacaacgttagcggtctacctctccaccaatcccgcggagatcgacctgcacttcgtccgcgagcgtgtcaccgccggaattgtgatggatccagaaaaacaaaatgaaatgagcttgatggacaagagacaactagtatacgaagttgcaagatggccgcaaggtgccgtggagattcttaagtgctggactcgaagggaacttcttgagcttatctgtgttgagttgggcaaagagaggaagtataccaatgtcccaaaagctaagatgatcgcttatctcttgaaattagtttcacgaaagagtggaaagaatgggcaactcaaggatgataatgcaaatgttatgttattagagcaggataacaaagatgaaacacaaatgaaggaatctgaggaacaagaacaatcacgaccactcaaaactgcaaactctgactcatcaatacgtagagaggctcatgcctgttgttcagtgaataaaaaggctggcattgtcaataatggctgcaacaagttagactgtagtttctactgtgttagctgtgggaaaatcaactggctaatgaggagtttgcagaaacaacttgcaattgctagggaggcaagaagagttgatgtgctttgtgagaggctgtcattgagccataaaatggtaaaaggatctgaacgttataaggaaataacgagcataatcagctcagctgcgaaaacacttgaaaaagaagttggtggtgcattagatcaggtttctgcgatcacggggcgtggcattgttaaccggcttacttgtggtgctgaagttcagaagctttgttcaagtgcattagaaattgtagactctacagtggatagcatcttggagttcgagtcaaataatagtccaaaactcttaggtccccagccccaaatcctttttgatgaaatcactccattttctgtggtaattgtgttgaactatcaggatagcatcggtaaggagcaggttgatggttccaaagtttggcaccgaagtgccaaggtttgcaactattcatcggagcccacatgccacatattgaggccaaatactaggagcctggtttctggtctgagcccttcaactgaatacttcttcaaggttttgccttttagcagcgtacaggggtttactgagtgggaggcaaaatgcagtacacgcagcctggaccatggcagcagccagtgctcaactcagaactctgagagcatgtgcctcaaagtggatccaatgcagcatcagaaaaaggatttgaatgtgcagaatcatcagagaactattcaatatgattcacctaaggggtctacaaattcaagtgagaacaatttattgtgtgaccggtattccaagcgggctaaggttgcaaggctagatggtgcaagtgacaatgatgaaagccagttgccgccaacttctgaagttttaccgtttgcaagctccaactactctccttccgaagctccaagtaaacctgacttgcttattggcaccccagattcggcatccaagaactatgtggagcagcagtacgagtactgtgtgaaggtggtcagatggttggagcatgaagggcacatggacaatgacttccgtgtgaagttcctcacttggttcagtctgaaggcaacagcgcaggacaggcgaatcgttggcgccttagtagatgttcttatcggtgatcctgcaagcttggttgcccaactggttgatgcattcaaggatatcatctacaccaaggagaagccctttcaaacacaacagaaggatgcacgctgcaagatttggcactag

SEQ ID NO: 32335 - DNA, 261 bp, Zea mays
  Peptide Sequence Number=SeqID_74114
atggcaccaccgcacggcctggcggcgccgctgcaacggggctcggttggggaagacaggtccgccactgaggaggagtccctcttcaacgagccaagagaagacaagcccactgactcaggctcgagtcacaagaagaaggacgggaagaagaagagacgcatcaagaagatcatctactacgacagtgatgcatcatcttcttcaccaagggacgacaacgacgacgacgactcttcgtcaaagaaaaagacgggatga

SEQ ID NO: 32336 - DNA, 405 bp, Zea mays
  Peptide Sequence Number=SeqID_74115
atggctttcttctaccttgagctcatgtgcacaaggagctcggcgagggagagaggggaacgggcgcgcaggggccgggcgaacgacgaggcgcggctgggacggggcagcggacgacgccgaggctcgacggcgttcggcgcgggcatggctccggtggacggtccgagcaaggcgagcgtgagcggggaagagaggaagagctgggcgagttcggatgcagggaggagcaggggcgtggcttggtcttttatagagagggagggagagaggaagggacgtcaggggaggggaaggggcgccgaccggtttaactccattgatgccattgatggcggcggtttctccagagagaaaatgggaggagagggaggggaagagatggccgttttcaggcgcggctag

SEQ ID NO: 32337 - DNA, 156 bp, Zea mays
  Peptide Sequence Number=SeqID_74116
atggtgaaggttacttgccaggcagatgaccaagcgctagtggcattcggctacaccagaagcaacggcaaatacagcgtggccaagtgggccacctgcccgcgcggccgcgcgtgcccgcgctcggctgggccgaattccccccagcccagctag

SEQ ID NO: 32338 - DNA, 1416 bp, Zea mays
  Peptide Sequence Number=SeqID_74117
atggcggggacgacccaaggcgctgctggcatgccacttctcgctggagagcgcgcacgggcgcccgagagtgtatcgacgtcagcacagggtggtgccgtcgtcgtcacggcgccgaaggaggatagcggtggcagcggtgttgccggtgctctagtagccgtgagcacggacacgggtggcagcggcggcgcgtcggctgacaacacggcaaggaagacggtggacacgttcgggcagcgcacgtcgatttaccgtggcgtgacaaggcatagatggactgggagatatgaggcacatctttgggataacagttgcagaagggaaggacaaactcgtaagggtcgtcaaggtggctatgataaagaggagaaagctgctagggcttatgatcttgctgctctgaagtactggggtgccacaacaacaacaaattttccagtgagtaactacgaaaaggagctcgaggacatgaagcacatgacaaggcaggagtttgtagcgtctctgagaaggaagagcagtggtttctccagaggtgcatccatttacaggggagtgactaggcatcaccaacatggaagatggcaagcacggattggacgagttgcagggaacaaggatctttacttgggcaccttcagcacccaggaggaggcagcggaggcgtacgacatcgcggcgatcaagttccgcggcctcaacgccgtcaccaacttcgacatgagccgctacgacgtgaagagcatcctggacagcagcgccctccccatcggcagcgccgccaagcgtctcaaggaggccgaggccgcagcgtccgcgcagcaccaccacgccggcgtggtgagctacgacgtcggccgcatcgcctcgcagctcggcgacggcggagccctagcggcggcgtacggcgcgcactaccacggcgccgcctggccgaccatcgcgttccagccgggcgccgccaccacaggcctgtaccacccgtacgcgcagcagccaatgcgcggcggcgggtggtgcaagcaggagcaggaccacgcggtgatcgcggccgcgcacagcctgcaggacctccaccacttgaacctgggcgcggccggcgcgcacgactttttctcggcagggcagcaggccgccgccgcagctgcgatgcacggcctggctagcatcgacagtgcgtcgctcgagcacagcaccggctccaactccgtcgtctacaacggcggggtcggcgatagcaacggcgccagcgccgttggcagcggcggtggctacatgatgccgatgagcgctgccggagcaaccactaacatcggcaatgccgcggcggcagcagcaagcagcaacgacaacattgccgccgacgtcggccatggcggcgcgcagctcttcagtgtctggaacgacacttaa

SEQ ID NO: 32339 - DNA, 273 bp, Zea mays
  Peptide Sequence Number=SeqID_74118
atggacatggagagggccacagcaccaagaaccgcctgctcggaaactgtcctctgcctagagagcccacatgttgccttcacagatggagccttagtgtggcatgttggccggatcttcttcgtgtctcatggacaccagcatcctgaacacgacctcttctcattaacgactattcttcaaatcaaatgtagaatgacacaaccttcagcagctgaacctcaaacaccagtggttccttggcataagacctcagacttcgcctcggtctaa

SEQ ID NO: 32340 - DNA, 339 bp, Zea mays
  Peptide Sequence Number=SeqID_74119
atgtgtagtagcgcagaggtggtgtcgtcggcgacggcgacggcacggcaccgttcggaggtggtggggtgtggagaggcggctgtggagatttcgcatgggggacatttggatgcaggtgttccggagcatttggaggcaataatggtggagagtacaggccggcaggtggcggcgaaggtgtatgtcctgctcaggtgctcagccacccacctaagaccctatggtgttgaaactatcagtatagagcatatctgtggtagaaagaattcatggatgtatttcctagaagaaattgccaggaatgccgccagaaaagagaagtggagttctacatag

SEQ ID NO: 32341 - DNA, 621 bp, Zea mays
  Peptide Sequence Number=SeqID_74120
atggctgacctgcgatcgcgcgggtctggcgggatccggcacagacggggcatggctttggccgacgcgcatccaggcgagccgacgaggacagggcacggctctggccgacgcgcggcggggcggttccggcatggacaaaaggggtccacgggctcggactcggcctcggccccggaagacgacgaactccgcctcgcccgaccccagggctcggactcggcctcggcttcggaagacgacgaactccgcctcgcccgaccccagggctcggactcggcctcggctccggaagacgacgaactccgcctcgcccgaccccagggctcggactcggcctcggctccggaagacgacgaactccgcctcgcccgaccccagggctcggactcggcctcggcaccggaagacgacgaactccacctcgcccgaccccagggctcggactcagccttggcctcagacgatggtctctgcctcgcccgacccgaggctcggactcgacctcgacctcggaagacagactcgacctcgacctcggaggagcctccgcctcgcccgactcagggctcggaccgaccacgtcacagggggggccatcattaccctacccctagctag

SEQ ID NO: 32342 - DNA, 270 bp, Zea mays
  Peptide Sequence Number=SeqID_74121
gcgacaattggtctcaatcactccgccgtcattcccgtggtggtgagctacagggcgactatcaggaaggtgtggtcgggggcgagccccggcggcgtcggcggcgtcccacccctcgccggcgccaaggcccatgtcaagcggcgtgagctgccactcctccgcccctcctccacctggccatgccgccaccaccggcggcggggagacgttcttggcgttagcaccggcgaggactgccacaccggcggggagggagtggcgaactga

SEQ ID NO: 32343 - DNA, 174 bp, Zea mays
  Peptide Sequence Number=SeqID_74122
atgctgcagcagtccaaacagctgcaacagtgtcggcttgcagccaaccgaacacgccctgagttcccgcggtcggattttggcatcatgatgagtgtgctccggtctctcggtcgactcctggagatcacgaccaagacaagcatggatatagttacagtacgaaagtactag

SEQ ID NO: 32344 - DNA, 1242 bp, Zea mays
  Peptide Sequence Number=SeqID_74123
atgggagggtgtcacgcgaagccgctcacccacgacgcggaccgctcgccgccgcacgcagcgccggcgaccccgcccccgggctccgccacgcccgccacccccggccccgggaagaagcactgggcggtgtccccgttcttcgcgttctccacgccgagcccgagccccgcgcaccacctcttcggcggctccgcggcatcgccgcgcaagtcccccgctccgccgggctccgcgcccaccaccccggccaggcggctcctgaggctgcccttcccgccgccgtcgcccgccaagcacatccgggcggcgctcgccaggcgccacggcccgccgcggccgtctatccccgaggaaggcggcggcgagggggagggcggcggcggcggaggcaggggcctcgacaaggggtttgggttcaacaaggggtttgcggccaagtatgacttgggggatgaggtcggacgggggcacttcggctacacctgcgccgccacggttaagaagggcgcgcgcaagggggagtccgtcgccgtcaaggtcatccccaaagcaaagatgactacatccattgctatagaggatgtccgaagggaggttaaaatcttgaaagctttagcaggaaacaaaaacttggtccaattttatgatgcctacgaggacaacgacaacgtgtatatagtaatggagctgtgcgaaggtggagagctacttgacagaatactttccagaggcgggaagtactccgaggatgatgcaaaagctgtcctggtgcaaatattaaatgtcgtcgctttttgccacattcaaggagtggttcatcgagatctcaaaccagagaattttctttttacatcaaaagatgatgattcccatcttaaggccattgattttggcctatcagactttgtaaaaccagatgagaggctcaatgacatagttggaagtgcttattatgttgctccagaagttctgcatagatgctatagcacagaagctgatgtttggagcataggtgtaattgcatatatccttctttgtggcagtcgtccattttgggcacgcacggaatctggcatattccgttcggttctcaaagccgatcccagttacaatgaggcaccatggccttctctgactccggaagcaatggattttgtcaagcgattgctgtgcaaggatccgcgtagaaggatgactgcagctcaggctttaagtatgtttccgttcattttatcctga

SEQ ID NO: 32345 - DNA, 903 bp, Zea mays
  Peptide Sequence Number=SeqID_74124
atggacatggaggactccggccagttcatgcagtgggcgatggctacgctgcagcacgatgaggaccaggcagtggactaccccatcgacgacggccgcggcggggctaccttcccctcgctccgagcgctccgcgaggcctcgtcgcaagctgcagaaatgatccaggaacctctcgccgccgcaaacagccgctgcggcggcgacgggggcaccgcagccgcaggcaataatatctcaggaaccgcgccaagaagaagcagcagtggtagtgccgtaatccagcccttgaggtggaattttggcgccggcgccgccgcaccgcctggccgcgacggcgtgcctgtgccagctgaggccgctgccacgggcagcctgctgccagatctggcgtacgggccaccgccgacgaggaagcaggccgtcttaaagagcgtgggatccatctacgcgcaggaccacatcatcgcggagaggaagcggcgggagaagatcaaccagcgcttcatcgagctctctaccgtcatccccggcctcaagaagatggacaaggccacgatcctttctgacgcgacgagatacgtgagggatctccaagaaaagatcaaggcgcatgaagacggcggcggcagtaacgaccggggcatcgtcgaatcctgggtgctcgtgaagaagccgtgcgtcgcagcgcccgacgaggatgctggctcctcgccgtcgtgggactcgtcggggacgacggcgccgtcgccggcgacgaatccgctcccggagatagaggcccggttcttgaacaagaacgtgacggtggacgaaggcttcacagtcacggcggaggagatcgttggcagactcaagacttctgcatgcattaatgcgccagcaaagccgctgctgcaatag

SEQ ID NO: 32346 - DNA, 456 bp, Zea mays
  Peptide Sequence Number=SeqID_74125
atggctggagccggtgacctcacgcgggcgaaggagggcacgaggcggtggcggttggccgggggacctcggcacgacggtgcggtgccaatgctgatgatcaccggcggcgatgggacttcgtttggcagtggcgggtcctgccagggacgacgagcgagccttgccggggaaaaatttgggtgcaggaggcctggcaacggggaagctttggcggttgaaggaggggaggcgctggcagccaggacacgctgggcggtggcacagccgcgcgggtgcgcaacgggcaaaggcgctgatgggtggggccaccgggaagaggctctgcccgaatctgagttggcttctcaatatatgtcaggtcctcttgaacttcgagatcctcggttggcagttgcttttctgattctcttgaaccattctgatattctcttcggcttcgagcaaaatatctag

SEQ ID NO: 32347 - DNA, 638 bp, Zea mays
  Peptide Sequence Number=SeqID_74126
accgcttcgagaggcacgagaccttcgccgggtggcggtggcgcatgcaggaaggcaggttccaaaacaccggcatcggcgaccgggaggcgttgcaggggtgcatgatcgcgaggatgtttgcgccgggcaactacagcatgcaagcactgctcagctatggcaccaacgctggggcaggcgtcctaatcctgtactgctctttcagtgtgcagtgttttaagctctcaagtagcctaacattgtggcgatttttggataatagccttctctccgacttccagagccgctcgcccgctgcctcgctcctgcccgagtgtgctactgcgccgtcggccgcccgcccaccccaacatccggacaccgccgtcggctcccactccccttctcattcctcgcgtcgcgcgccgctcacgcaaggtgacggcttcaccacggatagcggcgtacagatcctttcgtgccctagcccctggggttccgcaacacgccggcacgaccaagcaccaagcggtggcgctgctggtgtaattgggcagctgcacaggtccatcttcctcaacgaccagcagatcaacgctgaccagcagatcaacgctgcccctcagaccctcaggtactcagtagtcagcacttag

SEQ ID NO: 32348 - DNA, 715 bp, Zea mays
  Peptide Sequence Number=SeqID_74127
ctactctgagtctgactactttaagcaagcacttcgccaaggtgcaccagcaaagcctagggaaccaaggattccaagaatgccgcacttacatgatttccagtttttcaataaccaaaggctaaatgaattgtatgaaaaggaagtgcggtaccttatgaaaattttgatgcagcaagcgaaccagaagaaagataccattgatggtgaagacgaagatcagttggagcctttgacagcagaggagcaggaagagaaggaacaattattagaggagggttttgcgtcatggacaaggagagacttcaacacatttattcgtgcatgtgagaaatatggtcgcaatgatattaaaagtatatcatctgaaatggagggtaagacagaagaggaagttcaacgttatgctagagttttcaaggagagatacaaggaactgagtgcaaggatatcccgcaaggatgagattatgaaggctattgggaagaagctagaccgctacaagaacccatggttagagttgaaaattcagtacggccaaaataaagggaagttctataacgaggaatgtgaccgctttatgaacatgactccaacaaagcgagctgcactaaagaattcagagggtgagaatactccaccgagttcattcaagagacgacggcagtcccttatggacgactatgtgggctcgggaaagcgtaagagaggctga

SEQ ID NO: 32349 - DNA, 894 bp, Zea mays
  Peptide Sequence Number=SeqID_74128
atgcaggcggcatgcaactgcaccaaggggatgcaccttttcgacttcgatgcgtccagcatggaggcccaggcccacacgtcatggaccgggaaaggggatactccaaaagggatccttctctgcgaaggaagcgggcccccgagccctcctactgataagaggttcgaaggctggcccctcggaagggaaaacaacaccgcctgcgctgctccgactgccgtgccacccgtcacggtgaggctgacagccgccaagtccggtctcaggcgccataggatgctccgcctcgcccgaccccagggctcggactcaacctcgacctcggacgacggtctccgcctcgcccgaccccagggctcggactcaacctcgacctcggacgacggactccgcctcgcccgaccccagggctcggactcaacctcgacctcggacgacggtctccgcctcgcccgaccccagggctcggactcaacctcgacctcggacgacggtctctgcctcgcccaaccccagggctcggactcaagctcgacctcggacgacggactccgcctcgcccgaccccagggctcggactcaacctcgacctcggacgacggtctccgcctcgcccgaccccagggctcggactcaacctcgacctcggacgacggtctccgcctcgcccgaccccagggctcggactcaacctcgacctcggacgacggtctccgccttgcccgaccccagggctcggactcaacctcgaccttggacgacggtctctgcctcgcccgaccccagggctcggactcaacctcgacctcggacgagcctccgcctcgcccgaccttgggctcggaccgaccacgccgcaggggggtacatcattaccctacccctagctag

SEQ ID NO: 32350 - DNA, 147 bp, Zea mays
  Peptide Sequence Number=SeqID_74129
atggtggcggcggaggcgaggaggaggccggcgagagtcgcacgctattcgtgggcaagatcctggccggaggagcctgagccgcaagcgcacttcgcggccgcgacgagccgacgagctaatcgaagctgtagcacagatttgtaa

SEQ ID NO: 32351 - DNA, 1059 bp, Zea mays
  Peptide Sequence Number=SeqID_74130
atgttttttgacgggtcgttgatgaaaacaggagcggacgcgggcctgctcttcatctcacccctcgggaagcacctccgctacgtgccgcgcctccatttcccggcgtccaacaatgtggccgagtacgaggctttggttaacgggttgcgcatcgccatcgagctaggggtccggcgccacgacactcggggcgactcgcagcttgtcattgaccaagtcatgaagaactcccattaccgcgacccgaagatggaagcctactgtgacgaggttcggcgcctggaggacaagttctacgggctcgagctcaaccacatcgctcgacgatacaacgagactgcggacgagctggctaagatagcctcggggcggacaacggttcctccggacgtcttctctcgagacctacatcaaccctccgtcaagaccgacgacacgcccgagcccgaggaggccttggctcagcccgaggcaccctcggcccttgagggtgaggcactgcgcgccgaggaagagcggaatgggaaggcacccgggggctacacgcacctgctggtcgctatcgacaaattctccaagtggattgaggtccgacccctaaacaacatcaggtccaaacaggcggtggcgttcttcaccaacatcatccatcgcttcggggtcctgaactccatcatcaccgacaacggcacccagttcactggcagaaagttcctggacttctgcgaggaccaccatatccgggtggactgggccgccgtagctcaccccatgacgaatgggcaggtagaacgtgccaacgacatgattctacacggactcaagccgaggatctacaacgacctcaacaagttcggcaggcgatggatgaaggaactcccctcggtggtttggagtctgaggacgacgccaagccaagccacgggcttcacgctgttttttctagtctatggggccgaggatatcttgccaacagacttagaatacggctccccgaggacaaggacgtacgacgatcgaagcaaccaatctagccgagaagactcactggactag

SEQ ID NO: 32352 - DNA, 351 bp, Zea mays
  Peptide Sequence Number=SeqID_74131
atggagctctccctccccagccaagcctcctcccttcctcccccaagttctccctcgctcctcacattcgcgtcctgctctttggaccacgccggactgcctcgccggaacctcgctagtgtcaacgccaccgcaccagagcccgcgcagcaccccgtcaagaacccctgcccatgcgcagcagcaccaccgctcgccgtcgtgcctcgccggagttcgtccacgtcgttcaccatccgtggaacctcaccggagatatgcccgaacactcaccgacgatcgcgccgttccctgcccgtcgaaccccgctcgtcgacgttcatccctgcgcatgagcgaacccaaggttga

SEQ ID NO: 32353 - DNA, 1424 bp, Zea mays
  Peptide Sequence Number=SeqID_74132
atggcgtgtgctgcttacagcatcagaagccctctcaagctcgctgtaaggcacggctcggatgtgttgagtagcaacaacttgtgcaatggctttaagtcttcggtgtcttacctcaattctcaacgttggagcagcaactgctcagccgtcacaatgcggcatgtcgcatcccattgtcactcgattgttaagactccagcaatgtggccctcaaaagcttcagcaactgatgcagccacagcttccgatgagaggataactgtactggtcattggtggtggaggcagggagcatgctctttgttatgccttgaaccattccccatcatgtgctgcagttctatgtgcccctggtaatgctggtattgctcagtcccgggatgcaacatgtatcccagatttggacatctcgagtagtgatgatgttatctcattctgccgcaagaggggagtgggaatggttgtagtgggccctgaagcccctcttgtcgcgggtcttgcaaatgaccttgtcaaagttgggataccaacctttggcccttcatcagaggctgcagctttagaaggatcaaaggacttcatgaagaagctgtgtgataagtataatatccctacagctaagtatcacacatttacggatgctgtggaagctaaaaaatatgtaaaaaatgaaggagcacctattgttgttaaagctgatggactggctgctggaaagggtgtggttgttgcaatgactttggatgaggcgttggaagccatagattctatgttggttgaaggctcattcggttctgctggttcacgggttatcatcgaagaatttctagagggtgaagaagcgtctttctttgcattggtagacggcgaaaatgctttgcctcttgaatcggcacaggatcacaaaagagttggtgatggtgatgttggcccaaataccggtggtatgggtgcatactcccctgctccaatagtgacagatgagctcaaacgcattgtaatggaaagtataattatccctactgttaaaggcatggcagccgaaggttgcaaatttgttggtgtattatacgcagggcttatgatagagaagaaatctgggctgcccaagcttattgagtacaatgtaagatttggtgacccagaatgccaggttctgatgatgcgattagaatctgatctggcacaagttctgttatctgcttgcaaaggagagttgagcaatgtttcactgacctggtctcctgaaatggctatggtggttgtgatggcaagccagggataccctggctcttataagaaggggaccgtaataaaaaacgtggacaaggctgagcgagtgtctccagctgtcaagatattccatgctgggacagcagtagatggtgatggcaatctttgttgcccgttgggaggggagaa

SEQ ID NO: 32354 - DNA, 165 bp, Zea mays
  Peptide Sequence Number=SeqID_74133
atggaaccatattcattcgatcatagatcaacgccctgcaccaaccagctgaaatgcaatccgggcacggcggcgctcggccccctcactgcggtgcttcgccggcgatacgccaaagcggcgcccaagtgcactgctctcgcccccgacagcggctacgcatag

SEQ ID NO: 32355 - DNA, 501 bp, Zea mays
  Peptide Sequence Number=SeqID_74134
atgcagtggctttcaacttcatctcaagagtcaggaaggggcaggagctaccaccactcgatgcccacgcttcctagactacttcctggaatccctccaattttggccaaaaagactcaaaatgaaaccttttttaccatagcagttgcttttggaggaatggaatcttgtcatcaatgtcctgaagcccatagacactggataaccaccaaggctaaaagaataccaccgctagccccagaggaagatttagaatccaaagatattcttatcagacaactgcagaatgagttactgggtagttataggtcccttgagctacaaacagtggagagttgggaagctttgatatttcttactgttgtactgggaaaatttcatgagtcctgctcatttgttgatactgctaaactgaatatgcaacatcattgtcaagaaattgaaaaggaaattggttctgccaagagacatttagaagaacaatcttgcattattatctag

SEQ ID NO: 32356 - DNA, 810 bp, Zea mays
  Peptide Sequence Number=SeqID_74135
atggcaaaatattttgaaaaatatgagagaatatgtgaggtgatttcgcctgctcgcctgcacgtctcatgtcctgcctggttagggggaggagatgacgaggaccctccttgccccttcagacaggtcaagggcaagattgtctatcttgagcagcaagagggcataaagaagaggcgtctgtatagagctgctcgtgcagcgcttgcagcagcagcaaatcaggctaagcagggagggcagttgaggatttcctctgatcagatcgcctaccgagttcgtcgcctcgcgtctcggactcgctcctccactgctctctccacttcttctgacccagtctccactccacctcccacttcgacagctcctgccgctctcgagtcgtccaccactcccactgtttccaccacctccaccactcctgcttccactgctcccgctttcgctccacctattcctccacctcgcttccgggagcatgacaagaccgaggtgagaccgcttgctactgatccttgcctgcttgatcttcaacgagccatagttgcccagagggacccaacagttgcgccactcttcagtactaggacccaggagtccttcttcagggtgcagttgtctgctcaaattgccctacgagcgcaccggtttttggatctctatgccttcctttcagtagccagtgtagagtcagagggtcatatctcatatctgccaggtttacactctcttctgacattcggtggcaaatatattgaggagtgggtcagagtcttctatgccacagtatggatatatccaaatcattag

SEQ ID NO: 32357 - DNA, 2271 bp, Zea mays
  Peptide Sequence Number=SeqID_74136
atgagaccaccgagcagcggcgtgcgcacggcggccgcgcggccgccggccgcctcgttcctgctggccacggcggccacggcggcgctcgtcggagggttctacttctggttggtggtctcgtcgttccggctcccaaacgcctacgccgtcggttgccgccccgacggcgaggggtcgtgggcggtcggcatgttctacggcagcagccccctcgcgttccgtcccatcgagctggtgaggcggcgtgcggcgctcaccgctcagcttaaaaacagctcctttcgtgcgtcgttgtggtgtgaagggaggagcaatggcaacagctcggcgtggccggtggcgaaccccgtcctgacctgcgggactgcgacggaggcggggtacccgagcaactttgtcgccgacccgttcctctacgtcgagggggacacactatttattttctttgaaacaaaaacaacaacctcaatgcaaggtgatattggagttgcaagaagcttcgaccaaggtgcaacgtgggaatttcttggcattgcactagatgaggcatggcatctgtcatatccttttgtgttcaagtatgagaacgagatttatatgatgccagagggaaacaagaagaaggagctgcgcctttatcgtgctactaagtttcccctcgaatggacattggagaaggttcttgtcaataagccacttattgatgcctcgttagtccaatttgagggatactggtggctatttgcatctgattttacacggtatggtgttgagaagaatgcggagcttgagatttggtacagcaattctcctcttggtccttggactgagcacaagaaaaatcctatctacaaatcagacaaaagtttgggagctcgaaatggtgggagactcttcatttttgaagggtcattatatcgccccggccaggattgcagtggtacttatggccggatggttaagttgcacaaggttgaaaagctaagcaaggaggaatacaaagaggtccctgtaaatcttgggatagaggagccaaagaaagggagaaatgcatggaatggcatgaggtaccatcacatggatgcacaacaactcgcatctggtggatggattgctgtaatggatggtgatcgagttccttcaggtgattcaaccagacgctctctcattggttacttagctttcctgttggccagtgcccttgtcgtttttgtgggttttatgaaaggtgcaatcagttgttacgttcctcccagtttatgggttcctctcacaaggagaacagaattatcccgtatcttctacgtgcaccgcttcaaccagaaagtccgcagatattctaccagcatcagcagatatatctctgctgctaaaaccaagctcagcgaaaagacttggtccaacgtgcttttcttctgtgtagttgctctatttggtgccataaatgtctgcattgccgtgcatttcttatgtggcggcaatggcgctgaagaggcgtacacatatcaagggcaacactcccagtttacgatgatcacaatgacatatgaagcccgtctctggaatttgaaagtgttcatcgaacactactctagatgtgaatcggttagggagatagttgttgtttggaacaaaggtaaccctccaagtagtgacgcgtttgactccactgtgcctgtgaggatacgggtcgaggagaccaattctcttaacaacagatttagggtggatcctctgataaagaccagagctgttcttgaactggacgatgatatcatgatgacttgcaccgacttagagaaaggatttagggtctggagagaacaccctgagcggatggtgggcttctacccccggatgatagatggcaaccctatgcagtacaggaatgagaggtacgctaggggtaagaatggatacaatctgatactcacaggtgctgccttcatggacaaagagtttgctttcaagacttactggagcgagaaggctcgtgaggggagggactatgtgcacaagaacttcaactgcgaggacttgctcatgaattttctgtatgcgaatgcaagctccaccacaaggaccgtggagtacgtccaccccgcatgggctatcgatacgtccaagctttcttctgttgccattagccgggacacccagaagcactatgacatcagaacgcattgcttggcaaacttttcctccatatatggccccctccctcagaaatgggagttcggcatgcgtgaagaccgttgggacaaatag

SEQ ID NO: 32358 - DNA, 198 bp, Zea mays
  Peptide Sequence Number=SeqID_74137
atgcagcacggttttcgatttccgaatttgtctccgagtcaaaacagccgcctttacgaggacggtggactacctggcagtagagatagtttgtccggcggcaaattcgatgatagggcgcggccagcgagcgaggaaagagtgacaaccggtacacggtgtcaactgtcgacggcgggaacgaaagtggaagtttag

SEQ ID NO: 32359 - DNA, 258 bp, Zea mays
  Peptide Sequence Number=SeqID_74138
atggttgtccgcattgcaaccactgctcaggagaagatgaagtcgtggaaggagacttccaggagttccaagactacgacgagttctaggcgtgggttagcggcaacccccagtcggttgcctgtgaaggccgcttttatctacgtttcgttttcccactttgatctattatggctcatcttaggcacactgcacggaagtatgtcatccccttcttaccctcctgccttgctgagcgttcgcttcgctgtcctgtga

SEQ ID NO: 32360 - DNA, 180 bp, Zea mays
  Peptide Sequence Number=SeqID_74139
atggagcggctgcgcactagagaaggcgtggtgccgagttcacggcggcggaactttcccccacccgcacccacactctatctcacggcgagggaaggggtggtcgtgacccttatacccgaggtcagatcatatcaacctcggctagattcacgcagcacttcgcggcggccgatgtga

SEQ ID NO: 32361 - DNA, 183 bp, Zea mays
  Peptide Sequence Number=SeqID_74140
atggagaaaatgctgcccaaagttgtgctgtcagtcaccttgctgactgaaattgggtcatcagtgatcgccggtcttagccaagttagggcaccgaccattacttatcttagccggtacgagttcgccggagctcggttctccgccgtgcgacgtcgaggacctcaggtcgtgaagaattag

SEQ ID NO: 32362 - DNA, 969 bp, Zea mays
  Peptide Sequence Number=SeqID_74141
atgcagaaggtgcggctcaaatgggtgaagaaaggggctggatcacctgatcgagcgcaccacctcaatccgcgcgtcctgcctgctgctcgaccacctctcgcgcctccctggtcgctcccgctcgcctccgtgctcccgctccgcttcgacctcggactgccgttcaacttcgccgccgcgttcccggcctcccaccccggtgtcttcgccgtcgccaacaaccgcatctccctacggtccacctccggcctccccgaggacatcgccgtctcctctctccaacgccgccacgccgcggccatcgactccgcgacctaccgcgcgctgtcccggccgccgtcctcgtcgagcgccccgctcgcgttcccgatgcgattcccgcgggggtacggcgggatgaagaaggtcaaggcctggatggatgagttccaccgccttccctacatctcgccgtacgacgacgcgtcagggatcgaccctgagagcgacatttacgagaagaggaacatcggcttgctacatgagctacttgggctaacggtgcacaagatggtgcggaggaacgccatccggcttcttcgggaagagctgggcctgccacacaagttcactaggctgttcacgcggtaccctggagtgttctacctgtcgttgaagtgcaagacaacgactgtggtgcttcgtgaggggtacgagagaggtaagctcgtggagcagcatcccctggctgctgtgagggacaaggtgcattatgtgatgcgcactggagtgctgtaccgtggaaaaggtttgtccaagcttgttctggatgaggatgtcactgaggaagagggtgcactgaatggggaggaatttgaaggggagggaatggatggggatgctgatgtcgagtgcttcagaatggagattgtggatgacgatgggtctgctgatgatgtggatgatgaaggttatagtgatggttga

SEQ ID NO: 32363 - DNA, 513 bp, Zea mays
  Peptide Sequence Number=SeqID_74142
atggaacagaacgccggctcgttcctcgccgtgcgtcgcctctccggtggcgccatccaccaccatcgtcaccactcttccccggaggctcacggcggttatggttttttttctcctccctttctcgtgcgcccgcagctgaggtcgtgggcgtgtccactgcgtggctcggaagagtgcttgaataggttgcagaaccggatagaggtgcagtatgatggttcaaatctggagcatcagaaagcactggaagccctttggcgttcttcttttcctggaactgaacttctagggttagtatcagaccagtggaaggagatgggatggcaagggaaagatccatctacagatttcaggggcggtggttttatatctttggagaatttactgtatttctctaggaactatccagtgagtacaaattacttgactcaactgcttgctgtcattcatcgcaaaaattctgtaatgctggattgtgcctctgatgtggcgttaattgatattcattga

SEQ ID NO: 32364 - DNA, 675 bp, Zea mays
  Peptide Sequence Number=SeqID_74143
atgtccggtgcaccagaggactccaacgcaaactcaccaccttcgggattttccagaagcaactccgctataattcaccggactgtccggtgtacaccggacagtgtccggtgtgccaaggaagagcggcctcaggaactcgccggcttcgggaatctccaacggctagtccgctataattcaccggacatgtccggtgtacaccggactgtccggtgcaacttcggagcaacggctattcggcgccaacggctacctgcgacgcaattaatgcgcgcgcagcgcgcgcagaagtcaggcgcgcccatactggcgcaccggacaaggaacagtgcatgtccggtgtgcaccggacatccaggcgggcccacaagtcaggaactccaacggtcagaattcaacggcattgatgacgtggctggggcaccggacatgtccggtgtgcaccggactgtccggtgcgccatcgaacagacagctccaccaacggtcaagtttggtggggcccgggtgctggaccacgctgtaacccctttggggctacaggggacccacctgtcaacatcccttcttggtcttgggacgctggcgcctggcgcgctgcgaccgaacgtcccagtcacccaaacaaatgagcatgcctatcgagtgttggatgccgtttgtaacgcctaa

SEQ ID NO: 32365 - DNA, 750 bp, Zea mays
  Peptide Sequence Number=SeqID_74144
atgcaggcggcatgcaaccgcgccaagtgggcacgcccctccgacttccaacgcacccggcatgggggcccacgccccacgcgtcatgcaaccggcacgccggtcgctacgtgcaagcaactgcaccgccactcgcaccactgtcgtgcctcctcgactgcggaaccagtactgcaactcgaggcaaccctgcgtacgactcagcagtgccagcctggcgcgacggtcaatacggccaaaaatgggccggcagtaatggcggtggcaggcgggcaggagcagcggtcacgttgtcagccaatctcacgtcccgtccgggggcagcgagagaaccctctctcacggcgtgaagacggcgcgcccgcgtttcgttcctcgaacggctcgcgcacgcgcaacggccgccccgcgaactactcgccccgtcgcattaattccgcggcgggacaggcggcgcctctggcaggggaaggaccgggaaagggggataccccgaaaaggatccttctccatgaaggaaacaggctccgagcctccctactgatcagaggttcaaaggctggcccctcggaggggtttaacagccgcctcagagcgcgtgggctccacacccactactggtcagaggttcgaggcccggcccctcggaagggttcaacggccgcctcaggccactcgggctccgcgcccactactgatcaggggttcataggctggccctcgaagggttcacagccgcctcagacatag

SEQ ID NO: 32366 - DNA, 666 bp, Zea mays
  Peptide Sequence Number=SeqID_74145
atggctctgctccagctattgctgtcgctcctcatcgtctcctgcgccgcgcagtcgccgcgtctgcacagccgccgacaacagtcgccgcgtctgggcctcaggcctcggccgcagcaccaacaaaagcagccttggcgccacaggcctctgctgcgccgccaactacagctgcctcgccgcagctgggctgccacgttggccccggtttcctcaccgccactagctgccgctgcgccacctgcatccgctacccctccaaccacgccaccatcggcaacgcagacgcagcctccagtcgcctccccgcccacggcaatgccaccagcgggcggcgctccccccggccacgctccctccagcgatggatccgacgccacttctcgccgcccccgtcatgcctcccgccgccccaccggccacggcgcccgcgccggcccccgtgtctccggctccaactccaagcgtcgccccgaccccgtcgccgacagaagcccccgccccgtcgcccacaacagaggcacgggtcccgaccccgtctcccgcgctggcgccgctcagctcggtgtcggtgaacccgtctctgtcgcctgggacccgctttcgccccaggatgagtcggcggcgccgggctcgcgcaccgccgtcgacgctctggtgtcctag

SEQ ID NO: 32367 - DNA, 480 bp, Zea mays
  Peptide Sequence Number=SeqID_74146
atgagggactcccaaggtgtttatccagaagatttccctatcattgattcattagagtttgtagatcaggaatatgtatttgtgtctggaccacacccagagggatcatcgtcttcaacaaatgcctctcaacagcttaacttaccggcaaaatatgataatttgtctgtttcaccaccgaagttaactttcttgagtgcaccaaagccgataaacggtttgccgattaatagacaacaatctgctgggactggtagcttcgacagccactattctcctgcatctgtcacttcacagggatctgcggatataagtgatgccatggatcagcccccaactgattatctgacgaggattagattgttggagcaatatgcatcagccatagcagggttggtcagggatgaggtaattttttatctgcttggtggtacccagattctttgctttccctatgttatattttcactgagtcactag

SEQ ID NO: 32368 - DNA, 195 bp, Zea mays
  Peptide Sequence Number=SeqID_74147
ggtgcaagtgctgcagttaatgcaactatgcttcttcaaatttttctgtatcccaagggactagtgtatatttactttgtcattcctgttccagctgcacttatgggcgcaggtttgattggtgctgatttagtgaggttgaagaggactaccaactggcaacaacagttgacaggaccaactgcatatctttag

SEQ ID NO: 32369 - DNA, 762 bp, Zea mays
  Peptide Sequence Number=SeqID_74148
atgacgagtttgaagccccggctatttaaaaccttggtcacaactcacaacggcaaggaatccggcggttaccgatcgagactagttccaaccaggagttggaaacgaaacctccacccaggaacccctgctcgagccggcggaggcggcggccggagcagattaacagagcttttcgagcttgcaaggaggattcaacatgcggaggaagctgctgcagttcccgtccctcgtcgcgcagcacgccctccgcggggccccaacacccagattccaaccccagccccaccaccaccgcttcctgcactccccctccgcgcccacatccgcatccccttcctcctccccgtcggcccacctcatatggaatcgcctctccggctctaccgggatctctcccttaccgaggaccgccgcggacgtcgcagcggccgcgcggaccgccgcgtcccggtggttggccaccgcgcgcggcgcccgctctctcgatctcttctcgctgccgcggtggcgcagggcctcggggcggcagttctcgccttcccctttcctccaaggcgcgacctggtgaggttcataattggcgcaatcttacttgggaactgttgtagtcatttcgtcattttgtgttctggtgtctgcggaagggcgtcctggatggagtccgccgacggggcggtgtggatgctcatcggtgcgaatgttgctgtcttcctgctgtggcgtgtggccgatccagggttcatgaggaagcatttcatg

SEQ ID NO: 32370 - DNA, 243 bp, Zea mays
  Peptide Sequence Number=SeqID_74149
atgtgcacaataagggagggcgttaaagcaaggattgtaatcgacaagggagaaaaatgcaaccaagggcagggtaggtgctctagacaaaacttacaaggtgtcaaagaagggggaggagtcaatgatgaaatagatgaggcattatccttgaacagtgatggaaaagaaggggcttcaaagggtaggttcaagacaaggatgtatgagaggatacaaatgggcataagacgaaggatataa

SEQ ID NO: 32371 - DNA, 549 bp, Zea mays
  Peptide Sequence Number=SeqID_74150
atggtggattaccgtactggtggaaaggggcgtaatccaaactttgctctcgattttggagaatttgacacctcttctacaaatcttgtaggtccacctggctctggaaagggaactcagtctcctattatcaaggatgaatattgcttgtgccatttagccactggtgacatgctgagggctgctgtggcggccaagacacctctaggtatcaaagctaaagaagctatgaataggggagagcttgtttcagatgatttggttgtgggcattattgatgaagctatgaagaaaccctcatgccagaaaggtttcattcttgatggctttcctagaattgtgactcaagcacagaagcttgatgagatgttggcaaagcaaggtgccaatgttgacaaagtcctgaactttgcaattgatgatgttgtattggaagaacggattactggtcgttggatccactcagccagtggtaggacttaccactcaaaatttgcacctccaaagtctccaggagttgatgatcaataccgacacagatgtgattag

SEQ ID NO: 32372 - DNA, 174 bp, Zea mays
  Peptide Sequence Number=SeqID_74151
atggagaagtccctaggctaccgagccacggcggcgcgccggcctgacacttacagctcgggcggagcctccacgggggctactgccgccggcggcgccgcatccgggacgaggtgctcctggcggtacccggcgacgaagtcgatgagcttcttgccggacttcgtcttcgtc

SEQ ID NO: 32373 - DNA, 156 bp, Zea mays
  Peptide Sequence Number=SeqID_74152
atggagagtccaacaagggctacacctttatcaactgtgacctcgtcggaggtggattgtcggctacggggaggggccatgggggcctacaacgtgcacccgtgggctttcaagggcaacaccaagacctgcgctacccaccactttggccactga

SEQ ID NO: 32374 - DNA, 930 bp, Zea mays
  Peptide Sequence Number=SeqID_74153
atggatgatggtcgtcgcgcccctggcactggcctctactcggagctccctggtgccgagtccctcccagccatggtgctcgccggcctacagctcgccctcagccgtgccctggtgccgcgccccaagtttttttcccccgcgcggcaacttggctccctgcaagctgcagcacccgagattctctctcttccccaacacgtcttctttcccatcgtgccatggccgcgcgctgccggagctccctgctcgccgcgctctggttcggtttctggctcgtcgcgcgcgttccgttctccctgtgtgcgcagccgcgctccacctcgccccatcgcggcactccagcgcctgctcgccatggctggcctcgcgctggctccctgctcggccgccgacctgtctgtgctcgtgctgatcttggacgccaccgcgcctcaacctcgccatgaacctggttgtgtctgtccgctgctctggctcgccggcggtcagtgccctcgcccggccttcagcttgccttgcctcgggctggcacatccttgccgaagcgccatgctctgtgggggtgctccccatcggcatcgcttcaaccgctcggccctgttccctggccagcgctcgactctgagcttctatcttcctgcgccgttgttccacttgcagctagtggaggtggacctcggcagcgtacccatcgccgtagagctcccagacacgttcctctctgctcgttcgtcctcggttctgaccagatctcgcgcacgtggttttaaagctatgcacattcgtcgtgccgcgttgtctgtcgatatcaaggccgccaagtccgatccgctcctctgcgtgcagttcgccgtaacttccgtccgttgtggttgccagtcgtcgaccctgcttggattctatctcaccagctcgctccagacttga

SEQ ID NO: 32375 - DNA, 279 bp, Zea mays
  Peptide Sequence Number=SeqID_74154
atgtcaggagaacacgccaaaagggagatggtcaccggggaaaagcttggatcttcgggaaagaagattgaagaaaggactccgtcgaaggaggccagcgacaaacacaaggagcacaaggatgaatccgccgactccatcaagtcacataagaagggtgaccaagaagaaaaagaagatgaagaatgtggtctactacgagaccgactcttcttcgccctcaacctccaatgccgagtctacttcttcaaagcgccaagagcatatataagaagtata

SEQ ID NO: 32376 - DNA, 237 bp, Zea mays
  Peptide Sequence Number=SeqID_74155
atggaggcccaggcccacacgtcatgcaaccggcgcgccggctgctacgtgcgagcaactgcaccgccactcgcaccactaccgcgtctcctcgactgtggaaccagtaccgcgactcgaggcaaccccgcgtatgacccaacagcgccagccaggcgcgacgggaccgggaaaagggggataccccgaaaaggatccttctccgtgaaggaaacaggccccgagcctccctactga

SEQ ID NO: 32377 - DNA, 738 bp, Zea mays
  Peptide Sequence Number=SeqID_74156
gcccgtccaacgaggccaccgatcgacgggccgatgccaccatgggtcccatcgatagaattgttcgacaactacagcctggggtcggacccccgtggaacggtcctaggcctcaatcccctgctctctgctcaggcagagatccaatggtggcatgtggcctatggcgcatcgcaaaagctgctgggcatggcccacgacgtgcctctgtttgataaacacaatacccctccccaagggggtgaagcaccctcgacagagcaagtactatgcctggaccccattgacggtgcttcgacaatagccaccttcgaaacaaatcaagaaaaagataaaggcattagcttcgtcataacaatacaggaagacgaagatagaagtcaaacgaagccggaagaagaggatgggcaggtgaggagggggtttgagaactacgagtgggactcggtcgtcagcgacctagggcgcatgctcgtgaatggggaacagggaggctacaggtgggacctggttgttgggaccatcgccttcctctcgctcagctcagtcgggacagcgccgcggggcgatggtagtgatcctctgggcgtggacatggtggggacatcagacgtggcaacggcgagcacagagggcgtgacatggggcgattatgcggtgaaaaggtcggggctgatatatgggataggggtgtcggcaagacagcgcggggcatgcagcaacattgagagcacctag

SEQ ID NO: 32378 - DNA, 3294 bp, Zea mays
  Peptide Sequence Number=SeqID_74157
atggagcaccgggctttgctgctcggcgtggcgctggcctttctgctggcctctggctcccagggcttgaaccatgaaggttggcttctcctagcgctgaagagccagatgaacgacactctccaccacctcgacaactgggacgcgagggatctaacaccatgcatctggaagggcgtcagctgctcgtcgacgcccaacccagtggtggtgtctctcgacctcagcaacatgaacctgtcaggcacagttgcgcctagcattggtagcctgtctgagctgaccctccttgatctgtcctttaatgggttctatggtaccatccctccagagattgggaacctgtcgaaattggaagtgcttaacttgtacaacaacagttttgttggtacaataccccctgagctcgggaagctagataggctggtcacgtttaatctgtgcaacaacaagcttcatggcccgatacctgatgaggttggaaatatgacagcacttcaggaattggtaggatacagtaataatctcactggctcactacctcgttcacttggcaagctgaagaacctgaaaaatattaggttgggtcagaatcttatatcaggcaacattcctgttgagataggtgcatgcctgaacataactgtgtttggtcttgcgcaaaacaagctcgagggtcctttacctaaagagattgggaggttgaccttgatgaccgacttaatcctatgggggaatcagctttctggtgttattcctccagagataggaaactgtacaagtctgagcacaattgccctctatgacaataatctagttggccccattcctgcaacaattgtgaaaattacgaatcttcagaagctatacctttacaggaattcattaaatggtacaattccatctgacattgggaatctttctcttgcaaaagagatcgacttttcagagaatttcttaactggagggataccaaaggagctggccgacatcccaggcttgaatttactctacctcttccagaaccagcttacaggccctattcctacagagttgtgtgggttgaaaaacttgagtaaacttgatctgtcgatcaattcactgaatggcacgattccagttggatttcagtacatgagaaatctaatccaactgcaactcttcaacaatatgctttctggcaacatacctccaaggtttggcatttatagccgtctttgggtggtggatttctcaaacaacagtataacagggcagataccgaaagatctttgcaggcaatcaaaccttattttgttgaatttggggtctaacatgcttacaggaaacattcctcgtgggatcactaactgtaaaacattggtgcagcttcgtctcagtgacaacagtctgacaggaagtttccccactgatctctgcaatctggtaaatttgacaacagttgaactaggtcgaaacaaatttagtgggcctattcctcctcagataggcagttgcaagtctcttcaaaggctggaccttacaaataattatttcacgtcagagttgcctcgagaaattggtaatttgtcaaaactcgttgtcttcaatatctcatctaatagactaggaggaaacataccactagagattttcaattgtacagtgttgcaacgccttgatctcagccagaatagctttgaaggttcgttgccaaatgaagttggtaggctgccacagctggagctgctatcttttgctgacaataggctaactggccagataccacccattcttggtgaactatcacatttaacagcactacagattggtggcaatcagttatctggtgaaataccaaaggagctgggtctgctgtcgagcttgcagatcgccctgaatttgagttacaacaacctctctggcgatattccatcagagcttggtaaccttgcactgttggaaagtttatttcttaataacaacaagctgatgggtgaaatcccaaccacatttgctaatctgtccagtttgcttgagctcaacgtctcctacaattatctctctggtgccctcccgccaataccgctttttgataatatgtctgtgacctgttttattggaaataaaggattatgtggtggacaacttggtagatgtggatcccgaccatcctctagttctcagtcatccaaatcagtcagtcccccattgggcaagatcatagcaattgttgctgctgtcattggagggatttcacttattcttattgcaataattgtgcaccatatcagaaaaccaatggagacagtggcccctttgcaagataagcaaccttttccagcttgttctaatgtgcatgtttctgctaaggatgcatatacatttcaggaattgctcaccgccacaaataactttgacgagagttgtgtgatcggaaggggtgcatgtgggacggtgtacagagccatcctgaaggctggacagacaattgcagtcaagaaacttgcttctaacagggaagggagcaacactgacaacagctttcgtgcagagatcatgactcttggaaagataagacatcgtaatattgtgaagctttacggttttgtataccaccagggttccaaccttctactctacgaatacatgtcaagaggtagtcttggtgagctacttcatggacaatcatcctcttcacttgattgggagacacgcttcctgatagcacttggtgcggctgaagggctttcatacctacatcacgactgcaagcctcgtatcatccaccgtgatatcaaatctaataacattttacttgatgaaaactttgaagcccatgttggtgattttgggttagcaaaggtgattgacatgccatactcgaagtcaatgtctgcaattgcaggttcatacggctatatagcaccagaatatgcttataccatgaaggttactgagaaatgtgatatatatagttatggcgtcgtgctgctggagctgctaactgggcgtgcccctgtgcaacccttggaactaggaggcgatctggtaacatgggtaaagaactacatcaaggacaattgtttgggtccagggatcctcgataaaaaaatggatttacaagatcaaagtgttgtcgatcatatgatcgaggtcatgaaaattgctttggtatgtactagcttgactccgtacgagagaccaccaatgcggcatgttgtagtcatgttaagcgagtctaaagataggacgagggtcagctctgcatcctcgcctgcctctgatgattcttcaaagaaggatgactcataa

SEQ ID NO: 32379 - DNA, 300 bp, Zea mays
  Peptide Sequence Number=SeqID_74158
atggctccacctcgcctagtcgcccacaaaccccaagtcctgaccactcagcttgatggactgctccctgcccgaagtgtctactcacggctggcagcgtgggggggggctggtccctgccgtcggatgcgagtaaatggtgttggtgctgccatggcgtgcttgcacgagctgtttctggacaggcttttgcgtgtgcagggagtggatcacgtgggctggttatgggaaagggacagggctgctgctggttcacgtagtcttgctatcgcactagagggcaatgacgctaggcattaa

SEQ ID NO: 32380 - DNA, 609 bp, Zea mays
  Peptide Sequence Number=SeqID_74159
ggcaagaagggcgtcaaccaggaggctatgatcttctgggagaacttctgttctagagatgataccatcttttgtggtgtatttgatggtcatggaccttatggccatttggttgccaagagagtaagagatctcctgcctctaaagttaggagcagatttggggatggaagatggtagagtagcatccactggcaacattaagctcaatacaaatgatgtagcttcatctgaacacatagtcagaggaggtactgccgtttcctctgaagctcagcagaatggagattatccagaggtcttcccagcattgagaacttcattcttgaaggcattccatgtaatggatagggatctcaaattacataaaaatattgattgctttttcagtgggactacagcagtggcagtgatcaagcagggacacaatcttataattggcaatttgggggattcaagagctgtcttaggcaccagagatgaaaataaccagcttgttgctgttcaattgacagttgatctcaaacctgacattccaataggcaagtcttttctgcttgctgttattactacgattaaagaatttccaaagaaaaatctagtaatataa

SEQ ID NO: 32381 - DNA, 765 bp, Zea mays
  Peptide Sequence Number=SeqID_74160
atggcattggatggctgtatacctgcaaaactgtacacaatcaatattgcatttgttaattggaacacgactggtttaccttctgaggaagctacacacccagaatcacagttagatgaagaggaacaactgactaaagaagagtggcaggctattaataagctgttgagttaccaaccagatgaagatatgtcttttccccttgagaaggtttccccaaatgtgattcaatttatgatggatgtatccattggccaggctggtgcaaggatcatcaatattgatggaactgaggttttatgtggtagatttcatcagcttcaggttgtcactaagttgtatccgaagagcacatgttgtgatgtgacattgaaatattgtggtctatcatctccagaaggttctcttgctcagagtgtcgttagcgagggaaagagtcatgctcttgatgttagttttgtacgagcaccaattggtatggaccttgattggcagctcattgcgaagatatcaccatgccatgttacgggcattgtatacagacgagagggtattagagtacaactagtggatgaagacgccattgggctagctaatgacgtccactcaaaactgaccttgctactgctgttccagctactagcaaaattcaacttgatgactacctgccaggttcagacagctgccttgacttaccaaggaaataagacagctgatgttgcctacttactagaaagggaaactgacctatatgtcacccattag

SEQ ID NO: 32382 - DNA, 1314 bp, Zea mays
  Peptide Sequence Number=SeqID_74161
atggaagcatactgcgatgaggttcggcgcctggaagacaagttctacgggctcgagctcaaccacatcgcccgacgctacaacgagactgcggacgagctggctaaaatagcctcggggcgaacaacggttcccccggacgtcttctcccgagacctgcatcaaccctccgtcaagaccgacgacacgcccgagcccgagagggccttggctcagtccgaggtaccctcggctcagtctgaggtaccctcggctcggcccgaggcacccttggctcaacccgaggcacccttggctcggcccgaggtaccctcggcccccgagggtgaggcactgcgcgtcgaggaggagcgaagcggggtcacgcataatcgaaactggcagaccccgtacttgcaatatctccaccgaggagagctacccctcgaccgagccgaagctcggcggttggcgcggcgcgccaagtcgttcgtcttgctgggagacgggaaggagctctaccaccgcagcccctcgggcatcctccagcgatgcatttccatcgccgaaggtcaggagctcctacaagagatacactcgggggcttgcggccatcacgcaacacctcgaacccttgttggaaacgccttccgacaaggtttctactggccaacggcggtggccgacgccactagaattgtccacacctgcgaagggtgtcagttctacacaaggcatacccacctgcctgctcaggccctgcagaccatacccatcacctggccgtttgctgtgtggggtctggacctagttggccccttgcagaaggcacccgggggctacacgcacctgctggtcgccatcgacaaattctccaagtggatcgaggtccgacccctaaacagcatcaggtccgaacaggcggtggcgttcttcaccaacatcatccatcgctttggggtcccgaactccatcatcaccgacaacgacacccagttcaccggcagaaagttcctggacttctgcgaggatcaccacatccgggtggactgggccgccgtggcccaccccatgacgaatgggcaggaagaacgtgccaacggcatgattctgcaaggactcaagcctcggatctacaacggcctcaacaagttcggcaagcggtggatgaaggaactcccctcggtggtctggagtctgaggacgatgccgagccgggccacgggcttcacaccgttctttctagtctatggggtcgaggccatcttgcccacagacttagaatacggttccccgaggacgaggggcctacgccgaccaaagcaatcaagctaa

SEQ ID NO: 32383 - DNA, 129 bp, Zea mays
  Peptide Sequence Number=SeqID_74162
atggcgaacgaggtggcggtaactgaggtgaggaccatcattatcgtgcagagccgacccatcctagctcagttcaatgtacgtggcccctgcgcgggaaggtcgggtcactttgtgatcgccgcttga

SEQ ID NO: 32384 - DNA, 1177 bp, Zea mays
  Peptide Sequence Number=SeqID_74163
cggcagctgggcggagcagggcgcgggcgggtaccgccacggcagggacggcgccaccttcctcctccccgagctcctccagcgcagtaataacgccgccctgccccttcatggaggaggagtagcggccccgtttggcatggcgccgctgggagtggcggcggcggacgaagcccggttctgcatgacgccgtggtcagcggcggcgcacttcgagaactggggcgactccggcatcgtcgtcaccagcccgctcgccgagacggcctccaccgacgtcgacatgggtggaggtggagccatggcgcagagcgtcgacggacatgacaactcattgccggcgtgcaaggtggagcccagggatcacaaggcgcagaggaggcttgcgcaaaaccgcgaggcggcccggaaaagccggatgaggaagaaggcgtacattgtggagctggaaaacagccggtccaagctgtcccatcttgagcaggagcttcaaagggcaaggcagcaggggatgttcattgcaagtgcgttggcgttcgacctggagtacgcgcggtggctggacgagcaccagcaccacatgaacgacctccgggtggccctgagcgcgcagatcggcgacgacgacctgggcgtgctggtggacggcgcgatgctgcactacgaccagatgttccggctcaagggcgtggccacgaggacggacgtgttccacgtgctgtcgggcatgtggatgagccccgcggagcggttcttcatgtggctgggcgggttccggtcgtcggagctgctcaaggtgctggcgcggcacgtggagccgctgacggagcagcagctggtgggcatctgcggcctgcagcagtcgctgcagcaggccgaggacgcgctgtcgcaggggatggaggccctgcagcaggccctcggggacacgctcgccgccgccgccacgccgtgcgccgccgacagcgtcaccaactacatgggccagatggccgtcgccatgagcaagctcgccaccgtggagaacttcctccgccaggcggacctgctgcggcagcagacgctgaagcagattccctcgtcatgggctcatgcccagctgcgcgccggccgcgtgccgtggaatgacggaatgaggaagctgggtccgcggcaatcatgcgccttgcccgcctag

SEQ ID NO: 32385 - DNA, 699 bp, Zea mays
  Peptide Sequence Number=SeqID_74164
atgcccaaagactactgctatgagtccggaccccgtaggtgggacccggacccccacgtatgccgtctgggcccccgtagatgggtctacgacctccacgtgtaccgtccggaccctgcaggacggtcccggatctctgtgtatgtcaactggaccctgacaaggggggtccaagacttcaagccagcatacactcttggtctctgctcgggtaggacacatgcgatacaaagggacatgctctctcaagttcacagactcaaaccctcagcaatagaactctcaagtggacgtagggtattacgctccggcggcctaaaccactctaaatcctcatgtactgttgtgtttcaccatctcctcagactaaccctagacaacctccgtgttcttagtattagtcggatgctttctgccacccggctgaccctagacaacctccttgttcttaggattagtcggatgctttctgccacccgactggaatttaccttcgagagtactgatactgtttctatgtgtgtgatcggcgtggtctacccgaggacctttacaggattgaatgctcttctggggttcgagaagcttgtgaaggccaagacacaagtggttgctggcacgatgtactatctcactattgaagtgaaggatggcgaagtcaataagctctatgaagctaaggtctgggagaagccatga

SEQ ID NO: 32386 - DNA, 515 bp, Zea mays
  Peptide Sequence Number=SeqID_74165
agccgctgcccgccctcgtgcggtggaaagactcagagctgttgttggggtgccatgttttcattagaggaaagggttccatcaaagatccagggaaagtccatcctgacggctggagaagcaaatggcaaattaagctttgctatgtgcctacgttacctgggtgccatgttttcattagaggaaagggttccatcaaagatccagggaagattcttggttacagtctcaatgaagcacatcagctgctgcagatccccatcgggttgacgacagccttcctcaaggcctacgtgctccccaagcgccgcctcgaccacggtcgtgacaccatctacatgaaacctttcatgcaaaacagggagcagctcgttcatctcttgaaggggattgcggtcgaaacagagaagttccaagcgacaccactatctcaggtgtgttgtacaggaagtgctgattgtatggggagaccacgaccaactgttcccggtggagaaggcgtttgcagttcatag

SEQ ID NO: 32387 - DNA, 1179 bp, Zea mays
  Peptide Sequence Number=SeqID_74166
atggccatgggctgctgctacggtgatttcttcgacaaggccaagccttacctcgccatgatctccctgcagttcggctatgccggcatgaacgtcatcaccaaggtctccctcaaccacggcatgagccactacgtgctcgtcgtctaccgccacgcctttgccaccgtctctattgcaccgtttgctctcatccttgagaggaaggtgaggcccaacatgacgtggtccgtcttcctccagatcttcgtgttggcactgctcgggcctgtgatagaccagaacttctactacgccggcctcaagttcaccgggccgaccttcgcgtgcgccatgagcaacatccttcctgccatgaccttcgtcatggccgtgattttcaggatggagaaggtggacctgaagaaggtgcggtgccaggcgaaggtggccgggacgctggtgaccgtggccggcgcgatgatgatgacgctgtacaagggcccgctgatgaagatggcgtggaccagcagcggccacgcgcacggggggcggcggcggcgccgaggcggccgtcatcgaccccagcggcagggagtggcgcacaccctgaagcagtacgcggcgccgctctccctcaccaccctcatctgcttcgtcggcaccctacaggccatcgtcgtcaccttcgccatggagcaccgcccctccgtctggaccatcggcttcgacatgaacctcctcgccgccgcatacgccggcattgtcacgtcgagcatagcgtactacgtgcaaggcctggtgatccagaagaccgggcccgtgttcgcgtcggcgttcagcccgctgatgatgatcatcgtggccgtcatgggctccttcatcctcgccgagaagatattcctcggcggcgtcctcggcgccgtcctcatcgtcatcgggctctactcggtgctctggggcaagcacaaggagacgcaggacaaggaggacgatgagacgacagagctgcccgtcgtggcaataatggcatccaaaaccaatggagtcgtctacgacgacgacgatgacgtcgtcttcgtcaaggagatcgccgccgccggcgctggcgctgttggaggagatgactcggagtgcaggaaggcgactggggtggtgaagtcatcctcccgtggacacggagctgctggtgcagtttga

SEQ ID NO: 32388 - DNA, 312 bp, Zea mays
  Peptide Sequence Number=SeqID_74167
atggctgtggccgaggtcacggtcgcagtggtcgcttcaacgctgctggacgcagcggctagtaccctccggcgacctttcttcctccatggactgcacactgggctcccacttggcgtgccccatggacagggacctctggccctagcgtccttggtgtgcgtccaccagcgcaagcatattcggcattccagcagccacaaattgtgtccgcgccactacatgctccgtcttgggacacttcggggcttgttcacgctctccaggctgcctctattcaatagcaagcacatcccaatgattggtttctag

SEQ ID NO: 32389 - DNA, 273 bp, Zea mays
  Peptide Sequence Number=SeqID_74168
atgggcgtcgcaggtgcatgtgttggcgagctgcatggacatgtaggggccgaggctgagagatgtgtggtggccgaggcagaggttggaccgcccgtgaccaacagacgaggatggggaggcatgcgcacagttgctgaaatggcaggagcagaaaagacaggagaggctcgtaccgggatgatttccattccggacaccgctggatccgggatggaggaatgtggcaagaattttgtgggctatggtgaggcgaacggaaaaaaggattaa

SEQ ID NO: 32390 - DNA, 813 bp, Zea mays
  Peptide Sequence Number=SeqID_74169
atggcttccaagcagatcggagtcttgacctgcttcattgccatcaccgctctcgccttccgtccctgcgcatccgccgtgcccatggacggtggctggtcgaacggcggcgccacctggtacggcccagccaagggcgctggatccgacggtggtgcgtgtgggtaccagggtgccgtcgaccagcctccgttctcgtcaatgatcaccgccggcagccaatccatcttccaggacggcaagggctgcggcacctgctaccagtgcaagtcgtccactgtgaagtgcaccggccacgagtcgtgctccggcagcccggtgacagtggtcatcaccgacctgtgccccgacgctacgtgccaggtggagcccgtccacttcgacctgagcgggacggcgttcggtgccatggcgaagcccggccaggccgacaagctccgaaacgccggccgcctacaagtccagtacactcgggtggcgtgcaactggaacggcttggacatcgccttcagggtggacgccggctcaaacgccaactacctggccatggccatcgagtacgagtccggggacggggacctgcgcgccgtggagctgaagcagagcggcgcggcggcgtgggcgcccatgcaacgctcctggggcgctgtgtggcagtacaagtccggctccaccaatctgcaggcccccctgtctgtccgcctcacctcgggctccggcagggtcctcgtcgccagcaacgtcatccccgccggatggcagcccggcagaacctaccgctccgtcgtcaacttcggaggaaaccatgcataa

SEQ ID NO: 32391 - DNA, 474 bp, Zea mays
  Peptide Sequence Number=SeqID_74170
atgtcccacaaaaccaccttctgggttgatcacgagaccatctatctgttgacgaacttcggcactagtcatcattgcagatatcttgcagatcacattgcttcagaaaatctcgaaaaatctgggctgcacacccaatgggtgcgcccaaaggcccgcctacccgtgtccgctctcttcactcgttcttgcctttctgcactcttcttcgtctactctttccactcacccaagaaagcatggccggtggcaaagggcttctcctccgagggctacgactctccaccgccagcgctccccacggcatcgtccgatgactcagacgattccatggggttgtcggtagccgagagggcctacatccaatgcatcgagcaagcagggctcgaggggtcggatgactcggaggaggtggactttgaggaggactcctcgaaagtggactccaaggaggaggatagcagcgatggttga

SEQ ID NO: 32392 - DNA, 390 bp, Zea mays
  Peptide Sequence Number=SeqID_74171
atggcgggaggcaagagcagcaaaggcaagtgtgacaagaagaaccagggcggcaagaggaagcatccttcaactctcctgtcagaggactttggtgactcggagttctcggaggagcaattctcctccaaggatgaggagtccccgacgctgagaggggcatacatctgggtcatcgagcgagtggggcttgagagcttggatgactcgaaggaggactctgaggaggaggaggagggcggcgacaaagtggatgatggcggctacgatggcggtgatgagggagacgacaacgacaagatcgatagtggcggtggcgggaacaagagtagtggcggcatcgactgtaagggcagcgacaacgcaggtgccaagacgcaaccagcataa

SEQ ID NO: 32393 - DNA, 416 bp, Zea mays
  Peptide Sequence Number=SeqID_74172
atgtggggcccaatgggtagagacggtctggagctcacgcgcgcgatagcaaggagcggctgtggcccgggtcccacacgccagaggaaggaggtacaggggagcgcagttgcggtggtgacggcggggctgacagtttggccccacaagtcggttagagtgaggacgcacgcgtgtgataagggattctggctaggtggacccacggggcagtggccgaaggccacaattgctgtgtaccgagattttcctgaagaggataagcagactcacatcatgatacgaccgcctactagtgactctgagatcgaggctgttctcgtgactgcccaggccgagctgaaatacggtgatgatgtggtggatgctggtttggaggatgttgtggaaggtgggagtggggtgaaaacgactag

SEQ ID NO: 32394 - DNA, 393 bp, Zea mays
  Peptide Sequence Number=SeqID_74173
atggttgagggtctcctcgacatgaaccctggtgagattctggacccctttggttcgcttattggtccgctctacgtagcacaaatcgtagggggaaagtggagctttggtgctcggctggacgggagcaccggtgatggtctccgtcgttgggggcggccgccgctggtgcgggatctgctacgctcagctatcggtggtggaagacaacccatgaaccgaagatcgcgttatcagtggccaagattagaagatagggccaacttgactagagcctatctccgccattcgatcatgatcgtgcgcgcaggactccattccgttgttttaaatcctagccatcggccggtaatcttacggttctggttgcttaccgcttcggtaatgggctga

SEQ ID NO: 32395 - DNA, 225 bp, Zea mays
  Peptide Sequence Number=SeqID_74174
atggctcccaggcaccaacggtcggctttgctagagaaggaaagaaatccgcaccggatagtgtccggtgtgcaccggactgtccggtgcgccaggcgacagaagggttgtgcgcaaccgtaccccggcatggcataccgtgtgatacacccggtatacgggtcccagcagcaaatgttgagatccctgcaacgacgtttggtgggtgccatagggcagagttag

SEQ ID NO: 32396 - DNA, 399 bp, Zea mays
  Peptide Sequence Number=SeqID_74175
atgggcaagagcaagaaaggtgggagttcctcacaccattccggcgataagcggaaacgtgagccgactcctccctcggaggacttcggtgactcggagtactcggaggaggagttctcctccgagtcagagggctcgccggtatggacctacatccgggctgtcgagcgtgccgggatcgagggctcggatgagtcggggggctcctcggacgaggaggactcctcggactcgtccgaggagggcggtggtgacggcgatgacgagggcgacagcgagggcggaggcggcggcgatggcaacgacgacggtggtgaaggtggcggcaagggtggcagcggcgacggcggggacgacagcaagggcaacagcaagggcagcaacaaggccagtggctag

SEQ ID NO: 32397 - DNA, 2370 bp, Zea mays
  Peptide Sequence Number=SeqID_74176
atggcgtccggcggcgcacaaagccacacccagtcccaacctggggctggggacggggctaaacctgcttcaggttccatggaataccagctgaggcagtaccttctgctgctggccagtctggttgctacggtgacgtacggcgccgggctaaacctgccgggaggagcctggcaggtggacgacgggcagcaccacgcgggcgactcgatcctccaggacgcgcaccgccaccgctacctcatcttctactactgcaacgccaccgcgttcgccgcgtcgctcgtggtcagcctcctcctcctggtcctggacggcaagaacacgggctggtgggaggctctgctgcgggtggtcatggttctcgacctgctcggcctcatgggtgcctacgccgccgggagctgccgggacaagttcacgaccatctactcggcgctgctggtctgcgctgtcttcgcctacgtcgtagccgctttctgctggtacctcggcgtgctggcgctgccgcgcaagaagcatagggatgaccataacactgcaaaaaataatgacactagtgccgccaatgtgcatggctatgaacgcgaagaactggatgaggtcctgatgctgctcgccaccttcgcagtcaccatcacgtacgtggcagggctgaatccgcctggcggcttctggggcgacaccaaggatgggcaccagatgagcgacccggtcctgcaggagaactactccagacgctaccgggcgttctacgtctgcaacaccaccgcgttcgtcgcgtccctgctcatcatcatcctcgtcgtcgacaagaagctcaccgacaagctctccgtacgcttcgtggctctgtatggtctgaccatcacggcgctcctgggcctcatgggggcttacgccgctgggagctgcagggaggtccacgaaagcacctacgtcatctgcctgaacgctggagttcttgcctacatcttcctccaggtggccgtcgccgtcacagtgaagaatcgctgcagatgcttccaaactagcagattcctgctgaagcgccacacgctggaggcggccatgatactggacctgttcggcctgatcagcgcgtacgctgcagggagctgcagggacgagacgacctccatctacgtggttgccctggcaggggtcgtcctggtctacgtggtcatccacatcgtcttcttcacgctggaccacaaggacaaccaccgggacaaggagaagctggagaccaggcgcgaggtgctgctcctcctcgccatcttggctgcgacgctcacctaccaggctgggctgacgccgccggggggcttctggccggagaacgacggcgcccgcgggcaccgcgcgggctacccggtcctccacgacaactaccgcccccgctacagcgccttcttctattgcaacgcggcgagcttcatggcgtcggtggctctcattgttctgctcgtcaaccccaacctgtacaggccagggatacggtgctacgcgctgtacgtgtgcatggtggccggcatgtttggcctcatgggagcctatgccgctgggagctccagggatgtgcgcacctccatctatgtgttgacattggtggctgcggtgtttgcatttgtagccatagaggtattcattttctggatccgcccctacttccatctatgtgttgacgacattggtggctccggtgtttgcaacatctgtagtagaagaaagaatacaacattagaagagtcgccgccctctgactctagatcatcaagagaaaagaacggaggtgcaggacgctgcgagaaacaggcaactaaaacgtcggtggaaaaagcacagcagcaaaaagaggactctgacaagaacaagcgtgaatacttgatgctgctaggtgtccttgccgcgagcgtcacctaccagactggcctcaagccaccaggtggcctgtggcaggacaacagcggtggtcactcagctggcagctccatcctccaccacatcgacaaacgccggtaccatgctttcttctactgcaactccacttccttcatggcctccgtcgtcgtcgtcatcttgctcctgccatggactctccacggatacccattgccactatggacaatgcagacggctatttggtttgacatgctcggcctcctgggggcctatgcagccggcagtaccagggactgggagacatctaggaatgtcatctatttggtcatccctgtcctggcctatattgcagtctatgcagcagtgtcaatcttccgcaaggtaagatgcggccaccggcctacagcccacaacagcaagtctcaagggcataaatcatctggcaatgacgaagatcagccgtga

SEQ ID NO: 32398 - DNA, 783 bp, Zea mays
  Peptide Sequence Number=SeqID_74177
atggcgcacgagagatcagacgccagcagcgaggaggaggtgatggccggcgagctgcggcgcgggccttggacggtggaggaggacctccagctggtcaactacgtcgacgcgcacggcgagggccgctggaactcgctcgcccgatcagcagctggcgccgccgcggacgacacgccgctctcgtcgtcgtggcagcacggcggcggcgccgacgacgacggcggcctctacgcgtcgccggagctgcccacggacgcctgctggcctcccgcagactgctactactacccagccgccgctgaccaccagctactgaacaaccccgccgccgccgccgtcttcccggacctgtcaagcaccacggccgggtcgtcctctccgtcctcggattccggcgcggggacagcacaaccctggcccgcgccgctgggtggcgcagagtggttgaccaccggcgcctgctgcgacgcctccagcgccgccgccgccctgggcgggcagcagcaacaatcgtgcctggtctgggagacgtcttgggcgtcatccgagctccccgagctgggtgtcgcggacttggaaatcgtcaattcgacgtttaacgcatctggagcatgtatacagcctgtggttcacgttggtgtatggcgtgtgaattctagccatcaactcacgctgcgcgtgttcattttaattttttcactttacttctcatttattgtctgtggatatgtttcctttctcttcggacttaagttttacctttgccgcttatatgtttag

SEQ ID NO: 32399 - DNA, 1881 bp, Zea mays
  Peptide Sequence Number=SeqID_74178
atgggatgcctcgcggccctgagccgcttcatctcacgcctcggcgaaagaggtctgcctctgtaccgcctcttaaggaaggccgagtgtttcgcttggacccctgaggccgaggaagccctcggcaacctgaaggcgctccttacaaaggcgcctgtcttggtgcccccggcggacggagaagccctcttggtctacgtcgccgcgaccactcaggtggttagcgccgcgattgtggtcgaaaggcaagaggaagggcatgcattgcccgttcagaggccggtctacttcatcagcgaagtgctgtccgagactaagatccgctacccacaagttcaaaagctgttgtatgccgtgatcctgacaaggcggaagctgcgacactacttcgagtctcatccggtaactgtggtgtcatccttccccctgggggagatcatccagtgccgagaggccttgggcaggatcgcaaagtgggcggtggaaatcatgggcgaaacgatctcgttcgcccctcggaaggccatcaagtcccaggtgttggcggatttcgtggctgaatgggtcgacacccagctgccaacgactccgatccaaccggagctctggaccatgtttttcgacgggtcgctgatgaagacgggggccggcgcgggcctgctcttcatctcgcccctcggaaagcacttgcgctacgtgctgcgcctccatttcccggcgtccaacaatgtggccgagtacgaagctctggtcaacggattgcggatcgccatcgagctaggggtcagacgcctcgacgcccgcggtgattcgcagctcgtcatcgaccaagtcatgaagaactcccactgccacgacccgaagatggaggcctactgcgacgaggttcggcgcctggaagacaagttcttcgggctcgagctcaaccacatcgctcggcgctacaacgaaaccgcagacgagctggctaagatagcctcggggcgaacgacagtccccccggacgtcttctcccgggatctgcatcaaccctccgttaagctcgacgacgcgcccgagcccgagaaggcgcccgggggctacacgcacctgctggtcgccatcgacaaattctccaagtggatcgaggtccgacctctgaacagcatcaggtccgagcaggcggtggcgttcttcaccaacatcatccatcgctttggggtcccgaactccatcatcaccgacaacggcacccagttcaccggcaaaaaattcttggatttttgcgaggatcaccatatccgggtggactgggccgccgtggctcatcccatgtcgaatgagcaagtagagcgtgccaacggcatgattctacaagggctcaagcctcggatctacaacgacctcaacaagttcggcaagcgatggatgaaggaactcccctcggtggtctggagcctaaggacgacgccgagtcgtgccacgggcttcacgccgtttttcctggtctacggggccgaagctatcttgcccactgacctggaatacggctccccgagggcgagggcctacaccgaacaaagcaaccaagctagccgagaggaatcgctggaccagctggaggaagctcgggacagggccttactacactcggcgcggtaccaacagtccctgcgacgctaccacgcccgaggggtccggtcccgagaactccaggtgggcgatctggtgcttcggctgcggcaagatgcccgagggaggcataagctcacgcccccctgggaagggccgttcgtcatcgccaaagttctgaagcccggaacatacaagctggccaacaatcaaggcgagatctacgacaacgcttggaacatcaaacagctacgtcgcttctacccttaa

SEQ ID NO: 32400 - DNA, 353 bp, Zea mays
  Peptide Sequence Number=SeqID_74179
ctgggctcctggcgactggcgatggcgacaggcgagtccgcgagtgcatgctgcaggagccgatgctaccgggcgccgccgcgccgggtgaagctgtgtcggtgccggtgaatgctgccatggccccggccgccagtggagtattggagtgtggacgagcgggcgacagtccggcggccgacggtggacgcgcgtgcgagggcgactgggcgagggcgagtgagggaagagggcttaggcaggcggcgacgcggcgtagcgggttgcctggagctggtattagggttaggcggcgtagcggcatagggggtgctaggatggccgggtgggcggctctgggctggaccggctag

SEQ ID NO: 32401 - DNA, 123 bp, Zea mays
  Peptide Sequence Number=SeqID_74180
atggccctatgggcctcgccttctatggcctatcaaggtcgaggccattctaggaagatcattgttgaggggatggtctccatcgaggcaacctccttcccttatgtgatatctcttggctag

SEQ ID NO: 32402 - DNA, 178 bp, Zea mays
  Peptide Sequence Number=SeqID_74181
atggagagagtacctggggtggaagagcagaagtcagtagaccaagttaaccaagctggtctagctgatgagagtaccacagtaccgtggctgaagttgggtcttgatgcgccaaaaagtgaagaagtcaagcctcaagaggctctcggtgggcaccagaatgcgcacaagaggggag

SEQ ID NO: 32403 - DNA, 285 bp, Zea mays
  Peptide Sequence Number=SeqID_74182
atgaagactgtccggaggcacaaccagaccgtccgcatcaggcttcatctgacctttgatgacacatttaatgtggttatagctgtcgtaattgaccgttgcaatctagtcgttggtcttacaggggtggaccgtctggaccaggcccgcggaccatacaagtgtggcagaaaggtggtgttgggggccttcttctccgccgaaggtcctctaagcaaaaacaccttcggcaagatgatatgcaagcagatacgacatgaagatatatgccgaagctacaagtga

SEQ ID NO: 32404 - DNA, 597 bp, Zea mays
  Peptide Sequence Number=SeqID_74183
atgaagctgggactggtcactcttggagatcaaggatgcaagtactatgctagggacatgtctatcccattgtggcttggtggaagacttcatatgatgctgagacttacaagaactatttctaggggagagtttatcagatgccgccggcgacgaggacgactcggagcagaccacccccatcatcgctgggtcgccgccgccaacgatcgcgcatgtgctccacctccaccaccatcccaccggcatcgaggcattttcgcgagtgatacggagctaggcgtggaagaagttcatgtctggatggtgcgtattctcatacatatgaatactggtggttcgcatttgcacgtcatctctaatcctgagcctgtgtgctgtctcgcattgtcatcctgcttccgattgccatcaccttctacacgacatagtggttcatccgcttccactccttgtgcctatgagtttcttggtgtaaatgagggatttgttatagaaatcatcctctcagacggcatgtcggtgccaaagatcatatcggcggtggagggggccgtcggcctcggcgaccatggccgagcggtgaaggactactag

SEQ ID NO: 32405 - DNA, 201 bp, Zea mays
  Peptide Sequence Number=SeqID_74184
atggctcctaagaaagtaaccactagggccaactcctctctgtacaaggccacgaaggcaatcctcgctgctgagaaaggcaaagtcaccttcgctgacaacaccctgcccctcacaaccgtgaacaacgggtctgacgtagaaaacagcaagcagagacccacctataccagagggcggcattcacacctgcagtcctag

SEQ ID NO: 32406 - DNA, 606 bp, Zea mays
  Peptide Sequence Number=SeqID_74185
atgagattggtgagcaactttcttgcttgtggaatactggaatgtggtcattaccttctgaaaagtgaagaaacttttgttactaatgttaggagaatgaaaatgccaagtgaagcgagaaaaatcatcaacaattacaagatcatacttacttcctccgatgctaaggtcataccggttaagtttgctaaaaatttcagaggaaaaatagaaagaagtattacgcttgaatcacttggtggctgtacttttgatgttcaagtcgcacagaatttgggcagaatcgtgtttcaatctgggtgggagtcgtttgttagtgcccatgacttgaaaatgtgtgacttgttggtattcaagtatgatgggatgtctcggatgaaggtcctggtatttgatcctagtggttgcgagaaagtaccgcctttttttgtcacgaaaaatgctatgagtggaggacggaagagagaagggccccttgacatttcaagcagcgatgctaatcttcccatgaaaacaccagagactaaaaagaaagcttggaagcaaagggacaggagtaggatcagtattaggtcatctagatccctatccagctcatcaggttga

SEQ ID NO: 32407 - DNA, 1272 bp, Zea mays
  Peptide Sequence Number=SeqID_74186
atggcgatttcgctggaacaatttgattatttgagatacataaacattgtgtgtgaagtatgtggagatattggttacagacaacttctgctatgttgcggagactgtaagcgttatgctgtgcaccagtactgtttggacaaagttgttttcgatgcaacgttgctagaatggttctgttatgaatgcctacaaaggcgtggtgaagttacttgcgtcgcatctctagaacaggtgtcaagtgaaagcccactaagtcatgctcattttggtcctctagtacatcagcgtactactaagagggtggagtcagtaacagggccatattcacccagtgatgactgtgaggaattattttcctaccctggcatagaaagcatcccaagtgttcaagaaataagtgtagatcccattaagacttcaagtatttctgaacatgataccatagaagcagctgcaagcagtgaaagattcacggagtgtcaaaaggctagctcctgtcgcgaggggataactgtgaagatggctatggcgccctcatcatatgagaactcaggagaagacattttctctgaaaatgtatttttggaatatgttttggcatataaatgttatctatctaaagcacaaaagaagagagtaatggagcttattcaggaaattcaacctgaattcacagtttttatatcaataatgcggaggggcaatgtgcgacctccgggtccttttctgggaattaacaaggaatatgcaaatgcacatttcccagataaaagcacaaatgtcactcttgagatgcctgacaagagcaagaagtggcatcccaaattctacagaagagatgagggagatatatgcctccttttaccgacaaaagatgagataagatgcacgtttatggtctatgttcttcatgaaacaactcattcttctagaggtgaggctggctttcaaatgggtggcccatgccctggtgcatctggtgtggcttcagaaatccatgttgaggaggaaccaaccactggggaacatgtttcttcagaaagtgatatgcgagaaattcctcatgaatctctctcgagaggagactctgatgatcaatttgagcctccatactttgtaccatgcaagagtcctctatctgaatcccaaaagagaatggttgaggagcgagtgcgagctatccgatctgaaattcccatttgtgtggcagtaatgaagaacaacaatgttggtgtcgctcaacgttggatgctagtggtagcattatag

SEQ ID NO: 32408 - DNA, 1719 bp, Zea mays
  Peptide Sequence Number=SeqID_74187
atggctaaagttaccacccatacaagtgccgaagcgtcacgttcttgtgaaaccattgggacagaatcatctaagagcaaccatgggaagaaccagcaggtggaccatgcaaaccctgtcgcattgaacactgagcagtctttccctttgattgtgaatagcttgggtacattgggagataatcaccagtatcacctcttagaaacaacagaagggttggcttgcaaattcaagaaagttccacaatcactcgcagcaccattgaaaagattagagaagagagacaatgtggttttgggatcaaataatttagggtcatcttgtttcacagctgaccttggaagctcggttcttggaaaaagtggagacaaatcgaatagaatgaaggatattggtgcaaacttgtcttccaaacacaatgatcatggcaatcaggcaaatcaacacactttagttggctcgaagaacatggaaggcaagtctgtaaaggctaaacatactgtggttgatgcacataaaaacacgtcttggacagtggactcactgataaacgtcaaggacaagtctgaagtatatggtgatagtaatagggatatcttaaatgatgtcacagtccagctggatcatagggctagcaatgagttgctgccgagaagcacggccaccaatataccacagctagccactctggaaaacgatgttgtggacacagtcatgccatattcacccaatggtggttgtgaggaatcattttcctgccctggcataaaaaacaccccaagtgttcgagaaagaagtgtagatcccattaatatttcaagtgattctcatgataccatagaagcatccgaaagcagtgaaagattcatggaatgccaaaaagctagcttgtgtcgtcgcaggaaaactgtgaagatggctatggtgtcctcatcatctgaggagtcaggagaagacactatctctgaaaacgtatctttggggtatgttttggcatgtagaagttctctatctaaagcacaaaagaagagagtaacgaagcttattcaggaaattcaacctgaattcacagtttttatatcaataatgcggatgagcaatgtgaaactcccaggtcctcttctgggaattaccaaggaatatgcaattgcacatttcccagataaaaccacaaatgtcactcttgagacgcctggcaagagcaagaagtggcatcccaaattctacaaaagagatgaaagtagaaagaacttgcttatgggacaatggctagactttgtccgtgacaatcatgtgcaggagggagatatctgcctctttttaccgacaaaagatgagataagacacacatttatggtctatattcttcatgaaacaacccattctagatgtggggctggctttcaaagggttggcccatgccttggtggtgcatccagtgcaaagatggcttcagaagttcatattgaggatgaaccaaccgctggagaacatgtttcgtcggacagtgatatgccagaaaattctcatgaacctctggagagcggagactcggatgatccatttgaacctccatactttgtaccatgcaggagtcctctatctaaatcccaaaagagaatggttgagcagcgagtgcgagctatccgatctgaagttcccatttgtgtggcagtaatgaagaacaataacgttggcattgctcagcgttggatgcta

SEQ ID NO: 32409 - DNA, 324 bp, Zea mays
  Peptide Sequence Number=SeqID_74188
atgtcttcttcctcatctgcttcgagtgcgtcgtcgatcggtccgtcgtccgaggataccctaagtgatttggtggcaacggagttgcagctgggccacaccgtggagtttggcgtgtcgaggattttctcggtttgcgtgcaggagatgcaacaacttggatacttcgacgatggtgttgggcgggttccgggcgccgaggaaatccctgagcctgagggcgagttggttgtgtttgagtcgtttttccttgccggccttcgcctcccggcgcatcgtttcgtagtggaggttttgcggagatttgccgagcagatccactag

SEQ ID NO: 32410 - DNA, 1524 bp, Zea mays
  Peptide Sequence Number=SeqID_74189
atgggatgtctcgcggctctgagccgcttcatctcgcgcctcggcgaaagaggtctgcctctgtaccgcctcttaaggaaggccgagtgcttcgcttggactcccgaggccgaggaagccctcgggaacctgaaggcgctcctcacgaacgcgcccatcttggtgccccccgctgccggagaagccctcttgatctacgtcgccgcaaccacccaagtggttagcgccgcgatcgtggttgagagacgagaagaagggcatgcattgcccgtccagaggccagtctacttcatcagtgaggtactgtctgagaccaagatccgctacccgcaaatccagaagctactgtacgcggtgatcctgccacggcggaagtcgcgacactacttcgagtctcatccggtgactgtggtgtcatccttccccctgggagagatcatccagtcccgagaggcctcgggtagaattgcgaagtgggcggtggagatcatgggcgagacgatctcgttcgcccctcggaaagccatcaagtcacaggtcttggcggacttcgtggctgaatgggccgacacccagctcccgacagctccgatccaaccggagctctggaccatgtttttcgacgggtcgctgatgaagacaggggccggcgcaggcctcctcttcgtctcgcccctcggaaagcacctacgctatatgctgcgcctccacttcccggcgtccaacaatgtggcagagtacgaggctctgctcatcatcgaccaagtcataaagaactcccactgccgcgacccgaagatggaagcctactgcgatgaggttcggcgcctggaagacaagttctacgggctcgagctcaaccacatcgcccgacgctacaacgagactgcggacgagctggctaaaatagcctcgggacgaacaacagttcccccggacgtattctccagagacctgcatcaaccctccgtcaagaccgaggacacgcccaagcctgaggcaccttcggctccgcccgagaaggcacccgggggctacacgcacatgttggtcgccatcgacaaattctccaagtggatcgaggtccgacccctaaacaacatcaggtccgaacaggcggtggctttcttcaccaacatcatccatcgctttggggtcccgaactccatcatcaccgactacggcacccagttcaccggcagaaagttcctggacttctgcgtggatcaccacatccgggtggactgggctgccgtggctcaccccatgacgaatgggcaagtggagcgggctaacggtatgatcctgcaaggactcaagcctcggatctacaatgacctcaacaagttcagcaagcagtggatgaaggaactccccttggtggtctggagtctgagaacaacgccgagccgagccacgggcatcacaccgttctctctagtctatggggccgaggccatcttgcccacagacttggaatacggttccctgagggcgagggcctacaccgaccaaagcaactga

SEQ ID NO: 32411 - DNA, 468 bp, Zea mays
  Peptide Sequence Number=SeqID_74190
atgggcaagaacaagaaaggcagcagctcttcgcatcacttgggcgacaagcgcaagcgcgagccaactcctccttcggaggacttcgacgactcggaatactcggaggaggagttctcctccgagtccgagggttctccggctcccgcctctcccccggcgtcgtctgatgattcagacgactcccaggggatctccgcggaggtgtggacctacatccgggacgtcgagcgtgccgggctcgagggctcagatgagtcggagtactcctcggacgaggagaatccctctaactcgtccgaggagggcagcggcggcgacggtggtgacgtcgacgacgacggaggcgacggtgacggcggcggcaacagcggcaagggcggaggcgacagcggcgatggcggcaacggtaacggcggcagcggcagcaagggcagcaacaaggccagcaacaaggccagtggctaa

SEQ ID NO: 32412 - DNA, 243 bp, Zea mays
  Peptide Sequence Number=SeqID_74191
atggccgaccagcttgccatggtgtcgcgcgtccttgcgccctacttgtccctgaccctcgcgctggctcgcctcgtcgccgatttccaagaaccagcgccatcagcttgccgcaacatcatcgtttactccatggggctcatcgtcgattttgtctttcggagagtgatcctggagttcaataaaaatgtgagagaagtccgtgcaacaagtgcaaggagctcgaccggatgtctaaactga

SEQ ID NO: 32413 - DNA, 306 bp, Zea mays
  Peptide Sequence Number=SeqID_74192
atggccaccccgttcgacgggttcccgcaggagaatgtgaggttcgaccctggacgtgggcccgaaatttttttagaccttctcggcttgagcccatttaatctgaagcatgatgagattagaatggaccaaccccgcacagatctagcactacgcggcacaaatgacagtgatctgacgaccgaggacgtatgcgtacgcgcgagccagggggacttgcatggtgaccgattgtacgggtgcaatgcagcaggcatccgcttgaggtcgaggcatgaggcatcgagggccgcctgggcgccatga

SEQ ID NO: 32414 - DNA, 423 bp, Zea mays
  Peptide Sequence Number=SeqID_74193
atggagacaccgccacgagggaaagccaagcaccggcagtccggcacacaggcgcccgagtttcccgtcgagcccatgacgcgacctccgaggcaggcataccaggccatgggtcactgccgcgtgcccgtgtccgtgtctcgttggcaacagaagcgcgcgctccctgcgcaacccacccagcatctccagttccgcctacaagccgatgacaggtgggcccatgacctcagcttcgctctcatcccgcgcagtctcgcgttgtacgtctgccgcgtgggccacatctgtcagaaccatcccctccgccttcgcctgtccggtattccgctcagcgctgccgaaatcgtgcgccggtatcttactgccgccgcgatgccgctgtgcgccgtggccgtgtctccttgccgtcttcagtcgatg

SEQ ID NO: 32415 - DNA, 1722 bp, Zea mays
  Peptide Sequence Number=SeqID_74194
atgtcctcggcggcgggcggtggatacggggccggcggcgcggagcatcagcacctgttgctggggcaggccgcgggcgcggggcagctctaccacgtgccgcagcacagccgccgcgagaagctgcggttcccgcccgacgacgcggccgactcgcccccgcccactgcctggccggcgcccccacccttctactcctacgcttcctcgtcgacatcgtcctactactcgccgcatagccccacgctggcgcacgcgcagctagtagcacacgcgctacctgcgggcgccggggtccagatcccgagccagaacttcgcgctctcgctctcttcggcgccctcgaaccctccgcccgcgccgcggaggcagctcgccgcgggggtagccacggggccgtacggcccgttcacgggctacgcggccgtcctcgggcggtccaggttcctgggccccgcgcagaagctgctcgaagagatctgtaacgtcggcggacggcccccgcacctggaccctctctccgacgagggtatgttcggcatggagcatggcatgggcggcgttgaccgcgctaccgctgaggcggtcgctgtctccggcgccgagcagcagtggaggaagaccaggctcatctccctcatggaggacgtttgcaggcgatacaaacaatactaccagcagctgcaatctgtgatctcctcgtttgagacggtttcggggctgagcaacgccgtcccctttgcttccatggctcttcggacaatgtctaagcatttcaagttcctgaaggggatgataatgagccaattacggaacacaagcaaggtcgctgccagtgatggtattggcaaggatgatatggcgaactttgcgcttatgggtggtggagcagaccacctgaggggaaacagcgtgaacacgttcagccaggctcacaacatttggaggcctcaaagagggcttcctgagcgtgcagtgtctgttcttcgctcatggctgttcgagcacttcctacatccgtacccaactgatagtgacaagcagatgctggctaaacagacaggcctaactaggaaccaggcaactagcattgtttccaatattcacgaagacaaatttgctgtgcccctactaattaagctcgacgagcaggtgtcaaactggtttatcaacgcaagggtgcggctctggaagcccatggtggaagagatccacaacctggagatgcggcagcagctgcagaagaacacgtcggcggtggacaagacccaactcggcatgcagcagctgatccagcactcgtcggcaaactcccggcagcgggggcaaagcagcggcggcacgacgagaaaccaagacgagctgcccccgcggatgccccacgacatggcaggccagggccagcagcagcagcagcaggtgagcttcgcttacgctgggctccccgcgcaccaccacggcctcgcgctgtcgcacccccagcagcaagcggaagcggtcagcgccgtcggcggtggcgtttcgctcacgctgggccttcaccagaacaacaaccggacctacgtcgccgagcctctcccggccgcgctcccgcaccgtttcgggctggaggacgtgagcgacgcctacgtgatgcaggggacgacgtcgttcggcggccaggaccgccatttcggcaaggggatgggcggccaccattttgtgcatgacttggtcggctga

SEQ ID NO: 32416 - DNA, 642 bp, Zea mays
  Peptide Sequence Number=SeqID_74195
atgaccgcgtcaaaaaaggctggcccctcggaagggttcgacaggcgcctcagagcatgcagagcgagggatgactatgggtacatccgttacatggccgaggctcgggctacgctcccgaggagcgattttgtaacaaaatctcaccagagggaggcatcgagccctcggaccctatcgaacgggtccgggtccggcaaatcacctgcagcctcaggcacaacaggaagctccgcctcgcccgaccttgggcctcgacctcaggaggaggtctccgcctcgcccgaccctagggctcggcctcaacctcggcctcgtaaggtggtctacgcctcgcccgaccccagggctcggcctcaacctcagcctcggaaggtggtctccgcctcgcccgaccccagggctcggactcaacctcggcctcagaaggaatcgcgtcctcgcccgacctcggcctgggcctcaggagaagtctccgcctcgcccgaccttgggctcggaccgaccgcgccatggggatacatcattaccatacccctagctagctcaggctacgggggaacaagaccggcgttccatctggctcgccccgggctcaggcgctcctccgacggccacgttaccgcgtacacatggctctag

SEQ ID NO: 32417 - DNA, 219 bp, Zea mays
  Peptide Sequence Number=SeqID_74196
atggagttcagcatcatatcttcatctgcaaactccttatcaaaattaagcaaggaaacaggaaaaacaattatggagaagtgggttgtgtacagccaaaaggctgctcggtctgggtgcaccggactgtccggtggtgcaccagacagtgtccggtgcgccaggctggctctggcgaactggctgcccttgggtttcgtcagcggcgtacggctataa

SEQ ID NO: 32418 - DNA, 168 bp, Zea mays
  Peptide Sequence Number=SeqID_74197
atgaagaagcttgctgagggagcaatcgtggtttgctatgtatgccacaaggccataagtcctatgagtgcaaggttaaaaatgggtaaagaagaaagcacattggatcatatcatcgccaagtgggttagtaatgactatggattcaaattcccctacccatgttag

SEQ ID NO: 32419 - DNA, 531 bp, Zea mays
  Peptide Sequence Number=SeqID_74198
atggtctacaagctcaacaagttctctatgcacacgtcattgagccctgatggaaagcttgttattattgttggtgatgacacagatgctttacttattgatgctaattcaggaaagactattcattccatgaaaggtcacttggatttctcctttgcttcggcttggagcccagatggcctgacattcgccacaggtaaccaagacaaaacttgtcggatttgggatgccaggaatctcaccgagtctgtccatgtcttgagaggcaacgttggagcaataagatctattcgttttacatccgacgggcacttcttgtcgatggcagaagcagcagactttgtccacatctttgacatcaaaagtgactacaataagagacaggaattggatttctttggcgaggtatccggtatgtccttcagccccgacacggacacactttatgttggaatctcggacaggacatatggcagcctacttcagtttggccgcctctacaattattcatacctcgactcactactatga

SEQ ID NO: 32420 - DNA, 150 bp, Zea mays
  Peptide Sequence Number=SeqID_74199
atggcgatagaatttctggtagtgtcattgccctgttgctgcattggcgacggtggaggcggcggcgaggtcctgaggcggcggtgtaggctcaaggcggtggcggcatgggctagagacgaaggagagttcccgacgggaattaattaa

SEQ ID NO: 32421 - DNA, 267 bp, Zea mays
  Peptide Sequence Number=SeqID_74200
atgactgacaacaagtcacgatcaaccacagagttcaagcctcgggcacaacaggaaactccgcctcgctcgacctcacgctccggcctcgggaggaggtttccgtctcgcccgacctcaggctctagcctcgggaagagatctctgcctcgcccgacccccggactcggcctcgaccctggtctcgggaggaatcgcgtcctcgcccgaccccggcctcggcctcaagagaagtctccgcctcgaccgaccctgggctcagactga

SEQ ID NO: 32422 - DNA, 1254 bp, Zea mays
  Peptide Sequence Number=SeqID_74201
atgcagcttgggttcttcaaattcagcattagtatggaggaggttttcaaaatggtggaggagaagtgccttcactcatacaagatgctaccttcagatctttctattggcaagctgctgagtgagccaatctcttgtgaggctgctgtgggcataagtgatgatgtggctggtgggtcatcagtccttgaatcctcagaaccttgtttgcagaattcacttgttgcttggaatcctgagttggctcactgtaatcaaaagacaacccatgatactactgatatatccaaaggcgaagagcgggtaagaatacctgtagtaaatgaatttggcagcgagacctgtcctccatccttttattacataccaagaaatcttgtcttccaaaacgcttatgttaacatctcgatttctcgaatttgtgatgaagattgttgtgctgattgttctggcaactgtttatcagcgccagttccatgttcttgtgcaagaataacagggggcgagttctcctatacacttgagggcctgcttaagacagcattccttgatgaatgtacctcagtgaatcatttcctacaagagcaccataggttctactgtccagtttgccctcttgaaagatctaagaacgaaggctcacctggtccatgtaaaggtcatattgtcagaaaattcattaaagaatgctggagtaaatgtggatgtggcatgcagtgtggaaaccgtgtgattcagcgtggtataacatgcaaattacaggtgttctttacacgtgagggtaaaggctggggagtacgcacagtggaagatctcccaagaggtgcctttgtctgtgaatatgttggagagatactaacaagtgctgaattgcatgaaagagcaattgagaatgcaagaaatggtgtagtattgagggatgaggacgcttgtagccttgatggttcattttatgggaatgtcgggcggtttatcaaccaccgatgctacaatgcaaatttagttcagatccctgtagaagttgagacgcccgatcatcattatcaccatctggcatttttcacgaacaagaaagtggaggcatttgaagagttaacttgggattatggcatcgattttgatgacatggaagggcccagtaaaccgttcagatgcatgtgtggaagtagatactgccgcgatccgaacaatccaagtatgttgcccttttcagtgcttcctttggatgtgaacggagaagggatgtatgtatga

SEQ ID NO: 32423 - DNA, 438 bp, Zea mays
  Peptide Sequence Number=SeqID_74202
atggattactctttcattttactgatgcggcacccgtacttgcggatgattgtcgcaatgctgctgatatcaaaacatgatagcttaatgatggagcgttttgttcaggacagtggtgctctattacacactctcatgcagcagacacatgttattgagcaaaatgatatgagcattgatgagtactactcagcctttgatcgtctgatgagtgctttgacatctatggtgcctgcttgtactgctgatccatgtccagctcataagtttattgagaagttcttcacttatagatttgttatgggcgttcgggccgagtttgattctcttcgtgctcgtttacttcaaggttctgacactctcacaatggctaaggcgttgtctgatttacttgctgaagagactcgtcttaaattctctgtcttctactggtactaa

SEQ ID NO: 32424 - DNA, 1401 bp, Zea mays
  Peptide Sequence Number=SeqID_74203
atggtcacagaaaaatctagaggtagtccgggagaaaatctggaggagtggggagttgaccctaccaaagagataccttcaagtgcagctacaaccaagtacactgatttcctacttgcaactgcggctggaaaagttgatggcacaaaaggttctgacaaaatggttactccatttgagaagactaaaattgctgcatacattgttggggccataactccatgcatgaggctttatgcatatctaggcaaagaactcatggctttccttaaacaagatgaaaatcatccatataagaaatggattaacacatatgcatccagtgattttgagaacaatgcactccaaatagaagaattgctggacaaactgagtgtatcattaactggtgaggaacttgagattattggcaagctctaccagcaagctatgaaactggaagtggagttcttttctgctaagcttgtagaccaacctgttgtagctccactttcaagatattgtgatccaaaatataaactcttgatcttctctgattttgatttgacatgcactgttgttgattcgtctgccattttggcggagatcgcaattttgtcatttccaaaaggcaagtcaagtgggattgataataacctcgaccgtgcaaaatcgggagaactgagaaaatttgtggaaacatgctctctaagcaatacatggaagacaaagtcactagattatgataaactgtataaaggcctggaggtgcttgctgagtttgagaaggctgcaaattctagggttgtcgactctggtgtcctgaggggaatgaatttagaagacatcaggaaagctggggagcggcttattcttcagggtggctgtaaaaatttctttcagaagattgtaaaaacaagggagatcctcaatttggatatccatattctttcctactgctggtgtgcagagcttataagatccgccttctcatcagccggctgtctagatggtttgaacatacatgcgaacgagttcgcctttgaggaatctgtttcaactggtgagattgacagaaagatccagtccccgctagacaaggttgagaagttcaagagcatcagaagcgacgcggacagcacggtgccattcctgtctgtttacatcggagactcggccggtgatttgctctgcttattggaggcagatatcggtatcgtcgttgggtcaagcacaagcttgcgtagagtgggcagacagttcggtgtttcctttgtcccgttgtttctcggtctagtggagaagcagaggcaactgatggatgaagatgcgtccgtgttcaagccgcggtctggagtcctttatacggtctctagctggtcagaaatacacgccttcgtgctgggaagcgatttcagctga

SEQ ID NO: 32425 - DNA, 800 bp, Zea mays
  Peptide Sequence Number=SeqID_74204
cgtacctgagccccgcaccctggacgggcggaagctgctggtgggcgcccaacttcgcgtcggcgggcgtgggcgtgctcaacgacacgggggtccagttcgccaacatcatccgcgtccagaagcagctgcgctacttccggcagtaccaggaccgcttgagccgcctcgtcggcgaggacgccgccgcgcgcctcgtccgcggagcgctcgtgctcgtcaccctgggcggcaacgacttcatcaaacaactactacctggtgcccttctcggcgcgtacgccaaggtgctgcggcagctctactcgctgggcgcgcgccgggtgctggtcacggggtcgggcccgctggggtgcgccccagccgagctggcgctgcggggcagccgcgacggggagtgcgacgccgagctgcagcgcgccgccgcgctctacaacccgcagctggtggacatgatcaagggcgtcaacgcggagctcggcgccgacgtcttcgtcgccgtcaacgcctaccggatgcacatggacttcatctccgacccggcggcctacggcttcgtcacctccaaggtcgcgtgctgcggccagggaccatacaacggcgtggggctctgcaccgccgcgtccagcgtctgcccggaccgcagcgtctacgccttctgggacaacttccaccccacggagaaggccaaccgcatcatcgtcagccagttcatggacggcccacaggagtacatgcacccgctcaacctcagcaccatcctcgccgtcgacgcccgcgccgccgccaccttcaactag

SEQ ID NO: 32426 - DNA, 165 bp, Zea mays
  Peptide Sequence Number=SeqID_74205
atgccgctcaagcgagagaaccaggttgatgttcttgtgcagctgaccgctaatccctttcaggagctcaaggaccacaactacaaaaggtggaaaacacgttggaggctgcacagttatataccaatgtggcacatgatgcctatccatccacatgtagattag

SEQ ID NO: 32427 - DNA, 717 bp, Zea mays
  Peptide Sequence Number=SeqID_74206
atgggcagcaacacggaaagggccaggaaggcgttgggcgccatgaagctgatcggtttctctaagaagcaggccatcccagtactcaaggaactcctcaaaatcttcaacaacaactgggagcccattgaggatgagagctaccgtgccctcgcagatgccatcctcgataggcaagacagcaagcaaacccctccctcccaacagggcacccaagcagcccatgcggacttggagcctcttagatcaacaagggacgatcggcaacaatatctttctgctagccttgatgacacatgtgaagatgataatgaaacacccctggtcaagaggcccaggatgggcaccgctaatttcagaccagagctgcagccaccacagcaatccagtgtttcaacccaaggtgctctgcctgcttcaccacaaacgagtcgtcggcaaactcggtccttgactgtagagccacacgctgctggccatgaatatcctttagctgtcaacgatgctctagttgtgaaagaacccaaaccagaaccacaaattgatagagcagaagattttgtggctggtcctaatgccacacaactcaatgatggatcttcagcgactagatgcattcatattcagatgctcacagacgtatgccactccgttgtgcccctgagggctatctttcccgatgtcatccgggacagtgtctccttccctcatgaatga

SEQ ID NO: 32428 - DNA, 417 bp, Zea mays
  Peptide Sequence Number=SeqID_74207
atgacgagtcggcgacacggcgtggacgcgtggttgcgggctcgtgggctctcgggcctcggcggtgctccgggcaccggcggggcgagcggtgctgcggcctggcgacctgcggcagtgctccgtccgtatggcggtccggcctctaggctccaggcgagcggcgctgcgggctgcggcgggccggcggcgccacttcggggtccagacgtcggggcgtgggcggctccacggctagtgggcgacggctggtatagagtaggaaggatgttcatgggcctgggtgcggctgtagctaggcggctagagctgggctgtcatgtgacgatgagcctattcgctttactgggccgcgaccggggctgcagcctaggcagccccggttggagatccgcccttatatgtatatggctttaa

SEQ ID NO: 32429 - DNA, 420 bp, Zea mays
  Peptide Sequence Number=SeqID_74208
atgtggatagaattttttcatctaattaagtgcaagaaaaggaaggctcatgactttttacctgagtacttccaattctctccaatatatgctgctcagaagtggtgctactggattgccctctcaggatatctattgtgcttacagctggaaacttttgttgcttttttagttctaaagatctgtgggagatcactgacacaatcgactggagtggtaacagcatggaggggccgacagccagcagttttgagaacatttagccagaggcttagcaggggtttcaatgatgctgtcaatgggtttccagatgacggttggtcactgatgagcagtgacggtgctgaggttgttactattgctatcaactctactagtggtaaatgtgttgttgattgtttttgctctggtcgtttttga

SEQ ID NO: 32430 - DNA, 885 bp, Zea mays
  Peptide Sequence Number=SeqID_74209
atggaggtcgagagtgcccgcgcagaggcccaagctgcctacaaccgtgctgtcgagcttgagctcgaggtgaagagcatgagaacctaccgcgagaagatggagtctaccacgcgtgccggggtggaccgggcgcacacactttttgttgatgcgtaccgcgacctcggtgcacaaactgcccccttcgacaagtctggaggggaggtggggacccattttctcgggtggctgcaggaggagctggagtcgctcccatccatcatgacgggcctcatgcacttcgaggcctttgaccagagcaatgaggacttcatcgctggtgtattccaggtcgaagatgacatgttgaagtgcatggttgggcgctttacgataggatgtggggtcctcacggttgcggcgtcgtccaggagagggatgaccgagcactggcatagtttgatagtacttagtagtgatgaatctgatgttgactcgtggtcatcgaaaggtgagcagttgatgagcccatttgctaggatggaggatgagtctttgaaggatgacttaaattactttatggcgttagatttgtttgtggcagagtcttcgcctagggttaccctcaccacagcagagacttcgtcttgggttgccccgactgtgttgcagggcaggagaaagatcagagtgttgaaacagagtgtgggaatgttgggtgagtctttgcaaggcatcagagtccccaaaggcaccgccgtatgggaatggagaggtctcatccataggaaggagtgcggtcggaggaggcaactcgctggatcatccttgtgccgacgactgggcagtgtttcaaagagggagatctgcaggctctatttgatggcgatgagcttagactga

SEQ ID NO: 32431 - DNA, 207 bp, Zea mays
  Peptide Sequence Number=SeqID_74210
atggcccgcgcccgcgcctataaagcccccaggggccttgaccgtacccctctgcacgcgctcgacctcaccggagcccaaacccaccggcgtttgcccgtgcacggcgtgtccgcggctgcccgatcccctgccaccgtaggccggccagcagaccccctcccaaccccgtccagtcctcggagaggactgagcacacctcggtga

SEQ ID NO: 32432 - DNA, 207 bp, Zea mays
  Peptide Sequence Number=SeqID_74211
atggcccgcgcccgcgcctataaagcccccaggggccttgaccgtacccctccgcacgcgctcgacctcaccggagcccaaacccaccggtgtttgcccgtgcacggcatgtccgcggctgcccgatcccctgccaccgtaggccggccagcagaccccttcgcaaccccgtccagccctcggagaggactaagcacacctcggtga

SEQ ID NO: 32433 - DNA, 372 bp, Zea mays
  Peptide Sequence Number=SeqID_74212
atgtcgactatgtcgaaggtgacttgttcacttcgtgcattcggcgtagtgccaaatgacagtggtagctcgattttgccaattaggaagatcccatccttctactcggtagtttatcaccattgcattggcgtggggtgcactacggagatcgacatctctggcatcgaaggcaatccctggttaggtgtgctgagtcttcgccatggaaaagataatagaaccttcgctgctgttggcctcgacctctgcccctacttctggttgcgttactgtcgcggccttgctttagagggtattcgtgacgacgagcggtgtccccagttcgctgctgaatggcgatgttctgcacctgggactgtggccggttaa

SEQ ID NO: 32434 - DNA, 663 bp, Zea mays
  Peptide Sequence Number=SeqID_74213
atggattgggatgctccggcattgacgagcttcgtcgccgacttgtccttccgccacctctgctgctacggggccggaatcgcagggaacgccttcgccttcgtgctcttcgtctccccgctccccacattcaagaggatcgtccgcaacggatccacggagcagttctcgtgcacgccgtacatctactcgctgctcaactgcctcatctgcatgtggtacggcctccccttcgtctcctacggcgtcgtcctcgtcgccaccgtcaactccatcggcgccgtgttccagctcgcctacaccgccgtgttcatcgccttcgccgacgccaagcagaggctcaaggtctctgctctcctggccgctgtcttcctggtgttcggactgattgtgtttgttagtctggctttgttggatcacaaagcccggcaggtgttcgtcggatatctcagcgtcgcgtccctcgtatgcatgttcgcgtcccccatgtcaatcgtcaatctggtcatccggacgaagagcgtggaatacatgcccttctacttgtcattatccatgtttctgatgagtgcatccttcgtcatatacggagtgctgcttggtgatggcttcatatatgtacggttcacgtttcctatttgcttggattggaagagtgtctaa

SEQ ID NO: 32435 - DNA, 798 bp, Zea mays
  Peptide Sequence Number=SeqID_74214
atggatgaagtgcaaatcaacaagaagaatcatagaaaagagaaaaaggaaaagacttggctggagcagccaagactcagcgcagtctggcacaccggactgtccggtggtgcaccggacagtgttcggtgcgccaggctggcttctggcgaactggccactctcgagaattcgtcggcggtgtacgactacaattttcggactgtccggtggtgcaccggactgtccggtgagccaacgaccgccagcgcaacgatcagccgccaaatccgcgggcgacgcgtggcccactccaacggtcggcaggaggcaccggactgtccgagactgctagacaaggctatagctctggagtacaaacgaattgagctaggagagaaaagaagagctactaaccaaggacaggctggaagtagtacccgtccccgttatgctgcacctcaaggcacactagctcgtggtagttccaggcaacagactcaacagacccaatatcctcctcaagcaaacaccccggcaggacttgttgctcctaatgcatccacaaacaggtcgtgctttaaatgtagacaggctggacattatgccaactactatcccaagagggctgcttacaccactccagctcagataaagcaaggtctggcctcaggagttaagagtcaggccttatctatcaatcggggtcaggtcaaccatgtggaagcagaagctgtgtgtggtgaacccgaaaacccagaagaggaggcggttgaaggagaagaaggcagtgaagaaggcaatgagcaacaggattag

SEQ ID NO: 32436 - DNA, 369 bp, Zea mays
  Peptide Sequence Number=SeqID_74215
atggagaatgagcaattaaggcaagaggtggctcacctaggcaagactttgtatgacaagaaaggcaaagcaaaacaaaacaaacatccacaagataacaccactacaggagtgaacaaccctgtagaggcagaagttgtggtttgtaggctatgccacaagaaggccataagtcttaccaatatgatagcaatcaaggccaacaagcaagccaataagagaaagggggccaaaggagattatctcaactatgaaaagcaccaagaaggtttggatcccgagagggaagtgagaagtccgagagacttcgccaaattgggaagtgttgggggccttcggcttccgaaggtcctcaaaaacatgatttga

SEQ ID NO: 32437 - DNA, 159 bp, Zea mays
  Peptide Sequence Number=SeqID_74216
atggcgagagtagcatgtacccttcgtggcaagaggctggacggtggtgtatctgtgctctcggtgaagaagcagcaaacttttgttgcttctgttccatggtggtacctaaagaagagaatcaagactaaagctgcgggaggaaaggtcctccgttaa

SEQ ID NO: 32438 - DNA, 351 bp, Zea mays
  Peptide Sequence Number=SeqID_74217
atgacacatgactttgccatgactgctaagttgccaccatacgaggatatggatgtgattgtgaccatcatgatcttggtcccagtagttgtacatgttttcatgcgcttcgatgttgcacatctctttaggtgcttcgccaatctttctctgaagcttagaaagatgaagcattttctccttgcgcttctcgacttgcagatggatgagttcaaggttgctgatctcctcatcaagctcctcttctcggggtggtgggctagtgaccttcttcttctatttccatgcttctctaatgagagcttcgttcccttgattaggatcaaggggtgcgaggatagagctagttga

SEQ ID NO: 32439 - DNA, 372 bp, Zea mays
  Peptide Sequence Number=SeqID_74218
atgggcaaggacaggaaaggtcggggttcgccgcgtcgcaccggcgacaagcaaaagcgtgagccaagtcctccctcggaggacttcgatgattccgagtactcagaggaggagttttcctccgagtccgagggatcgccgatgagtcggaggtctcctcgggcaaggagaaactcttccggctcgtccgaggaagggagcggcggtgacagcgacgacgagggcgacgacagtggtgaacgtggcgacggcgacagcggcaacgacgacggcaagggcggtggtggaggcagcggcggcggcaggagcgatgacgacagcaagggcggcagtggcagcagcaaggccagtggcaaagcaccactggcttaa

SEQ ID NO: 32440 - DNA, 390 bp, Zea mays
  Peptide Sequence Number=SeqID_74219
atgcgcgcaccatcgttttcaccgtcgtcggacgtcttgttcgtcttcccggccttcgccccattcttcctccccaacctactgcccccacccacggtcacaactgcgagccgaccgatgctcgtcgatacagatctaagatattggacaaccaagacccgtagagcggcaacaatcgcatatgctacggagttggtggtggtggtgtgtcgcctcggtgggtccagggctgggaaggtagtcgctgtgggggacatatatcccccgggtccattagaaggcgaaaaccctgctcgaggccacaagctagttgccctgcaaggtcgccgcatcgtgggacgggcaaagactacagttgaaatgggtcgacccaagaaggcgatggcttaa

SEQ ID NO: 32441 - DNA, 231 bp, Zea mays
  Peptide Sequence Number=SeqID_74220
atggaggatgaagacaggcttgattatattgttagaaatcaatcaaaattacgagctgaatatgtacaaggtatttttgatgcagtagaaaaaggaatatatgacgccagtcgaataggaaaaaaggtgttattaccatctagccatgttggatcaaaacgatgttacgccatttatgttcaggcagaacactacattcttctcaactttgatctacatatatcgaaggag

SEQ ID NO: 32442 - DNA, 174 bp, Zea mays
  Peptide Sequence Number=SeqID_74221
atgtcgggaaatatggtaaccgaaggagcgaacttagctaaaggtatgcttcaggatatggttgatggtgtgacttggcctaccaccctgccaccgggttggacggtcgagtgggatcggatgctgttccagcaagagaggagcaggaggagtagtgggctaggccttgcctga

SEQ ID NO: 32443 - DNA, 252 bp, Zea mays
  Peptide Sequence Number=SeqID_74222
atggcgagcactctgcagagcctgggcttcttcgtcatgaaagacggctggggagcatcttctctggggaacaccgcgcgtcatgggtgccttgccgaagttcagggacggcgtgattgctcatcgtcgttcatgctccaccgtggcgccacccatctccgtgggcagtgggctgcatcgtccaatcgaccgcggccagatgttgatcgtgcggccaggaacgcagaataccccttcgccgtgcctatttga

SEQ ID NO: 32444 - DNA, 291 bp, Zea mays
  Peptide Sequence Number=SeqID_74223
atggatgtggacagtaaggcagtcaaagatgcatgtgttgatatgataaaaggagggcagcgccagatgaggtataggctgaaaaggaagtacttcaccggggttcctgcaaatcaagtgaggactacatcgcctgttccatgtatgactgatgaccaatggaaagatttggtacaaatgtggtctaccccaaaccacaagaacaattgtgtcaagaacaaacttaatcgtgagaaggtcaatttccacagtgcacaggatctcaatcctacattgcaaaatcctatgtag

SEQ ID NO: 32445 - DNA, 360 bp, Zea mays
  Peptide Sequence Number=SeqID_74224
atggctggttgtacctgttctttctctggaaagtggagtgttttaaaccagaatcaaaaggtctctaactggtggaaacgagatgcagtctacctaggacaagcgatacaagaaggccagttcgtagccgccttgaatcagctcggtggccccagggccaaagcaaatcagggagctgatgaaggtgaacggcctgacaaacgacgaagtgaaaagccatcttcagctccgggagatgaagactcactgcccttgtttgttgtgacatggatctgcaatatgtctgacgatgctggtgggttcttcaaaataccgctgcacaaccggaagaggcccaaacagtttgttgatcttctataa

SEQ ID NO: 32446 - DNA, 1923 bp, Zea mays
  Peptide Sequence Number=SeqID_74225
gctggttctcagcaaccactcagtgctgtttctgtgccatcttctgttcccattccttcaaaggtatcttcaatttctaccaacaatgcaaatgagggagttagtattagatctgatgaggttaccgtaaaatctagtacagatggaagtgcaatgtctgctgctagcaaaagtagtaacctatctcttgatgctttagccaaagcaaaaaaagctttgcaactgaagaaggaactgtcagaaaaactcaagaaattacctatgcttaataataaactcgctacagctgttactgctacacaagtttctaaagaagcagcaaaaacttctgtatcagctgtagatgcacaacacttttctaaaggagaagcaaaacttactgatgtttctagtctgccaactagtagcatctccggaacgccagccattggtggtgtgattggtattccaggtcttacacacatacccaatctcgattctgtgaagagagcccaagagcttgctgctaagatggggttccgccaagatccacaatttgctcctgttatcaacttcttccctggtacatccactgaagttactgtggcacaaagacctgcaaaggctcctgttcttcgccttgattctcatggtagggaaattgatgagcagggaaatgttatcagcatgacaaagccaacgaatctgagtactctgaaggtcaatataaacaagcagaagaaagaagcttttcaaataatcaagccggacttggattctcttgcaaaatcaagtgttcattttgatgaaaggatgggcataaaccaaaagaagctcctccgtcctaaaaggccaggatttcagtttgttgaagagggtaaactctctaggcaggctgaattgcaaaaaattaagagtcaatttggtgaagcacaagctaaagagcttaaagtaaagcaagcccagcttgctaaggcaaaggcagaagtagacattaatccaaactttattgaggttgctcctggtgtgagagctccaaaacaaaagcagaatgaagatatccctgaaattgagccatgggatgcaaaaattttactttctgccacatatgaggatatctctgtggaggagattaatatggacaagatcaccatatatgttgaacatccagaaccatatgatccacctgctgaacctgcaccaccaccgccccagccactgaagttgactaagaaggagcagaagaagttgagaacacaaaggcgtcttgctaaggaaaaagataggcaagaaatgattaggcaaggcctcttggagccacccaagcccaaggtcaaaatgagcaatcttatgaaagtactaggctctgaagctgtgcaagatcccacacggttggagatggaaataagaactgctgctgcagagcgtgagcaggctcacgttgaccgtaacattgcccgcaagctcacaccatctgagcgccgcgagaagaaagaacggaagctttttgatgatcctactaacacaatagagactatagtttgtgtttacaagataagagacctgtcccatccacaaacacgcttcaaagtcgatgtgaatgctcaagagaataaactaacaggtgctgtggtcatcactgatagtatcagtgttgtggttgttgaaggggggaagaagtcaatcaaaagatataataagctcatgctaaaccgtatagactggcctgctgctgttggtggtgatgaagacacagaaatggaagctgacaagccagtgaatagctgtgtattggtctggcagggtagtgtggcaaaacccaccttccacaggttcactgtacataactgccggagtgaggctgcagctaagaaggttttcgttgatgtttctgttcctcactactgggaccttgctgtcaatttctcagaaaattcttcctga

SEQ ID NO: 32447 - DNA, 2267 bp, Zea mays
  Peptide Sequence Number=SeqID_74226
caaagaagaactcaggatcagatacttcttcagataaatctgatactgctgagcatgtgaagtaccttgaagtgctcgagagtttaccagataagaaaggagtagcgtctgaagctagctgtgctgttcgagaagcagagaccaataaaatcgaagctgggtcagaagagaggtttgtacccagctgctgcaccatgaagcttgaacctgcactcggagatgacagcagggaagtccgggaggcaaaataccggcgcattcgtcatgaagggaaaggagaagcaaagcagccagcgacagcaagagacagatcaccaaggcctgtggttaacagcatcccttctaatgctgaccctgtagaagggccatttgagtgccatatgagaccgggattcatatacgctaacggcgagaagggccatctgagtgacaggaattttgatgatcctagcaccagagtcagtggcctggagaaagatcgtactgagcttctgcggatgcttgatgagttgcgggacaaggtacagagatcctgcgagattgctgacaagtcaagtgtgaatgcttcgacaaatagaatggttaatcctacaagctcctgcattcctcatgagcgtctgagtcgattgcggtatggttcacctcagctgcaacggaatgggtctcagcactcaccttctttgaatgggcagacacctggtgttcctcctgcttttccttcattatctgtacagcaagatctccatggatacggggaatcggttgcacacacgggagctcctatctacccagctgccccatatccatggagaaacttcgataattatttccaaggacattatgatcctgaccctctgatctcttatcaccatgatggcttctaccatcagcctgcttgctcttgcttacattgttaccatcgtgaattcttacctgttcgaagggcaccctatcttatgaacaatcctagcttgtaccatgcagaaggcccagtgatgtttggtgcacagaactacaatacaagaggcatgaatggtatgatgcgacgcagtcacatgagggccaccctgagtaaaaaacctgcacagacttgtgaaccgattgtcaatggcgctccttttactatttgctacaattgctatgaagtgctgcagcttcccaagaactctctcttgttgggaaaagatgagtataagctgcgttgtgggtcatgctcacatgcaattgtggtcagacttgatggaagcaggcttgatgtttcagcacctacaccagtttcacacttatcacctggaagtaagaactactacaacaatggccaagcaaacaatggacaaaatgctgatgagagacttcttccatcctatagtttttctgcaggcagtcattgctctcaagaaaaagatttaccctcgaactcaagcgaaccagacaaaacgcaatgcatatcttctgccagcatttccgaggatgataatagcccagctagatcgaattcacagaagaactcctctggttctagagacgttcctcatgatgctgaagtggttatccgcgttccaactttacctcttcgtgatcattttggatattctccatcagatagggtggttgatgggccaggcaaaggaagcagaagcacccggtccgaacatgaaaagggtgtgttaactgaaagttttaagccaaacaaagtgaaatgtgtacctgtagcaagcgtgctagacccgtcggacgacgagtatgatgatcctgagcacagtcaagatccaggtggtggggcacaatacgtcgaccacctgcgggccacgaaatcgggtgattcctttttctccagcctcataaagaagagctttaaaatcaatggtggaatgggcaatggcagagcaaatgttttcatcaatggctatcccatttctgaccgagctgtcaggaaggcggagaagattgctggaccagtctacccgggtgaatactggtatgactaccgtgctggattctggggtgttatgggacagccctgccttggcatcatacccccatatgttgcggaattcaactatcccatgcctaagaactgtgctggaggaaatactggtgtgttcatcaatggccgagaacttcaccagaaggacatggacttacttgtgggtcgagggcttcccgattctcctgatagatcatacagagttgagatttctggtaaagtatccgacgaagtatctggtgaagagctttattgccttggcaaactcgcaccaacgtaa

SEQ ID NO: 32448 - DNA, 228 bp, Zea mays
  Peptide Sequence Number=SeqID_74227
atggccgcaattgaaagaataatcgtggaatcaacccagatggtacctgagaaagtttctggggggcaaatacgacaactacaacacctaggtggtatcgatcttaacgttaaagagttatgtgagcttctagaatttgctattgctggtggctacggatctgattctattttatttggtggcgtggacgaggagattcttttgatgagtaaagctttgaggctttaa

SEQ ID NO: 32449 - DNA, 165 bp, Zea mays
  Peptide Sequence Number=SeqID_74228
atgcctcatcaagggggagattgcgaacacagggttgacttgtcccttgtggtttgggttgatgataagtgtggagcacagggacgatggtcgacgactgaggtgaaaatgagttatgggacttggttgatggaccggagcagccgggtgaccagcggtggttga

SEQ ID NO: 32450 - DNA, 340 bp, Zea mays
  Peptide Sequence Number=SeqID_74229
atggttgagaagaagaaattattcattaagaagaagggatgtgaagcccatattggcaaggagtgggactcagatgaggactccgacgacgacgaaggcatcgccacccgccttcaattcaacaaaagtgctatcttccccaaggccaaccacacgcctcaggagccgccggcattgtgcatggagggtgaggaggacggttccggctccgcggtgcagcgcccgcctccgcagcagcagcagatacgggtggtgcgctgccccaagtgcgacaagctcctgcctgagctgcccaattactccgtctacgtctgcggcggttgcggcgccacgctccagg

SEQ ID NO: 32451 - DNA, 660 bp, Zea mays
  Peptide Sequence Number=SeqID_74230
atggggtgggggaagggaaggggaacgacggcgcagcagaggacctcgagcaccgggagcatctccagggcgccctccagaggacctcgagcaccaggagcatctccagggcgccctccagtctggggttcgtctgaagcgtccgcagcagcacaggctgtaccagtccacgcccccacggtcggcggcggcgcagcagaggacctcgagcaccgggagcatctccagggcgccctccagcctggggttcgtctaaagcgtccgcagcagccgcgccatgattttgtgagttgcaacacgcgtgcgggtcgcgttcttccactcaaagacgaaagcagaagtggcgaacgagcagtttgcaaagaaattaaaacaggaggagcaaaatccttcaacaagtgtccatctctaagaaaggggggaaaaggtccgacagtgacaactgacagcaagaatttgccactagaatcaactccatgccctatgaagctacgacgatccaaagttccaaaactgaaacatacaacatctacacaagacagctttctacgcaagagacggttaaaaaacgacagaaggaagaacgtgcaaaaccatgagggtgtgttcagcatgcatggagagctcagtagacatacgattacgatcatcaaggcatga

SEQ ID NO: 32452 - DNA, 454 bp, Zea mays
  Peptide Sequence Number=SeqID_74231
aaaggttctcattacttgtgttatttgtcaggtgttcctagaaagctctaagaggcttcagtttacctgctgcagaaagatttccttaagcagtgagcttcttactggtatggtgccttatactcatctgagagcagaggcacaggtgatggtctatgatgatgcttataaaagcaccgacagtgaattcttagaatctgacagtagtcaaaatcaatctattgttgtttcaaaagatcacaaacttgatcaaactgatgagcggcagacgcggcaccgtattgaagatgatggaggttttgcgatgtgggaaggaacatggcatgttggtggtgtacttgctgtttctcgtgcttttggtgacaaactcttaaagcaatacatagttgtggatccagagatccgagagagctataatagtaggaagtgtggccaccttggtgtttggtggtaa

SEQ ID NO: 32453 - DNA, 192 bp, Zea mays
  Peptide Sequence Number=SeqID_74232
atggccagaacgacggtgaagagctcggctattgaggaagcgatcgcgaaggagataagctctgggaggcgagaaacagtcggaacaaaccagaacgatgttaacaacagtattttagactgtgttcgatttgatttgaaatcaaataatttcatccgcagtctcaacacccgattccacggccacagataa

SEQ ID NO: 32454 - DNA, 228 bp, Zea mays
  Peptide Sequence Number=SeqID_74233
atggcggccgctgtcgaactcccctgcacgctggtcgtccctccctctgtccgcttgcgcgcagccgcgcccctgctctgctcgtcgggcgcgcaggtccctgctggtgctcagctccagtcaaccccgcgcgcgctgctccctgcactcgcatggtgctcgcccctgacttcccatggccgaaactcccagcgccgtggcactccctctggtctgcgcttcctttag

SEQ ID NO: 32455 - DNA, 366 bp, Zea mays
  Peptide Sequence Number=SeqID_74234
atggctggagtaggagtggtcggccgagcagcttctaggggagttccatggctgggactagggacgccggagctagagctgcacagcagggagatgggcgcagggaaaatctcggctgggggagatgagcacccaaatgcagctgccgtatttgagcagaggatagggttgaggaagaagggaaatatcccctccgtgctgaaggataaattgggtcatatcctcgcgcacgatttttctcagacagtgcgcgttttagattattttgctccgaacatttctgttgtcgagttcaaaataaatttgtttgagatgaaatcggaggaccggactgaatttccaaattcgtatttgcgcgagcgatga

SEQ ID NO: 32456 - DNA, 243 bp, Zea mays
  Peptide Sequence Number=SeqID_74235
atggggaagcctatcccatcactcctcatgctcctcctctgccgagcaatcaacaattttggccaagtcttcacatttccacttgttactcaatgtagcagcatggatcaagcagacgattcgaatcgagtttttatccttgcaagctggggcaggcagatcctcgatggcaggctctggtactggatcctgggctacctcctgagcagctctgtgctctggaatgaggagattcataggtga

SEQ ID NO: 32457 - DNA, 521 bp, Zea mays
  Peptide Sequence Number=SeqID_74236
atgggagaggtccagcaaaagatcgggcgaggtccggggttctctggtggtcacgtcgaggcggtcgggctcatcagtggcgcgtgcttcggcctgctcagtggtagagctcaatcaatgtgctcggggagcttcacgggaagtcagtggtgccgtgggtgcaaggaattggaaagtggctcaccgtgcagctcggtccacgcgcggtggcggtcggatggagtccggcgatggcaatctggtaccttcggtgaaatggtgttcggtctgagggctcgggaagcattacagggccctagggaagctagccgaggagctggattggatggaggtgggctggagtggccggtccacggtgggcgaactcgggcggccgctggcacgccgtgcgcagggagaactccggcgaactcgtgctcgggcggggctgagagcgagcaggggagtacagtcgcggctttgggtaactttataggcgcgggcacgggcaagggcgtggggtcgggcgtcgcttggcgcgg

SEQ ID NO: 32458 - DNA, 963 bp, Zea mays
  Peptide Sequence Number=SeqID_74237
atgacgaggtcgcggccgagccggacgaggagcatgtggccaacaccaagggcgagcgtagcagggaaccatgtcccgcctggccgagctgaaggaagcacagaccagagggagtgccacggcgcggagactacgcgagctggagtgctgcgatggggcttgagccggcctgacgacgagctggccaagcaccagagaaagccagccgcgatgctgggagttccggccatgggaagtcaggggcgagtgccaactgagtgcatgaagcagcgcgcgcgtggtcgactggagctgagcaccggtagggacctgcgcgcccgacgagcagagcaggggcgcggctgcgcacaagcggacagagggagggacgaccagagcgtaggggagttcgacggcggccgccatggcgcgcaaggagggcaaactccagggagggcggccaagggaaacttcacgccatgggagagagcagagagaaacgggctgagggaggagcgagcagggagggagcgcgtgcagggagagaaatccagcgccagggaagagctcgcaacagggacacggcgagcagggaggggtaccgcggccatggagatgcactgcgagggagaaaagcaggggcacgcaggagcagtcgaccgcgcgctagtgagggctggagatggggaaggcatctgcaaactccaggaggagctccagcttccaggtcggacgccagggagcttaggccatggcgacgagcttggggagatggggaaaaccggcccgccagcgagccggagcacgggaggcacgaccatggctggagcaggagcggtcggccgagcagcttgcaggggagttccatggctgggaccaggggcgtgggagctagagctgcatggcagggagatgggcgcagggaaaatctcggctagggagatgagcacccaaatgcagctgccgtatttgagcagaggatag

SEQ ID NO: 32459 - DNA, 666 bp, Zea mays
  Peptide Sequence Number=SeqID_74238
atgaatgaagttcctgcttcgacaataggtgggcatggggcaggtgcatcccgccttttggccagatttggctctccctcttctccgacatctagcagtagagaaaagtcgcactatgacttcctctacctgccaatggattttaggagggaggccaacaagggctacgcctttgtcaacctcatcacaccaaaggcagcttgtcggtcgtggggggcccatgggggctaccacacgcacatgtgggttttcaagggtagcgccaagacctgcataacctgttgcattgggctactattaggcaccacggcactaagacccaacacgtcgcccacatcccgagctccatgcctagtgacacctaccctcattaacctggtccggctcggtcaggcagcatgtgcaattcgcaaggcttgggtcgcgctagtaaccggcgcgttacctaggcaaataccattgaccaacttacatcgctcatgggcaaactccatcatgacatctattatttccactacagaggcatgcgacaaagatatgtggatgggactggacgacaccgtccacctactccctacacaagacgatgagccagcctacatcgctacctacaccgctgcattcgctcgcacgtcaacgagacatgacgaaggtgtgactgggtag

SEQ ID NO: 32460 - DNA, 498 bp, Zea mays
  Peptide Sequence Number=SeqID_74239
atggcgcctcctgctgacgaggtcggtccgcgccctaggttgggcgatgtggaggctccttcgaggtcgaggtcgaggtcgagtctgtcttccgtggccgaggtcgagtccgagcccctgggtctggcgaggcggagaccgtcggctgaagccagggctgagtccgagccctggggtcgggcgaagcagagggctgagcccgagtccgagccctgggtcgggcggagcggagtttgccgtcttccggggctgagcccgagtccgagccctgggtcgggcggagcgaagttcaccgtcttcaggggcttagcccgagtccgagccctgggttgggcggagcggagtttcctatggtgcgtgaggctgggcctgactgcctgtcagcctcactctgtcgagtggcacagcagtcggagcagcgcaggtggcgctgcccttctgtcaggctggtcagtggagcggcgaagtgactgcggtcacttcggctctgtcgactga

SEQ ID NO: 32461 - DNA, 324 bp, Zea mays
  Peptide Sequence Number=SeqID_74240
atggagacgagtcccagcgacaccctgcttccgcctcccgcatttctctctctcacttcagctcacaagactaggggggcaggcgtaggggagagtagcgggtcggtagccggatccgaggcagtcctcatcggtgagcaccaaaacaattgggcacgcagaggcaagagctgcccatggaggtgcagaggcacggttccatggctaggagatgagagcggctggtggggaaggaaaggctgccggaatccacgaggtgagagcggtggccagatttatagaggcggtggcaaccgtttggcgctccgtggagttcggcgatga

SEQ ID NO: 32462 - DNA, 402 bp, Zea mays
  Peptide Sequence Number=SeqID_74241
atgccaccgacgcggcccaagataaagatcatccacatcatcacgccggagatcatgaagaccgacgtcgcccacttccgggcgttcatgcagcggctcaccggcaagcctgcctgctgttctgacgtcacatcgacaccgccgccgccggtaggggagaggaggagacagagacgtccaagaagaggcgaggccgacactggctccggtgaccgacgacgagaggagcggtttcacggtgcaaggattggcggcgacaaggagaggaagatcaagtgcgaggtgaaggtggaggatcggaaagagctaggcttcgacgggtatgagtatgagctcggccgtagcgacctgtggatggacatggacctcagcccgggaggagggttcttgagcttcctgtaa

SEQ ID NO: 32463 - DNA, 246 bp, Zea mays
  Peptide Sequence Number=SeqID_74242
atgtcgtgcgcgttcgacgactactatatcaaggactatggcgtcatcttggcgctagaggtgacgcagaggaggaccgacagcaatgaccactcgtcatcgtcgggcgtgtatggtggtgcctacctgatgactgataatgtacgagggaacttctaccggcaggccaggtttgggccgaggtcgcagcctatgggcgggcacgagcacggcctgtttaaggcaggcacgaaatggcccatataa

SEQ ID NO: 32464 - DNA, 555 bp, Zea mays
  Peptide Sequence Number=SeqID_74243
atggcgccgatgtgtagcggtatagtggtgaagatcgaagtccggtgtgtaattgacgagccgccagaaattcatgggcaaaattggcgcaagaagaggatctcccatgggctgatgcaccaccataatagcccgcgtccaggatgcagagataaggcacacatccatacccagcggtgcaactcgagctcccagctgcgaccacatgctctcacgcgagacgcgacgcggggagggaagaagataaatcctaattgcccaggcggctatcgagacccgagcgctccagacccgtccaagagtagcgccttgagcctggccgcggagacctgcttccgtgggaaggccacggccgcggcatggttaggcgctgactacgccatctcgatgcgaagggattcctggaaccggaagcttgccaccgaatccgacgacagcgacggcgatgacgcccaggcgaaggcgaggagggcaaggaagaggagtagtgcagtgggtaccgtcgccatggaagtgggcagttccgtgaacgattcccggtttccatggcgatga

SEQ ID NO: 32465 - DNA, 513 bp, Zea mays
  Peptide Sequence Number=SeqID_74244
atgccggtcaagtgggagccgccgtcgtcgcagatgctggagtacagccccaacgacgaggcgatgcggggcgggccgatgaaggccctgcggcgatccagcacctcctcggcgccatcgccaagggacgcgggtgacggcgacgccacgactgtcgccgccagtagtgcaggcaagaggtcgttcgcgctctgccgatcgttcagcagggcgaagcgttcccgcgtgacgagcctgatcgtgggcggcgacgggggcaccgagaggctggccgccgtggccgaggagctggagggcctgacgcgcgactacatgcgcgagttcatcctgctggtgcaggggtacccgcggaaggtgcaccgaccggagcggacgacgatgtacatggaccgctgcgtgttcgggcgccacgtcgagaaggagcgcgtggtggacttcctgctgcagcgcgcgccgtacctgagcgcgctcgccgtggtgggcgccaagatgtgggcaagacgacgctggtga

SEQ ID NO: 32466 - DNA, 918 bp, Zea mays
  Peptide Sequence Number=SeqID_74245
atgggtctcctctcaaacaggattgggagggagagcctcaaggcgggggatcatatctactcctggagggcggcgtgggtctacgcgcatcacggtgaggggctacatgggaaaaatgaaattgttattacagattgtatatcgttgggtaaccttgtaggaataggaaacgttgtaggaatatatgtgggcgatgataaggtgatccatttcacaagaggaagaggacaggaggtcggaacaggaactgtcgtcgatattattcttgtgagttccaccccaaaacgaagcaacacgccttgcccggtgtgcaccgacgaaaccagcgacagcagcacagagacgaacggcgtggtatcctcctgcctcagctgcttcctagctgggggtgctctctaccgtttcgagtacgcagtcaacccggcgctcttcctcgccaaagcgcgaggagggacgtgcacgctcgctccctctgaccctgacgacacggtggctcgccgcgccagatacctgctgagcaacggtttcaggtgctacaacctgttcaagagcaactgcgaggacttcgcgatatactgcaagactggccttcttgtcgctgagcagggcgttgtcgggcagagcgggcaggctatctccatcatcggtggacctctcgccgcggtggtctcgaccccattccgcttggttaccacgaacatctatgggatggcggtgatggccgtcggggtgtactgcgcgagcaggtatgcagctgatattggcaaccgccgtgatgtggtgaaaatggaagtcgaggacctgacggccggactggccagcggcaggatatgtgctgtggagaacatcgcccagctggtggctccggaggcagaaggcccggccgatgccacggccacggccacgctggctgcttaa

SEQ ID NO: 32467 - DNA, 1170 bp, Zea mays
  Peptide Sequence Number=SeqID_74246
atggcgtccgaatcctccccgcccccggcgggggcgccaccgcctggtctgggagacaagctagcggtgttctgggacgagggcatgctggcccacgacgccggccgcggcgtgttcgactcgggccgcgaccccggattcctggatgtgctcgaccaacacccggagaacgccgaccgcgtccgcaacatggtctccatcctccgccgcgggcccatcgcgcacttcctctcctggcactcgggccgccctgcccacgcctccgagctcctctccttccactcctcagaatacatagaggagctcgtccagacgaacgccaccggagccaagaagaagctctgtgagggcacgttcttgaacccgggctcctggggtgcggcgcttctagcggccgggaccacgctctcctccgcgaagcacatactagacgggcaggggaacctggcctacgcgttggtcgccgttgtggatattgatgtgcactacgggaatggcaccgcggagggcttctatcggacagacaccgtgttgacgatgtctcttcacatgatgcatggttcttgggggccatcgcatccgcagagtggctccgtcgatgagattggtgagggcaaggggcttgggtacaatctcaatatacctttgcctaatggaagtggagatgctgggtatgaatatgcgatgaacgagttggttgttccatcgattgataagtttcagcctcaactgttgtttcttgtggtcggccaagattccagtgcggtgagtgcaacacacttacatagtccttgcagtgaagcaggacagagaggcaaagcacatttgcgcgtgtcccagaaaattattcaccccttctataccaagtttgatcccaatggaagacagtgcttgaccatggaaggctacaggaaaattggacaaataatgaggcgcctggctgatcgccattgcaatgggcaaatactggttgtccaggaagggggttaccacatcacttattcggcatattgtctgcatgctacactggaaggagttttggatctggaagccccgctgcttgatgacccaatcgcttattatccggaggatgataaatacactatgaaagtcgttgacatgataaagagctactggaaggaatcggttcctttcctaaaggaaatttag

SEQ ID NO: 32468 - DNA, 1005 bp, Zea mays
  Peptide Sequence Number=SeqID_74247
atggaaacgatcgagggggagctcggtcgatttatgctcaatcaaggagaggagccacaagccatgtacaaccggctcaaaaccttggtgaaccaagtgcgcaacctcgggagcaccaaatgggatgaccatgaaatggtcaaggttattcttagatcacttgtttttcttaatcctactaaagttcaattaattcgtggtgatcctagatataagctaatgtctcctgaggaagtgataggaaagtttgtgagctttgaattgatgatcaaaggctccaaacaagtcatcgagcgaggcgccacctccacacccgaggtgcaacccgtcgcattcaaagcgacgaaggagaagaaagaagagtctacaccaagtagactccccatcgacgcctccaagctcgacaacgaggagatggcgctaatcatcaaaagctttcgccaaatcctcaagcaacggaaggggagagactacaagccctgttccaagaaagtttgctacaagtgtggtaagcccggtcactttatagcaaaatgtcctatttctagtgacaggggcgacgacaagagagggaagaagaaggagaagaagaggtactacaagaagaagggcggcgatgtccatttttgtcgggagtgggactccgacaagagctccaccgactcctcctccgacaaggatgccgccaacatcgctgtcaacaagggtcttctcttccccaacgtcggccacaagtgcctcatggcaaaggatggcaaaaggaaggtaaaatctagagcctccactaagtatgcaagatctagtgatgatgataactctagtgatgatgtagataatttgcttgccctttttgccaacctaaacatgcaacaaaaagaaaaattgaatgaattaataggtgctattcatgagaaggatgaactcttggatagccaagaggacttccttattaaggaaaacaaaaggcatgttaaggttaaaaatgcttatgctcgggaagtataa

SEQ ID NO: 32469 - DNA, 2779 bp, Zea mays
  Peptide Sequence Number=SeqID_74248
atgtcctttgttccgccaacccgtccagaggatcaagctgatgttgtctctggtactgccttatcttctgacatggacattgactgcagttctgcaaaagggaaagggaaagctgtgtctgtcccacctgaagagagcaagcatgctatccaagagtctactgcatcccttgccaaagcttcatttttccttaagttgatgacagatgtgttgttaacttacacatcatccattcaagttgttcttcgtcatgatgctgatctgagcaacatgcacggtccaaatcgaacaaattctggtctaattagtggtggaatctttaaccatatcctgcagcatttccttcctcatgccacaaagcaaaagaaagagagaaaaagtgatggagattggatgtataaattggcaacaagggctaatcagttcttggtggcttcatctattcgttctgcagaggcccgaaaaaaagttttttctgaaatctgcaatatacttcttgatttcaccgactcgtctgcagcttacaaagccccagtagcaaggatgaatgtgtatgttgatttactgaatgatattctgtcagcccgatcaccaactggctcctcattgtcagcagaatctgcagttacatttgttgaagttggtcttgctccttcattattgaaaatgcttcaaaatcttgatttggatcaccctgattctgcaaagatcgttactgccattgttaaggccctggaactcgtcagtaaggaacatgttcattcagcagataatgcaaaaggagagaactcatcaaagattgcttccgacagcaacaatgtgaattcatcacctaataggttccaggctcttgacatgacttctcagcccacagagatgattactgatcacagggaaacatttaatgctgaccaaacttcacaaagttcagattcagtggcagatgagatggatcatgatcgtgatatggatggtggctttgctcgtgatggtgaagatgattttatgcatgagatggctggcgatggaactggtaatgaatctacaatggaaatcagatttgaaatttcacgcaatagagacgatatggctgatgatgatgatgatgatgacaacactgatgaagatatgtctgcagaggatgatgaggaggttaatgaagatgatgaagacgaagatgaggagaataacaatttggaggaagatgatgcccatcagatgtctcatcctgacacagaccaggaagaccgtgaaatggatgaagaagaatttgacgaggatctactagaagatgatgacgatgaggatgaggagggagtcatccttcgcctggaggaggggattaatggcattaatgtgtttgaccatattgaagtatttggtggtagcaacaatttgtctggggatacactgcgtgtgatgcctctggacatttttggtacaagaaggcaaggccgaagtacctccatatacaatcttcttggcagggctagtgatcatggtgttcttgatcacccacttcttgaagagccttcctcgacattgaatttttcacatcaagaacaaccagagaatcttgttgagatggctttctctgatcgaaatcacgaaggtagctcctcccgtttggatgctatattccgcagcttgcgaagtgggcgtaatggacatcgctttaatatgtggctagatgacggtccacaacgcaatggatctgctgcccctgcagtacctgaaggcattgaagaattgctgatctctcatttgagtcggcccactcaacaacctggtgcccagactgttggtggtactcaagaaaatgaccaacccaaacatggctcagctgctgaggcaagggaaggatcgccagctcagcaaaatgagaacagtgaaaatacaacgaatcctgtagatctgtcagaaagtgctggccctgcacctcctgatagtgatgcacttcaaagagttgtgtccaatgcaagtattgagcatgctacggagatgcagtatgaacgcagcgacactataacacgtgatgttgaagcagtgagccaagcaagcagtggcagtggtgctactttaggggagagcctcagaagtttagaggttgaaataggaagtgttgaagggcatgatgatggtgaccggcatggaacttcaggggcctcagaacgattacctttgggtgatattcaagctgctgctcgatcacgcaggccatctggaaatgctgtggctgtaagcagtagagatatgtctctggagagtgttagtgaggttcctcaaaatccagatcaagaacctgatcataatgctagtgaggggaatcaggagcctagaggggttggtgctgacacaattgatcctacatttttggaggctcttcctgaggacttgcgagctgaagttctttcttcacgtcaaaatcaagtgactcagacttctaatgaccaacctcagaatgatggtgatattgatcctgaattccttgctgcactcccccttgatataagagaggaggtgctagctcaacaacgtagtcaaaggatacaacaacaatcacaagaattagaaggacaaccagttgaaatggatgctgtttcaattattgcaacattcccttcagaaattcgggaagaggtccttttgacatctcctgacaccctcctagctacactcacacctgcactagttgctgaggccaacatgttaagggagagatttgctcatcggtatcacagtagttctctttttggtatgaactccaggaacaggagag

SEQ ID NO: 32470 - DNA, 231 bp, Zea mays
  Peptide Sequence Number=SeqID_74249
atggcggcggcggcggccgcacatagagccagcttcccgttgcgcctgcagcagatccttgctggaagccgcgctgtctcacctgcgatcaaggtcgagtctgagccgagcttttctggctggctagagaatcatcttgaatctaagtttttggcaacactgattctcctgaagaaattgtttgtcatgagtgtgatgacccctagtgctgatgatgacttgcttggttga

SEQ ID NO: 32471 - DNA, 2658 bp, Zea mays
  Peptide Sequence Number=SeqID_74250
atggctaaagctcttattcggtacttcgagtgttcagtaataatactgttcttctgttcgctctctttgcccctatacaagggtcagctgcagaggcttcttgtgaacctttgcacgcatcgggataacagacaggccttggttcaaattctggtggacatgcttatgcttgatctgcaggggttttcaaagaaatcagtagatgcatctgagccaccatttaggttgtatggatgccatgcaaatatcacatattcacgtcctcaatcttcaaatggtgttcctccattggtttcacgtcgtgtgctcgaaacactgacaaacttggcaagaagccatccaaatgttgctaaactcttgctctttcttgagttcccttgcccatcaagatgtcgctctgaagcacatgatcataggcatggcaaggctgttctagaagatggtgaagaacggaaagcctttgcggttgttcttttgttaactctgttgaatcagccactttatatgagaagtgtagctcatcttgaacagttactaaacctccttgaagttgtcatgcataacgctgagaatgaaattaatcaagctaagctagaagcgtcatctgagaagccatctgagaatgcagtgaaagatgtcaaagataacaccagcatttctgattcatatggatcaaagtcgaatcctgaggatggtagcaaagcccttgctgttgacaataaaagtaacttgcgagctgttctgcgaagtcttccccaatcagagcttagattgctatgttcattgcttgcgcatgatggattgtcggacagcgcttatctccttgtaggtgaagtgttgaaaaagattgtggctctggcccctttcttctgttgccatttcataaatgagcttgcacgatcaatgcaaagcttgacattttgtgcaatgaaggagcttcgtttgtacgagaattctgaaaaggctcttcttagttctacatcagccaatggaactgcgattcttagagttgtgcaggctttgagttctcttgtcagtactcttcaagatagaaaggatccagaacagcctgctgagaaggaccattcagatgcagtttcccagatttctgaaattaacacagcattggatgctttgtggttggaattgagcaactgcataagcaaaatagaaagctcttcagagtatgcatcaaatctaactcctgcttctgcaagtgcagctacattaacagcaggagtagcacctccattgcctgcaggaactcaaaacatattaccatatatagagtcattttttgtgacatgtgagaagttgcgtcctgggcaacctgatgctgtacaagaggcttcgacttctgatatggaagatgcttcaacatctagtggtgggcagagatcatattcctgtcaagctagtcttgacgagaagcaaaatgcttttgtgaaattctcagagaagcacagaagattgctgaatgcattcatccatcaaaaccctggattactggagaagtcattctcgctgatgttaaaaattcctcgcctgattgattttgacaacaaacgtgcatatttccggtctaaaatcaagcatcagtatgatcatcatcatcataatcctgttagaatttctgtgcgtcgttcatatattcttgaggactcctacaatcagcttaggatgcgctctcctcaggacttgaagggtagactcactgttcattttcaaggagaagaaggaattgatgctggtgggctgacaagggaatggtaccaatcgctttcacgagtcatttttgacaagagtgcccttctatttacaacagtcgggaatgatttgacgtttcaaccgaatcctaattctgtatatcaaactgagcacctctcatactttaaatttgctggacgagtggttggcaaagctctcttcgatggtcagcttttagatgctcattttactagatctttctacaaacacatacttggtgtcagggttacataccatgacattgaagctatcgatcctgcatactacaagaatttgaaatggatgctcgagaatgacataagtgatgttttggatctcaccttcagcatggatgcggacgaagagaaactgatattgtacgagaaggcagaggtcactgattgtgagttgattccaggagggcgtaacatcagggttactgaggagaataaacatcaatatgtagatcgggtagcagagcatcgactgacgactgcaatcaggcctcaaattaatgccttcctggaagggtttaatgaactcattccacgggagctgatatctatcttcaacgacaaagagcttgaacttctgattagcggtcttccagatattgacttggacgatttgaaagcaaatacagaatattctggctacagcatagcctctccagtcatccagtggttctgggaaatcgttcaggggttcagcaaggaagacaaagcccggttcctccagttcgtcactggcacttcaaaggtaccgttggaaggttttagtgcacttcaagggatctctgggccacaaagctttaaccaactagacttgcctgagtacacatccaaagagcagctccaggagcggttactattggcaatccacgaagcaaatgaaggtttcggatttggctaa

SEQ ID NO: 32472 - DNA, 183 bp, Zea mays
  Peptide Sequence Number=SeqID_74251
atgctggtagactacacaacgggggcatctctagctaaggtgcagaggaaggcggcctctcggactccacctcctgctgaggtgagggggaagagtcctgttgctcctggtcctggtcctgctcctagcgtcggtgctccttctcctcgtgcaggcaacgatgcagtctctccaggtgactag

SEQ ID NO: 32473 - DNA, 2277 bp, Zea mays
  Peptide Sequence Number=SeqID_74252
atgaaggaaacccagcaggggggcctgtccttgttcccagtagacttggagagcaaatatcagcatcgtcttggttcaactcttcattttgagtataatttgggttctgcacagtaccctgaccaaactagtgacaagggcaagtcatctaatttgtgtgtgatacatattccagacatgcatcttcagaaagaggatgacttgagcatactgaagcaatgcgtggacaaattcaatgtgcctccagagcacaggtttgcattgcttacaaggataagatatgcccgcgccttcaactccacacggacttgtagtatctatagccgcataagtcttctttcgttcattgtacttgtgcaatcaagtgatgctcacgatgagctcacatatttctttacaaatgaaccagaatacataaacgagttaatcaggcttgttcggtcagaagattctgtccctgggcccattcgtgcacttgctatgctagcactgggagcacagctggcagcatatgcatcatctcatgagcgtgctaggatattgagtggctcaagtatcatttctgctggtggaaatcgtatggtgttgctcagtgtcttgcagaaagcaatattctcactcaatagcccaaatgatgcctcatctcctctaattgttgatgctcttcttcagttttttctgctccatgtattgtcctcatcaagttcagggactacggttagaggctcaggcatggttcctcctctcttgcccctgctgcgagataatgattcttctcatatgcatcttgtctgcttggcagtgaagactcttcaaaagcttatggagtacagcagccctgctgtttctctgttcaaagacttgggtggtgtagaccttttgtctcggaggttacatgtagaagtgcagcgtgttattggtactgctgatggtcataattcaatggttactgatgcagttaaatcaaaagaggaccacctgtactcccagaagcgattgattaaagctttgcttaaggctttggggtcttctacttattcccctgggattcctgctcgttctcaaagctcccaagataattcattgcctgtgtcactttcccttatatttcagaatgtagaaaagtttgggggcgacatttatttttcagcagttacagttatgagcgaaataatccataaagatcctacatgctttcctgctttgaaagaacttggtcttccagatgcttttctctcatcagtgactgctggggtaataccatcttgtaaagccctgatctgtgttcctaatggcctgggtgcaatatgcctcaataaccaaggacttgaggctgtcagggaaacttcagcactacgatttcttgtatataccttcactagcaggaaatacttgataccactgaatgagggcgttgttcttctagctaatgcagcagaagagcttcttcgtcatgtgcaatccctgagaagtattggtgttgacatcattattgaaataatcaataaactaagttcatctctgaaagatagaaacaatgaaacagccatcttggaagaaaaaacagatatggaaactgatgttgaaggtcgtgatttggtaggtggtatggattccagtgtggagggcagtaatgatgaacagttttctcatttgagcattttccatgtgatggtattggttcccccggacaagggaaaaactctgaaacctgccggtttatttgtcgaaaagggagctgcctcaaaagacaatcgttggatgaatgctttgctctcagaatttggcgatgctagcagggaggtcctggaagatattgggcgagtccaccgggaagtgctttggaaaatttcgctttttgaagaaaacaagattgacgctgaaattagtttatcttcttccacatctgaagcccagcagcctgacttgtctgccagcgacattggtgatagcagatacacttctttcaggcaatatcttgatccaattttaaggcgaaggggttctgggtggaacatagagtctcaagtgtctgacctcattaatatgtatcgagacattggcagtgcagctagtgactctcagagagttggttctgatagatattctagtctgggtttgccctcaagttcccaggaccagtcttccagttcatctgatgcaaatgtcagcacaagatcagaagaggaaaagaaaaattctgagcattcctcctgctttgacatgatgagatctctctcctaccatatcaacctatctttttatggagcttggtaa

SEQ ID NO: 32474 - DNA, 135 bp, Zea mays
  Peptide Sequence Number=SeqID_74253
atggcaaagatgattgctaaaatcaaatcttttatgaggaagatgagttgtgtcagtggaagtgacatggatgagattaccgttgccaacaataatgtgagagtcaggaggaaggattcacaccaccgggcatag

SEQ ID NO: 32475 - DNA, 339 bp, Zea mays
  Peptide Sequence Number=SeqID_74254
atgaagaatggacctggaagaaataattgctctggtggtagagttgaaaagtcaaaaggattttgtcctaacagctttgatcgtgtcctccttgatgctccatgttctgcgcttggcttgagacctcggctctttgctggtgagcaaatacctcaagtcttcacaaaacagttcttcaactcttcaaatatataccttgctttggagactttgaacttgacaagaataaagagatgtgtcaaatcaagccaaaggaagagcagagagatcactggtgcaagatggcaaacaggacaaaatggtgatgtgacaaataaacagccattaatcatgatgtag

SEQ ID NO: 32476 - DNA, 214 bp, Zea mays
  Peptide Sequence Number=SeqID_74255
gtgtactataaatccaggggagaatgaggctttgtacccgaaagttggagggcctggtattgttggttcgtgcgagctgttcaacaagacatatactgaggaatggttgagagaggatgaagctgaccttgttcagaggtttgatccgtcatcatcagtggataccattggtttcttcatcgcgaaatttgatgttggagagaaagatgaataa

SEQ ID NO: 32477 - DNA, 516 bp, Zea mays
  Peptide Sequence Number=SeqID_74256
atggcgacgcaaggtggaattggaccagcagggcactccacagacgatctctatgtccttgacctcacaaacgacaagtttaaatggcacagggttgttgttcaaggggcagggcctggtcctcgctatggtcactgcatggatttggcagctcaacagtatcttgttactgtctcaggaaatgacgtgtacgtgcaaaaccttttggaagtgcaagtctatgcaatgtctaactccttaacaaccaaaattggtggtactaataaagaaaattatggagatgttagtgatatgaattctgattcgtattacagaagctttggaagagatggttctatggggttaataggattggagaatctcgaaaatacttgctttatgaacaattcaattcataaaggcgaaatgattctagcagatgatacatgcagaatcttggaaatactagcagatgagtaccagagcaaccatctagctcgaaatgattatgttatagttgatacatgccatgtgtaa

SEQ ID NO: 32478 - DNA, 300 bp, Zea mays
  Peptide Sequence Number=SeqID_74257
atgaccaccagcttcgtggtgggggagagcaagccgggctgcggcctctgccccgccctcagcttcaaggatgttcatcatccgggctggggaggagggcgtaccgagttggggcctgcctccacgtgggtcggccacccgcttcttcctccagcattcgggggaggaggtcatcctccagctctgcggaggaggcgtcctccagccatgcgggggaaggtggctgctgtcaccggccttgcagagggggcaaacttcgacaacgcgggcccggtcagccgcaagcgtcgtcagctgtag

SEQ ID NO: 32479 - DNA, 273 bp, Zea mays
  Peptide Sequence Number=SeqID_74258
atggcgtggcttagggatgtcttcagtataacttcgtcttccgtcatccccttagcgtcacctttcatcatgcgtaggtgcacgtctggtatggcgtattgcctcatcccctctggcgtatgggtcactgtcgagaccccgatgctgaggtctttactgccagggtcgtctggtcccactggtcagcagggatacgtatccgacgtcgtgcttgacagagatcgtaccgcttccacagtctgggtatcgctcggtgatgtcccatcgtgctaa

SEQ ID NO: 32480 - DNA, 1329 bp, Zea mays
  Peptide Sequence Number=SeqID_74259
atgcataaactgctggatttagtatgcaaaaatgagctctctgctgtaatcaatggattggaggttgttgaactgaatggtggagaccaatcacaagaagggtgctctctggtccacaagtgcccctatgcgggccttgaaaatgttttgtttgttcagggatcaggaccacatgtgctgcattatggtagccaaccagatcaagctgttaaggaagtagttgtaagtcgaaaatgtgcagagtcagttcttcggggtgcccaggtgtatgttcctggtgttttagcatgtagttcacatgttgaaaagggtgataaggttgcagtgtcagtcgctattgagcagcctgtcaaggaagatggctgggcttggcatattcatggggctgttgatatacacaatgttgcagatgcacattatgaagaaaggaagggtctgtacattggtcaaggaactgctgcaatgtcaagatctgcaatatttcgtgttcctcatgggattgcagtagagatgactgagagggtatacaagctcccatctttcaatgatgtgcttgaaggggaaatatttcttcagaatttaccaagtgttgtgacggctcgtgtccttgatccccagtcaggagagcgaatactagatatgtgcgctgctcctggaggaaaaacaacagcaattgctatccttatgagggacgaaggagaagttgttgcccttgatagatctcacaataagctagaagaggataaatggattagaagaataggggttgacagagaggtagacgactctgacgttgtcatagtagacaagggcacttctagtgggtgggctatggagctcctggaggagttgctggagctagcacgcctctgccaccctgttggccacaacgcgatacttgccctcgacactcgagcgggaaaccacgggttgtcgcttcgaccactaggagatgaggttgtccccaaggaccatgacataattggaggtggatcgacacatgtccaggcatctcacccaattggtgtcagtgtagacaaggaggtacaccgtatcactgtcacgccagtaaatgaacaccgagatattggacttggcctcagagagacccaacaagagcaagctggccaaaatatacaatctcaattagagtgccatggagaaacacattctttacgcccaactgatggactagccaagaatgggatagtgcaagggacaacggtgtggacaatggcctacttcaccgcaagcttatgggggcaatggttgaaagatttgggtaacaagcacattcaaagttgcgaaggtgatcgtaggagggagtga

SEQ ID NO: 32481 - DNA, 273 bp, Zea mays
  Peptide Sequence Number=SeqID_74260
atggatattctgaagttggcttctgagatggacttgagttgtattaaagcttataaacttgatgctctcaaatctgtacggaaaactgatgaagcaagaagccttggcatggctgataatcacagtgaagcaattgaaacaccaacagaggacccttgccatgccacagtaggtgggagatctaccagtgtagacgaagacagctcaacaacaacagtggtgttttctgcttatttaagtactccacaattcagtgcgaggaactatgcctaa

SEQ ID NO: 32482 - DNA, 195 bp, Zea mays
  Peptide Sequence Number=SeqID_74261
atgtctccgatctgggtgttcaagtacggctcactgatcttgaacccaggcatcgccgacaacgccctcgtcatcgacttcatcggggactaccaccacgtggcgctgctatgtacccagttcctccttggttacaagaccaagatgttagaggatgagcatgtagcaatatttgaccatcctagaagcttttag

SEQ ID NO: 32483 - DNA, 408 bp, Zea mays
  Peptide Sequence Number=SeqID_74262
atggctacgacatgctgcattgtcggatacacctcttctgacagggcagttcagcatgtcaaaatcaaaggaacattgtctgctggatatgttcgttggaatttctgtgttcaatgcctttgtgttgcttacactatcaatttctgtgtcagagcattggctgaggttaaaatcagactgtacacccagttagatagactgagcagggtcttggtcctggagcactgcacgaggatcacatcagcacgattatctataactgttccaaaaattcagttattaagagacagactaggaaaaggatatacatatagtgttatcggtgagaaccaccaaatctttgatctagaaggtgacagtggaaggctcattattctgactgaccaagacagcgagaagcagttctga

SEQ ID NO: 32484 - DNA, 213 bp, Zea mays
  Peptide Sequence Number=SeqID_74263
atgaccacaacaggatcatatggaagggaagttcttaatcaaactatggagaaagggctgactgaagaaagggggagcaattatctgttgaagattcagaaaaggctgaaatatctacccttgatatttactctccttgccatgaccaacctgggatcgaatgaagattgggatgaagtgctggcaggggtattcagattggtgcatccctga

SEQ ID NO: 32485 - DNA, 825 bp, Zea mays
  Peptide Sequence Number=SeqID_74264
atggtcgctacctcgacttgcgaagagcgcatcgacaaagtcaaacccgtcatctcgttgctacatcgtcaagctctgcagtctgcactgcacatctcagatgatctgatcccatggaggctctgtttcctgcaggcgtccatcgatgagtacctgcagaacagccccatggtcgtgggagcggtgtttctggaccagcgcaaaagaagaaagatcaacgacgaggaatggagcgtgcagctcctgcccatccagttcctcttcctgtcggcgtcgccggtgatcgtcatgcgcttcgtcagcaagtccggcgggaaggagtccccgtgcacgccaccagcctcctcctcatggaagtgcaacgccatgccgtcgcacctggcgttcaccgtccgaggcctcatgtacccgcagcggcagcgggaagggaggaagagcctcaagggccacgtcgagatgaccgtcggcttcgacctcccgccggtgctcgcgttggtcccggagagcatcatcaggggcgtcgccgagacggtcggaccatgtctcctcttctctcctcgcctggtcttgcagagaaaaccatcggtgttcttcctcaccggaatgactggcaggcgtttcgtctgtgacgaacaacgcgcaggtgctgaggcaggtggcggagcagatgaagcaggacttggacgcaggcctggcagcagatttcaggaagtacaggaaggagaagctgaccgaaaggcgcacatcgccctgaattttgagaaacatgttcacagccctgtatggctgtatcagtgtatcaccgccgacagtagccatgactag

SEQ ID NO: 32486 - DNA, 228 bp, Zea mays
  Peptide Sequence Number=SeqID_74265
atgggcatggactatggaatccctaggacgttgggcaagttcctgcgccgtgtctccgtccgtgcttacggcatgcagcggcacctcatggagtcgttcgattcctcgccaacgtctacaacgcttaaatccaccttctgcccgccagaagttgttgcggactgtcaaacgcctaacttttcagtccgcttccatgataatcgttttggtgaaaatcgtccaaattaa

SEQ ID NO: 32487 - DNA, 342 bp, Zea mays
  Peptide Sequence Number=SeqID_74266
atgacccagagcgtcgcgccgacggtgaggagggacttgaggcgccggtcgttccacttgatctcctacgttcgaggcaggcaggcagttccagagatggcgggtctggttggagatagccttaaagtgttcgccggaccgctcttcgggaacatcgccttccagaggcggttcgagcaggagctgtgcgtgcgatggagctatggcgccgaggtaacacagctcggcgccataggctatggcgccgagctcggcgccaaggtctatggcgccgagcttggtaccacgtcggcgccacgacgtccgagttgtgccagcgcaacacgtacctcggcgccatag

SEQ ID NO: 32488 - DNA, 1059 bp, Zea mays
  Peptide Sequence Number=SeqID_74267
atggcgtttctctcgcggtcgaggagccacgctgtcccctcggcgctgctggtgctgctgctcttgtcggtggcctcggcggccgcggtgggcgtggcggccaagacggacgtccacgacgtcgcggaggagagcaacaaggacgaggagtcatggacgggctgggccaaggacaagatctccgaggggttggggctcaagcaccatgccgacgtcgacgaggaggagaccgcgcgcaaggctggccacaccgtcaagtccgcgcgcgagtccgcccagcacaccgcctccggtaagaactccacggtgccccaccattcattcattcgttcttctcgttcgtgctatgatcgtgctgacgccggccaagtccatgctacagagatagggaagaaggcggggtacgccaaggagacggcgggagatgccgcggccggcgcgtcgaacaaggccgggcaagccaaggaccaggctaaggacacggtgaaggacgcggccggcgaagcgtccaacaaggcggagtacggcaagcagaagaccaaggaggccgccgaggcggcgagcgagagtggtgccgaggcgcacgagcggtcgaagaagggcaaggccatggtcgaggagaaggcccgagagaaagccgggcaggggtacgagagcgccaaggacgcggccggcaaggcgcaggagacgctgagccagaccgcggacgcggcggcggagaaggccgggacggccaaggacgcggcgtgggagaaggcggacaaggccggcaagaaggcgcaggagtccaaggaggcggccaaggggaaggcaacggagaaggcggcgtccgccaaggacgcggcgtgggagacggtggaggcggccaaggagaaggccggcgaagggtatgagagggtgaaggagaaggcgcgggagacggcggacacggccaaggagaggctggaggaggtgaaggagagggtcgctgggcccgacgtcgccgccgtcgacggcaaggggaagcaccggagggcggacgtggacaagtaccggtcggagtcggaggacgagctgtga

SEQ ID NO: 32489 - DNA, 312 bp, Zea mays
  Peptide Sequence Number=SeqID_74268
atggtcatcggcgctgccaacgcgctcgtcatggtaaaacgcgggcgcctagctagcacgccacgctgcacgtccaaatcctaccggtttcgcgtgctctggctttacattacatgggcaggtctcacgacggttgggctggagagccggctggtaggggaggacctcaacggctgcgccttcgtctactgctccctcagcttcctggacaagatcttctgcgggatcgccctgtttgccctggaatcgtacgaaggccggcaactgatcgggcgggcgcaacaccgtcgtcttccgctgcagatacgatga

SEQ ID NO: 32490 - DNA, 159 bp, Zea mays
  Peptide Sequence Number=SeqID_74269
atgatgtcctccctcctcttgccgctgctcgcccgccgcatcctccccattgctcgcagtcgcaggctcctaagcaccggatattctcgacgccggccggcgccctgtatgttgaagaagctcgcgacgttggcgaaatctggagtggacactgaataa

SEQ ID NO: 32491 - DNA, 177 bp, Zea mays
  Peptide Sequence Number=SeqID_74270
atggaggaagcttggatagtggaagggtatttttggagatcaatttgtagatgctggtggaagcgttttctttcctatactggccttctcgaaacctgtaggagttgctctaacagaccacacatcgaagtacaggtgcgactgggtgaagcttcacctaggaacgaatcaagctga

SEQ ID NO: 32492 - DNA, 448 bp, Zea mays
  Peptide Sequence Number=SeqID_74271
atggaggggattcataccttgctaccggatgcggatggtcgggagttgtttctcctcgcagacacgcccagaaggaacggcccagacggcagcacggcactccccgctgaatatcttgtcgactcgaagcgggaggagaactgcgcagagcgagtgattgcgctgcccgagatcttccatgggcacctccacgcgacgatacccagtcggcgcgcaacatctttctgcgctcccccgttggcgttagtgcgttccctgcgaagcactccggatgggatgccgggtggtacaggggcacagcgcgccgccttttatgcccaggttgtgccagggtcccaacagaaatcccgaaactccagtaattctactacggctggaactcgtgacgaggttgttatggcgcggcgagaattccgggcggactccgtgctagcctgctacaacgaag

SEQ ID NO: 32493 - DNA, 195 bp, Zea mays
  Peptide Sequence Number=SeqID_74272
atggcgcaatgctcagctctaaccatcctctttggtaagccttacacttcacaccgtaatcttgctgacgaggagtacatcctcgtgccgaagcaagaagttgctcaggaggtagcccaggatccagcaccagagcctgccatcgaggatctgcctgcctcagccttggaaggcaagccccggttttatgcataa

SEQ ID NO: 32494 - DNA, 372 bp, Zea mays
  Peptide Sequence Number=SeqID_74273
atgcctcttctgtcattgcactttgggcatagggataagctggagcttaaagccatgaaagacggttctgcaaactatgctactttggaaaagaaagcaaagttgtatgaaaagttatccagaggcgagctacctgatgaagaagacaaggagaaatactgtgtggatttcttccaaaaaggtttcgatcgtgtctatgagcctcagataccagagtgtagccatagagccactgatggtgcggaaccagtaaacgatcatgaagattctatgcctaatgccaaaccattggaccttggccgagcaggcactacaatcgacagagatgaacacaagcgctttgtgaggtgttgggttattgtataccagtag

SEQ ID NO: 32495 - DNA, 237 bp, Zea mays
  Peptide Sequence Number=SeqID_74274
atggcgtttccttgccggtacgggtccgtcgtcgtgccgctgaggttgggcagacctgggcatgcttcgaagggttggcatgcgctgcgccgtggccggaattgttgccgccacggacccgtcgtcgaaactgggtgcttgggtgtcggccttgccgactctggttgggcgccgtcgtgtgtccctgttgccgtcgcgattaggagcggagggttgaagatggtgtttggaccgtag

SEQ ID NO: 32496 - DNA, 285 bp, Zea mays
  Peptide Sequence Number=SeqID_74275
atggccggttcaaaagatagttccgatgtttctcctagcaatatcatcgaaccgactatggagaatctatcgaccgaagatcagcaggagatcgaggaacacaaggagcagctgatcaaggaagcgttggcgaaattcctggccaacttcaaggtgaacaggaatcacagggtcgtccaacagcgggcgacttatctggcttcgctccaacctactacatctaaccaaaacgtaaagggtctggttggtggggctcctagagcaccttctagactgattatttaa

SEQ ID NO: 32497 - DNA, 261 bp, Zea mays
  Peptide Sequence Number=SeqID_74276
atggcgacgcaaaagatgatccgtgccaaggtgcaagtgcatgtccaacacgggcctgaggccattggcgaggagtgcatgctgcagctggtggagggtgtcggcggcgtcaaggtcctcgccgtcatcatcgtagatctagctcgtccgcagcagcttttggtggccaaaagctgcgaaaagccgaaacaaacgggggcaatgtcggtcgaagcgaagccatcgaccatgggagtgacaggatctagagggtgtggttga

SEQ ID NO: 32498 - DNA, 585 bp, Zea mays
  Peptide Sequence Number=SeqID_74277
atggcgagcgcggatctgctgcggagggaggaggagttctactcctccctgtttgattccgccaaaggcgatggcgccaggtcgcgctcacagctgatcgagaggaagatcgaggccctggaggacatggccaccagggtcagtaaccggagatcgcggaagtggtttaacgaccgtttgctgattgaactcgtcccgcgtctttacgttgaagagatcaaaggcctattcgctcctccgccgtggggtgagcaagtgcccttgtcagcattctacagggcaaatgttggtgaatgggattccttcaggagcattgacatggatgctgaggaacgcgttagggccttcattgaagacgctagtgacaaagatgctcttgtgctgaatgttcaggacccatttcagagactactgctccacggtgtttgtgagttctacaacgtgagctcgacaaccaccagcagtgtgagagaagatgggaggccttggaaggcaaccaccatcaagaagaggcagggcaccggcgttccctctagaatcacactagttagctttctgagaatgaagaagaatggatcgcagtaa

SEQ ID NO: 32499 - DNA, 282 bp, Zea mays
  Peptide Sequence Number=SeqID_74278
atggctaatgcaacagtatgcatcttactttgcaaggagaggctcaccttgaggctatccaagttggaccagtgcgtgcaactgaagctcacggcggcgctcgccgacctcgactcgtcgaacaattggtgggcaaccatctgtggtctcagaaataagagcggaaatggcggcttgactgcttcattgctacgtggtggtggttcgcatatactcgcaactgctctcatctgttcccgctcagccgaaaagaaggctgtggggattggttccacattgtag

SEQ ID NO: 32500 - DNA, 522 bp, Zea mays
  Peptide Sequence Number=SeqID_74279
atggcggtgctggtcgaggtcaacgcggcagacgctggtgacgaggtaggagacgtaagtggttgcggattcggggacgagcgaggtggtggcagactcagctttaatcgccgaatcagagacgaggacgaacgaggtggtggcagactaagcttcaatcaccgggtcggagacggtgaggagggcatactcggaggccgccaccgcgcggatctcggtgacacggaggaggacgaggagacggaggacggggaagagaacgccagacacgatcgagggcgaggagatggagcacggggaggagacggcgcgagattggagggtggaagagagcgacgcgcagacacgagattagcggggatagagagtagagcggatgcagaccttccagtacgcccttccatgaacggtgcggaggctgatgactttgggccgacgatggtgcagatggggaatggaggtggcgtcgcggacaatgaacggaggcggcgacacggaggtaagaaaccctacctggcgtga

SEQ ID NO: 32501 - DNA, 213 bp, Zea mays
  Peptide Sequence Number=SeqID_74280
atgggagaccacaggaacatcaagtacaagatcaaccttcttcctcaatggtggtgcaatccccaacttaatatgaggaacatgtacctcaatacagcggcatggatcaaaggggagcacaagaataagaagaaaaggaggaggaataagtaccacatgcacctccaacccaagtccgcacaagggggaggtgaaagggaaatgtgcccttga

SEQ ID NO: 32502 - DNA, 168 bp, Zea mays
  Peptide Sequence Number=SeqID_74281
atgggcggcggatccactctccctctcctcttgattctctctctccagcgaggatctctgctccccaaggtatctgcggcggcttctagttggcgcagacggaggtgggggtatcgggacccgatctatagggatgaggagtccccagatttccaatatccaacataa

SEQ ID NO: 32503 - DNA, 468 bp, Zea mays
  Peptide Sequence Number=SeqID_74282
atggccccaacgagagcgctgcccgccctctggttgtccatggccgccgccgccagctatgtcgtcggagaaaagtactgcaggttgtgctatctgaagggcagttccatggtccccactatccaagcccagggcgacgtcgggctgctggaccgccgctgccttgccggctacgacttctcccacggcgacgtcgttgttttcaggttgtcgacggatcatgggatgaagatggtccagaggctgatcgcgctgccgggggattggattcagatcccggagaagcgggacatccggcaggtccccagcggccactgttgggtggaaggggacaatgccggcaacagctgggactcgagacactatggcccctttctttctttaacaagaactggtaagtttcacagtttaattatcagcacagcaggttgcaaaggcaaggaactgaacccatacacataccccgag

SEQ ID NO: 32504 - DNA, 393 bp, Zea mays
  Peptide Sequence Number=SeqID_74283
atgtggggtgcgtttgtggtggccgcgcctgggcggacgcctccaggggcccaggagccggtgtctgccatggagagggaggggaggaggcagtacgacaacggacaaagatggagggggaggggtctgggtggcagccgggctgggtcgtgtcgacaacgactggaggtgggagggaagggggctggcggctgcagggagaaggggaggagaaacctagcttttttctctaacgcgcaggagagctacgcatcttttatattagagagaagaaaagtctatctgcttgttgccctcaatgttccaaaatgggttattaagcccttgacaaaattaggagaaatttcttgtggaatggcagaaaagagactcgaggaggaaactgtcttatag

SEQ ID NO: 32505 - DNA, 249 bp, Zea mays
  Peptide Sequence Number=SeqID_74284
atgggggtgttgcaactccaggcgtctgtttatagagaagactacagaagtgctcataagctgaggctagctattgctactatagtgaaaaatgacactgtgggtagagctgtctctgacttaaatatggccatagatgaggaacgctacaaggatgcagcatatatcagagatcatgctggcacaggactggttagtaccgtggagttcttctatattgtttgtcccttgctatctaagtttctttga

SEQ ID NO: 32506 - DNA, 867 bp, Zea mays
  Peptide Sequence Number=SeqID_74285
atgacggctctcagctctcttacggaagcaaggcgacgtcagcaaggactcgaccgctcctacagctgtccctccgccaggctccgttgctcctccgacagccacgacatcacgccagcaaggtgccaagacctctccggctgccacattggcatggccttcttagagaaggttggccgcgcgggaccgaggacgagacaggcgctctcttggggccgctcgcttccctcacccgcgtggacgcttgtaacccccctactgcaagcgcacccgacctgggcgcgggacgaacacgaaggccgcgggacttccacctctctcacgcccgtctccggccacctcgcctctccccccttcgcgctcgcccacgcgctcgacccatctgggctggggcacgcagcacactcactcgtcggcttagggacccccctgtctcgaaacgccgacatcacaggtgtagccaaagtgaccccatctgacctcatcccccaagtcatacttggccacaaaccccttgttgaacccaaaccccttgccgaggctcctgctctcgcccccttccccctcgttgccgccttccttggggatagacagccgtggcgggccgtggcgccttgtgagtgccgctggatgttcttagcgggcgacgatggcaggaaggggcagcctcaggagccgcctggccgaggtggtgggttgtgggccgtgggcgcaaaggtcgacagagaggtggtgcacggggctcgggctcggcgtggagaatgggaaggacagggacaccgcccaatgcttcttcgcgggcccaagagagctttggggagtggcgagtggggacttcaggaagcgaagcgtacgagtggagaatag

SEQ ID NO: 32507 - DNA, 360 bp, Zea mays
  Peptide Sequence Number=SeqID_74286
atggtcgtcgagcgctaccccgcctcgtcctccccctcgcctgtaggtgccggtgccgacccctccaccgaaagtagtgtccgtgcgctgggaagcgccaggccgtgctcagaccgccggggagcagcaggccgtggtcgggcctgtgtgaggctgcgtcaggttgggtcgcgttcgtgcccgagggcctctggctggggctgcgcctgcaccacccgcaccggggccgtctcgcgttggggctgcgccctcgccgaggttgcgcccacgcctgggtcgcctctcgttgatggtaagcgccaggccagagccgtgcccgtgccactaggccggactgtgctctgctcatgccgtggctag

SEQ ID NO: 32508 - DNA, 258 bp, Zea mays
  Peptide Sequence Number=SeqID_74287
atgtggcagaggggctcgcacacagttcaccaccgcggagagcggaccaccggtggagtcgcgtctacagatccgagtggttcctccaaagccgtctccatgacgtcgagcggaggggaagcttggacgcggcagcctggtcgcatccgtcaccatgacagcgtctggacaagatggagcgaggttgttttccgtgcaaaagttggtgttctctatcggctccctcataagggaattatccctagagaactggagtga

SEQ ID NO: 32509 - DNA, 318 bp, Zea mays
  Peptide Sequence Number=SeqID_74288
atgctgctgcccaaggaggcgacacaacggcaaccctcttgcttggcgaagcatcgcgtgatgaacaaccagagaagatgtcttgggagggtggttcgctcgcgatctgttgatcaggccgacaacgtgcgaggaggagacgacgatgtcgatggtggagcctcccgatcggcggtggcgacgagctggcgtaaatggatgtgtagacgaaggggcgcgacacaggcggtcgttccggttacgccgcaggccacaccagttgtaccgtcgaagaagatgaagaagtcaatgttgtcgaagtcgatgttgaggatgtga

SEQ ID NO: 32510 - DNA, 1038 bp, Zea mays
  Peptide Sequence Number=SeqID_74289
atggaggcccaggcccacacgtcatgtaaccggagcgccggttactacgtgcaagaaactgcaccgccactcgcgccaatgtcgcgccttctcgactatggaaccgggatcgggaaaggggatactccgaaagggatccttctccgcgaaggaagcgggccacgagcccccctactgatcagaggttcgaaggctagcccctcggaagggttcaacagccgcctcagagcactcgggctctgcgcccactactggtcagaggttcgaaggctggcccctcggaagggttcaacagccgcctcaggccactcgggctccgcgcccactactaatcaggggttcgtaggctggcccccgaagggttcgacagccgcctcagacgcagagcgagggatgacactgggaagctccacctcgcccgaccccagggctcggactcagcctcggctccggaagacggcggattccgcctcgcccgaccccaaggctcggactcgggcttggccccggaagacgacagattccgcctcgcccgaccccagggttcggactcgggctcggccccggaagacgacgaactccgccttgctcgaccctagggctcggactcgggcccggccccggaagatgacgaactccgcctcgcccgaccctagggctcggactcgggctcgaccccggaagacgacgaactccgcctcgcccgatcccatggctcggactcgggctcggccccggaagacgacgaactccgcctcttccgatcccatggctcggactcgggctcggccccggaagacgacgaactccgcctcgcccaatcccagggctcggactcgggctcggccccggaagacgacgaactccgcctcgcccgaccccagggctcggactcagccttggcctcggacgacggtctccgcctcgcccgacccgaggctcagactcgacctcgacctcggaggagcctccgcctcgcccgacctagggctcgggccgaccacgtcacaggaggggccatcattaccctacccctag

SEQ ID NO: 32511 - DNA, 756 bp, Zea mays
  Peptide Sequence Number=SeqID_74290
atggcagttcacagtaaaggcaaatctgcttttttggatgttgagccgtggctggagccaccaaattccgaccccttccctcttcagaataggaaaaacagaagcttgatgataggttcttttcttgatggtggtactgatgagaacggtgacagtgaaaggttcataagacggcgccagaaagctgatggtgagctgttaccgagggaggaaaatggtggtgactttctggcaagcgttggaaaaggcttggctctgaggccaaagtctagcaatcgaccagacatgaacaagagccagcagaatctttttgcaatggcggagcctttgtttggcaatggtttgcaaactgtaaggaaatcatccagcactccggagttccaggagccagagaccaacaccagttcatccatatgtcgtttacgtttgctggtgaagccgatgtatgaacaccggtatgatcaggaccaacaggtcctcagcgtgccactgtcatctatagagattaattcttcaactcaaacacaccctaagtttgcatcttctatcaagcacgcaaggtttagatctatgccgaaccttgttactacgaagaaacaagatctatatgttgtcgactactttcgcaagataacgagcgttgtctctgatcttgccgctgttgatgctcctctcagtgacgatgacgtgctcacctaccttttcaacggtcttggatcagaatatgactttcgtctcttccgtgatgaccaatag

SEQ ID NO: 32512 - DNA, 576 bp, Zea mays
  Peptide Sequence Number=SeqID_74291
atgacatcctcgtcgtcgacgaatacatcagacggcgccaagccgtcatcttgccggagaggccactggcggcctggggaggacgagaagttgaagcagctcgtgaacaagtatggggcccagaagtggaaatccattgccgaaaaactggagggaagatcaggcaagagctgccggctcaggtggttcaaccagctggaccctcggatcaacaaacggcccttcacagaacaggaggaagagcggctgctcaacgcccaccacgcccacggcaacaagtgggcgctcatcgcccgccacttacccggccgcacggacaacgccgtcaagaaccactggcatgtcgtcatggcgcgtcgctgccgcgagcgctccaggcaccatgccagggccgcgagctccagctcccctctctccatcaacttgtctccaagagaaacgctagacgtggatatcggcgaccgtgtccgtcataaacatcgccgaaaggattatcacgccggtgacagcgccgacaagccattgaagaaggacgtgcccttcattgatttcctcggcgtcggcatgtcctcgtaa

SEQ ID NO: 32513 - DNA, 456 bp, Zea mays
  Peptide Sequence Number=SeqID_74292
atggacgaggcaccccggcggcggatggaggaggcccacgagcctgcgccagcgcctaggtcgcgccggggctgcacctcgccggaggagccagccgccagggcggcgccgtggccactgttgcctcgtgacgaggctccgtgccgtgcgccgccgggccgttgcccgcgtcggggccggcgtgggcgcgcccacgcaaggggccacgcgcacctgcgccgcgccgtcggagccgggggctgccgcgctgaggctaggcagccacgcccgcgccgagctgcgaggtgtcgcgccagtggtaggggcaaccccgggagggaggaggagcctcccggggtcggcggcggctcaggtgggaggcggctgctgggtgggagagagccgccggcggctgcattgggaagggaggagagctcggctgggaggaagaaggccgcctccgggagggaaggatga

SEQ ID NO: 32514 - DNA, 390 bp, Zea mays
  Peptide Sequence Number=SeqID_74293
atggatatgccaaatgacacttgctcttcaccaaaactccacacaagactgaggctatgggaatttgcggactgttatgtttttgaaccagttggtcttaatgatcttttactgtcagtcaaccggatcaatggatcaatgaatctagtggaggaattgccacagcatggcccctctataaatccaaaagttcaaatagtgtttggtgtaataggagtgctaaaacttgcagttgggacatatattctggtgatcactgaccgtgattgtgctggatcctacttgggacatgcagttttcaaagtgagaggtatggtaatgtttaattacttccagttacaatgtctatattgcactatttattccattcacagaggctacatgaactag

SEQ ID NO: 32515 - DNA, 387 bp, Zea mays
  Peptide Sequence Number=SeqID_74294
atggcgacccagcctaggccaaccccgaggacggagtcccagcgacgacgagcttcacttgcggcggaactacgcagccctcccagatgtccagtgagcaattgccgaggcacaggtcaccgcgccaatttataccccgaagtagtgcgcggaattcggtatccgttgcgcaagagacgggctcggtccctgcgcggaattcgcggcgccaggtgcgcgcccgcccggttcgatggagacgatgaacagggtagcggattgtgtcgagcgcgagctactggaaagtgggcccaagccgtcaatgaggggggagaacgaacggtgctaattccaattcgtgttaaccatgcaatttggtcatacccacagatggtgaagttattataa

SEQ ID NO: 32516 - DNA, 186 bp, Zea mays
  Peptide Sequence Number=SeqID_74295
atgccatttgggttccaagaagaagacatgaagatttgtgagcgcatgtggggagcttcgacaaccctcaattcgatgggggatgtagcggaccgaagggaattcctcgtcggagctagcacaccgctgcggagccgctggaggtcgatgctagggaacctcgctgcacgattgaagctgcattga

SEQ ID NO: 32517 - DNA, 533 bp, Zea mays
  Peptide Sequence Number=SeqID_74296
atgaagctggtgtggtgccccgacacggcctccaaggcctacatcgacggcgtccgcgcgatcgccgccgccgccgactactccgacggcggcggctcggccgagctggtcgccgccatggccggcggatggaacgcccagctcatcgtcgacgccccggccgactccgctccgcctccgccttcagcgcctagccctaataacaacccgcccgccacgagcctcgcgctcgccgccgccgcgcgccacacgggcggccgctacgcccgcctcgacgcccatccggacgagccggcggcggcggccaaggccgccatggcgcggctggagggcgtggacctgctcgtgctggacgcgcggcgccgggacgcggcggccgtgctcagggcggccaggccggggcccaggggcatggtcgtcgtgctgcgccacgccgacaacaccgccgcatccgcctccgccgcgccgttggggaggatggcggccgggaccaggctcgtgcgcgcagcctacctccccatcggcgcccggcg

SEQ ID NO: 32518 - DNA, 363 bp, Zea mays
  Peptide Sequence Number=SeqID_74297
atgactgtcgctttcggaaatcgggataaacgaagattgaagcaggtcatggacgcgctggaatttgattatctagattacgaaaggtttgaagaagaagctggtggagtgaaaaggaaaagagttctaagtattatgaaaatacaagctatgaggtcagttcaagaggacaaaaagaaaaggatatttccgaagaaacgaaagattgctgatgaaggtgagtcttcacaatcggggccaaaatcccctgcccctaaaaagcgaaaatcatcgaaggttggccgtgctgagaagaaaatacttgtacctccaaagcaggtccctgagatgagaccccttcgacatcttctattggcgttatag

SEQ ID NO: 32519 - DNA, 1752 bp, Zea mays
  Peptide Sequence Number=SeqID_74298
atggcggcggagatggtcggctccgtggttgcccaggagacggtgagccagatcctctccggcctggttcagaggtacgcggaatcgagcgacgcaacccgaaacctcgagaggctagagatggcgcacatcaggctggaggccgccctggacgcgtccgacaggtggcagatcgccgacgcgtccctgcttcgctggcgcaagaagctgaggcgcgtcgctcaggagtgccacgacgtgctgcacaggtgcaggcagcagcaaggcgtggcgcaagcgcaagcgcaagagccggcgacgccgagctcctccctctcccccctggccgccctgcccacccgcatcgcgcgcgcgaccaagtcgctcatcttctccgccttcgtcggcgacgcaggcgcgccgagcaggtccacggtgcaacggttcgagtggttcgcggacggggccggcgagttcctgcgctacgtggaggtcggcggcggcgcggcgccgcgctgccacgtgccgctcagacggtctctcaccaggcacctcttcgcgggcatggagctgctgctgcagcacaagatcgtctggggaggaggccgcgacgagtgcccgtcctacctgctgtggctggtcccttccgtcacgcccgaccacgggatcgaggcctgcctcaagttcatccacagggaccacagtgcgcccgagaacaacttctttcttggcgccatgctgcagatatcggagagcacggacgtcgtcgggaccgtggtgaactgcctgcggctgttccctccgtgcttccagccgacgatcgaggccatcaagaaggagctcacccagctccccacgcaggacttctcgtgggtgccgtacgtcgatctgtggcacaggaagcactgggacaacctccatggcttctgcacccagtggttccgcccggacccgttgtgctgcaagaagcagcagcaccagcagcaaggtccgaacggtagtagtaggccttcttggtgcagcagcggtgacgacccagacatggttgggatcccggatgtttctctggattcggtcattctaatgcacctggagtgccaagtctcggtgccctcggagtacaacggtgcttacaggtacagcaagcagaaggccaccacggcgtcgccgccgtatcgacgacgatgcagcagcagaactagtccgactccgaccacgcaggacagcgagtactccccatgccgccgtctgaaggccgggctccttttcacgccccatggctgtacgaagcacaggctccccgaagagaagagctccgcggtggtcacggtctacggcgaagagcaacgctgcgtgcacacggacattaccctggaccagctgaacgagatcatgctgccaaaggcggcagactacttctaccggaaccccgaggcgacggcctgccagatgctttggaagtctagacatgggaccgagtacatcgagttcgagaagccaaggacggaggaggaggaggaggaaccgccgtgtgcgaggagggcgatctgtaggggaggcagtaggaagaggaagctgcagctgcaggtgcagcaagatcaggtgcaggtgctcgggagctggaaccgcaaggtggcttgcttcctcaactcgtgggttgcccacgcgcctgtccgcctgcgaggtctgatcctggactggattcggagaggcaaggaaagtcagctaccagcgccaccgccggtgcaccagctggaaatctcaaccatgtga

SEQ ID NO: 32520 - DNA, 243 bp, Zea mays
  Peptide Sequence Number=SeqID_74299
atgaagggtcgggcctcacctgcgcttagccggaggaggggagcgactctggactgggacgacgacgacgacgagaaggagcgggagcgggatgagacggagcaggaggagacggagtgggacagcgagccggaggaagagcccgaggtggagcgagacgcgaagcctagaatggaaggggaggaggccacgtaccgcgggttgaatttaaagaagtgtagagaaatgggccaaagcaagtaa

SEQ ID NO: 32521 - DNA, 2019 bp, Zea mays
  Peptide Sequence Number=SeqID_74300
atgatgctgccaaaggcggtagaccacttccgcgagaacggtgaagcggcagtccaccagatgctttggaaaggcgccgtgtatgttcttgacttcttggtcgagaagggaggggatgctacaaatacttattggatcctaatgaccgagagggtcagttctatggttgtccaggagacagttagccaaattctgtctggtctgattcacagttacgagggcaaaggagactcaaatccaaatgataacttggagaggcttgagatggcgcatatcaagttggaagctgctcttgagacatgcagcaagtggcacatcactgatttgtcgttgttgcgttggcgcaagaagctgaagcgagctgctcaagagtgtgatgacacgctatacaaatacaagaagatgatccttgaagatgaacagatggaacaggaggttaggaattcctactttcctagacgaatagcgcatgctaccaaatctttcattttctctgcctttggccacaacaactacgagtccagcagatctgctgttcgaagattcgagtggtatgcagatggtgctagtgagtttctgagattcgtagagcttggtggcgcaccttgctgtcacatgccattcaactcttttgccaagcacctttttgcaggcaaggaactacagcacaaaattgttcgtggaaacgagtaccctttgtttctactatggttgatgccctttgttacggaagagcatggaatcgaagcttgcctgatatttatcaagaaagacggaaatacactggaggatgactttttctttagtgtaatactgcagctttcagaaagtacagacatagttgggatcacaatgaagtgcttgcagttgttcccccatcattttcagcccacagttgatactatcaagaaagaacttactcaactaactacacaggacttttcatgggtgccatatgttgatctatggcacagaaaacactgggacaatcttcataggtttagcactcaatggtttcgcccagatccattatgttgcaagcagcatgatcagcataagcttcagtatagcaacctaggcacagttgatgcttctctggattcaattattgaagtaaatatgcagtgtcagatctcgctacccaagtacaacaaccatcggaccgcactgtctgaatgcaaatattctctgcgcgattatcaaaagctgaaagctggattcctctttactccccattgtccttcagaaaacatgctacctgcagatacaagttctacgatggtgccgatcttcaggaggggacaacattgcgaggatactgacattgccttggaacaactgaaagaaatcatgatgtcaaaggcgatagattacttccgacaatacactgaagcgacagtctaccaaatactttggaaggctatacatggcactgcgtacattcattttgaaaagccagccatggaggctccaggcacctcttcccgggcgaggagctgcggcacagaatcgttcgcggggatgagcgccgctcgtttctgctatactggcgtggcgccctttcgttacggacgagcatgggacagaagcctgcctggcgtttatgaagaaagacagagacacactggaggtggaggagagcttcttcttcagtgtgatactgcagctctcagagagcagagacatggttggagtgctcgcggctgttccccgctcattttcagcacgcagctgacaccatcaggaaagaactctcactcagccgcctacacgggatgggacttctcatgggtgccgtatgattgctggtcactggcacaaaaaacaatagacccgttatgctgcaagcagcatgacatcctctgcgcgattagcgattaccagaacctgaaagctggactcctcttcagtccccatggttcctcggaaagcatgctaccacgggatacagcttctacaatggtggccatccacgggggagaacagcaccgtgagcacaccggcgtgaccctggagtag

SEQ ID NO: 32522 - DNA, 225 bp, Zea mays
  Peptide Sequence Number=SeqID_74301
atgcgtccgatccggctacccgagccgccgggtgtcgacggcatggagacgcccgagatcttctctggcagcggcactggtggcgccgccgtcgttcgccgcgccgtcctcataggcaacggctcccccggcgcagaaaaccagtgtctcggcctcgcccgcgccctcggccttgccgacaacctcacattctacgtcagttccctctcctctacttctccctag

SEQ ID NO: 32523 - DNA, 1476 bp, Zea mays
  Peptide Sequence Number=SeqID_74302
atgggcgaaacaatctcgttcgcccctcggaaggccatcaagtcccaagtcttggcggacttcgtggctgaatgggtcgacacccagctcccaacagtttcgatccagccggaactctggaccatgttcttcgacgggtcgctgatgaagacaggagccggcgcaggcctactcttcatctcgcccctcgggaagcacctacgctacgtgctacgcctccatttcctggcgtccaacaatgtggctgagtacgaggctctggtcaacgggttgcggatcgccatcgagctaggggtccgacgcctcgacgctcgctgtgactcgcagctcgtcatcgaccaagtcatgaagagctcccactgccgcgacccgaagatggaggcctactgcgatgaggttcggcgcctggaagacaagttctacgggctagagctcaaccacatcgcctggcgctacaacgagactgcagacgagctggctaaaatagcctcggggcgaacaacggttcccccggacgtcttctcccgagacctgcatcaaccctctgtcaagatcgacgacatgcccgagcccgaggcaccctcggcccagcccgaggtaccctcggctcagtccgaggcaccctcggctcggcccgaggcatcctcggttcagcccgagaaggcacccgggggctacacgcacctgttggtcgccatcgacaaattctcccagtggatcgaggtccgacccctaaacagcattaggtccgaacaggcggtggcgttcttcaccaacatcatccaccgttttggggtcccgaactccatcatcaccgacaatggcacccagttcaccggcagaaagttcctggacttctgcgaggatcaccacatccgggtggactggggccgccgtggctcaccccatgacgaatgggcaagtagagcgtgccaacggcatgattctacaaggactcaagcctcggatcaacaacgacctcaacaagttcggcaagcgatggatgaaggaactcccctcggtggtctaaagtctggggacaacaccgagccgagccacgggcttcacgccgttcttttagtctatggggccgaggccatcttgcccatagacttagaatacggttcctcgaggacaagggcctgtgctgaccaaagcaaccaagctaatcgagaagactcactggaccagctggaagaggctcgggacatggccttgctacactcggtgcggtaccagcagtccctgcgacgctaccgcgaccgaggggtccggtcccgagacctccaggtgggcgacctggtgctttggctgcgacaagacgcccgagggcggcacaagctcactcctccctgggaagagccgttcgtcatcgccaaagttctgaagcccggaacatacaagctggccaacagccaaggcgaagtctacagcaacgcttggaacatccaacagctacgtcgcttctacccttaa

SEQ ID NO: 32524 - DNA, 312 bp, Zea mays
  Peptide Sequence Number=SeqID_74303
atggaggtcttcttcaaccttactgcagtgcgacgaacagggggcggtgttgaatgctcggccatggcctcgacgatggagatgaaggcacgaaggagaggttcgacgaaggaggagcaggggaactctgaggtgtgctcgcgagtggctggaacatcatggaaagctcctacggcggcaacagcaacggtcgacgcggctatgctgcgtgttatagatagtgacagggacgacgacaagaaaggaaagaagaagatggagaagaagagatactacaacaagaagaaggatggagaggcgcacatgggatag

SEQ ID NO: 32525 - DNA, 523 bp, Zea mays
  Peptide Sequence Number=SeqID_74304
cgccgcctacgccgctccgattgctgtgccactcgacagagagaggctaacagcagccaagtccgacttcgggcaccataggaagctccgcctcgcccgacctcagggatcggactcggcctcggcctcggcctcggaagatgacgagctccgccttgcccgaccccagggctcggactcggtctcagccccggaagatgacgagctccgcctcgcccgaccccagggctcggactcggcctcggccccgaaagccgacgaactccgcctcgcccgaccccagggctcggactcagcctcggccccggaagacgacgaactccgcctcgcccgaccccagggctcggactcagctttggcctcagacgatggtctccgcctcgcccgacccggggctcggactcgacctcgacctcggaagatagactcgacctcgacctcggaggagcctccgcctcgcccgactcagggctcggaccgaccacgtcataggggggcccatcattatcctacccctagctag

SEQ ID NO: 32526 - DNA, 273 bp, Zea mays
  Peptide Sequence Number=SeqID_74305
atggtctggccctcgggaagaaactacgccaagcccgaggtcggcctcagccttggaacaaattctacctcgcccgagcccgacctcggctacctgctccccgcgaatcctgcagaagaccactcctcccactgtgtcctgcatgtctacgagccccaaagaaggctcggccacggcctcgacaagatttctgcctcgcccgagcatagattcaatcaaccccagggacttgggatcctttccctctcccgaccagcttgtactccctactaa

SEQ ID NO: 32527 - DNA, 435 bp, Zea mays
  Peptide Sequence Number=SeqID_74306
atggccgaggctcaggctacaatcacgacgtaccctaagacatatccgagacccccgggagagattcgtgatggcaacccatcagagggaggcatcgagcccttggaccccatcaacaggtctgggaccaggcgattcacccgcaggggtacctggattatgcccctaaacacgcgtaaccacaaggctaccgtcaaacacattccccaaggtcaagagattgtgaaccacgattcacccgaggctccactcgatagtctctcaaaactctgccttgcccgagcctgccctcggacgagggacgtactcgggaaatcctcgtcccacccgaggtcccctctccacagaggcgccgtttccgcctcgcccaagcccgtctcaggcgaagaagacaacctcgagctaggcctcgaccaaaggccacaggggacctga

SEQ ID NO: 32528 - DNA, 474 bp, Zea mays
  Peptide Sequence Number=SeqID_74307
atggcgcctgaggctggactcggctgctgtcagcctcaccctggcgggtggcacagcagtcggagcaaggcaggcggcgctgttttcctgtcaggagtgagagctggtctggtctggtctggtctgtttgcagcagaggagcgatggtggcaactgctgcatacaccgttgttgcagttggtcatacacggccggcgaccagtcctcgatcgtctctccagtactcctatagctaggcaagaaagacacacacactgtggaaggaccatttgtgtcgatcgtggtcggcagcacagcctatgtaacggtgaagcacagcgtagaagaagctcaccatccatcgctgtggtttttattcttagcagaggaagcatcagaatcggcagtggggcgccgggtccaccggtggcgtggctgagcccgccgcgccgcgccgcccgtcctgcttctggcaggccagcgcaggggaactaa

SEQ ID NO: 32529 - DNA, 144 bp, Zea mays
  Peptide Sequence Number=SeqID_74308
atgagagaccgtgccatgttccatctccgcgcgcttttctcgcgagcgccctctgctagcctgccttctcctggtcacgcgctgcctcaggcctattttcagcaactgccatgtcctctcaagtatgacaaaatggagatgtga

SEQ ID NO: 32530 - DNA, 471 bp, Zea mays
  Peptide Sequence Number=SeqID_74309
atgggcaagagcaagaagggaggaaattcgtcgcaccactccggcgacaagcggaaacacgagccgagtcccccctcggaggacttcggcgactccgagtactcggaggaggagttttccttcgagtctgaggggttgccggtctacgcctctcccccggcgtcgtccgatgactcggacgattcccaggggatcactatcgaggtgtggacgtacatccgggccgtcgagcactctgggctcgagggctcagatgagttggagatctcctcggatgaggagatctcctccgactcgtccaaggaggagagcggcggtgacggcgacgacgagggcgatggcggcgatggaggtgacggcggcggtgacagcgatggtgacggcaatggcggcaagggcgacagcgacggtggcagcggcaagggcggcagcgacagcagcaaggacagtggcaaagtgccactggcttaa

SEQ ID NO: 32531 - DNA, 384 bp, Zea mays
  Peptide Sequence Number=SeqID_74310
atggctcgggcgtactggcgcttcatcgagtgcgccgggctcggtgggtcggacgagtcgggggtctcctcggatgaggcggactcctccgactcctccgaggagtggagcggcagcgacggtgatgatgagggcgacggcagcagcagcggcgatgatgacaagggcgacagtggcagcagtgatggcagcaagggtgacggtggcgatgacagcagcgacgacggcaagggcgatggtggtgacgacagcagtgacggtggcaagggcaacggtggcgacaacagcaacgatggcggcaagggcaacgaaagtggcgatggtgacggcggcaggggcgacggcagcagtggtaaggccagtggcataatgccactggtttaa

SEQ ID NO: 32532 - DNA, 681 bp, Zea mays
  Peptide Sequence Number=SeqID_74311
atggcgcgtccaggggggtcgatccgcggtggagcgcggtcccgcggtggcccttcaactacggcaaggaattcaccggagttccctgtcccagctgatgcgattccactgcagaagcaacccacgcaccaaggcgatccgtcccagcctctcacgagtcccggagcggcggtgcagaaacgagtcctcggcagcggcgagttgttcgtgtgggtcacggcggcgcaagagctggcgcggagtggcgatggcagaaaagcaagaggggctcgagcggacgagttcgtgggatcgatgcttataggcaaggcggggtatctttggttatttaatccctttttggatgatgtttattcacatgtgatagtaggtatagtcaatacacacaaggatatgggaacttttcgaaaaacaactcatgatggtgaatccatcatggccatgatggattcatcattcagaaagagtacctctatcaggtatgttgcttgggctcccacaccttcaaatggtcgatttggtgatgtatatataggccccaactcaaatctagacgttggagaaaagttgttgccctctatggcacatcaaacagtccggtgccccggctttcacattggacagtccagtgtcacaacggatagtttgatggcttttctccctagtgccacccggacctag

SEQ ID NO: 32533 - DNA, 258 bp, Zea mays
  Peptide Sequence Number=SeqID_74312
atggcttacatcacgtgtcgtagaacacgtggcagcaccggtcctcgccttgtgtggggagcagtgactgagatcgcccttcctcgtgacagctatggaccctcttggctcggggtccgtatggtgttcgaggaaggtcccgtctcctccagcattggccagcatgtagcagcacctgatctccttaagacagaggccagcggccttactgggcagtcccagccactggaccgagatggaccaccattaacatggtga

SEQ ID NO: 32534 - DNA, 244 bp, Zea mays
  Peptide Sequence Number=SeqID_74313
atctatggctttctcggcaagaacgatttcaagggagatggaggtgcaaatggggaaggccccaccatgtttgaatcccttcctaatgaggtaaagagtggtggagatgacattttcctcaattttgaggacacctccacagggttagtctggcgcttccgcttttgcctctggaataatagcaagacctatgtcctgaccaagggttggtctgtctttatcaaggagaagaatctcaagaaag

SEQ ID NO: 32535 - DNA, 642 bp, Zea mays
  Peptide Sequence Number=SeqID_74314
atggggcacgtcggcgtctcgggtcttgagcgcgcggtcgaggtcgcctgggcggtcgagtcgcagggcctggtggctcgtgtcgcggcgtcggtgtcacaacggacgacggtgaacgggttcgagcgcgtgtctaggcgaagggttggacggggttctgtcacgtctccgtggcttcttgggtccggccgtggggcgcggtcggccaagtcgggtcgcgggcttcctggtgtggtcctgctcggcggcgtggtcggcttcagtgcacggtgcgctgggcgcgtgtgggtccggtgcggtggcgcggcgcctgggcttcgggtgtcggtattgactactcgacacggggatgagctcctggaggcgctgcggctaggtcgtcgagatagggtccatggcacaggagctcggctggagaagtgtgcgcgtcgggctgggggcgctgctcggtgggcagggcgaggtggagcgtgcgcggggcctgggcgcacggctcttgggtcgctgcaggcttgtgaatgggcgcgcgcgtcgggtgcgcgttggggcggccagggtcggcctctggcaggggcgcgcgtagggcgggtcgtgcgctgggcgcgggcggccggggctgtgcaggcgcgggtgcgctcctga

SEQ ID NO: 32536 - DNA, 228 bp, Zea mays
  Peptide Sequence Number=SeqID_74315
atgtcgttcaccccggagaaggccagccgctcaacgctcgtcgatgtgcgaagctatgcacaaatcggaatcatcgtcgttcttgcaaacgccgtttggaggtcttatatgagcgttatcgcattccatttccaagtagcattcataagtcagtcctggttaaaattggagaacaattcgatagcatatgcacataagtgctttaggtccctcagtagccaattttaa

SEQ ID NO: 32537 - DNA, 726 bp, Zea mays
  Peptide Sequence Number=SeqID_74316
atggccccctgtgacttggtcggtccgagccctaggtcgggcgaggcggaggctcctccgaggtcgaggtcgagtctgtcttccgaggtcgaggtcgagtccgagccccgggtcgggcggggcgaagactatcgtctgaggccaaggctgagtccgagccctagggtcgggcgaggcggagttcgtcgtcttttggagccgaggccgagtctgagccctggggtcgggcgaggcggagttcgtcgtcttccggggccgaggccgagtccgagccctggggtcgggcgaggcggagtttgtctcttccggggccgaggccgagtccgagccctgggtcgggcgaggcggagtctgtcgtcttccagagccgaggctgagtccgagccctgggtcggggcgaggcggagttcgtcgtccgaggccgagacgggggccgagcccctgggtcgggcgaggcggagcttcctatggcgcccgaagccggacttggctgttgtcagcctcactctgtcgagcagcacagcagtcggagcgacgcaggcggcgctgtcctcttgtcaggccggtcagtggagcggcgaagccatccttgcattaaatgcttctgcaatacggtcggtcggtgtggcgatccgcccaaggttgcttcttggcgaagactgggcctcgggcgagccgaagctttgtgctgatgggggttaccagctgagattaggagtctcgggg

SEQ ID NO: 32538 - DNA, 312 bp, Zea mays
  Peptide Sequence Number=SeqID_74317
atgggggtttacattgaagcttttgacgaagtattagccggcagaggggacttttgtgcctgtgtgggtgttcgaggggccgtgtcattgctcgaaaatgttggctatgaacatgtgaaggctgtaatttatctagaatttctaagtgtggatgaacgatggaagaaagatagcagacgaagctatcaaacaaaagtgaagaatggaactttcttcccccaccccccggaaccatatgaccctgacgttgatctagctctaaaggggatccttgatgaattcaagatggtaaacacaacgatagatgaatga

SEQ ID NO: 32539 - DNA, 638 bp, Zea mays
  Peptide Sequence Number=SeqID_74318
ggcgtaggcttcgggtggccgatgaggtcctgggcccgttcatcggtggttgtgtagatgtccacctcccgaaacagctgttccgaggtggtgggagctttctagaggatggcctggacaaaggtcaaattgttacacccgcgatagaaatcttcgatcatggcagcctccgcgacggcagggatgctattcctcatggggctcttttacaaagatgcatcagcaaaggggtatggagcgacccaggccgttggattagagattcagatcgccctcaaccgtccatcctagatctacggttcagattaggagcacgaagggatatcgcgatctacagttcatgggtcgtcttcaaccatcgaccaggatacccggcgacgcccgcacccacggcgaagccgcgctggcgagcaccccgacatagcgctctggcgagccaatttgagtgcagatatgtcctatgcgctgaggatagggcgaagcttatgaagacaagccttaccgaagatggggtagccgtgagggctgcccacggttgggtacggattcgcaacggcggacactccgatgagcaattggttgcggaccagggcaccccctcgcctgcgaagaccacaagctcaatcctagaggcgtga

SEQ ID NO: 32540 - DNA, 252 bp, Zea mays
  Peptide Sequence Number=SeqID_74319
atggccctcggtgatgatgcagtgggccacgatggccaggacatcggcgatggctctgcatatgaggtatcacatttcgccgatgacctcgtcgttgaggtagaagagctgatggctgctttggctagtcaggataagtttctcaggctttctactcgtgagaggaaagattttaaaattcaaacacgacaagacaaggaccaaaagaaaacacatacttcgatctgccctgagatgggtgtcatgcagtga

SEQ ID NO: 32541 - DNA, 480 bp, Zea mays
  Peptide Sequence Number=SeqID_74320
atggggaagcctggcccatcactcctcatgctcctctgccgaggctacagggcaagtgcagtgtgtggtgcactggtgcggcagtggctagtgggcttcctgtgtggcagtggccagtgggctgcagtgcttgctgtgtgggcgtggggctgtgcctgggcgagggcgacggaagattggaagtggactgtggtggccaacggcagatgggttgtggtggcctgctgggctacttgctcctatgggccgcccatgagttccaagtccggcctcgggcgccataggaagctccgcctcgcccgaccccagcgctcagactcggcctcggccccggaagacgacgaactccgcctcgctcgaccccagggctcggactcggcctcggccccgaaagacgacgaactccgcctcgcccgaccccagggctcggactcggcctcggccccggaagacgacgaactccgcctcgcccgaccctag

SEQ ID NO: 32542 - DNA, 1474 bp, Zea mays
  Peptide Sequence Number=SeqID_74321
atggccgccgcaaccttctccgccgccggccgccggctcctctccaccgccgcggcagcggcagagaaaaccgagctccccgtccctatcgcccgtcttcgccagctcgcccgcgctggccgcctcgacgacatcgacgcgactctcgcgcccctgttcccttcccaccccgtcgccgcgctctcggccctctccacgctgggcctccccgaccgcgcctccgctctgctcggcaccatgacgtcgcccaataccgcgcacctgaacgcggtcctcggtccactcctccgccgccgccgcctggccgggctcgtgccctcaatcctcgccgcgcatgcctctgtcccgcgggacgccgtcacggacagcatcctcgccaagtcgctctgcctcacctccggcgccgactccgcgctccacctcctccggaagccttcgtcgggagcgccgccgtcgctccagctcttcacaaccatcatcgactccttctacaagcaacgcctcccgcaccgcgccgaggagatgtggcgcgccatggtccaggaccacggcatcgcccccgacaccgctgcctacaacgccctgctcacctacaagtccaccaacggcaccgtggatgaggtcaaggaggtgatccgcgtcatgcgcgaggaggccagcctacggccggatgtcgggtcctacaacgcgctgatgcgggcgatggcgcggcacaaaagattggatgaggcggtggaggtgtaccgcagcctggaggccgggaagaaggcggacgtggtgccggactgcgcgacatatagttgcgtggtgggcgcactttgtggcgcagggcggtggtcggaggcggaggacgtgttctacgcgggagtgaagcgccggaaggtggccgaccttggaacggtgcgtgtgctggtgcgcggtcttaaggacgctggcaaggggcgagcggcaaggcgggtggttgtcggtttgtgcaagaagttccccgagatgttcgacgggccgtggagggagcttgaggtggcggccgggctgaactcctccgggaaggaggatggtgatgttgaagacggagccgacgagaagcttgcgatgacaagggccaccgtggccgtcgtatctcactgtaacacatggcttgtttctggtctggtgtcccatggcccacaactcggagatgggtacaagagcagcatcagagagatggggaggggagaagaaaagaatcgggtcttatccccttccgtcgccggcttccgtccgaaggcggattcagcttgcgacaccgacaacctcagcgccgaacccgtttttgacgatgtggtgttcgaggacattgagaccaacttcgacgacctcgccgagctcgacaagggaccggtgttcgacactgattcgatcaccgaccatatcaccgtctccgtgacatggtcggtgattctgagttcaccgtcttcgacaccgactcggacag

SEQ ID NO: 32543 - DNA, 453 bp, Zea mays
  Peptide Sequence Number=SeqID_74322
atgggtgctagaaaaccatataccaatctagcaaatatgcttcctgagatgccaattatcaaccatatgatcaagactgcagtcgcagcaataagaagcagaagctttaccacaggtccaaccagcttggttctgcccaaagaaaaatggaggaaaaaatatgagcactttcgggggtcacatcgccctagacgattaggtctggacagagctcgattgggtagccgcgcctgggcgctcgccctcggcggtcgacagcggactccggctacccatgtccattgcagcgtcgaccgcgccctgctagctctgcggtcgccggagctcaaaggcggcaagagtggggcgactggctacccaggggcacatgcccgcagtggccatagggggagctcggagaggggcgacactggcgtccttagatctgtcttcgtcgaactcgcgagcgggtga

SEQ ID NO: 32544 - DNA, 1809 bp, Zea mays
  Peptide Sequence Number=SeqID_74323
atgaagtacgtccttgtcaccggcggggtggtgagcggcctgggcaagggcgtcacggccagcagcatcggcgtcgtcctcaaggcgtgcggcttccgcattacgtccattaagatcgatccttaccttaacaccgatgctgggactatgtctccattcgaacatggtgaagtgtttgtgctggatgatggtggcgaggtggacttggatcttggtaattacgagaggtttctggacattaaacttactcgggacaataacataaccaccggaaagatctatcagtctgtaattgacaaggagaggaaaggggaatacttgggaaagactgtccaggttgtgccacacatcacaaatgccatacaggagtggattgagcgtgttgctatgataccagttgatggcatggagggacctgctgatgtctgtgtgatagaattggggggcactataggtgatattgaatccatgccatttatagaagctttgggtcagttctcttatcgtgttggtgagaaacttcacacttattatgacgcatacaaaccttctgctagtcctggcaacttctgcctggtgcacgtcagtctagttccagttttgaatgttgttggtgaacagaaaacaaagccaacccagcatagtgtacgtggtttgaggggactcgggctcactccaaatattttagcttgccgcagtactaaggaattagaggatagtgtgaaggagaaactctcccagttttgccatgtgccggaccaaaaggctcatgaggctatccttaaagttctgaatctggaaagggtggatagcattgcccgagagccgaagttagacgaatgggttgcaagagctgctatatttgatacccttcatgacactgtgaggattgctatggttgggaagtacactggcttatcagattcatacctctctgtgttgaaagccctcttgcatgcatctgttgattgccgtaggaaacttgttgttgattgggttgcttcgacggatcttgaggattccacagcaattgaggcacccgatgcatataaaacatcatggaatttattgaagggggcagatggaattttggtacctggtggctttggtgacagaggtgttgaagggaaaattttggctgctaagtatgcccgggaaaagaatgtcccatatcttggtatatgtcttgggatgcagattgctgtcgtggagtatgcccgtcatgttatgaatttcactgatgccaacagcactgaatttgatccaaataccaagaccccttgtgttatttttatgcctgagggttccaaaacacatatgggtgcaacaatgcgcttaggatcaaggaggacatttttcaagattgctgattgcaagtcttctaaattgtatggcaatgtcacttatgttgatgaaaggcaccggcacagatatgaggtgaaccctgatatggttccagagttcgaaaaagctgggcttcagtttgttggcaaagatgatactggaaggaggatggagatgattgaaatacccaaccaccgatattttgttggcgcacaattccatcctgagttcaagtcaagaccttcaaaaccttctcccctatttgtgggactaattgcagctgcatctgggcagttggatagggtgctgcaagaccgctgcaatggtcatgttggttcagctaaacatgttctgagcaatggctcatatacatccgcagtacaccaaaatgggaacccaaagaagctcaccaatggtctctcaaacggaacatactatgccaatggcaatggtgtgcatgcttag

SEQ ID NO: 32545 - DNA, 390 bp, Zea mays
  Peptide Sequence Number=SeqID_74324
atgcgcctgtgggggagggaacacgcagcggggcatcaggaggcgggcgtggtgggcggggggcatagaggtaggagagcgggacgggggcacggacgccgatctgggggatgggggcacgatattgccgcgcgggagggcgagcttgacgcggggacgctaagattgccgcgggggagggagattgccgcgggggagggtgagcttgccgcgggggacgccaagattgccgcgggggacgccgagattgccgctggggagggcgagcgccgagattgccgtgggggagggcgagggggagcgtttgccgagggcgcgctgctgcgatgtcaggcgaaggcgtggtggatgcccccgctacgtacatatggtgcagcagagataccttaa

SEQ ID NO: 32546 - DNA, 318 bp, Zea mays
  Peptide Sequence Number=SeqID_74325
atgccgcactgccatgaactccagtcgcctccgctcgctcacggtgcacgacctcggggtccgcaagatgacgctgccgcccaaggtcagcccgcgcaagccttcagcctggaccggttgttcggccccatgctgcgccacgggtacggcgaagacggtgtggagatctccatccccatcgcctggctcaccaacatcctgtctgccgccatgggattcccatcaccgcctttgctggtgtgccattcactcgcccgcaagcttcgcagtgccgggggaaaggtttccaaagacccgccaccaaggattagtcgctag

SEQ ID NO: 32547 - DNA, 198 bp, Zea mays
  Peptide Sequence Number=SeqID_74326
atgtcgctatgccaaagctccttggatggtagctttggcgtgtaccttcgcgccagtgtttgcttctgtgctgatcttgcgaaggtgtttcttcttaaaggaccttcggcgacgaagcagacccccaacagtctgtttggtaatggtgtcatggttaaggacttatggtaccgcggcgaaactgagagcctcctgtga

SEQ ID NO: 32548 - DNA, 213 bp, Zea mays
  Peptide Sequence Number=SeqID_74327
atggcgtcggcgtacagcgccggttacggcgcgggcaggaggctgctattcaggcagctgttcgagaaggagagctccacgtacacctacctcctcgccgacgtcgccgaccccgacaggcccgccgtgggattattttaccactctcatgagtatgttgcaatcagtgagaacgagtgtaatttcgtcaatttagaatctgcatttatataa

SEQ ID NO: 32549 - DNA, 249 bp, Zea mays
  Peptide Sequence Number=SeqID_74328
atgggggatgtggcgagttccgcgagggccgaggagccgccggaagaggagggctggcgcggccgcgaggcgaaaacccgcggcggaaggagtagcgttgtctggaccccggagattttacgaaaggagtcggcgagggccgagggggacatgtgcatcgttgtcaagcttcgcgtcggacaaatcacgaaccatgccgtgcaaaagctagtgatcagtgacatcatgcaccgtgacatctttgcgtaa

SEQ ID NO: 32550 - DNA, 793 bp, Zea mays
  Peptide Sequence Number=SeqID_74329
atgggtcggcgcgagacggagcgcgaaggggggaagaagccggagggagacaggcataaaaggggaaacccgcggccttcgtgtttgtcccgcgcccaggtcgggtgtaaggagaggatccagggtaatgatggcgcctcctgtgacgtggtcggtccaagccctgggttgggcgaggcggaggctcctccgaggtcgaggtcgagtttgtcttccgaggccgaggtcgagtccgaacccctgggtcgggcgaggtggagaccgtcggctgaggccagggctgagtccgagccctggggtcgggcgaggcggagttcgtcgtcttccggggctgagcctgagtccgagccctgggtcgggcgaagcggagtttgtcgtcttccggggccgagcctgagtccgagccctggggtcgggcgatgcggagttcgtcgtcttccggggctgagcccgagtccgagccctaggatcgggcgaagcggagttcgtcgtcttccggggctgagcccgagtccgagccctggggccacctttgcattaaatgctcctgcgatacggtcggtcggcgtggcgacttggccaaggttgcttcttggtgaagtctgggcctcgggcgagccgaagctttgtgctgatgggggttaccagctgagattaggagtcttaaggctccaccatcgatccttctcgccactgtaccgccaagcagatgaagaatcaatagtccatgaacaaccacaagacgggtttcaagctagagcacatacggtgctcttcgccatcaacttaagtg

SEQ ID NO: 32551 - DNA, 354 bp, Zea mays
  Peptide Sequence Number=SeqID_74330
atggcggcggcctcttctgcggcgccggcgaggcacagctgcgcaaagctctcggtcccagtggaggaccccaaagcagtgacggcgggcggtggcaccgtcttcgtcaaagccacgtggctgccgtcccgcttctccctcgccgtgaccgatggtgccggcgcctgggtcgccgacgcctctgaccacgaggtgcgcctccgcgccgagcagtgggatcagcccgtcgccgattacatcgcccttgccgagcgctacctcgctttccaacagcctggttccacgtattccttccatgacgccggcaaaggccaacgcagggtcattttgcccatgcttttagactcagagtag

SEQ ID NO: 32552 - DNA, 684 bp, Zea mays
  Peptide Sequence Number=SeqID_74331
atgaagcttatggaagcttcatgtcctgcttctacggaaagttggtatgactattatgcattgcttctactgaagctcgcttggacatttgaaagacaaggtaccaagttggaatggcggtggaagctgcagccttcaccaaacacgcagcagactatatctgagatcctggattttcttatggatgcaaatatacgcttaagtgtatgtccctttgcttcacctcttcactttttcagcctacctgtgattctgaaacaggaagaggttgtgaggaaaacacaatcctttgacaagttgaaacaagaagctgagaagtgcttgcaacaaagtgaaagatttaacaatgagaaagctgagttcgaacaagccgccttttcaaagtttgtggccgtgttgaattcgaagaaggccaagctcagacaactcagagataaagttgtggagctcgaacccgctgtcaagcctccaaaggaggaggcaggtcaggagcaggaggaggaggaggagaactcaacggaccggacagagctcttcgagggagagaatgacaaagaagcaagcgccaaggatgaacactccggcgagacaggcagcggcaacgttcctagttctcctggggaatcggcagctacctccagaggaagaggacgagggagaggtcgtaagaaggcaagaagatag

SEQ ID NO: 32553 - DNA, 1206 bp, Zea mays
  Peptide Sequence Number=SeqID_74332
atggcccataggtttgtcattgaaaacagtgcgaagagtgagatgggtgaagctctgctaagagattcttcaggtttcttcttggggatggaatcattgccgtgtccatcttggtcagttgagttggagatgggtgcaaccctgaacaaggaattgagaactcgagattgttcgtggggctggaatgttgggcccatctgttccagcacatatctgcgccatattgggactgttattcttccgaactctgttaccgtctatgaactgtggcgagctccaccagctggatctccagggagcccctgcgaccttggccatggccgacctccacttctcccttggcaggcgctgccctcctctggtccgagctcgagcaggctcggctacgaggacaccacgctcgccctcaccctccgcctcccgggctccgactccggccgttcctcctcgctcgccgcgccctccgctgcgccgtcacccaaggcgcgggtggtggggtggccgccggtgaggtcgtaccgcaagaacgcgctcgccgactccagcaaggccaaccgcgcagccaatttcgtgaaggtggtcgtctcccgccgctcctcggcctctgctcctcccgcgcccggttcccatcgccgctctcttccccagcgcgtcttcttccccagccgcgccgtgccgagctgcttcttgcgcacgcgccgtgccgagctcgcccccgacctctgctcttccctggcgcgtcgcgttcttccctgcacttgcccatggcggccgagctcccagcctgcgcgccctccgggttctctgtgtcgcgcgctgctccagctcccacggcgcgcagcctccctctcggctcaccggatctcccagcgccgcgcccagcttctttctccctcagctcccgcggcccgtgcagctccctggcgccctgcttcctctgttctctccctggacgcgcacagcgttccgtcgaactcctgcgccgtgccctgctcaggttccatggccgcaccaaattccctgcgcgcgctggcctacaactcgactgcacacctccctacttgtcatggccaccgtgccctgctccctgatttctgctcgccgcgcgcgctcatctctctgttcgcctctgcgcacaactctccgagctccatggccggttccctgctcgccggggatgctcctgctccagctcaacctcgcctt

SEQ ID NO: 32554 - DNA, 2292 bp, Zea mays
  Peptide Sequence Number=SeqID_74333
atgctgtctggcgtgaagctggttccgcgagaccagatccagtctgatcagaagcgtaggggtgaccagggctccgattccgactcctccgacggcaagaggccgtggaagcacagtaaaagagggcgggacaagaaagagaagaagagacgaagcagccggcggcagcggaggcggagcaagaggtactcgtcggaagattctttggggtcagacaccgacgattcaatcggagaggaagaggaggatgatgtcagtcggagcaagcgtcgcgggaaggacaggaggcggcgacgcaacttctctgacgacgatgattccgaatccggcgaatctgaccggggaagagcctctcgcagggggaagcagagacgtgatgacgaggatgaggaggaagagactgaaggtgatgggcttagggcaagtgaggtggtcaggagggagatggggcttgaatggatgctcaagccagcaagcagcagccaaactgagggcaccggtgttcgtaaggttgataatgtcgagaaggatgaatctgcacatgaagagattatgagaccgaacccaaaggaacttaacccataccttaaagataatggaaccggatacccagaagaatcaaccccatcaaatgctggcagtcagttgcttgcatcctctgttgtgggtgatggaggtgccagctggagacttaaagctttgaagcgtgcaaaggagcaagctgctcgcgaaggaagaaaacttgaggaggttgttgaagagagatggagctcattaggcgacttagctgtttcagtatcagcatcaagagctgcccattcacatgctcatttgcatgccattagaggcagaaaatctggtaatgctgacaactcagaagaacgtgttaaaagaaatccagagggtcagctggatggtagcagtggcagacgtgaatatctacgggatgtttcttctcagcaccatgccatgagaaaaccaaaacctgattctgtcccatggaaaaagagaagacagaatatatcttctgaagatcaggcacttatctcatcagcggtagcaagcttaaataagttttctgatgatggaagctttatggaaaagattagcaatgttgagagcaagaacacaaatgtttccactgctagtgctagtgctgatgagcagagggacaatgggcagaaaacccctaaggagagttcaaacaaagtacaattagtgagcactcagaaactaaatgcaaaccagatggctgcaaagattctgcagctccgaatgaaaggcaagcatcaagaagctgaacaactttcgagagaaatggaagctttgctggagaatcaggatactgcccatgagaagcctggtcatggaaaagaaagaagctcaatcaggcctacattgaagcctactgcagctgatcacaggagaagagaagatgatgcggaccttcatttggctaataaaattatgcacaacaagcagtataacatgtccaaaagtatagaagatgaatatgattttggtgatgctcccactaaaaaggacaaaagaaagaataaagaagcacgtgacgagaggaaaagcactgatagacgtatgttgactcagaaggagcgttgtatgtattgctttgagaacccatccaggccaaaacatctggttgttgctattggaaacttcagctacttgatgctgccacagtttgagcctgttgttcctgggcactgtattattctcccattacagcatgaatctggaacgagaacagttgatcagaatgtttggggggagatccgcaacttcaagaagtgtctgctgaagatgtttgcacagcaggacaaggatgtgttgtttatggagactgtcataagcctggccagacaacggagacactgcatgattgagtgcatccctgtcccttgtgaagtgtcaagcaatgccccaatgtacttcaaaaaggctattgatgaagctgaagaagaatggacccaacatgagatgaagaaggttatcccgacaagtgcaagccgcaacttgaggcaagtcatcccggagaactttgcctacttccatgtggagttcgggctggaccgtggctttgttcatgtaatagatgacgagagcaagttcagtgctggatttggattgaatgtcattagagggatgctccagttgccagaggaggacatgcaccgtcgacgaaggcacgagtccatggataaccagaggcaggctgttgctagcttcatgaaagattgggagcccttcgattggacgaagcaacttgattga

SEQ ID NO: 32555 - DNA, 318 bp, Zea mays
  Peptide Sequence Number=SeqID_74334
atggctcctagtgacgatagtgtggcggcaccgccgctgctaccaatgtcaagcggtgggggcgtcgccgcttttccgtcagttgtcgcgccgtcttctgatatggttagtcgcgttagtgggtcgggccacttgaattatgagttggcccgtcgagaacttcgcgacggaggatcgacggttaggttatgtccagtggcagccacatgggcaatggaaaacacgaagtgtgaatgcgcgtgcgtaaacaagaggacgcctctatctaataaaaacgcgtatgcagatggcacatatagacttgtggagaagagataa

SEQ ID NO: 32556 - DNA, 711 bp, Zea mays
  Peptide Sequence Number=SeqID_74335
atggggacggcggttgaggccggggcgcggcgacggcggtgtcggggcacggcggtggcggtgacggggcgcagcagcggtgtcggggcggcgcggcgggcaggcgggcacgaccacggcctcggcggtgggcgggcgcggtgggcgggcgcggcgaggggcgggcgcgtcgtcgggcgcacgacgtgggcgaggcacaggcgaggagcacgccaccactgcaggctggtgctgggtttagctagtcagcccggtcctgggaacggaggcacgaacagaagtgcatgtagaagcttctccgacctgcaggccaacgtcgtctcctcgcagacaagccggcgtagccggtccacgtcgtcgcggtcgagcagcaggcgtgcacagctgcgactgggcactcgtgcgtgccccgccgcaacggccggagcacatggacggggcaagcaggcgccgccgccactgccagccacacggacgcaggcgtgggcgcgcgagcgccggtacgctggccgctgcaggcacgcgggcgccgccgtcacgctgccgcagccacgggggcacaggcgtgccgaccaccactcgctgtaccgccacgcagcctcgcgggcgcgcgggggtgaacccgttccccagccgccgccgtcgccaaggggaaagggcaccggaaagggaaaaaaaggagaagggttgggaaaccctaaaaggccctag

SEQ ID NO: 32557 - DNA, 153 bp, Zea mays
  Peptide Sequence Number=SeqID_74336
atggggacccctctggcggattctttgcctagtgctgtcaggcagacactcggcaaaggcttggcaactgcaagtttatccttttctatctcctttagagctatcaaacttttatcggttacatcatcaatattatccatcattaggttatga

SEQ ID NO: 32558 - DNA, 840 bp, Zea mays
  Peptide Sequence Number=SeqID_74337
atggtgaaccctgccgcctacttgcaacagcagttgcttgcatcaaacccacttgctctggcaaacgtagttgcaaaccagccacaacaacagctgcaacagtttctgccagcgctcagtcaactagccatggtgaaccctgccgcctacctacaacagcaacaactgctttcatctagcccgctcgctgtggccaatgcacctacatacctgcaacaacaattgttgcaacagattgtaccagctctgactcagctagttgtggcaaaccctgctgcctacttgcaacagctgcttccattcaaccaactgactatgtcgaactctgctgcgtacctacaacagcgacaacagttacttaatccactagcagtggctaacccattggtcgctgccttcctacagcagcaacaattgctgccatacaaccagttctctttgataaaccctgtcttgtcgaggcagcaacccatcgttggaggcacgtcgcctgtagagtggtctggtcgtcgcctgtcatcagagtggacgggggacattaaatgccgagacggcacatcgcctgtcagcagggcggacaggcggcgcgtcctctccgcaataaatgtagagatcacgtggctcaaaggccttacgtcaggctccaccctccggcttgcgtcacgagcaataggccgcgtggcagcattaggtcctcgcctgagcggggagcggaagtacaccaggcaagaccctgacaagtcccatccaagggaacatggaggtcctgggtcgtacccggaggtccgagtcatgtatgctggggtccgacactttcccatgggggtccggattcactga

SEQ ID NO: 32559 - DNA, 1176 bp, Zea mays
  Peptide Sequence Number=SeqID_74338
atggcgttccgggtttctggggcggtgctcggtggggccgtaagggctccccgactcaccggcggcggggagggtagtctagtcttccggcacaccggcctcttcttaactcgtaatgatcctgcaactcctcctccctctctgatcaagtgtgggcctgattcggggggtgctcgagttggatgttcggggacgcacggggccatgcgcgcggcggccgcggccaggaaagcggtcatggttcctgagggcgagaatgatggcctcgcatcaagggctgactcggctcaattccagtcggatgaactggaggtaccagacatttctgaagagacaacgtgcggtgctggtgtggctgatgctcaagccttgaacagagttcgagtggtccccccaccaagcgatggacaaaaaatattccagattgaccccatgttgcaaggctataagtaccatcttgagtatcggtacagcctctatagaagaatccgttcagacattgatgaacatgaaggaggcttggaagccttctcccgtagttatgagaagtttggatttaatcgcagcgcggaagcattggtgggtgacttcaacaactgggatccaaatgcagatcgtatgagcaaaaatgagtttggtgtttgggaaatttttctgcctaacaatgcagatggtacatcacctattcctcatggatctcgtgtaaaggtgagaatggatactccatcagggataaaggattcaattccagcctggatcaagtactcagtgcaggccccaggagaaataccatatgatgggatttattatgatcctcctgaagaggtaaagtatgtgttcaggcatgcgcaacctaaacgaccaaaatcattgcggatatatgaaacacatgtcggaatgagtagcccggaaccgaagataaacacatatgtaaactttagggatgaagtcctcccaagaataaaaaaacttggatacaatgcagtgcaaataatggcaatccaagagcactcatattatggaagctttggataccatgtaactaatttttttgcgccaagtagtcgttttggtaccccagaagaattgaagtctttgattgatagagcacatgagcttggtttgctagttctcatggatgtggttcatagctccaagaaaaaggaaatacagtaa

SEQ ID NO: 32560 - DNA, 1374 bp, Zea mays
  Peptide Sequence Number=SeqID_74339
atggagaaaggctctatgttgatttggaacataaggagccactttctcatgtttccatatatgtggatcctgatccatgttcatcagattgattcattttctaaggacataaatcatgcgtcaagtaatactctggatgggttgaatggttttgatggtacagatacacattactttcacagtggtccacgtggccatcactggatgtgggattctcgcctatttaactatgggaactgggaagttttaagatttcttctctccaatgctagatggtggctcgaggaatataagtttgatggtttccgttttgatggtgtgacctccatgatgtacactcatcacggattacaagtaacatttacggggaacttcaatgagtattttggctttgccaccgatgtagatgcagtggtttacttgatgctggtaaatgatctaattcatggactttatcctgaggctgtaaccattggtgaagatgttagtggaatgcctacatttgcccttcctgttcacgatggtggggtaggttttgactatcggatgcatatggctgtggctgacaaatggattgaccttctcaagcaaagtgatgaaacttggaagatgggtgatattgtgcacacactgacaaataggaggtggttagagaagtgtgtaacttatgctgaaagtcatgatcaagcattagtcggcgacaagactattgcgttttggttgatggacaaggatatgtatgatttcatggccctcgatagaccttcaactcctaccattgatcgtgggatagcattacataagatgattagacttatcacaatgggtttaggaggagagggctatcttaatttcatgggaaatgagtttggacatcctgaatggatagattttccaagaggtccgcaaagacttccaagtggtaagtttattccagggaataacaacagttatgacaaatgtcgtcgaagatttgacctgggtgatgcagactatcttaggtatcatggtatgcaagagtttgatcaggcaatgcaacatcttgagcaaaaatatgaattcatgacatctgatcaccagtatatttcccggaaacatgaggaggataaggtgattgtgttcgaaaagggagatttggtatttgtgttcaacttccactgcaacaacagctattttgactaccgtattggttgtcgaaagcctggggtgtataaggtggtcttggactccgacgctggactatttggtggatttagcaggatccatcacgcagccgagcacttcaccgccgactgttcgcatgataataggccatattcattctcggtttatacaccaagcagaacatgtgtcgtctatgctccagtggagtga

SEQ ID NO: 32561 - DNA, 159 bp, Zea mays
  Peptide Sequence Number=SeqID_74340
atggacaggatgtttgatagtgtcaatgttaatgacgatgtggaggatgcacaagatacttcagctaagattaatgacatattaagcaacactttaaagattatgatcaaccagaccagagagaaaggtctgatgttgaaagggactctaccattctga

SEQ ID NO: 32562 - DNA, 3007 bp, Zea mays
  Peptide Sequence Number=SeqID_74341
gtacaaagcatgctggcttccgcttcttgacaagcacactaagggtgtggttgtagatggtccattggttgttcctcttgattgtgagtggatatggcactgccatcgccttaacccggtacacaccctactcaccatgatcatctgtaattcacgtacccttggagaaccgagggacctgattattcgagcacatatctttcaggttcagtacataagggactgcaagaaagtgtatggcagaatactgaacaataacaacgttgagtcgtccactcaaacaaagtcgacacttgagtcagaaaaagtttggaaagagctgtatcctgaggagcccttcgaattgttgttcacaagaacctttgacactgccgtggatgtcaaccctgcaggtgcagaggaggacattacctatgatctggtctcggctgttaagagacaatcctctttctattatcaggttggaacaccaacaatgcatgatccacggtttctccaagaagctctagctcgatacaaggcgtttctttacctgatcaagatgaatcaagaaaaaggattgcagcgcttccgtgtaccaacctatgatgtggatctgttgtggcacactcaccagctgcatcctattacctaccgcaacgacatggtgaagcttcttggaaaagttctggagcatgatgacaccgatgctgatcgatctgaagggaagaaactcgatgttggatttaccgagactactgaacagttcgagagtacctttggtgtaagatactggaaggctggatgtatgtaccgtggcaacgtgccatctcctgtgacatccactcctcagacattcagtgctgaggttggtactgggtcttacatctgcaaagcccagaaagatcttaatgcccttgatgtaacagttgtagagttatatttacaaattgtagacatcaagaatttaccatctgctgttcaaaaagaaaatgtgtatgtacggttcgccaagaatcaatcagatatgttcatcagtgacggcggcaggttggatatctcaacagttacagggaagaacaccggagtttgtttacagtgtgaacctaccggagaactcattcttgcagtaatggttgatcaattatcaaagaaaccagaaccgatagggaaggtttctttcccactgcacgatttgacagggcctgattctaagctctccttcgagaagtggtttgaactgaaagctcatggtgggcatgccgcttcacctcctgttagtcttcgtgttgcagcttctgctactgtcccaagcagcgctcagaaggtgttcaccatggtcaggatggagccattctctctcaagtcatgtcttttgccacattccatcaaggatcagaacacgggcagctggactcgtttcgtaaatgattgtggtaccgagcttatccgtctccagataagagagcacaaggcgaagaatagcatggccgtcgttcgagaattggttggagtattgaagtcaacaaaaaagcaaattcaacttgcagaattcaaggaaaacaagtggaccctaaaagactccaacttgccaataagtcatggcactgatggcagtctactcgatctcaaaggtgacaaccatctgatcaagctttatcggggaaggaaactggaatatgagcgcaaatgttgcagcgctcactctgaggacgtatcagctgttactgctgtaaagttctgtgctgaacatccatatggcaaagccgttgccttgctagacactgaagctcagcttatcatggtgaacgaggattggctcctacttccatggatctccatatcagtcctgtttatggacggcgatggcagtatgaaacttggcggcggtgccatggttcagaaaggtacagtgtttggatccgacactagcatggtgctagagacacagaccgtcggagcagggagcgtggcatccaatctagcacaatgtggcacttgcagcgccgtgttcggtggtgatgataaagaaatggcgaactgcaaggttgagcatgcgagctctggcgcttctcgcacagtcgttgcaagtggtgagaatgggcacactgagactgctggctgtggaggcggctgtggtagcaattgtggacccatgatggctgaagaccccaaggccggcaatgccaagtccggaggctgtggttcggggtgtggtggtggctgcggtggcgcgggaggttgtgggaccatggccaacgaaggccaatccaggtccggaggtgttggcaccttgttgagctccaacgccatgggtggtgagggccagcaggcccattcagctggctgtggctccggctgtggtggtggctgcggcagcggcatggtcatcgaaggctccaaggccaacaacgccatgtccggtggctgtggctctggttgcggtggtggatgcggcagcggcatgctcatcgaagtctccaaggccaacaacgccatgtccggcggctgtggctctggttgcggtggtggttgcggcagcggcatggttaacgaaggctccaaggccaacaacgccatgtccggcggctgtggctccggttgcggcggtggttgcggcgccctgttcaacgctagcactgctgccggagagggcctgcacaataagtcggctgggtgcggcggcggcgggtgcggctccgggtgcggcggtggcggcggctgtggtagcggcatggctatcgaaggcttcaaggccaaccacgccaagtctggtggctgcggctctggctgcggtggtggctgcggcaccctgttcagctccagcgctgcggccggccaaggccagtccagatccggcggctgcggctctggctgcggtggaggctgtggcagtggcagcatggtcgctgaaggctccaacggcgggcacgccaagtccggcggctgtggcggcggttgcggtggcggaggtggctgcggcggcggaggctgtggcgggggttgcagcaccgtgttcaacgcatga

SEQ ID NO: 32563 - DNA, 1497 bp, Zea mays
  Peptide Sequence Number=SeqID_74342
atggctttcatcgtgctccttgctgctgcagcagcggcaatagccttcgtcctcctccacctcctcagtgcccaaaaaaagcgcagcagcaggtctgcaggctcgacgtcctacagcctaccgcccggcgacctcggcgtccccgtcatcggccagaccttctccctcctccacgcgctgcgcagcaacacggacgaccagtggttcagggcgcggatcaagaggtacggcccggtgtccaagatgtcggtgctgggctcgccgacggtgctgctggccgggacggaggccaaccacttcatattcaccaaccagggcctcatcctcacgcagacgcgcgcgctccgctccctcctccgccgctccatcctcacgctcaccggcgacgacctgaagcaggtgcgcagcgcgctgcagggctacttaaggcctgagatggtccgggggtacgtggggaagatggacgccgaggtcaggaggcagctcaagctcaactgggttggtcgcagcactgtcaacgtcctgccgatggcgaggagccttacactaggggtcatctgctccgtcgtcttcggcgaagaagcagccgccatagtagacgccctagctactgacttccagcagctaggtgacgcgatcctgtcgttcccagtcaacatccccttcacgaggttcggcaagggcatgcggtcgagcgccaagatcagggaggccatcacgaagttcgccaggaagagggaggaggagtactccttgctgctgtcgcaggacgaagggtgcaccgccactgctactgctacgacttcagccgccaccgacttcgtcacctacatgctcctcctgcgctccaggggcgcgcactccctctcgctggcggacatcgtcgacaacgtgatgggcatcgtcatcggcgcgcacggcaccacctcgacgctcatcaccttcatggtgcgccacctcgccaacgagccagacgtcctcgccaagatcacccaagaacaagatgagatcgctggcagaaacggaagagacggtgctctaacatgggaagacgtttcgagcatgaagtacacatggagggcggcgctggagacgctgcgcacggtgccgccggtgttcgggagcttcaggactgccaccaaggacatcgaataccagggctacctcatccccaagggctggaaagtcttcgcatcccagagcatcacgcacatggatcccaggttcttcgccgaacccaccaagttcgatccgtcccgcttcgagaagcgctcgtcgatcccgccgtacagcttcctgccgttcgggggagggccaaggatgtgccctggaaccgagttctccagggtggaaaccatggtggccatgcactatctagtgacgcggttcaggtggaagctgcgcttcgaagacgaagcctacaacaaggatcccaaacctacgcctgttttcggatgtccagtggaactggagctgagaaaaccccctgcaatataa

SEQ ID NO: 32564 - DNA, 294 bp, Zea mays
  Peptide Sequence Number=SeqID_74343
atgggggcgaccagcacttctcctcctcggtccacggacagatccaccgccttgggttgttgtcgactgtgcgccaccactcgacctcgggcggttgtccggggagtgtcgcgggtggatggaggtgtcgaccgtgggctcggaggaaaggatcgaccgatcggagcatggaattttacatcggagttcatcgccaccacggaatccgtcgtgcgccgtggccacctaacccttcgctgtaggagcccttgtggttcgggggaatcagatctaatcgtggccgtgggcttctga

SEQ ID NO: 32565 - DNA, 540 bp, Zea mays
  Peptide Sequence Number=SeqID_74344
atgtgctcggccgttgcggcggcgcacgcacgagtgcccagtcgcagctgtgcacgcctgctgctcgaccgcgacgacgtggaccggctacgccggcttcaccagcctgcagtggtggcgtgctcctcgcctgtgcctgagcactcatctgtggagcgcggtggttgtgcttgtgcatgcctgtgcgcttgccttcaaggcagcggtccagtggaggttgcgacggtggcggtgctattgtggcgcggcgtttcaggttcacaacggaggttggcaaggcgccaaggcctcacgctggaggacactcggcacaggaaaactctcggcaaagacaattttgccgagtggcaaacactcggcaaaggcggctctcggcaaagggccgtcagcggccgttctaaagctgacggccgtcagcctttgctgagggccgagggtcggcactcggtaaagagagctttgccgagtgccagccggttgacactcggcaaagaaggctttgccgagtgccatccccttggcactcggcaaagaaactag

SEQ ID NO: 32566 - DNA, 276 bp, Zea mays
  Peptide Sequence Number=SeqID_74345
atggagacgctctcggcgaagcaggagggcacggtggacgtgaagctgaagccgacttctaaccaatccaactcgatggatgtcggctggcgaccgatgacggccaccagagtcgacgtggagcgtgagtcgcgtgcccatggtgacggactgacgggcatgtcgggggtggcgactggcgaggcggagatcacccatggtggtggtgaagaagtcgagggtgtccaacatgatatggctccccagcgcgaaggtttcaccattggcgaatgttaa

SEQ ID NO: 32567 - DNA, 621 bp, Zea mays
  Peptide Sequence Number=SeqID_74346
atgggagggggttctagatctggtgctgctccagttgttccccagatatcaaaggaagccggttatcttacagttggtgttgtcacctatccattcagtttcgagggcccattggaagcactagagaagctggaaaagagtgtagatacacttattgtgattccaaatgataagttattagatgttgccgatgaaaacatgcccttgcaagatgcatttctctttgcagatgatgttcttcgtcagggtgtccaaggaatatcagacatcatcacagcagctactggcgttgtgtataatattactggtgggaaggacatcactttgcaagaagtgaacaaggtgtcccagattgtgacaagcctagctggcccatctgcgaacataatttttggtgctgtcgttgatgaccgttacactgaaatccagtactcctttcatgtttgtagccatatttatagaaacttagaagcacgaatgacagatactttaactacaattgctgagatcaattggtatggaagatccaaaggtgaagacggtattgaagaaccaggaagctatcagtctcatgaagtcaatcaaggatccccaggcagcagcgaagtgattgaccactaa

SEQ ID NO: 32568 - DNA, 600 bp, Zea mays
  Peptide Sequence Number=SeqID_74347
atggctaccaagatattatccctccttgcgcttcttgccctttttcaacaacaattcctaccagcactgagccaactagctgtggtgaaccctgtcgcctacttgcaacaacagctgcttgcatcaaacccacttgctctggcaaacgtagctgcataccaacaacaacaacaattgcaacagtttctaccagcgctcagtcaacaagccatggtgaaccatgccgcctacctacaacagcaacaactgatttcatctagccctctcgatgtggttaatgcacctacatacctacaacaaaagttgttgcaacagattatacaagctctgactcagctagctgtggcaaaccctgctgcctacttgcaacagctgcttccattcaaccaactgactgtgtcgaactctgctgcgtacctacaacagcgacaacagttacttaatccactagcggtggctaacccattggtcgctgccttcctacagcagcaacaattgctgccatacaaccagttctctttgatgaaccctgcttgtcgtggcagcaacccatcgttggaggtgccatcttttagattacatatgagatgtactcgataa

SEQ ID NO: 32569 - DNA, 1209 bp, Zea mays
  Peptide Sequence Number=SeqID_74348
atgaagtcaacagtgttttcagcagctgttgtttctattgggtatgcattgcttggatgggattttgcagcattatcagaagctaataatcatatggaaaaagaatttgaattgttgaatggaccttctattgaagagtcacctaggtggcttgcaagtgatggaaagattagtgaggccagagtttctctgcagtggcttagaggaaagaaacatgatgtttcaggagagatagctgctattgtggaaggtgtggacatcatatcggactccactgttggcgctgctcgtgctcagagtttctctggaaccagtgctagccacacttggccccgtaagcatgaacatatgaatgaacacagggatggtaacagtgatcaacagactagggagacttattatgctggagaagctaataatggagatggtttaagggcttctctgctttctcaggcagcaaatgttgaagtaaatgatacaaatacctcttttacttctgaagggagctcttcatatttaagaaggcatggaacatcagtgcttgcacaagagtttatggcgtctatacatgattatgacattgaagaagaagaagaagaaatccataggtttgcattgcctcaccagtctgcacctcgtgatatggaaagcaccgggagacatccattcagacatcaaatagtccggttatctgaaacagctgatatgaagtttaaatggcggattatgtattcaattcagcatggagttcagtttacttgcgcactggctaccatggttcttgtgctggccactactcctgtcctgatactatcattgagtgttatgtctatgtccaccctggtgaatatgggaccgttcgaaagtgccgtcctcttccacttcgcattaaccatttgcttctggtcctatgtcattggtttgggaccgataccaaacattctctgctccgagatattcccaaccaaggcccgtgcgacatgtgcaagtttctgttcgctttccttctggtttgggggcctgctttcagcgtactgcttcccggtgatgttgagcaccatcgggcttggcggagcgtgtgggatctatgcacttgtgtgctgcgctccgctttttctcgtctactatcgaataccagagacgaagatgcttaacctggagctcattgcggagctgttcaagctttcaaggcaggagtatgtacagtag

SEQ ID NO: 32570 - DNA, 732 bp, Zea mays
  Peptide Sequence Number=SeqID_74349
atggctaccaaggtattagccctccttgcgcttcttgccccttttttcctcccaccagttacttcaatgggcttcgaacacctagctgtgcaagcctacatgctacaacaagcgcttgcagcgagcgtcttacaacaaccaattgaccaattgcaacaacaatccttggcacatctaaccatacaaaccatcgcaacgcaacagcaacaacagtccctaccagcactgagccaactagctgtggtgaaccctgtcgcctacttgcaacagcagctgcttgcatccaacccacttgctctggcaaacgtagctgcataccaacaacaacaattgcaacagtttctaccagcgctcagtcaactagccatggtgaaccctgccgcctacctacaacagcaacaactgctttcatctagccctctcgctgtggttaatgcacctacatacctgcaacaacagatgctggaacagattgtaccagctctgactcagctagctgtggcaaaccctgctgcctacttgcaacagctgcttccattcaaccaactgactgtgtcgaactctgctgcgtacctacaacagcgacaaccattacttaatccactggcagtggctaatccattggtcgctgccttcctacagcagcaacaattgctgccatacaaccagttctctttgatgaaccctgccttgtcgtggcagcaacccatcgttggaggtgccatcttttag

SEQ ID NO: 32571 - DNA, 1281 bp, Zea mays
  Peptide Sequence Number=SeqID_74350
atgaggtatgatggcatcgagcttggtgtgccaaggttcacgatgcaaagaggactgctagatcaaagccacacgcacgcagaggcagccggcctgccgccgttcggctaccggacgacaaagcaagagggcagcgatcccggctcccgcccacccacccacaggcgtcgctctcgccggagctgcagcggcgacgcgggcctcggcgcagcgggatctcccaccctccgcccaccgtcgtcgcctcgccggccgacccagccagcgatcggtcacaaacaagaacgaccaaggcgcgcccctcaagcggcgtcgtcgtcctcgtcctcgtcccccccgagaccccgagcgcggaggaaaaagtcaacccggatccatccacgagaagagatggggtcgttcaaggggcacgtgctcccgggcacgctgttcctggcggtggggctgtggcgggtgtggtcgtcggcggcgcggcacgccgcggagccgtcgtcgttccgggtgcgcgcgtggagccccgcgccggcgcccgggccggcgcggctgctggagctctacgtcgtggcgggcggcgcgctggcggacatgtgcgtggaggtgctctactccacgcacctccggatattcgccggcggcgaggtcaacccggcgcacctcaacgacctcgagcacggcggcatgctgctcatgttcttcctcttcggcgcgctcgctctggcgtcccagctctggcccaggcacttcccgctgacggacggagcgctgtgcctggtggcggcgacggcgttcacggcggagctggtgctcttctacttccactccacgacgcacatggggctggagggctactaccactacctgctggtgctgctggtgggcctgtgcgtggccgccgccgtcctcggcgcgctcctgccggacagcttcccggccgacctggcctcgggcgtcctcgtcgcgctgcaggggctctggttctaccagacggcgctggcgctgtacgggcccatgctgcccgcgggatgcgcccgcgacgccgacgcccacgtcgagtgccgctcgcgcgccgcgcaggagcgcgccgagcagctcgccatctcccagctcttcgccctcgtgctcctcgccttcctctacgcgctcgggtgctacgccgtcgccgccgcgaggtacgggcgacccccggagctgcccgcggtgcgtcacaggcgcgccgcggccgtggagttggagtgccggcagggtgatgacgctggcgcgatggaggagtgcgcgatctag

SEQ ID NO: 32572 - DNA, 576 bp, Zea mays
  Peptide Sequence Number=SeqID_74351
atggctaccaagatattatccctccttgcgcttcttgccctttttcaacaacaattcctaccagcactgagccaactagctgtggtgaaccctgtcgcctacttgcaacaacagctgcttgcatcaaacccacttgctctggcaaacgtagctgcataccaacaacaacaacaattgcaacagtttctaccagcgctcagtcaacaagccatggtgaaccctgccgcctacctacaacagcaacaactgatttcatctagccctctcgatgtggttaatgcacctacatacctacaacaacagttgctgcaacagattataccagctctgactcagctagctgtggcaaaccctgctgcctacttgcaacagctgcttccattcaaccaactgactgtgtcgaactctgctgcgtacctacaacagcgacaacagttacttaatccactagtggtggctaacccattggtcgctgccttcctacagcagcaacaattgctgccatacaaccagttctctttgatgaaccctgccttgtcgtggcagcaacccatcgttggaggtgccatcttttag

SEQ ID NO: 32573 - DNA, 288 bp, Zea mays
  Peptide Sequence Number=SeqID_74352
atggctggagcacatgatcaaggtcgatgtcttcacaccggatcgggtggatggagctcttttcaaggttgcaggaaaataccgcaccatgttgtgagatttactgatcctagcaaattttttctgtcaacgtttaaagaatctgttatttcaactgtcctcaagctctgcctgaaaagcctgcaagaatttgtccgtcttcagactttcaacagaagtgggtttcagcagattcagctggatatggaatttctcaagacctctcttaaggcccgtttgtttcgttga

SEQ ID NO: 32574 - DNA, 771 bp, Zea mays
  Peptide Sequence Number=SeqID_74353
atgactgaccgcaggcgccaaggattagagaggacgcaacccaacccacaaaaggacagggcacaggagggtggctccgtggctggcggggcagtgcacggggccagacagggccggtgcgcgtcggcgtcggcgtcacgagcgcgcgcgtgcacaggtgcatgttctgccgcttgccgctggcgcaccccgcatcccgcccgcctcgccctcccccgcggcaatctcggcgctcgctctccccagcggcaatctcggtgtccaccgccgcctcataacactcccgtctcccacgccatacgcccaagaccgagccgcctagatctgattgggttggctctcgtcgcgggggcgaaggggaagggggaggaagaaccaggaggcgtgcgttcgtccaagatgctgcagctgctgatggcggcggccttctcggcggccccgctgacgctgtacgtgccgccggtgcgcagcctcatcctcttcgtggaggccatggaggtcgtctgccgcgactgcggcccctactccccacgacgtcgtcgcccacttccgcgtcgccctctcccgcgtcctcgccggcctagcccagcccatctccggtcggctacggtggatcgatctaaaggcaacaagactgagatatccaaatctgagctcatacagaagagtgcatactgtagggtttcaggacgggacatggatcttgttgaactttctgcctatggaaatgtccggcgagggccagattcagggggctgcaaaatccaatga

SEQ ID NO: 32575 - DNA, 2442 bp, Zea mays
  Peptide Sequence Number=SeqID_74354
atggagcttgtcctcgtcaagcccgcggcaggagctctcgtcgaggtgggctccgggtccgttgccggcgcgggctcgatcccggcgatggtggcggcgcagcaggagattttgcacgaacaggtggaccagctccaacgcctcgtcgtcgctcagtgccgcctcaccggcgtcaaccccctcgcccaggagatggcattgaagaaacctcagaaggacttaatatgtaaacaaaggataagtgaaattctccgtgacgagtcttggaaatctgaagttgatattaccgaggaggtacttgctttgactgatggtgctaatgagagcagaaagcctgaacccagaaaaacaccaatgcttctcactgcttctgctattgagacaaataaaaggagttctgtgcagacaaatgatattcaaaaagcaaagatgcgtgccatgttcatgcaggagaagcgtggcaagattgacataaataaattgagtgataaaccacaagcaatggacacgaaaaaagcagctggattagtaaattcaaatccatcagctatgcccataagtccccatacgtcagctgcacaacctgttgacccaagcccatctacttcaaaacaaagcacagatcctcagcctgataatacagaaatttcaggtggtttgaagttaaacataggttccaaaaacaatgtcataaagaagttggattgcaagaaagttctttggcaaataccaccagctgtatggatagacccctcgtggagtgtaggagctggtgacaacagcaaggagcttgaggttcaaacacagaggaaccggcgtgaaaaggaaaccttttatacaagccagaaggacgtcccaatgaatccaaaggacccatgggatctggaaatggacttcgatgacagcctgaccccagaggttccaattgaccaggtgccagatgtggacgccatggaaacggaaagcgttggcgcggcgcctagcgctgtggctcctgttaaggacaagcagattgaatctgcctcatcgacatcaggcgcagttgctgatgatgaggaagctaataccgattacgaattgcttacggtgctactcaggaacccggagcttgtctttgcattaacctctaacaagggggaaaacatgcctaacgagcagaccattgcgcttctggatacactgaagcagaccggccttagcctatcagagcttgttaaccgtctggggaacggcgctgggctcccaaaagagccagagccggagccagaacctattcccgcttcgcttccgtcaccaactccgccagaccgtacatcaagggctgtctggataccagaacacgcaatgcaggtgagggctgctccaaccttgcatctgccaagccgggggagtacacctcctgttgcaaatgccgtgcaacaaggcttctcaaacgttgtcagttcgttaccctcacaaccttacgcccctccagtctcggtcttgccggcacagattcaagctaacgcacccccatctcttcctctgctggcggtctctgtaaacccgccagtccaacatgtttcccctgtgaataaccttctgaacagagcttcagtgcatcagcatggacagcagcaatacgctttgttgtctgaccctgttgccacgcccttgcatcaacaagcagcggggagcaaaccagctgtagcagcacatccgtcgttgcctgagcctaatgcatcatctcacacagcattcccttggcaatctaatgctgctgacatgacccacgctggacggaatgcgacggctgatccatgggccgccgcccgcgcagctaactcgtatagtacagcatcagcaagcacagtgccgtctgctaaccagaatgcttacggcgatcaaggcaagcagggtgcgtacagctcttatggattttcggcagcctcgtcccgtcctgttgtaccagggcacgggcatgacagaaatggatacagccggtctgccctggtggagtacccatgggacgggcaccaccagcggcactcgaggtcaccagatcctggcgtggtccgggactacgacaccgactatggcggtgcgcagggctacagtcagcagcccctgacgcagtggagtgcagggaaagtgcagcagcagggctacaatcctgagccgtcaaggcagtggagttcttcccaggcgcaccagggcggctacgcacccgccgagccgtcgaggcagtggagttcttcccaggcgcaccagagctacgctcccgagctaccgaggcagtggagctccgaacgccgtggctacgatgatgcggagccctcgaggacatggagctccggccagcagaacccggaggcgccgaggcagtggagccgcgggaagcaggatccttactacagcccgagccatagccgaagatcgtacgatcagcaccggaggagatag

SEQ ID NO: 32576 - DNA, 116 bp, Zea mays
  Peptide Sequence Number=SeqID_74355
gcacgctcgcgctccctcgctggcctgctgctggcgacctgacgtctgacggatacagcctgtggccaatgggagaggcatcgagctatcgaccggcgaccgccgagacgccctag

SEQ ID NO: 32577 - DNA, 427 bp, Zea mays
  Peptide Sequence Number=SeqID_74356
gcctgatacattggatcctgcacttctgcgtcctggtcgtctggacagaaaggtagaattcgggctacctgacctggagggccgtacccaaatctttaagatccatacacgcaccatgaactgcgagcgagatattcgtttcgagcttctggcacggctctgccccaactctactggagcggatataaggagcgtctgcacagaagccgggatgtatgccattcgtgcccgcaggaaaacggtgacagagaaggattttctcgatgctgtcaataaggtcatcaagggctaccagaaattcagtgcaacacccaagtatatgggtaggggcttgagggagttggcgcgaaacaggaagagtctggactgtagcagccgtggaaggaggcgccggtgcccacctgaggaactggagcagccgcagtag

SEQ ID NO: 32578 - DNA, 1416 bp, Zea mays
  Peptide Sequence Number=SeqID_74357
atggcgctcgcctcgcaacagccaccgctggcccagcaccaccaacagcaaccccgcttgttctccaccacccactcgcgaaggccccctcggtctcccttaaaccaccgtctcccaccgacttctgcggttcccctagggatgctgatgcatgcggtagagcgcgccgggacctctccctcacagatgcacctccgcgtagtcgccggcgaggacaacatgacacctactgtcgtggttcccccggggacgctgatgcgtgtggtggagcgtggttggacctctccctcaccgatgaacgcctgcgcccgacacgccgcgtccccgttgttcacctcggcctgctgctgggcgccagccacctcgcctccctcgctgcgttgctgcacgtgcctctaccgtggcgacatgcccaagcacgtgaccgaggccaacctgctcgtcttgttctgcgaggtcgccactgtcgaggaggtcaccatcatcaaggacaaggccaccaaggtctcccgaggtgtagatctgcctggccccagatctgggctcgccgccctcccttccccacgcctgctcccgctcggttcgccgcaatgttgtgacctccactgctcgctccggagaagtttttctctgctcggggatgggtttgggagcaatgtcacccgcagaaaccttttgtgcacaggttggtcgttctgggagatatgggcaccttggtttggcagtgaacttgaccacttacaaagattgtttcaacttagcatcaaggctcgacaaccaccatattctcgtgtcaggaaatggaaaagtgatgtcttgaggacatttttgcaggcagatgaagagataatggatagggcaagatcttatgagaccggtatttttaagaaaccggcagattttatacagatgtttaagacctggtgcagtggtgagagttgtctcactgagtcaccagaacttggacaatctttggcggacttcggaaaggcgattaagcttttgggctcttgtgaaggagatttgatggaaaaggtgttttctgaagttggttcaaagtcagagatgttgtcaataaagctgcaaagagaggcagacaatcttctctttaactttgaagaacccttgaaagattatgtgtgtgctctacaatctataaaagccactatgctggatcgagctaatgctttcagacagcgctttgatttggatcaggagaggaagtataaagagcttaatcttgaaaaattgaagttcatgaaccctgagaagtatgccgaagcagaatctgagtttagagaggcaagttgctgtaactttccattgaggaattttttacgtagccttgtggatgagttgaaagcagacagtgaggaggctacaaagaagtttgaacacatctatactatatactag

SEQ ID NO: 32579 - DNA, 879 bp, Zea mays
  Peptide Sequence Number=SeqID_74358
atggaggtgggtgacctgcacaaggtgtgggaggtccgtgcgctcaagaccaagcccgacgcgaccgccgcgcgggcaaccctcgaccgcgttgccaggcaggtccagcccatcatgcgccgccacaaatggcgcgtcaaggtcctctccgagttttcgccgcggaacccgaggctgctggggctcaatgtcggcgcgggcgtcgaagtcaagctgcggctacggcgcgccggccgcgaccatgacttcatcccgtacgaggaggtgctcgataccatgctacacgagctctgccacaacgagcgcgggccccacgatgcgcagttctacaagctctgggacgagctccgcaaggaatgcgaagaacttgtttcaaagggtatcactggaacaggacaagggtttgatggcacaggaaggcgagttggtggatttactgtacatccaccaccaccatctctgcggcaagctacgttagctgctgcacagaagcgggcaaggaatggagctctattgccttctggaccaagaaagttgggtggaaacagtgaaattatgagcgcacttagtccagtacaagctgctgcaatggcggctgaaaggagaatgtatgatgatttgtggtgtggatcacatgatcaatctgctattgatgattcggatgatgttattattcttcaagagtcgccaaatttgacaacaagggatggaaaagacaagggtagctgctccaacacttctgcacagcccagcacttcttctagaattcacatagcagcacgagatgataggacaacaagtgatgcacttgatagttcaaagtgggaatgtggtgcttgcacacttctgaaccaggcaagttttatagtgccgaaataa

SEQ ID NO: 32580 - DNA, 1341 bp, Zea mays
  Peptide Sequence Number=SeqID_74359
atgcccttagggctttgcgtcatcattggaataaccaagtacagtgtatttgtatcatcctcgttgaagttctgtagtttgcagccgaagagcgacgaatgtcgcagggtcgccactggctggtaccgcatggcactgttctccaataaacgggcaccgcacgacaaaccccgagcggcagtggggaggagaagaatccagacggagtcacgcagacgccatcactactaccacccccggcctaacgaactcctccccaccccaacccccgcccagagcgacccacgcaccacgccatgcgcccgggcggcctcccgacccagcagcccggcacgccgggccgcgcgcgccgccgcccggatctcaccctccccatgccccagcgcgaggtcgccacctccctcgccgtcccgctccctctcccgccagccgccgcctccgccggggggcccaccccgccgggcgtcaccgcgcccgcccccgcggcgcagcagcagcagcagccgccccccgctcgcggagctggaacgcgtgcgccgcgtcggcagcggcgcgggcgggacggtgtggatggtgcggcaccgcggcacggggcgcccctacgcgctcaaggtgctgtacgggaaccacgacgacgcggtgcggcggcagatcgcgcgcgagatcgccatcctccgcaccgccgagcacccggccgtggtgcggtgccacggcatgtacgagcgcggcggggagctccagatcctgctggagtacatggacggcgggtcgctcgacggccgccgcatcgccgccgagccgttcctcgccgacgtcgggcgccaggtcctgtccgggatcgcgtacctccaccgccgccacatcgtgcaccgcgacatcaagccctccaacctcctcatcgactcggcgcgccgcgtcaagatcgccgacttcggcgtcggccgcatcctcaaccagaccatggacccctgcaactcctccgtcggcaccatcgcctacatgagccccgagcggatcaacaccgacctcaacgacggcagctacgacggctacgccggcgacatctggagcttcggcctcagcatcctcgagttctacttgggcaggttccccttcggggagaacctcggcaggcagggcgactgggccgcgctcatgtgcgccatctgctacaacgacccgcccgagccaccgcccaccgcctcgcgcgagttcagggggttcatcgcctgctgcctgcagaagaacccggccaagcgcctcacggccgcgcagctgctgcagcaccccttcgtcgccggcccgcacccgcagcccctcgctgctcctcccccgtcatga

SEQ ID NO: 32581 - DNA, 483 bp, Zea mays
  Peptide Sequence Number=SeqID_74360
atggagcactgtcccgggttggagaggttgctggagactgcccatctggagcttgacgggaagctgttcgtcaacacgcagcaggcccctacctggcgcgccaactgtcggcgtttcgagaccggggggtccctcgggccgacgagttgggtgacgtggaggctcctccgaagccgaggtcgagtctgtcttccatggctgaggccgagtccgagcccctgggtcgggcgaggcggaggtcgttcggcagaggccagggcggagtccgagccctggggttgggcgaagcggagttcgtcgtcttctggggctgagcccgagtccgagccctgggtcgggcggagcggagttcgccgtcttccgggacttagcccgagtccgagccctgggtcgggcggagcggagttcgccgtcttccgggacttagcccgagtccgagccctgggtcaggcggagcggagttcgccgtctgccgggacttag

SEQ ID NO: 32582 - DNA, 420 bp, Zea mays
  Peptide Sequence Number=SeqID_74361
atgaatgacgggaacaacggcgacgagaatgtgtccccgcagccaatactaaaccgtcgcgacacgcggcagcaacgccgaggagcaggaagcgacaaatgccaagcaggagctccagttcaacggatcaggacacgggcgcccgaggcacaacaacagtgggtggggagcagtccccccatccactgcccgcccacccatggtcgacgcagcatctgtcgctgccctatccaggaggaagcaggcgccaccacatcgggagacgtcgccatcaccgacaacaggaagaactcgcagccaccgcaagagcactcgctccaatatcacctagatctggacgcgcggaagagaagggccccgccgccgccttcctttgggggtctagacgacggggaggaagaggtggcggctagggtttag

SEQ ID NO: 32583 - DNA, 525 bp, Zea mays
  Peptide Sequence Number=SeqID_74362
atgcggatgaggtggcgcccgggagtgcttgccgggcatggtgtgcacgccgacgaggacgctcataaagctccgccggggggctggctaccgacgacaccgtcgacgttcgcccacgggtcatcgttgctggcgcagcgcggacgacaaccggcggtgacgccgacgcaaggcgctcgtgggcaacttgccgtggaagcaaaacggtataacaaggacgatgcgcatattataccacctgctagagaaagtggtactccttcaggagctggcgatctagattgcagaagcggatggctagagggaccaaacaaggtgtacatcccgttcctgccctgcggggatctcagcggctacgactccgaccgctcgtacccgctgcccagcacggacggtggctcgtaccggagcctggaccccgtgcagcctcccatcgccccgtcttacaagaccgccctacagatgaagaaggcttccagccacagcgccggcgcggacgccatcaagccgtccgcagactcctga

SEQ ID NO: 32584 - DNA, 675 bp, Zea mays
  Peptide Sequence Number=SeqID_74363
atgctgatatacgacaccggcgacattcgccagccgccctgcgccccgttcgtgaagaatgcgtcagccatgttcagtttctcgcagggctgcctttgttggaggcaagaagtgcccgcagatatctggcttcggtacaacacaaagagctactgcagacagaccttggttggaggcaactatggcctgctcaacacaatgctttattgtggcaccgcctcatgtatgggcaccaaggtcctctcgacggcattcaacggcacaaacaagatccgtgcctacgcacactgcgcgaaaaactcggaagagatcgctctgctcctgatcaacctggacggcatcagcacgaaccgcatctacgtgacgagccaaggcgcgcacgcccggagcggaaggaagaaggagagcaggacgtccgacgtccacatcatccctgcagggctcggcgaagcagcagccgcgctcacgagacaggagtaccatctaactcccaaggacgggaacctgcagagccagcagctgctgctgaacggcaacgtcctggcaaccgacgccgacggggagatcccggagctggagcccgtgcaggtggaggggacgcagcccataaccgtgggcccttactctatcgtgtttgctcacgtccccagcttctacgctcctgcgtgcctgtag

SEQ ID NO: 32585 - DNA, 2136 bp, Zea mays
  Peptide Sequence Number=SeqID_74364
atggtggtccataaagacagaaagatggtggtagcagcagccagcaggcatattccaaccccccaagcacactggcaaatgacaggcagcagctacgcctgcacgtgcacggccttccgctccatcagcacgaagctagcagcacggtccagcggtggccgccgttctgccgtggccccctctgctggagggccgccgctgccgccgccaccaccagttgtcatggccggcgccgtggcgtcgccgggcaagcgaatcccgccgtcaccaattggttgcaccagcagggccgccagcggcgtcgccgtctctgctagtgccaccgtcgccgcccccgctagtagtagtaggcaggcgaaagaggacgatggcgcgagcagaaacgtctcgggctttgagccatccatctggggcgatttcttcctcacctactccagccctctggccacgtcgtcccttcacaaggcatggatggtacatcgagcagagcagctgaaggaacaagtggcagcaaaactggtagcagcttcgtcgagcgcctgtagcctgcaccgtaggattcatctcatccacgtcttggagcgtctctgtctggatcatctcttcgaggacgagatcagcgacatgctagctcgaatgaacgacgtcgatgtcagtggctgcgaccttcaaacggtggccatgtggttctatcttctccgaaagcacggatacagtgtctcgtcagatgtctttgccgagttcagagacgaacaggggggtggttttacagcaaacagtgcaagggatctgctgagccttcactgcgctgcttgtctcgcgacgcgtggagagacgatacttgacgaggccatttccttcacagccaagagtttaaaatcaacagcgccgtatacgggagcagcgtcgttagcatgtgaaataaagcgtgcgctcgagatccccctcccaagacgtgtgagaatttacgaggctaaatctcgtatagctgaatatggaagagaggctgaggctgatgaactgaggaactatctttttcaaataattgctatcgtgaactatcgcaaattgccattatatttcaacgggcgacaccgatttatttacttcagaatcgaaagaattgctgttcaattaagaacgtgcaggtggtggaatggtctagagcttcagtcaaggctatcgttcgctcgagacagagttgtggagtgctacttctggatcgtgggagtatattttgagccaagctactctcgagctcgaataatactaacaaaagtcatcgccatcgtgtccctattggacgacacttatgatgtctatggaactccacaggagtgcgagttatttaccgagtgtatagaaagctgggaccctgcagttgctggaggtcttccagagaacatgaagttcatttttggaaaaattttggatacttaccaaagcattgaggaagaattagcgccggaagagaaataccgcatgccctacataaaaaattttgttagactgattccagcagtttacccatatggccgtgcattgtttagcagactgcattgtttgcagcgtggaggatcgggatggattatagatctagtaagagcatacaacaaggaggtaagatggcgcgaacaagggtatgtgcctgcaaccgttgaggagcacctgcaggtttcagcaagaagtggcgcttgtcacctcttgtcgtgcgcatcatttgttggaatgggagatgttgcaggtgaagaagctttcgaatgggtgtgcagtgtgcctaaactagtgcaggcgctctgcatcattctcagactttccgatgatctcaagtcatatgagcgagagaaaatggccccgcatgttgcctcgacaatagaaagctgcatgagagagcacgaggtcccgctcgaagtggctcgcgtgaagatacaggaaatgatagatgaaacatggaaagatttcaacgaggagtggctgaacatgaacaagcaccagccggcggagctgctcgagaggatcttcaacctgacaagaacaatggtgtatatgtacaagaatgatgacgcgtacacaaattgccatgtcatcaaagacaccataaactcgttgtttgtggagcctgttttcatagcctag

SEQ ID NO: 32586 - DNA, 360 bp, Zea mays
  Peptide Sequence Number=SeqID_74365
atggtgaagggacgcacggggcagcgcgtcaggctctacgtccggggcaccatcctcggatacaagaggtccaagtcgaaccagtacgagaccacgtcgcttgtgcagatcgagggggtgaacaccaaggaggacgtcgcgtggtacgctggcaagcgcatggcgtacatctacaaggccaagaccaagagcagtgagacccgctacaggtgcatctggggtaagatcacccgtccgcacggcaactccggcgttgtccgcgccaagttcaagtcgaacctgccgcctgagtctatggtcagtgacgcactcagtacgctgtgtgatgtgcgctgcttcccaattgatgctctgtcctga

SEQ ID NO: 32587 - DNA, 1338 bp, Zea mays
  Peptide Sequence Number=SeqID_74366
atggaagcctattgcgatgaggttcggcgcctggaggacaagttctacgggctcgagctcaaccacatcgcccgacgatacaacgagactgcggacgagctggctaagatagcctcggggcaaacaacggagagctgcccctcgaccgagccgaggctcggcgactggcgcggcgcgccaagtcgttcgtcttgctgggggacgagaaggagctctaccaccgcagcccctaaggcatcctccaacgatgcatatccatcgccgaaggccaggagctcttacaagaaatacactcgggggcttgcggtcaccacgcagcgccccgagcccttgttggaaacgccttccgacaaggtttctattggtcgaccgcggtggccgacgccactagaattgtccgcacctgccaagggtgtcaattctacgcaaggcagacccacctgcccgctcaggctttgcagacgataccccatcacctggccgtttgctgtatggggtctggacctcgtcggccccttgcagaaggcacccaggggctacacgcaccttctggtcgccatcgataaattctccaagtggatcgaggtccggcccctaaacagcatcaggtccgaacagacggtggcattcttcaccaacatcatccatcgtttcggggtcccgaactccatcatcaccgacaacggcacccagttcaccggcagaaagttcctggacttctgcgaggatcgccatatccgggtggactgggccaccgtggctcaccccatgacgaatgggcaagtagagcgtgccaacgacatgattctgcaaggacttaagccacggatctacaacgacctcaacaagttcggcaagcgatggatgaaggagctcccctcggtggtctggagtctgaggacgacgccgagccgagccacgggcttcacaccgttctttctagtctatggggccgaggccatcttgcccacatacttagaatacagttccccaagggcgagggcctacgacgaccaaagcaatcgaacaaaccgagaagactcactggaccagctggaagaggctcgggacacgaccttactacactcggcgcggtatcagcagtccctgcgacgctaccacgcccgaggggttcggtcccgagacctccaggtgggcgacttggtgcttcggctgcgacaagacgcccgagggcggcacaagctcacgcctccctgggaagggccgttcgtcatcgccaaggttctaaagcccgggacatacaagctggccaacagtcaaggcgaggtctacagcaacgcttggaacatccgacagctacgtcgcttctacccttaa

SEQ ID NO: 32588 - DNA, 2187 bp, Zea mays
  Peptide Sequence Number=SeqID_74367
atgcaggccaggctcgacgagggagcaggaacacttgagccgttccgccgggacatcgggcaggaatgggcaggccaagctccggccggagaagcgcgtcatctaccccagggcatccagcaccgcattgccgacgacgtcagggcaaggccgccaccggcttctagtggggtcggccagaacctggctgcagcggcaatacttctctgcgcgatgccggaaccatcgaccaccgaggggcgacgtatccagggagagctcaagagtctcctggaggatgccgtggtccgacgggccgaaagctcttcctcccgaaggcagggatacccctcggagcatcgcgccgcgacttcccgattcatgcgggaagcctcggtccacaccgggcgcacgcgcaacacagcgcctgcggccccgagtcgcctcgacaacgagcaccaccaccgcaaccgtcgaacccacctcgacgagagggtgcgccgaggctaccaccccaggcatgggagacgctacgacagcggggaggatcggagtccctcgcctgaaccacccggtccgcaggctttcagccgggccatacgacgggcgccgttcctgacccggttccgaaccccgactactatcacaaaatctccaactgggacgacttggtccaagccttcgccggcaacttccaagggcacgtacgtgcgccctgggaactcctgggatctccgaagctgccgccagcagccgggagagtctctccgggactacatccggggattctcgaagcagcgcaccgagctgcccaacgtcaccgactcggatttcatcggcgcgttcctcgccggcaccacctgccgcgacctagtgagcaagctgggtcgcaagacccccaccagggcgagcgagctgatggacatcgccaccaagttcgcctctggccaggaggcggttgaggccatcttctggaagcacaagcagccccagggccgcccgccggaagatgtccccgaggcgtctactcagcgcggcaccaagaagaagggcaagaagaagtcgcaagcgcaacgcgacgccgccgacgcggaccttgtcgccgctgctgagtataagaaccctcagaaacctcccggaggcgccaatctcttcgacaagatgctcaaggagccgtgcccctatcatcaggggcccgtcaagcacacccttgaggagtgcgccatgcttcggcgccactttcacaaggctgggccacctgcggaaggtggcagggcccacaacaacgacaagagggaggatcacaaggcagaggagttccccgaggtccacgactgcttcatgatctacggtgggcaagtggcgaacgcctcggctcggcaccgcaagcaagagcgtcgggaggtctgctcggtaaaggtggcggcgccagtctacctagactggtccgacacgcccatcaccttcgaccagggcgaccaccccgaccgcgtgccgagtccggggaaatacccgctcgttgtcgaccccgtcatcggcaacgtcaggctcaccaaggtcctcatggacggaggcagcagcctcaacatcatctacgccgagaccctcgggctcctgcggatcgatctgtccttggtccgggcaggcgcgacgccttttcatgggatcattcccgagaagcgcatccagcccctcggacaactcgatctgcccgtctgcttcgggactccctccaacttcagaagggaaaccctcatgttcgcagcagcctcaacatcatctacgccgagaccctcgggctcctgcggatcgatctgtcctcgaagggaaaccctcatgttcgaagtggtcgggttccgaggaacctaccacgcagtgctagggaggccatgctacgccaagttcatggccgtccccaactacacctacctcaagctcaagatgtcgggccccaacggggtcatcaccattggccccacgtaccgacacgcgtacgaatgcgacgtggagtgcatggagtacgccgaggccctcgccgaatccgaggccctcatcgccgacctggagagcctctccaaggaggcgccagacatgaagcgccatgccggcaacttcgagccagcggagacggttaagtccgtccctctcgactccagcaacgacgcctccaagcagatccggatcggctccgagctcgaccccaaatag

SEQ ID NO: 32589 - DNA, 1704 bp, Zea mays
  Peptide Sequence Number=SeqID_74368
atgggcgaagcgatctcgttcgcccctcgtaaggccatcaagtcccaggtcttggcggacttcgtggctgaatgggtcgacaaccagctcccaacggttccgatccagccggaactctggaccatgttcttcaatgggtcgctgatgaagacaggggccggcgcaggcctactcttcatctcgcccctcggaaagcatctacgctacgtgctacgcctccacttcccggcgtccaacaatgtggctgagtacgaggctctggtctacgagttgcgcatcgccatcgagctaggggtccgacgcctcgatgctcgcggtgactcgcagctcgtcatcgaccaagtcatgaagaactcccactgccgcgacccgaagatggaagcctactgcgatgagatcgacgacacgctcgagcccgaggcaccctcggcccagcccgaggaaccctcagctcagtccgaggcaccctcagctcggcccgaggcaccctcagctcggcccgaggcaccctcggtttggcctgaggcaccctcagctcggtccgaggcaccctcggcccccgagggtgaggcactgcgcgtcgaggaggagcgaagcggggtcacgcctaatcgaaactggcagaccccgtacctgcaatatctccaccgaggagagctacccctcgaccgagccgaagctcgacggttggcgcggcgcgccaagtcgtttgtcttggtgggggacgggaaggagctctaccaccgcagcccctcaggcatcctccagcgatgcatttccattgccgaaggccaggagctcctacgagagatacactcgggggcttgcggccatcacgcagcacctcgagccctcgtcggaaacgccttccgacaaggtttctactggccgacggcgatggccgacgccactagaattgtccgcacctgcgaagggtgtcagttctacgcgaggcagacccacctgcccgctcaggctctgcaaacgatacccatcacatggcctttcgctgtgtggggtttggacctcatcggccccttgcagaaggcacccgggggctacacgcacctgttggtcgccatcgacaaattctccaagtggatcgaggtccggcccctaaacagcatcaggtccgaacaggcggtggcgttcttcaccaacatcatccatcactttggggtcccgaactccatcatcaccgacaacggcacccagttcaccggcagaaagttcctggacttctgcgaggatcaccacatccgggtggactgggcagccgtggctcaccccatgatgaatgggcaagtagagcgtgccagcgacatgattctacaagggctcaagcctcggatctacaacgacctcaacaagttcggcaagcgatggatgaaggaactcccctcggtggtctggagcctgaggacaacgccgagccgagccacgggcttcacgccgttctttctggtctatggggccgaggccatcttgcccatagacttagaatacggttccccgaggacgagggcctacgccgaccaaagcaaccaagctagtcgagaagactcgctggaccagctggaagaggctcgggacatggccttactacactcggcgcggtaccagcagtccctgcgacgctaccacgcccgaggggtccggtcccgagacctccaggcgggcgacctggtgcttcggctgcaatag

SEQ ID NO: 32590 - DNA, 1815 bp, Zea mays
  Peptide Sequence Number=SeqID_74369
atggccttctactcctccaccgttgcaccttcaggcaccactgcacttttcggcttgctggtgccattgcggttgcggcgccagatggtagcagcagccagcaccacccaagcacactggcaaatgacaggcagcagctacgcctgcacgtgcacggccttccgctccatcagcacgaagctagcagcacggtccagcgctggccgccgcagccgtggccgccgttctgccgttgacccctctgctggagggccgccgctgccgccgccaccagttgtcatcgccggcgccgtggcgtcgcccggcaagcgaatgccgccgtcaccaattggttgcaccagcagggccgccaccgctagtagtagtaggcaggcgaaagaggacgatggcgcgagcagaaacgtctcaggctttgagccatccatctggggcgatttcttcctcacctactccagccctctggccacgtcgtcccttcacaaggcatggatggtacatcgagcagagcagctgaaggaagaagtggcagcaaaactggtagcagcttccagcgcctgtagcctgcaccgtaggattcatctcatccacgtcttggagcgtctctgtctggatcatctcttcgaggacgagatcagcgacatgctagctcgaatgaacgacgtcgatgtcagtggctgcgaccttcaaacggtggccatgtggttctatcttctccgaaagcacggatacagtgtctcgtcagatgtctttgccgagttcagagacgaacaggggggtggttttacagcaaacagtgcaagggatctgctgagccttcactgcgctgcttgtctcgcgacgcgtggagagacgatacttgacgaggccatttccttcacagccaagagtttaaaatcaacagcgccgtatacgggagcagcgtcgttagcatgtgaaataaagcgtgcgctcgagatccccctcccaagacgtgtgagaatttacgaggctaaatctcgtatagctgaatatggaagagaggctgaggctgatgaactggtaatggagctagcaaagctcaactataatctcgtgcaactccagtatcaacaagagctgaagatcataacaaggtcgattgctgttcaattaagaacgtgcaggtggtggaatggtctagagcttcagtcaaggctatcgttcgctcgagacagagttgtggagtgctacttctggatcgtgggagtatattttgagccaagctactctcgagctcgaataatactaacaaaagtcatcgccatcgtgtccctattggacgacacttatgatgtctatggaactccacaggagtgcgagttatttaccgagtgtatagaaagctgggaccctgcagttgctggaggtcttccagagaacatgaagttcatttttggaaaaattttggatacttaccaaagcattgaggaagatgtgcctaaactagtgcaggcgctctgcatcattctcagactttccgatgatctcaagtcatatgagcgagagaaaatggccccgcatgttgcctcgacaatagaaagctgcatgagagagcacgaggtcccgctcgaagtggctcgcgtgaagatacaggaaatgatagatgaaacatggaaagatttcaacgaggagtggctgaacatgaacaagcaccagccggcggagctgctcgagaggatcttcaacctgacaagaacaatggtgtatatgtacaagaatgatgacgcgtacacaaattgccatgtcatcaaagacaccataaactcgttgtttgtggagcctgtttccatagcctaa

SEQ ID NO: 32591 - DNA, 1014 bp, Zea mays
  Peptide Sequence Number=SeqID_74370
atgtcgacgtacctcaagaagccgcccccctgcagcgtctccctcatcgtcctcctccctctcaccctgatcttattatgcttcacctttctccttccgctgtccgcctacatcagcaacccgcttgcctccacggcagtggccacgagagcctgcgtcggcgccaccgctggtgtcgtccgcgctgcgccagcaacgacgaccgtgggcgacgtcgacggtgtcgtcggtagccagcgcccggcggagcttatgagcgtcctcgtcggcgtgcacaccatgcccggcaagcactcccggcgccacctcatccgcatggcgtacgcgttgcagcagcagacgcccgcgctgcgcgccgccgcgcgcgtcgacgtccgcttcgtgctctgcgcgcgcccgatgccgcccgagcaccgcgtgttcgttgcgctcgaggcgcgcgcctacggcgacgtgctggtcctcgactgcgccgagaacgcggaggaggggaagacgtacacgtacttcgcgagcctgcccaccatgctcggctccggctccggcggcggcggcggccggccgtacgactacgtgatgaaggtggacgacgacacgttcctccagctggacgcgctggtggacaccctgcgctctgcgccgagggaggacatgtactgcggcgtggggctcccgttccacgaccggcagttcccgccgttcatgctcggcatgggctacctcctgtcctgggacctcgtggaatggatcgccacctccgacatggtcaggagggaggccatgggtgtagaagatctgaccacaggcaaatggctgaacatgggccacaaggccaagaaccgggtgaacatcttccccaggatgtatgactacaagagtgccaaaggtgaagacttcttggagaacaccatcggggtgcaccagctgaagcaggacctgaggtgggcacacacactggagcacttcaatgtcaccaggctggagccctccagcatgctactacacaacttctag

SEQ ID NO: 32592 - DNA, 1374 bp, Zea mays
  Peptide Sequence Number=SeqID_74371
atgccgcccaaggaactggagaagtggagagacagcgccgcggcccatacctcttgctcttgttgccgccgcgcagcctctctttctaacagctgggtcccaactactcctgtccccacttggcattgtaaccaagctgccgcagcccgcagcggccaccaatgcggagcggccgcctgcgtcccttcacctatccgaatggggcttatcgccaccatccaatcgaagctctggaacctcctccactcccagcttccgccgacgctcgcttcagctgctgctttccttcccatccttcaacagccttctttcaagttttacagaaagtgcctgacaaactgcccatattttgcactgaccatgcattcaactacaaagcccttgggttcatctatgccggtaaagagggcgcatttgaagccacatgccgcagacatcaagaggaacccccatgtacatgagctttacaaattggtttaccgacttccggagaaccttagctggctgttggcaccaccagaaattcctaaaagacctgcctcaaagaagaaaaaacaaaaagacgaaatagtggccggtaacagctttggtgtgatcttggagtgggagggagttgttgtggatgatgatgatccagacttggagccccgggtttggtatgttctatcactagaagaggggaagtctttccctccagatgcattgctgaagaaaatcgagggaatgagaactgaccaggctattgcagaagtcttatgttggtcagaagatccagcagaaatccaaaggttggcaacacacaaggaggttatatatcaaaaacttcaaggtggatactaccagctgcgaccacatgtgcttgatttcttgaacacccttgtgggttttgacattccaatagcaattgcagctcctcgctcaaggaagagccttgaagaagggatcaaaactgttggtctgcaaggctacttcgatgctatagttgcattggaggacttctgcttagggaaacctgatggtgagatgtttgaagtcgcagcggagcaacttggtctggaaccagatgcctgtgttgtgtttggtaactcaaacttgacgacggaatctgcacataacgctgggatgaggtgtgtggcagttgcaggccgacaccctgcctatgagctccaatcagcaaaccatgttgtgagatggcttgatcagctctctattgttgacttgcagaggcttgctaatggtgaagttattggtcgcaggggtagagaatctgacatggatatggaaattgccaagcagtgcaagttccggactaaggatactccggagtttgcattaccttcctggtttgcttgtgatgaattggaattcgcctaa

SEQ ID NO: 32593 - DNA, 237 bp, Zea mays
  Peptide Sequence Number=SeqID_74372
atgggcggaggaaacggacacaattcctcgctgctggagagacctagaggaagcggcggacatgagagagcagggattgcgtctgtggatctaggcggatggcgaggattgcgtgaggagaaagcggacttcgcggaaccagagagcagggaagttggccggcacggggagcagcatggacggcgggatgaccgcgaccgctacagctttgttttcaatctgggggatggaacctag

SEQ ID NO: 32594 - DNA, 327 bp, Zea mays
  Peptide Sequence Number=SeqID_74373
atgtcgacgcccgccacagccagcatcgtccaagactccggcctgccctccacggcgcacacggccaggcaagatcaatcaaggaaggaagcagttccatctgtgatcccttttcagttgaaggatgcgcaaacccaaggccaaaaggaatcactggcagctccaattcgagcaatcagaccttcagttaagattgatattcccactcaagttaaggaagcttcagctagtgctagcagtgaattgccatcatctgctacggacaatgctgctgctatggaatgcagtacatcatcaaaaatgttcttggcaataatgttgccgtag

SEQ ID NO: 32595 - DNA, 612 bp, Zea mays
  Peptide Sequence Number=SeqID_74374
atgaaggcgaatcagacgccccagatcgacgcaccggctctcgatccgcgctctcaagggaagcatgacctgcaagtcatcataacaagaaaaaatatttataatgtttcaattggagctacacacaagagtgtttcaaataacctcgcttggtgcaccgagctggctcctgatagggttcggccagcactccagaaaacactcaaggacttgcagctggattacctggatctctaccttgaacgcacgcagatccactggcccttcaggctgaaagacggggcgcacatgccaccggaagccggggaggtgctggagttcgacatggaagaggtgtggagggagatggaaggccttgtgaaagacgggctcgtcaaggatataggtgtctgctttaccacggtcaccaagctcaaccgcctgatgcggtcagcgaatgttccaccggcagtgtgccagatggaaatgcaccctgggtggaagaacgacaggatctttgaggcctgcaaaaagcatgggatccatgttactgcttactctccgctgggttcgtcagagaagaacctagcacacgacccgctcgtcgaaaaggtcccttactacttcagttga

SEQ ID NO: 32596 - DNA, 1776 bp, Zea mays
  Peptide Sequence Number=SeqID_74375
atggcggggtcctgcatcattgccctgcccagccgcttcgccatggccacgagctatggattctgcatcggatatgtacctaagtggttcaactggggttaccaccaggaagtggaagatgagtacggagatgagtactatgatcaagatgagtatgaggaggaaggttcgggtgctggggatgggtatgctgaggaggaagagcctacagagggacaaaaggagatccttgaattgagagaaagattaaaagagcagattaggcgaaaggcaaaggctgctgctgcctgcacagctggtcgatcatcttcttcacaaatacctcaagccagggacaaatttggctctttttttgggccatccaagccggtgatttctcgtcgagtgatagaagaaagaaaatcattgaaagaactgcatagcacggttgcaagggagccaaggccttctggagtacataaggatattccatcgtcctctaaagtgcaaagtagagtaaatggacatcagcataaacaaaagattgttaatcaggtaaagaagaaggctgaggcacttaaggataaccgggattattcatttctactctcggatgatgctgacctgtcatcctctccaaaggagaaacctgctgctagatcttccttgactcaaagggctgatcgtgaggtgacacaatcaacagtaaagaggaaggcaccaacaagtcaacctgcacgcttgtcaaatggatatggacctaagaacacaatgtcaactcaaaggcatgctgaaggtaaggtaaattccatgagaagggaggatttctcgaatacagaaagggttgtttcacgtgacaatgagaggatgtatgaaagggttgtttcacgtgacaatgagaggatgcatagtattgcaagaaatggatccaaccaggcaagtactagcaaaaccacaatccaaaagcatccaagcaggggtcccattgctaataagcaaccgtccaaggattcgaatgatgcaactctgaggaagagcagtgtagcctcaaagcaccatcccttagagattgacagaccaaaatcctcgcaaagtcagaggatgcagtcagctggtcagagaccacagcattcttcccatggtcagacgccacatcaatccatgcagcataggacgcagcagtcattgcagagtcggaggccacaacaaatgacacagggtcagaagccacaacagtctttgcagagtcaaaggactcaacagtccttgcagaatcgaaggccacagcagtcctcacatattcagaaatcgcaatcctcacaagcacacagaccacagtcattaagtaacaggtctcaggctttacaaggacaaaggcctctttcttcacagggtcaatatccggagcaaagaagagtacatgcaagtgacagagtcaaacaagctgaaaggcagattcggcctccttccaagtccatgccatcacggccagtctcttccaatggaattcgtgatgatcatgcaaaaaggaagcaagtggcaaaaagaagatttgatgaagatgatgaagaccccttagcaatgatcagaaatatgtttgggtatgatcctagtagatatgcaggcagagatgaagatgtcagtgacatggaagccgattttgctactatagaaatggaagagaaaaggagcgcgaggattgctaggcaggaggatgaagaacaacttcgcttgattgaggaagaagagagacgcgagcaggagagaaagaggcgaaagatggcacgaggccgatag

SEQ ID NO: 32597 - DNA, 489 bp, Zea mays
  Peptide Sequence Number=SeqID_74376
atggcggatcagacaggcacttctcttgcagtcctgtttacccttaccacgatgattatctggaggcaaatcaagggaaaacgacaggagtatgaagcaacagtggcagcactttcacaaatggagaagagagatgtaatggcaaaaacaatgctggaagctacaaagcaataccaggctggacagaactctgtttatggcacatgttgctcagacataatgatcgagtccctcttcatggtcggagaaattgggggcaatgactacaacctacctctcgtctccaaagtgccgattgaaaagatttgctcattcacaccaagtgtcattgtcaaagtttcttcaacaaacaccgtgaatgtctacgtcattttatatgttgttgctgctgctgagctgacatattatatagatagtaatgtaactgattggagtttgcaggaattgattaggctaggagccaagactctggtagttcctgggggttaa

SEQ ID NO: 32598 - DNA, 1809 bp, Zea mays
  Peptide Sequence Number=SeqID_74377
atggccagaacccagtgcgtgcggtcaccaaccggagggaacaaggagcagtcgtcgatcgcctctcctttgcagttgcggctttgcttgatcgcctcacgccaagcaagcaccgactgcctcaaattaagaagaggctgcaccgaccggctctatttgagctatatctctgcaggaaagctcagttcagatccattcacttcactcatgggctcatcctcgggccatcagagaagcaaaacgcgcagcaggaacaggaagcccttgggaattcagctcttggagcgggtccgtggcagccccatctccttcagatcatgccaggctctcgtgctagtgctcacgttcctatcctacgccagctaccacgccaccaggaaaaccacgagcgtcgtcaagagcgtcctcgacccaaagacgaagacgaacctaggcacgtcgtcggcgcattactggccccccagccacctcttctatctccataatctcaaagatgcggacaacagcagcgccggcggctctctctccagcggcggcggcggcggctgggttccgttcaacgaggcggaagacggcacggcgttgctgggcgagatcgacctggcgttcctcggcgcgtacgcggccggcatgttcttcgcgggccacctgggcgacagggtggacctgagggtcctcctcaccgtagggatggtggggaccgggctcttcaccgccgccttcggagcgggctactggctcgacgtgcacagcttctactacttcctggccgtgcagatggtggccggcctgttccagtcgtccgggtggccgtcggtggtggcggtggtcggcaactggttcgggaagagcaagagggggctcatcatgggggtgtggaacgcccacacctccgtggggaacatttccggctcgctggtcgccgctgccatgttgaggtacgggtggtgctggagctttgtggtgcccggtgtcgtcatcgcgctggtcgggctcgccgtgttcctgctcttgcctgttgcgcctgatgtgattggagtccaggaggatctctgtttgaaggacgctccattgcttgaacgacgacgcgcagatgtagaggaaaaggcggttgggtttattgaggcgtggaggatccctggtgttgcccctttcgccctctgccttttcttctgcaagcttgtggcgtatacgttcctgtactggcttcccttctatatcagccacacagctatcggtggagaatacttgtcggactccgcagccggggtactgtcgacgctgttcgacgtgggcggcgtcgtgggcggcatcctcgccggccacatctccgaccacctggacgcccgggcgctgacggccgcgagcttcaccttctcggcgataccggcgctcttcttctaccgcgtctacgggaacgtctcgctggcctggaacatcgccctcatgttcgtcacggggatgctggtgaacggcccctacgcgctgatcacgacggccgtgtccgcggacctcggcacgcacagctcgctcaacggcaactcccgcgcgctggccaccgtcacggcgatcatcgacggcacggggtccatcggcgccgccgtcggcccgctcctcacgggctacatctccgccaggagctggagcgccgtgttcacgatgctgatggcgtccgcgctcgtcgcggggctgctgctgtccaggctcgtggcggcggaggtggtcgccaagatggagtcccggaggacgcccgcccctgctgcgagcgacctgctgcccgtgtcctcctcctccatggacgaaccgtag

SEQ ID NO: 32599 - DNA, 606 bp, Zea mays
  Peptide Sequence Number=SeqID_74378
cctgaacacggccgcgcaccagtgaacgacggcggagctatcgccggagtgcggcgatccatggcactggtgcactactccccgattcgcaacactctacacaaatctcaggccaaagctaaccgcagggaagaggtctcaccagaagtgaagatggggacgaggtcggacacggtgtggtgcggaacgctggcatcgaagtcccacggcggcggcgatctgacgaggcaggctggtagagagctcgcggcgcgaggagagacaagagaggggtcggcacggaggcgagcactaaggcgggagatggcaaggttagcagcggcggcacgactggtgatatggctcagcggacgcggcagcgacacccacggcgccgggagatggagaccgagcggtcgaccaccaggcggattgcacgaggaagaggagaaggctgggtgggagagaaggcaggaggaagcccagcacacagcttatagccccgcgcgggtcagttccggttgcaagcaacggactccgagttccctggaggggtacatactggatgagataatggatgctgctgctaaaggaagaagacatattacaagtaaagcagggatgtag

SEQ ID NO: 32600 - DNA, 351 bp, Zea mays
  Peptide Sequence Number=SeqID_74379
atggaagatatggaatttgatagtttattctatagtacaagttggtcgctgatgttgtatttaaagaatttgcttgacatccaaaggtctatatttggaatggtgaaggtaggtatgcagctcctgtgctgtgaagttgttgagaatactgacgcagtggtctatcgtggaaagatgtgcttcaatgcatttgacgaggaagctgacctcgatgttcttgaccatccagttctgaatttgttctattacctgcttgtggagattctcccttcatctcttgtcctgtacattctaaggaggattcctgcaaagctacggctatcccagtatcaccccgtcagcagcagctag

SEQ ID NO: 32601 - DNA, 282 bp, Zea mays
  Peptide Sequence Number=SeqID_74380
atggacaagatttacaggttcgggccgcttagaagggatatctatcccccacacgcgcggacccgtgcgcgagcacagaggagaatcaccggcggcggctgttggcgagatggcagcggcgccggtcaatccgcgcggaccgcggactccgttggcggcgcgcccaccaagctcggagcggtctgttacgagaggtggaagacatctgccatgcgggtcccgctaggcccgcctgtcggcgccatcaccaggagctgggccgcgcgggaggttaagggttaa

SEQ ID NO: 32602 - DNA, 375 bp, Zea mays
  Peptide Sequence Number=SeqID_74381
atggagtcgtggcggaggcggacgctgctcaaggtcatcgtcctcggcgacagcggatacgtgagcaagaagttcagccagcagtacaaggcgacgatcggtgccgatttcctcaccaaggaggtgctcattggcgacaggctcgtcaccttgcagatatgggacacggcgggacaggagaggttccagagtcttggcgtggcgttctacaggggtgccgattgctgtgtgctggtttatgatgtcaatgtcaagagaagctttaatacgctcgatacctggcatgatgagttcctcaatcaagtaagccacatctcccacgaccatgtatctttctggatgtctggttacaatagcagctactcatgtggttga

SEQ ID NO: 32603 - DNA, 1617 bp, Zea mays
  Peptide Sequence Number=SeqID_74382
atgggacagtcaggcagagacagtcaggcgtgcacatggaaggataaggtggctgcacacgccgtcattcgcgacggtttctccgcaagaggtttcaggttccagcccagcggaagtgcagaattttgttgttcagtgcagggcagctggacagcatctgctaactggaactggatagtcgatcccctgaacggtgataaattcatcaaagttgctgaggttcagggaacagaaataaagccattcgtggagagtttatctaaatgcccaaagcatggacttcacaacccacttaaagctccagagaggtacctcatgtatggagatatatctgcaaaagctgcgcatatgctgggccaacctgcagtcttagatttctttgctaaacttatccagagggtatctcccaagagctaccaacaagctcttgcagaagttcaagtttctcaaaagtttttggaaaacttttgtggagaccaggtacgctttctggcaaggtcatttgctgtaccaggtaaccatcttggacaaagaagtaatggctaccgttggccatatggcccagttgcaattatcacaccattcaattttccgttggagatccccttactacaattgatgggagcactatacatgggaaataaaccagtactcaaggttgacagcaaggttagcattgtgatggaacaaatgattaggttgcttcatgattgtggattgccagcagaggatatggatttcataaattctgatggtgccgtaatgaacaagcttctgttagaggctaatccgaaaatgacccttttcactgggagttcacgggtagcagagaaattggctgctgatttgaaaggccgagttaaattggaggatgctggttttgattggaaaattcttggtccagatgttcaagaggttgattatgttgcatgggtttgcgatcaggatgcttatgcttgtagcggtcagaaatgctctgctcagtctgttctattcatgcacaagaattggtcttctagtggtctgcttgagaaaatgaagaaactttctgaaagaaggaagcttgaagatttaacaattggtccagtccttacattctatagtgaagatctagtagaaaatactgatgaccccgataaaatttttgctagcttcgctactgcagttactacagaagccatgatagagcacatgaacaaccttctcaaaataagaggatcaaaggttctgtttggtggtgaaccgttagcgaatcactcaattcccaaaatttatggtgccatgaagcctactgctgtatttgttcctctagaagaaattctaaaaagtgggaacttcgagcttgtgacaaaggagatatttggtccattccaggtcgagtttttagatacatggatgtacttgggagatccgttaacgggacaacctacgccggaattcgagcgaggaccacgggcgctccacagaaccactggtttggcccggccggtgatccgcgaggcgcagggatcgggactccggaagccatcaaacttgtctggtcctgccacagggaagtcatatatgacgtcgggcccgtgcccgagagctgggcgcttccttccgcgacctgattag

SEQ ID NO: 32604 - DNA, 246 bp, Zea mays
  Peptide Sequence Number=SeqID_74383
atggccggggcgcgggtgcgggggcggctgctggcgcgggcgcgcatgggcgggggtgggggcggggacgggggcgcgcatggcggcggatctaaaatatactggcgattgcgaaaaatattctacctttccacaaagcctgtttggttcgtggctaactacgtcatactttgcctaagattgtctcatgtgctgtccgtgtccggcaaggatttaaagtcacacaatctcaatcaatccatatga

SEQ ID NO: 32605 - DNA, 675 bp, Zea mays
  Peptide Sequence Number=SeqID_74384
atgccgggcttcgctcagcgtctcgcgggcatcccgtggcggagcatcgcgaggcaaggcctctcccgcgtgttcctggtggcgaaggcctactgcttgatccacgtcgtcaacgaccacctctgctcggtgaccttagtgcggggcgccagcatgctgccgtccctgaacctggcgggcgacgcggtggcggtggacagggtcagcgtgaggctcggccgggtcgcgccgggggacatcgtgctgatgatctcccccgaggacccgcgcaagtcggtcgtcaagcgcgtcgtcgggatgcagggggactccgtcacctaccttgtcgaccccggcaaaagcgactcctccagaaccgtcgtgatcctcaatgaattagaactatgtgctggtaaaaccttgcactatgctaccctcggtatatttaccccgccagaccagaaggtaccgcaagatcatgtctgggtgcagggtgacaatatctttgcttctaacgattcgaggcaatttggagctgtgccttatgggctgattacagggaagatcttttgccggctgcgacgagtactgacagtggctctgttggatgttaggtttggccgccagagagttttggcgcaattgatgacgcaacgaagcagtcttaacgctgaggaggagccgaggaggtactga

SEQ ID NO: 32606 - DNA, 360 bp, Zea mays
  Peptide Sequence Number=SeqID_74385
atggcgcaacaaagctcagcttctccagatcaaagaaatcgtggtcagcacctgaagactgcagcttctgcgtggccgctagatgtcaggaaaggatcgtctgcttgcagtgtagatgcaactgaggctgctgctcatctgtgcttccaccgcccaatgggacgcttccttttcttgagcatttcctcgtcgactgtttacggcatgggagcctgggaggaggcgtccagttcttgtgcgcttgccgtccgtacttgtaaagaaaaaaaagagaaagtatttcgtactaaccagatcaacccaaaaaatgttgagagatacgtttcaacattttctatcgttgctacagtaacacggtga

SEQ ID NO: 32607 - DNA, 396 bp, Zea mays
  Peptide Sequence Number=SeqID_74386
atggccaaggtgacggcggctccgcgagaagttaggcatgggtggtcacatgtgggggatggagggaatggggtttatgctcccaggtgccggccatggcgagtgggcgacgtggggaggggaaggaggctgacaggacccctatggctatccgtagctgatgaggacatcactccaatacatacaatgaatggactgataacacgcttacatgcacgacagctaaatctccagtatcgtcgctcatcagtttgtgagactccaactcataatcaacacaactttggttgtgttcttcctgttcttgcttgtgttcttgattgcgtttgcaaggataagccttcttggcgaggtcactcatgtgacatgggtgataaccaacagagcagtgtgtag

SEQ ID NO: 32608 - DNA, 843 bp, Zea mays
  Peptide Sequence Number=SeqID_74387
atgaccgcgtcaaaaaagggaccgggaaagggggataccccgaaaaggatccttccccgtgaaggaaccaggctccgagcctccctactgatcagaggttcgaaggctggccccccggaagggttcgacagccgcctcagatcgcgggggccctacacccactactggtcagaggttcgaaggccggcccctcggaagggttccacggccgcctcaggctactcgggctccgcgcccattactgatcaggggttcgaaggctggcccccgaaggccctagaagacggcgaactccgctccgcccgacctagggctcggacacgggctaagtcccggaagacggcgaactccgctccgcccgacccagggctcggactcgggctaagccccggaagacggcgaactccgctctgcccgacccagggctcggacttgggctcagccccagaagacggcgaactccgctccgcccgacccagggctcggacttgggctcagccccagaagacggcgaactccgctccgcccgacccagggctcggacttgggctcagccccagaagacggcgaactccgctccgcccgacccagggctcggacttgggctcagccccagaagacggcgaactccgctccgcccgaccccagggctcggactccgccctgacctcagccggcggcctccgcctcgcccgacccaggggctcggactcaacctcggccatggaagacaaactcgacctcggcttcggaggagcttccacatcgcccaacctaggacgcagaccagtcacgtcaacgggagggaacaagactggcgtcccgtctggctcgctccgctag

SEQ ID NO: 32609 - DNA, 105 bp, Zea mays
  Peptide Sequence Number=SeqID_74388
atgaaatgcataaacagagatattattgaattacaagtgtaccttcaactggaaggagatgatagtacaagcgtgacgcaaaaagcgaatgccaagtcagcgtga

SEQ ID NO: 32610 - DNA, 588 bp, Zea mays
  Peptide Sequence Number=SeqID_74389
atggaggatggtggtggtgacgttagtcgctccatcaaccacgatctaaggctgctgggagaacctagacaccttgagagtcgtgttgctgccactatcgacattggtagtggcagttgtagcagtgctgctgctcctattaacctcaccgtcggggactcaggcgctggtggaggcaatggagtagaagctcatgctgcggccgatcagggttctagcaatcgcaagataccagctctcagtgtcgctgcctctccgtctctggctcttagcgactcattgtcagcatggccatggaggcgcaaaccccacgtggccatgcccccgcctctccttcttcatatatctgtcttcatctccggctcttcttcttcggccctcatctctcctccgtttctcagttgtggtattgatccacatcttgcactagatctcggtgtcttcctccttcctcgtttcttttgtggcccatcaccgacggaatcggtgctccgtggtagcagtgctgctgctcctattaacctcaccgtcggggactctggcgctggtggaggcaatggagtagaagctcatgctgcggccgattag

SEQ ID NO: 32611 - DNA, 648 bp, Zea mays
  Peptide Sequence Number=SeqID_74390
atggcggttcttgacgcggcggtgacgccgtcgccgagcggcagggcggacgcggcggcggcggaccaggtcgccacgacgagcggctgcggcggccgcgcggcagaggaggcggaggcggtgctgctgcagcaggagcatgacggccaagggcgcgcgaagcgaaagcgctcgaggcgccgccgcgaccgcgacggccagcagcccaaggagccgaccacccaggaggagtacctggcgctgtgcctcgtcatgctggcgaccggccgccgcgacgccgacgccgacgccgcggttccgccgcaggaccacgcgtgctccgtctgcggcaaggcgttcccgtcgtaccaggcgctgggcggccacaaggccagccaccgcgccaagccctcgccctcgccttctccggcggcggcgctggcgccggagccgggcgcagaagacggggaccgccacgacgagaagaagccggcgcagccgtcctcgtcgtcggctggctccagacccgcggcggcggcgcacgagtgcaacgccgtcgccttcgacctcaacctgcctgcgctgccggacaggtgcgcgggcgtggacgaagacgaggtgctcagcccgctcgcgttcaagaagccccgcttcatgatcccggcctag

SEQ ID NO: 32612 - DNA, 243 bp, Zea mays
  Peptide Sequence Number=SeqID_74391
atgggctggctactgtgcacaaacccaacacgccaatccgggtcgggctggcatggacctagtactgggccgactaagcgggcttccgggccatgggccttctctacatctctaggtggaggtgagggttttcatctcccacccggttgccaccacaggttcccgctcatcggctcaactttcaccggcgccgaccaggtgcaagtgaggctggacgctgacgcctacgagccaaagctgtag

SEQ ID NO: 32613 - DNA, 255 bp, Zea mays
  Peptide Sequence Number=SeqID_74392
atggcaccaccatgggcactttgtgccgccatgtccggagttggggaagggagagttgagggtgatgtggaagaggagcgctggccgcaggatcttgatcctttgatcgggactgggtaccagttcgtggggggatcctgggcattgaagtttaatcgagcagacaggatggctgagggagctatttggatcgtggtcgttggatcgtggatgaagagtgcaattagatcccaggttaaccattcgactttttaa

SEQ ID NO: 32614 - DNA, 555 bp, Zea mays
  Peptide Sequence Number=SeqID_74393
atgaagtcccagtggaggattttcaggagttccaagactatgatgagttctaggcacgggttagcggcaaacccccagttagctgcctgtgaaggcccacggtaccggctctgcttcgcccgtggcgatgaagctgtcgaagatgaggcaggcgtggccttcggggggtttggggtcgccgaagttggctggggctcggcgaacttaatggcgggattccggtcacaagaacaaggctggagacgagagaatggtggaggggtgatccgggcgggtcggggttactccgacgagcaatcccggccgcggggagagggaatcgggtgtgccgaggccagaactagctccggcgagggagggggaacactacggaccaaagcatgggcgcagggcgaggctgaatctatcgggcgtcgtgcgggtgtggcgaaccggcgcggcagagcttcggcgagcgctaattcgctaaggcaggggaaaatcagggtaactagagcacgggaacaggtttctcacctcgagacggtgctcagggaggctcaatgcggcgtctag

SEQ ID NO: 32615 - DNA, 3057 bp, Zea mays
  Peptide Sequence Number=SeqID_74394
atgcccggcataccgagggatgtcgccgagcactcgctggatatccgagctggagcccgacccatgaagcagcctctgcgccgattcgacgaagaaaagcgcagagccataggcgaggagatccataagctaatggcggcagggttcatcaaagaggtattccatcccgaatggcttgccaaccctatgcttgtgagaaagaaaggagggaaatggtggatgtgtgtagactacactggtctaaacaaagcatgtccgaaagttccctaccctctgcctcgcatcgatcaaatcgtggattccactgctgggtgcgaaaccctgtctttcctcaatgcctactcggggtatcaccagatcaggatgaaagaatccgaccagctcgcgacttctttcatcacacccttcgacatgtactgctatgtcaccatgccgtttggtttgaggaatgcgggtgcaacgtaccaacggtgtatgaaccacatgtttggcgaacacattggccgaacggtcgaggcctacgttgatgacatcgtagtcaagacgaggaaagcctccgacctcctttccgaccttgaagtgacattccgatgtctcaaggcgaaaggcgtgaagctcaatcccgagaagtgtgtcttcggggttccccgaggcatgctcttggggttcatcgtctccgagcggggcatcgaggccaacccggagaaggtcgcggccatcactagcatggggcccatcaaggacttgaaaggtgtgcagagggtcacgggatgccttgcggctctgagccgtttcatctcgcgcctcggcgaaagaggcctgcctctgtaccgcctcttaaggaaggccgagtgcttcacttggacccctgaggccgaggaagcccttgggaacctgaaggcgctcctcacgaacgcgcccatcttggtgccccccgctgccggagaagccctcttgatctacgtcgccgcgaccactcaggtgaggccagtctacttcatcagtgaggtactgtccgagaccaagatccgctacccacaaattcagaagctactgtacgcagtgatcctaacgcggtggaagttgcgacactacttcgagtctcatccagtaactgtggtgtcatccttccccctgggggagatcatccagtgccgagaggccttgggtagaattgcaaagtgggcggtggaaatcatgggcgaaacgatctcgttcgcccctcggaaggccatcaagtcccaggtcttggcagactttgtggctgaatgggtcgacacccagctcccaacagctctgatccaaccggaactctggaccatgtttttcgacgggtcgctgatgcagacgggagcaggcgcaggcctgctcttcatctcgcccctcgggaagcacatacgctacgtgctacgcctccatttcccggcatccaacaatgtggccgagtacgaggctctggtcaacgggttgcgcatcgccatcgagctaggggtccgatgcctcgacgctcgcggtgactcgcagctcgccatcgaccaagtcatgaagaactcccactgccgcgacccgaagatggaagcctactgcgatgaggttcggcgcctggaagacaagttctacgggctcgagctcaaccacgtcgcccagcgctacaacgagactgcggacgagctggctaaaatagcctcggggcgacggttcccccggacgtcttcttccgagacttgcatcaaccctccgtcaagaccgacgacacgcccgagcccgagaaggcctcgggccagcccaaggcacccttggctcagtccaaggcaccctcggctcggcccgaggcacactcggctcggcccgaggcaccctcggctcggcccgaggtaccctcggcccccgagggtgaggcactgcgcatcgaggaggagcggagcggggtcacgcctaatcgaaactagcagaccccgtaccagcaatatctcctccaaggagagctacccctcgaccaagccgaagctcggcggagacgggaaggaactctaccaccgcagcccctcgggcatcctccagcgatgcatttccatcgctgaaggccaggagctcctacaagagatacactcgggggcttgcggccatcacgcagcacctcgagcccttgttggaaacgccttccgacaaggtttctactggccgacggtggtggccgacgccactagaattgtccgcacctgcgaagggtgtcagttctacaaggcacccgggggctacacgcacctgttggtcgccatcgacaaattctccaagtggatcgaggtccgacccctaaacagcatcaggtccgaacaggcggtggcattcttcaccaacatcatccatcgctttggggtcccgaactccatcaacaccgacaacggcacccagttcaccggcagaaagttcctagacttctgcgaggatcaccacatccgggtggactgggccgccgtggctcaccccatgacgaatgggcaagtagagcgtgccaacggcatgatcctgcaagggctcaagccacggatctacaacgacctcaacaagttcgacaagcgatggatgaaggagctcccctctgtggtctggagtctgaggacaacgccgagccgagccacgggcttcacaccgttttttctagtctatggggccgaggccatcttgcccacagacttagaatacggttccccgaggacgagggcctacgccgacaaaagcaatcgagctaatcgagaagactcactggaccagctggaagaggctcgagacatggccttactacactcggtgtggtaccagcagtccctgcgatgctaccacgcccgaggggttcggtcccgagacctccaagtgggcgacctggtgcttcggctgcgacaagacgcccgagggcggcacaagctcacgcctccctgggaagggtcgttcatcgtcgccaaggttctgaagcccggaacgtacaagctggtcaacagtcaaggcgaggtctacagcaacgcttggaacatccgacagctacgtcgcttctacccttaa

SEQ ID NO: 32616 - DNA, 633 bp, Zea mays
  Peptide Sequence Number=SeqID_74395
atggcggccaagatattttccatccttatgctccttgctctttctgcatgtgttgctaacgcgaccatttttcctcaatactcacaagctcctatagctgcccttcttcccccataccttccatcaatgaccgcttcagtatgtgaaaacccagcccttcaaccctacaggctccaacaagcaatcgcaaaaagcaacttacctttatcacccctgttctttcaacaatcgccagccctatctttggtgcagtcattggtacaaaccatcagggcacaacagctgcaacaactcgtgctaccagtgatcagccaacaacaacaactactaccattcagccagctagctactgcttactctcaacagcaacaatttcttccatttaaccaattggccgcactgaacccctctgcttatttccagcagcaaatactactaccatttggccagctagctacaacaagccccgcttcctttttgacacaacaacaattgcttccgttctaccagcagtttgtggctaaccccgcaactctcttacaactgcaacagttgctgccctttgtccaacttgctttgacaaacccagcagccttctaccaacaacacatcattggcggtgccatcttttag

SEQ ID NO: 32617 - DNA, 417 bp, Zea mays
  Peptide Sequence Number=SeqID_74396
atggatgcgggagataaaggtttcagggctctatcagctcataagtctctgacgctgctatctacctacgctgcttcgctgcatgacacgaggtacagacatcttcctctatgtctttgtggagaaatccagaccagtgttgttccaggtgaagctggagaagatcgcatcaacacccttgtaggtgtgctggcaggtcttaacactaacctggacagtgctaccctagatgtttcgagggatgcactttctaaccaaccagatggtgaacgacgctcaggtcctagaaacacccgtaataagcgtgttgggcagcagttgccaccaccaccacccaaccaaaacatggagcagttcattgctgctcaaatgcaacttcttcaaggcctcactgctttagtgcagcaaatacaatag

SEQ ID NO: 32618 - DNA, 3054 bp, Zea mays
  Peptide Sequence Number=SeqID_74397
atgccgctcctcctctaccccttctccgcgtgcgtgccgccgccgcgggcgctgctccgccgcctgtcgccgccgccgcccatggcggtcgtcgctccgctgccttccgccgtccgtataatcccctcggtgggaacgctcgaccttccggcgctcccgcccccgcccacggacgacttccactggctcgacctattcgcgttcctcaactcccctgccgacacctaccaccagatccccgcgcagggcgaagaggagctggaggcggggctggaactggaactggagctggagctggagaagcacgccgaggtggagaggcagcgggggcgggcgcgaagagcgcaactccggcggctgcggcagcggcaggtcaaggcggagacggaggcctgggcgcgggccgccgaggagtaccgcgagatcgagcgggagatgctcgaccgcaggctcgcgcccgcgctgccctacgtaaaggcgctcttcgtcggctggttcgagccgctgcgggacgccatcgccagggaccaggacgtgcagcgaaggaagcgggtcaagcacgtctacgctaagtacctgcttctgctcccagccgacaaggtggccgtaatcgtcatgcacaagatgatgggcctgctcatgtccagcaaggacggcactggcagtgtccgcgttgtccaggccgcgcactgcattggtgaggctgttgagcgcgagttcaaagtccagtcattctttcagaaaagtaggaagaagaaaatccaaggtgaaaatgatccagcattggagaaggagcaagctaaatgccgtaagcgtgttaagagtttagttaagaggcggaagatgagtgaagcacagaggctagttcaacaggagttggaattggaggaatggggcacagaagcccaagtgaagttgggaagtcgcctgattgaattattactagattcagcatttgtgcagccaccagctgatcaaacaccagatagttctccagatattcgacctgcatttaagcatgtgctacgtcagcctataatagaaaatgggaggctaaagaagaagcattgggtgatagagtgtgaccatcttgtgcatgaggggtttgaaagcactgctcggcatgttgatataccctacctccctatgctggtacctccgaagaaatggaaaggttatgataaaggtggtcacctttttctgccctcatacattatgaggacacatggtgtgaaggaccaaaaggatgcaattaatagtgttcctagaaaacagctgcgaaaagcattagatatccttgggagtactaaatggagggtgaatagaagagttcatgatgttgttgagactatctggagtcaaggtggaggcattgcagggctggtggacaaggcaaatattcctttgcctgaacgaccagaatcagaggatcctgatgaaatgcagaaatggaagtggagtttaaagaaggcaaagaaaactaaccgtgaactgcatgctgagagatgtgacactgagctcaaactctcggttgctcgtaaaatgagagaggaggatggattttattaccctcacaatttagatttccgtgggcgtgcataccctatgcatcctcatttgagtcacctaggttcagatctttgtcggggtgttctagagtatgctgaagggcggccactaggaaagtcagggttgtgctggttgaagatacacttggctaacaaatatggtggtggcattgaaaagctttctcacgagggcaagctagcttttgtggagaaccaactgtttgatatatttgattcagcagcaaatcctgttgatgggaactgctggtggacgaatgctgaggatccctttcagtgtttagctgcatgcatggacctttctgatgccttaagaagtccatcaccttaccatgctgtctctcacctgcctattcatcaggatggttcatgcaatggtttacaacattatgccgctcttggaagggactatatgggcgcggttgctgtcaaccttgttcccggagagaaacctgcagatatctactcagaaatagcttctagggtactgaatgttgtatgtgaagactcgatgaaggatcctgctactaacccaactgcttcattagcaagagttttagttgatcaggttagccttctctcccatccttcctctgtattcctaaattctagtaagaaatatccttgcacacactctatatcatcaaacaaaacagttgaggacatgggcattggtagcttacaggtggataggaagcttgtcaagcagacagtcatgacatcagtctatggtgttacatacattggtgctcgtcagcagattacaaagagactgcaagagaaagggcttatcacagatgataaattgctgtatgatgtatcctgttacgctactcgggtaactttggatgcactgggacaaatgttccaatctgcccgtggtataatggcctggcttggtgactgtgcgaagatgattgcttcaaaaaatcaaccagtcaagtggacaagtcctgttggtctcccagttgttcagccctacaagaaatataagaattatatgatacgaacttctttgcaatgtctggctttacggcgggagggtgatgcaattgcaatccaaaggcaaaaggcagcttttccaccaaattttgtgcactcactggatagttcacatatgatgatgacagcgattgcttgcaaggagtctggccttcattttgcagatttccccagaccccgcacagtgcgggaagccccagcctctgcatattatgcgggagttcatgactcattttgggtgcatgcgtgtgatgttgatcaaatgaaccagatattgagacaacaatttgtggagctttacagcatgccgattcttgaaaatctgctggaggagttccaaacgtcattccccacactagaatttccaccctgcccaccgcaagaatctgcttggatgttcaggtcactcattggttgccatgacaactcatggtatactccaccctggagtgcaaaggacttgtag

SEQ ID NO: 32619 - DNA, 1293 bp, Zea mays
  Peptide Sequence Number=SeqID_74398
atgggagatgaaggatggctctgcccagcatgtgattgcaagatagattgtatagatctaataaatgaactccatgggagtaacatctccattgaggactcttgggagaaagtttttccagatgcagctgctatggcaaatgactctaaacaagatgacgcatttgatcttccatcagatgactcagacgacaatgactttgaccccaatatgcctgaagagcatgtggttggtaaggatgaagaatcgtctgaagaggatgaggatggaggatcagactctgatgactcagactttttgacatgttctgatgattcggaacctttgatagacaagaaggttgatgacctcagattaccttctgaagattcagaggatgatgactatgatccagcaggtcctgattcagataaagatgtcgaaaagaagtcaagttctgatgaatctgacttcacatctgactcagatgatttttgtaaggagatttcaaaatctggacatgatgaagtttcatcacctctattacccgatgccaaggtgggtgatatggaaaagattactgctcaagctaaaacaacaagttctgctgacgaccctatggagactgaaatagaccagggtgttgttttaccagattcaaggagacggcaagctgaacggttggactacaaaaagttgtatgataatattgaggagcgtaacagtgctaagcgcctcgacccaatatgcgagaaggacactatcctgaatcaacaaggagtgaacgacattattgatggtgagaagcatgtgttcggctttactgttttgaggcaaagtttaggggcaagacatacggagttgaatgttgtgggagtggaagatagtgtgggtgatgtgtttgtcgaatctgtgaccattattgcactggatgccctaaatggaaacgtcgaactgtgtggcagcagaggcaagggtggaaaatgtgtgagatttcagtcacaggtggaatgtccaaagttaatgcaaaaaatcaaggatggccagataaaaattgacccttatctcgacgccattattattggcaccgagattacacgtctcggcgttaatataaatggcgtcgagatctctgttccagagacgctgagctggcgtgagcttgtcgaagatggtgttgatgatccacgttcgcacgacgcgatcctggtggacccagttgggggcagaaacgtcgaagaggacatggccctcaagggagtaccggtcgacggcgaggaggaacgccttggccagtgggggctagaagtttga

SEQ ID NO: 32620 - DNA, 2229 bp, Zea mays
  Peptide Sequence Number=SeqID_74399
atggagggcgacgacttcacgccggagggcggcaagctccccgagttcaagctagatgcgagacaagcgcagggtttcatctccttcttcaagaagctgccgcaggatccccgggccgttcgtctcttcgatcgcagggattattacactgcccatggcgagaatgctacgtttatcgcaaggacatactaccacacaatgtctgccttacgtcaactaggtagcagctctgatggaatcttaagtgccagcgtgagcaaggctatgtttgagaccattgcccgcaacattttgttggaaaggactgactgtacattggaactctatgagggaagtgggtcaaattggaggttaacaaagtccggaacacctggaaatattggtagttttgaagacattctgtttgcaaacaatgacatggaagattcaccagtgattgttgctttgtttccagcgtgccgggaaagtcagctgtatgtagggcttagttttttggatatgaccaataggaagcttgggttggctgagtttcccgaagatagccgattcactaatgttgaatcagctcttgttgcattaggttgcaaggagtgtcttctcccagcagattgtgaaaaatccattgacctaaatccccttcaagacgtcattagtaactgtaatgttctgttgactgagaaaaagaaggctgacttcaaatccagggatctcgcacaagatcttggtagaataatcaggggttctgttgagcctgtacgtgatctactatctcagtttgactatgcccttggtccccttggagctcttttatcttatgccgagttgctagcagatgacactaactatggaaattacacaattgagaagtacaatttgaactgctacatgcgacttgattctgctgcagttcgagcattaaacattgcagaagggaaaactgatgtaaacaagaacttcagtttgtttggtttgatgaacagaacttgtactgttgggatgggaaaaagattgctgaacagatggctgaaacaacctctattagatgttaatgaaattaataaccgactagacatggttcaggcttttgtagaagacccagaacttcgtcagggactccggcaacaacttaaaaggatatcagatattgatcgtctaacacatagtctccgaaagaaatcagctaatctgcagcctgttgttaagctttatcagtcctgtagcagaatcccatacatcaagggcattcttcagcaatataatggccaattttcaacattgataaggtcaaagtttcttgaaccgttagaagaatggatggcaaagaatcgatttggtcggttttcttctcttgttgagacagctattgatcttgctcagctggagaatggagagtacagaatatctcctctatattcttctgacttgggtgtactaaaggatgagctttctgtggttgaaaaccacataaacaatctgcacgtggatacagctagtgatctggatctttctgttgataagcaactgaagctagaaaaaggatcccttggacatgtgttcagaatgtcaaagaaagaggaacagaaagtcaggaagaaactcactggcagctacttaatcatagaaactcgtaaagatggtgtaaagttcacaaattctaagctgaaaaatctaagtgatcaataccaggcattgtttggtgagtacacaagttgtcagaaaaaggtggttggtgatgtagtgagggtttcaggcacattctcagaggtatttgaaaattttgctgcagttctgtcggagttggatgttttacaaagttttgctgatttggcaactagttgcccagttccttatgttaggccagacatcactgcgtcggttgaacctggtgcatgcgaccaaagttttggtattcatgttgcagaatttgctaattttccagaagctgttgttgcccttgcgaaaagcaaagcagcagagttagaagacttttctactacacctaccttttccgatgatttgaaagacgaggttggatcaaagcgcaagagggtatttagcccagatgacatcaccagaggagctgcacgggctcggcttttccttgaggaattcgccgcattgcctatggatgagatggatgggagcaagatcttggagatggccaccaagatgaaagctgacttgcagaaagatgcagctgacaatccttggctccagcagttcttctga

SEQ ID NO: 32621 - DNA, 3702 bp, Zea mays
  Peptide Sequence Number=SeqID_74400
atgccattaactcctaggcagaccaagcatttgctgaattatctttctcttgcaccttattttgctatcctgaatatgcttgattctcttttatgcagaaatcaatacgattcccaggttagacattcagaggggaaaaacttgcctgtggaaaatcaagttctctcaaatgagtgcttaggtgcattgttctcaagacctatttacggcgaacacagcagaacaatcctttccccagaaggaggtgcagatatgtctccctctcaggagccccaaaagcactcactgaggtcttccactgatgaatctactagagcaaccaaagaagttattctggagcatccaaagaagttattctcagagtctcatactaattgcattcatgctacagccttaaatgagaactttggtgtgcaaactccttcccaggttgcctcaaagaaaatcttcccagggcttgctcatggtgctgatacacctttaactggatatggttcagaacaaactcttttgcagcattcatcaaagaagttctcattggtttctgctaatggtaaatacactagagcagcggtgacaccgtttgagcaaaattcaaataatacccgtgcagaggaactttcaaagatgcgctcagggtcttcagacatgttgtatcttaaaccaacaaatttgtctgcagaactcgagacaaatggaaccccattgaagaatcactcaaagaattcctccttgcttatggacggtaaatataacataacatctgctgcactatttccagaacttgactctagtcctctgaaaccagaaacaccagcaatgcaggcagctattcctcgcctgaagcgagttcaggaagaccaaggtgtggatgccaacaaccaatgccctcctttgtgggccatgaacaagaagatgaaatcagctcattgttctattgaaaagaaggatcatgatgaaatggctggtagcgcgcgtagcaaatttgagtggctgaattcatttgccatcagagatgcaaataaaaggcggccaaatgatccactttatgacaagagtacccttttcattccacctgatgcattgagaaaaatgtcaacatctcaaaagcaatactggaatattaagtgcaaatatatggatgttgtcctctttttcaaagtggggaaattttatgagctctatgagctagatgctgagattggccaaaaagaacttgactggaaaatgactgttagtggggtgggcaagtgcagacaggttaggaacacgatcatttgcctgcaggccctgcacctgccattagatttgggttttgtgggtaggggacagtgcttggataaatctgggacccgtgttgtaggagtgtgggaggcaatggttggtatttcagaaagtggtatagatgatgctgttgataagcttatagctcgggggtataaagttggaagaatagaacaaatggaatctgcaaaccaggccaaagctagaggagtacattctgttattgaaagaaagttggttcatgtgtccacaccatcaaccgcggttgataacattggtactgatgctgttcaccttctggcactgaaagaggtgaccctagcttctagcggtttccaagtctttggatttgctttcctagactatgctgcccttaaaatttgggtgggttcagtccaagatgatgactcgtctgcagctttgggtgctttgttgatgcaggtttctcctagagaattaatctatgaaacctcaggagctaatagctattctcttttgtcaggcatctcaaaagaaactcaaaggacaataagaaaatatgcctcagcaggatctgtgaagatgcagctgacccccctctccgggatagatttctctgatgctgcacagattcgaaatttaatacattctaaagggttctttaatgcatcaacagagtcatggttatctgctttggattgcacaatgaatcaagatgtagttatttgtgcacttggtggacttattggccatttgactaggctcatgttacatgatgccctgaaaaatggggaagtcttaccataccatgtgtacaaaacatgtttaaggatggatggccagactcttgtgaacctcgagattttcatcaacaatttcaatggtggttcatctggtactttatataagcaccttaatcactgtgtcacagcatctggtaagcggatgctaagaaggtggatttgtcatccacttaaagacattgatgctatcaataaaaggcttgatgttgttgaggggtttatccaaaactgtggactaggccctacaacacttgggtatctccagaaaattcctgatcttgagagattattaggacaagttagatccactgttgggttatcatctttgcttcaactgccctttattggagaaaaaataataaagaaacggattaaaacatttataatgcttatcaatggcctccgcaatggtattgacttgctaaatgatttacaaagagcggaccatggtatcttggcgctttataagattgtggatattccatcattgagctatcttcctgagttaatccataagtttgaagagagaatgcaaaatgagtttccatgtggccaggtttctgatgtcaatgccaatggtgccaacgatttggctgctctgatggacgtttttatcggaaaggcttctgaatggtctttggtgatcaatgccgtcagcactattgatgtgcttaggtcctttgctgcaatgacattgtcatcatttggtgccatgtgcagaccacaagttctgctgaaagatgatgtgcctgtacttcgtatgaagggtctgtggcatccctacgcttttgcgggaaatgcaaatagtctggtaccaaatgatttaacccttggtcaggatttatctggtctcaatcgttttgcattgctgttaactggtccaaatatgggtgggaaatccacaatcatgcgtgccacctgcctggctgttgtacttgctcagcttggctgttatgtcccctgcacgtcatgtgagttgacccttgcggattccatctttacgcgcctcggtgcaacagatcggattatgactggggaaagtacttttctcgttgaatgtactgagactgcctctgttcttcagaaagcaactgtggactcgcttgtcttgcttgatgagcttggcagaggaactagcacatttgatggatatgcaatcgcatatgctgtgtttcgccacctagtggagcgagtgcgatgccgtcagctctttgctacccactaccattctcttacaaaggagttcgcctcgcaccctcacgtgagcctccagcacatggcctgcatgttcaagccaaggagcgacggcaacggccagaaggagctgaccttcctataccggctgacctcgggggcctgtccagaaagctacggcctgcaggtcgccgcaatggcagggatcccgaagtcgatagtggagaaggcgtctgtcgcgggccaggtgatgagggctaagatcgccgggaacttcaagtcgagcgaacagcgagctgagttctcgaccctccacgaggaatggctgagggcggccctggcggtgagcgcgatggacggacaaccggacgacgacgacgtcatggacacgctgttctgcatccagcaagagctgaagtctcacttcaggaaggcgagatga

SEQ ID NO: 32622 - DNA, 582 bp, Zea mays
  Peptide Sequence Number=SeqID_74401
atgggtcaagatggaggaacaaaaaagggaccaaagaaacaatctggtggttcgaaatcgaagacagctgatgctgatattacggttgcaaaattggatattagagtgggccttatcaggaaagcagagaagcatccagatgctgattccctttacgtggaggagattgatgttggagaggacacaccaagaacagtgatactgtcttttgatgccctgtatcacttaacatctactatggatcagcagaaccggaaagtttgcgtactctgcaatctgaaacctgtggcaatgcgtggtataaaatcacatgcaatggttttggctgcatcgaatgaggaccacacgaaggttgagttggtggagccacccgaatctgctgccgtgggcgagcgtgttacctttgctgggtactcgggggagcctgaggcttccctcagtggcaagagcaagacgtgggagaagctggccgccgagctgcacagtaacggtgagctcgtggcgtgctacaaagatgtgcccttcacaacctcggctggaatctgcaaggtcaagacaatagcaaacggagagattcgctag

SEQ ID NO: 32623 - DNA, 267 bp, Zea mays
  Peptide Sequence Number=SeqID_74402
atgatgagaagattaaagagaagggaaaaaagcatgtacaaaacactcgagagataccgcagctccaactactcacaagaagtaaaaactccactggacactgaaattaaataccaggattatctcaagttgaggacaagggttgaattcctccaaactacacaaagaaatattcttggggaggatctgggtccacttagcatgaaggagctcgagcagctggaggaccaaatagagatatctctgaagcatatcagctcaagaaag

SEQ ID NO: 32624 - DNA, 1944 bp, Zea mays
  Peptide Sequence Number=SeqID_74403
atggattacttatctcaagaggaagatttgcagtttttcgatgctaacgaagagatgatggcattgaatccaagtggttttggatttgatgtatggaatgattcacctggaagtgttgtggagcggcggaggaagttcttggagtggatgggagttgaagaagaagggcgtgttgagacgaaggattcggtttctggaagtagtgtggagtcttgttttgatggaggtgaagagaattctgttgaagctgaggagagatctggagagtgcagcagttcttctagtgaggtttcattgtctggttcaagcgttgaagtttccgaggaattgtctttgagagtagacagaaatgtgggtggatgtgatgtgacgagaagacaaagctcttcaatggcgtcatgttctagttccagatattgccaagtgaaggaaaccgagaagcagaggaatatcgcagggctagtcacgagttttaagaagggatggttatcgaggcttcggtctatgggatgtaccgcggatacaaatatcgaatctggtggtagaatgagagcttcttctggttatggtgatgtgatttcaagagttaaggttaagcattgtaagaagcaggcaaaggagctttcagctctttatcagagtcaagacattaaagctcatgatggtgccatcttggcgatgaaatttagcaacgatgggaagtttcttgcaagctctggtgaagatgggattgtgagggtgtggaaagtcgttgaggataagaaatctagactacgaagggattgccttaacgagatagatccttcgtgtatgtactttgaggtaaatgatctttctcagttgaaaccagttttggtaaatgaggagaaaccaaagaagactacagaaagtttcaggaaaacatctgattcagcctgtgttgtcttccctcctaaagtttttcggattatggaaaaaccattatatgaattccgtgggcacacgggtgaagtcttggacatctcatggtcaaaagataattatttgctttcggcgtcaatggataaaactgtccgcctttggaaagttggtagcaatgattgtcttggagttttcgctcacaatagttatgtaacctctgttcagttcaacccggtaaatgagaattatttcatgagtggttcaattgatggaaagttcttaccacaagaaccgactaaagtcctggttgtttccgcggattccaaagtcagaattctccaaggcaacaatgtcgtcagaaaatacaaaggcgtttgcaagacgagaagcctcacatcagcatctctcacatctgatggaaaacacattgtttcagcttcaggagaaaacagagaaaatggtgaaggtgtaaagaagagtctctttcctcttaaggagcttggatctatcgcttgcgcagctctctgtgcttgcactcttacaatagcttctcctgttattgctgctaaccagagacttcctccgttatcaacagaaccagaccggtgtgaaaaagcatttgttggtaacacgataggtcaagcaaatggtgtctatgacaaaccactggatcttaggttctgtgattacacaaatgatcaaactaatctcaaaggcaagactctctctgcagccttgatggttggggctaagtttgatggtgcagatatgactgaagttgttatgtcaaaagcttatgctgtagaagcaagctttaaaggggtgaatttcactaatgctgttatcgatcgggtgaatttcgggaaatcgaatctgaaaggtgcggtgtttaggaacacggtattatccggttcgacatttgaggaggcaaatttggaggatgtggtctttgaggacactatcattggttacatagaccttcagaaaatatgtaggaatgagtccataaacgaagaaggaagacttgtgttgggatgccgatag

SEQ ID NO: 32625 - DNA, 2004 bp, Zea mays
  Peptide Sequence Number=SeqID_74404
atgaagagatcttcagggagaaaggattcaaatttcatagaacaattgatactttacgtcgctagtgctgcattgagtagcttggttctctacgttggtctccgtcaacttgacccgaaccgtgacgccgctaaaaagtctctcgagcacaaaagagaaatcgccaaacgtttgggtcgtcctcttattcaaaccaatcaatacgaggatgtgattgcgtgtgatgtaataaacccattacacatagatgttgaatttggttctattggaggattggagtcaattaagcaagctttgtatgagcttgtgattctaccattgaaaagacctgagctttttgcttatgggaagttactgggtcctcaaaagggtgttttgttgtatggtcctcctggaactgggaagactatgcttgctaaagcgattgcgagagagtctgaagctgtttttattaatgtaaaggtttctaatttgatgagcaagtggtttggtgatgcacagaagcttgtgtctgctgtgtttagcttggcgtataaactccaacctgctattatttttatcgatgaggtggatagctttcttggccagcgacggtcgactgataatgaagcaatgtcgaatatgaagaccgagtttatggctttatgggatggatttactacagaccagaatgcgagggtgatggttcttgctgcaactaacagaccatcagagctcgatgaagcgatattgaggcgttttcctcagtcatttgagatcgggatgcctgattgccaggagagagcgcaaatattgaaagttgttttgaaaggagagagtgttgaatcagatattaactatgatcgtatagctcgtttatgtgaggactataccggatcagatatttttgaactctgcaaaaaagcagcttacttcccaatccgagaaatcctagaggcagagaaagagggcaaacgagtttctgttcctagaccattgacacaactggacttggagaaggttcttgctacctcaaagaagacacaagttgctgcaagcgagtacactggtttaagctctcaatcttctgtctggggaagtccaagcaatgccgatgagaattatcttcttggagctttcaagccagcatgtaatatttcaatcacatttactgatgggaaaaaccgtaaacaggtacccactaagaaagataatggacaaatagttatgaatccacttttccagagtcaagaaactattgctgggaagattaacattgaaccatatcaagggaaaaaagtggagcataatggtgtaaaagttgagcttcttggtcaaatagaaatgtactttgacagaggaaacttttatgacttcacttccttggtgcgtgagattgatgtacctggagaaatatatgaaagaaagacatacccttttgaattttcgagcgttgagatgccatatgagacatacaatggcgtgaacgtgcgcctaaggtatgtcctcaaagtaacagtcacacgtggttatgctggaagcatcgtggaataccaggactttgtggtccgtaactatgttccgcttcctccaatcaataatagcattaagatggaagttggaatcgaggactgtctgcatatcgagtttgagtacaataaaagcaagtatcacctaaaagatgttatccttgggaaaatatactttcttctggtgagaatcaagataaagaatatggatcttgagataagacggcgagaatcaactggagcaggagctaatactcacgtcgaaacagaaacactagccaaatttgagttaatggatggtgctccagttagaggcgaatcgatacctgtaagagtgttcttgacaccatacgatctgacaccaacgcataagaacataaacaacaaattcagcgtaaagtattatctaaatcttgtgctggtggatgaagaggatcgccgttacttcaagcagcaagaaatcacgttgtacaggctcaaggaagagacatcttga

SEQ ID NO: 32626 - DNA, 2019 bp, Zea mays
  Peptide Sequence Number=SeqID_74405
atgaaagactttacagatacaatatcggagtcggagtgcgacgatgagataagtatagttccacaagtggaactaacggtgcccaaaaccgacgatccaacttcaccgacggttacgtttaggatgtgggttcttggcataaccgcttgtgttctcttgtcatttcttaaccagtttttctggtacagaaccaatcctttgaccatctcctctgtttcggctcagattgctgttgttcccattggtcatctcatggctaaagttcttcccacaaggagattcttcgaagggacgaggtggtctttcacgatgaatcctggtccctttagcaccaaggaacatgttcttataactgtgtttgcaaactcaggctctggggctgtttacgctactcatattcttagtgctgttaagctttattacaagagaaggcttgatttcttacccgctttgctcgttatgatcaccactcaggtattgggatttggttgggctggtttgtataggaaacatttagttgagccaggtgaaatgtggtggccaagcaatctcgttcaagtgtctctcttcagagcattgcatgagaaagagaacaaatcgaaatggggaattagtcgaaatcagttctttgtcatcactctcatcactagcttctcctattatctcctacctggttatctcttcacggtcttaaccaccgtctcttggttatgttggattagccctaaatcgattctagtaaaccagcttggttcagggtcagcaggtcttggtatcggttcctttggtctggactggtcaaccatcgcgtcataccttggaagtccactcgctagcccattctttgcctctgcaaatattgcggccgggttctttcttgtgatgtacgtaatcacacctctctgttactatcttgatttgtacaacgccaaaaccttcccaatctactccggtaaactctttgtagccagtgggaaagaatacaaagtaacgagcatcatcgatgccaatttccgcctggatcgtcaggcttacgcagagaccggaccagtccacatgagcactttctttgccgtgacctatggactaggtttcgcgaccttgtctgctagtattttccatgtcctgattttcaacggcaaagatctctggactcaaaccagaggagcgtttggaaaaaacaagaaaatggatatacatacaaagatcatgaagaggaattataaagaagttcctctctggtggttcctttcgattttcgcggtgaatcttgcagttattgtcttcatatgtatttactataagacacagattcagcttccatggtggggagctttcttggcttgtttgatagctatcttcttcactcctctcgttggtgtgatcatggccactactaaccaggttgtgggcactttagttgcagttatcgcttacgcaggcacggcttggtggctaatggctgaaatcccaaatctctgcgacactaatctgcttccaccgggaagtcaatggacttgtccatcggatcgagtcttcttcgacgcatcagtgatttggggactagtaggaccaagaagaatgtttggtgatcttggagaatactcgaacataaactggttcttcgtaggaggtgcaatagctccagcattggtatacttagcctcaagactcttcccaaacaagaaatggatctcagacattcacatccctgttctgattggagccacagctataatgccaccagcttctgcggtgaacttcacgagctggctcgttatggcgtttgtgtttggacatttcgtgtttaagtacagaagagaatggtggcagcgatataactatgttctgtctggaggaatggatgcaggaactggattcatgtcagtgcttttgtttcttgcgttgcaacgtagtgagattgcgattgattggtggggaaattctggagaaggttgtcctgttgctaaatgtccaactgctaaaggtgttgttgttcatggttgtcctgttttctaa

SEQ ID NO: 32627 - DNA, 1848 bp, Zea mays
  Peptide Sequence Number=SeqID_74406
atgaagaagtgcgatagtggaattgaagtctcttcggtgagtttctttactaatggagaccgccgcttcgagcgtagctacaactcgtggcggttcccttcagaatccgtcgccgacggctccgtcaagaaaagagtggcgcgccgtttcggattcacaagacaccacagattatgtggtaacgatttggaacagttaaagctgaacaggacagatgagagaacgatttatgagaatggaagagaacaggatggttattcaaatagtgagatgttgcagcaacagattcttaatgtttctagaaagaaaggagaattacagcagttggagattgagcttcgagctcagatgattgcgagacatgagatcatggagatccagagcaactatgaatctcaattcacagagtatgctaatgctgctgctagaatgcaggagcaacttcatgagaatgagagatctattcgggaggcagagaggaagttagaagagaaagacagagagctacatgcgattaaactagataatgaagcggcttgggccaaagagggtatcctaagagaacaaaataaagaacttgccacattcagaagagagcgtgatcactctgaagctgagaggtcccagaatatacataaaatatctgaacttcaggagcatattcaagagaaagagagtcagctcagtgaattgcaggaacaagctgaattgcgagaacgtactgagcagtataaccagctctggcatggttgtcagaggcagtttgcagagatggagagattgcatgtgcacacagtgcaacagcttcagcaagagcttgctaatgtaagggaagctggtggttccaaaacaaactccggtggagcctcccagactattcagaacagcgggaaccaatttgatgctcatggaaacagcgcagaaagtgcaaacattagtgtccattcaaatggaaaaagcgcagataacatctcatcttttacttcaactgatgataaggctacccagaacaaccgtgttgatgggatatcagcttccaatcttgcgacacatgggttccttcaagctggtcagatgacccctctgcattcatttgtcatgcatcaacaagagatttctcagcttgttcagcctcaggctcaggctgtaccagatagttcacagatgcctatgcagaatcatgtgcatccatctcaaggtgttcatggcttggcagtggaatctggcaatggagattataatggatctaatcagtcagagaataactttcaagacatttcttcacagttccgtgatgccctaaggcttgattctcattcccagaatcagaaacctgaggaactcaatggtcaggtttcacctgatgaacacagtggtgctaaatccattgtccctgaaactctagtctcatccggaaaacctgagaggaactcagagtgcgctctgctcgatgaaaggtcgcttttgacatgcatcctccgtactataccagctggtgggagaatcagaatcagttcaacgcttccaaaccgtttgggcaaaatgctagcccctctacactggcatgattacaggaaaaagtacgggaagctggatgattttgttgctagccatcttgagttattttcgatagaggatgactacattcaagttagagacggtgcacagaaaatggtagcagcatcagcagcagcagccaaagtggcagcagcagctgcagcttcgtcatccccaaactccatctatgtggctatgactcctatggctcagtctcaagggttaaagaagaatgacaacagagttaggcagagctctgattttatggtgaagcagcaaagaaagctctga

SEQ ID NO: 32628 - DNA, 2886 bp, Zea mays
  Peptide Sequence Number=SeqID_74407
atggcggagcgagaagagcaacaaaatcaaaatcgttttcaagttgcagtttcatgcgactcagatcttggagatgtgacgcagttgaaggcggagggattaacaatctctgtagttcccggagatgttgggaagtcgacggggaaggcagagaaggctatggtgctcgacggacattgtcggtgggaatctccggtgtatgagacggtgaagtttcttcaggatgtgaaaacagggaagggatctacaaaatctggtgttgtaggagagacttcgattgattttgctgattatgtagatgcaattaagacttgcaatgtttctcttcctctccagaattcaaattcaaaagcaatgttgcacgtagcaatacaaaggcagttagaaaatgcagacccacaaagagtggtgaaagaaagtgatagcttggtgaaaaggtcacggggtcaagatttgaaatcccatttgagtattgaagctgatgaaagtcataaaagtgattcacaagaggagggtccatttggtaaagcttccaggattactgaattgaggcgtcgagcatcaatagaatctgatagtacattatcaagctttgacagtgtctctgaactggatacactgggagaagttgaaatcagaggagatcacattcagcaaaaccactcaacaatgcatcaccattcggttagaaatgtctatgaagagcctcatatatcagaatccgagtggtcaggaagttctgatcaaggaatcagcactgatgactccatgaatagttcaaatgatacaatcccgagagatacaacgaggacttcctcggataacgaggtagacaagcttaaagctgagctcggtgctttggcaaggcgaacggatctttcagaactagagctacaaagcctgcggaaacaaattgttaaagagaccaaaagaagtcaggatctcctgagggaagtaactagcctaaagcaggagagggacttgctgaaggcagataatgaaagtaataaagcatctgacaagcgaaaggaagaggcaaaaattaggaacaagttgcagcttgaaggaagggatccacatgttcttttagaagaaacccgtgaagaactggattatgagaaggatctgaattcgaatctacggttacagcttcagaagacacaagaatcaaacactgagttgatccttgctgtgcaagatctagaagcaatggaggggcaaagaactaagaaaacagttgatcttcctggaccaagaacctgcgagaggaacaccgaagaatcaaggagaatgtcctgcacaagtgagacagatgacgatgaggatcaaaaggcactagatgagcttgtgaagggacacatggatgcaaaagaagcacatgtcctggagcgaaggatcactgatctctacaatgagatagagatctataaacgagacaaagaggatcttgagatacaggtggagcagctttctctggattatgagatacttaagcaggaaaatcacgatatctcatacaagctagagcaaagccaagtgcaagaacagttgaagatgcaatatgaatgttcatcttctcttgtaaacgtgaatgagcttgaaaatcatgtagagagtctagaagctaaactcaagaagcaatacaaggagtgctctgagtctctgtaccgcattaaagaacttgaaacgcagatcaagggaatggaagaagaattagagaaacaagctcagatctttgagggagatattgaagctgtgacacgtgctaaagtggagcaagagcaaagagctattgaagccgaagaagccctgaggaagacgaggtggaaaaacgcaagtgtagccggcaaaatacaggacgagttcaagagaatctctgagcagatgtcttctacgttagcagcaaatgagaaggtgactatgaaagcaatgaccgaaacccgcgaactgcgcatgcagaagcgtcagctagaagaacttctcatgaacgctaacgatgaacttcgagtaaatagggtagagtatgaagcaaagctcaacgaactctcgggaaagacagatcttaaaacgaaggagatgaagagaatgtcagcggatctagagtatcaaaagaggcaaaaagaagatgttaatgcagatttaacacatgagatcacaaggcggaaggatgagattgagatcttgagacttgacttggaagagacgagaaaatcaagtatggaaaccgaggcatctttgtcagaggagttgcagcgaatcatagatgaaaaagaagcagtcattaccgctttaaaatcacaactagagaccgcaatagcgccatgtgataatctcaagcattctttatccaacaatgaatcagagatcgagaatctcagaaagcaagttgtacaagtgagaagcgagctggagaagaaagaagaagaaatggcaaatctagagaacagagaagcgtcagctgacaacataacaaaaaccgagcaaagaagcaatgaagatagaatcaaacagcttgagggacaaatcaaactaaaggaaaatgctttagaggcctcttcaaagattttcatcgaaaaggaaaaagatttgaagaacagaatcgaagagttgcagactaaactcaacgaaactgatgaaactctgcaaggtccagaagcgattgctatgcaatatacggaagtattgcccttgagcaagagtgacaatcttcaagatttggtaaatgaagtagcatcgctaagagagcaaaatggattgatggaaactgaactgaaggagatgcaagagagatattcagagataagtctaagatttgcagaagttgaaggtgagagacaacaacttgtcatgactgtacgttatcttaaaaatgccaagaagcgttaa

SEQ ID NO: 32629 - DNA, 2760 bp, Zea mays
  Peptide Sequence Number=SeqID_74408
atggcgctgaaatatcaccaacagatcatatcagaccttctcgaggactctaatggcggattattaatcctttcctccggtctctccctcgctaaattaatcgcttctctcctcatccttcactctccgtcgcaaggaactctacttctcctcctctcccccgccgctcaatctctaaaatccagaatcatccattacatctcctctcttgattctcctactccgacggaaatcaccgcagatcttccggcgaatcagcgttactcgctttacacctccggttctcctttcttcatcacgccgcggattctcatcgtcgatctgttgactcaacggattccagtttcttcactcgccggaatcttcatcctcaatgctcattcgatttccgaaacctccactgaagcattcattatacgaattgtcaaatccctaaatagctctgcttatatacgcgctttttccgatagaccgcaagctatggtttccggtttcgccaagactgaacgcaccatgcgtgctctcttcctccgtaaaatccatctatggccaaggtttcagttggatgtgtctcaggaattggagcgagaaccacctgaggttgtggatattagggtttcgatgtcgaattacatggtgggaatacagaaagctatcattgaagtaatggatgcttgtctcaaggagatgaagaagactaataaagttgatgttgatgatttgactgtagagagtggtttgtttaagtcctttgatgagattgtgaggaggcagcttgatcctatttggcatactttggggaaaaggacaaaacagcttgtttctgatttgaagactttaaggaagttgcttgattatcttgttaggtatgatgctgtgagttttctcaagttcttggatacactaagggtatcagagagctatcggtctgtttggttatttgcagagtccagctataaaatatttgattttgcaaagaaacgagtgtatcgtctcgtgaaggcaagtgatgtcaagtcaaaagaacatgttaagaataagagtggtaaaaagagaaattcgaagggcgaaactgactctgtagaagcagttggtggggaaacggcaacaaatgtggctactggcgttgttgtagaagaagttctggaagaggcaccaaaatggaaagtcttacgtgaaattttagaggagacacaagaagaaagactaaagcaggctttttctgaggaagataacagtgacaacaatggaatagttcttgtggcttgcaaagatgaacggtcctgcatgcagcttgaagattgcatcacaaacaatccacagaaggtaatgcgggaagaatgggaaatgtacctgctgagcaaaattgagctccgcagtatgcagacaccgcaaaagaagaaacaaaagactcccaagggttttgggattcttgatggagttgttccggtaactacaatacagaactcggaaggtagcagtgttggcagacaagagcatgaggctcttatggctgctgcgtcttctattcgcaagctaggaaagacaacagatatggcttctggaaataacaacccagagcctcatgttgataaggcttcgtgtaccaaaggaaaagctaaaaaggatccaacaagtctccggagatccttaagaagttgcaataagaaaacgacgaacagtaaacctgaaatcttaccaggcccagagaatgaagaaaaagccaatgaagctagcacgtcagcccctcaagaagccaatgctgttcgccccagcggtgctaaaaagctaccgcctgtgcatttttatgccttagaaagcgatcaacctatactagatatcttgaaaccctctgtgatcattgtctaccatcctgacatgggttttgtcagagaacttgaggtttacaaagcagagaaccctctcagaaagctgaaagtttattttattttctatgatgagtccacagaagtgcagaagtttgaagcaagcatacgtcgagaaaatgaagcgtttgaatcattgatcaggcaaaagtcttcgatgattattcccgttgatcaggttatagttgacatgagggagttcatgagcagtctaccaaatgttcttcaccagaaaggcatgaagataataccagttacactagaggtcggcgactatattctatctccttcaatatgcgtagagagaaagagtattcaagatcttttccagagcttcacatcaggtcgtttatttcaccaagtcgaaatgatgtcccgttattacagaataccagttcttctgatcgagttctcacaagacaaaagcttctcctttcagtcttcgagtgatatatcagatgatgtgactccatataacatcatatcaaaactatcattgctagttctgcattttcctcggttaaggttattgtggtctcgaagtctacatgcaaccgcagaaatctttactaccttaaaatccaaccaagacgagcctgacgagactcgagcaataagagttggtgtgccttcagaagaaggtatcatagaaaatgacatcagagccgagaactataacacatctgcagttgagtttctgagaaggcttcctggagtttcggatgcgaattacagatcgattatggagaaatgtaagagtttggctgagctcgcgtctttgcctgttgagacattagcagaactcatgggtggtcacaaagttgctaaaagtctcagagagtttcttgacgccaagtatccgactttgctatga

SEQ ID NO: 32630 - DNA, 1725 bp, Zea mays
  Peptide Sequence Number=SeqID_74409
atgcagctttctcttatgagtcttgttctagggttcctctttgtttcctgtgacgcgtttgcctctaaagaagttgaagcagttagaagattcaaggaagccatttataaggacccattgctagttatgtctaattggaatgtccccaatttgagtccttgtgattggaatggcattaaatgttctccatctaaggatcacattatcaagataaatatatcggggacatcgatgagagggtttcttgtgccagaacttggtcaaataacctacttgcaagaactgatcctgcgtgggaacattctaatggggacaataccaaaggagataggaaagttaaagaaactcaagatcttagacctgggaaacaatcatttgacaggaccgattccagcagagatcgggaaattgtcaaggattaagacaataaaccttcagtccaatggtttaataggaaagttacctccagagattggaaacttgaagcaccttaaagaacttcttattggcaggaataggcttcgaggaagtattcctattgccgcgaaaacatcaaaaaagtatgcttcaaatccaagtgcaaacatcagtggtttgtgcaagtcttctctatttaaagtggcagatttctcttacaactttttcgagggaagagttccgagttgcttggattacctcccaatcttgtgcaaaataaagcgctctctcatcgttccctggaagaaatctgcaagtgaaaaggagaagttcacggtctacgttgattctgaaatgctgaaggatgtttcaagatatacaagacaagagctagaagtagcatgtgaagacttcagcaacatcattgattctagtgcagagagtcagatttacaaaggaacgatcaaaggcgggactgagatcgcggttatctctctctgcgttaaagaagaaaattggactggatatcttgagcttaatttccagagagaggttgcggctttggctagattaaaccatgagaatgcggggaaattactgggatactgtaaagagagtacaccgttcacaagaatgcttgtgtttgagtatgcatcaaacgggacactatacgaccatctccactatgcggacgggagtttagtatcgtgggcaaaacgcatgaaaattgttataggcatcgcacgtggtctcaagtaccttcatactgaactccatcctccatttacagtctctgagttgagctcaactgcagtgtatctcactgaagattttactcccaaactggttgatttcgaatgctggaagattattcaggtgagatcagagaagaacctgaagaatatctgtaatgaaggagcaatatgtgtacttcccaatgcaatggaacaccgagatatggatttacaagggaatatctactcatttggcatacttttgctggaaattgtaagggagaaaaaccttggtgcaccagatgtgatggctagcttggtggatcctgagctcaagcatttcaagcaaaaagaacttgaggcagtatgtgaagtggcaagccaatgtctgaacttggaccagaatgaaaaagacaaggataagctttcttgttcgattcaagcgctttgtgagacactagagagtagaatcactgtgtccatttctgcagaattcaaatcgtcttctctggcgtgggccgagctagcgctggcctcgccttctaacgaagacgacgatgataggagtaaataa

SEQ ID NO: 32631 - DNA, 1809 bp, Zea mays
  Peptide Sequence Number=SeqID_74410
atggatccgaaaccaacctcgatgtggagctcaattgtgaagaaagatccaccttcaaagcctccggttaacgacggagctccggcagcgattctcgggatggtcggaaactgcaaatccacaaaaggaatatctattgcggttgttgacgccaacgccatcattgaaggacgtcagagcttaacaaacttcgccgacaaattcgtaactgtccctgaggttctctctgagattcgtgaccctgcttctcgccgtcgtctcgctttcatccctttcactattgataccatggaaccttctcctgaatctctaagtaaagttatcaaatttgcaagagctactggtgatttgcaatctctgtctgatgttgatctgaagttgattgctttgtcatacacgcttgaggctcaggtttatggcaccaaaaatcttagagatgttcctccaccgattcaaactgttagagttaagagattacctgagaaggatttacctggttggggctccaatgtggctaacttggaggagtgggaggcacttgaaaacgagactgaggaaaaatccaacgctaactccaaaatccttccattgaaagaccttaacatgaatattattgcttcagacaatgtttctgaggttggttctgttgtctctcatactgagaatcatgaagaggatgtgcaggaaggtgggaagaagcataggcgatacccgcccaagaaaacagagattaagcttgagggtaagatggtagtggagggagttgatgcatcccaggggcaatatgatgatgatgatgatgctagtgattggagacccgcagtcagtagaagtactcactcaaagtatcttagaagaaaggcaaggtgggaacattacaatgctttggctgaacaagaaattcagaaagatcaagaagctgacaaagctcgacacactaaagaggccaatgaaacccacgcaaaagatagtggaaagaatggtgaggatatatcttccatccttaaagatatgaggttggaggaagagtcattaagggctctccaagaagagactgaagagacgaatgctgaagcaactttgatcaatggtgaggatgatattgatcatgatattgaagtcgaagctgaggggatcgatgttgcaaatcaagcgctagagaacttggagattgctagtgaggctgaggataccttcgaggcatcatcgattggagatgatggtagcagcgagcagagttggtcattgagagctttatctgagtccagtgtagcttgtataactggtgactatgcaatgcagaatgttattcttcaaatgggtttgcgattgcttgcacccggcggaatgcaaattcgccaactgcataggtggatcttaaaatgccatgcttgctacacagtaactcctgaaattggaagaatcttctgtcccaaatgtgggaatggtggcactctacgcaaggtagcggttacaataggcgcgaatggcgccatcatagctgcatgtaaaccacgaattacacttcgagggacccaatattcgataccaatgcctaaaggaggaagagaggcaatcaccaagaatctgattctacgggaagatcaactccctcaaaagcttctccaccctaggaccaagaagaaagcaagcaaaccgggtgatgagtacttcgtatcagatgatgtgttcttgaaccatcatagtgatagaaaggcgccattgcagcctcctgtgagaaaagctatgtcggttttcagccagaaaagaaaccctaatgacaaccattactctcgttctatgcactga

SEQ ID NO: 32632 - DNA, 2502 bp, Zea mays
  Peptide Sequence Number=SeqID_74411
atggagcccaagaagaaccaaaatctaccaagtttcttaaacccatcacgacagaatcaggacaacgacaagaagaggaaacaaacagaggttaaaggtttcgacattgtggtcggcgaaaagaggaagaagaaggagaatgaagaggaagaccaagaaattcagattctttatgagaaggagaagaagaaaccaaacaaagatcgtcaccttaaagttgaaggaagaggtcgtagagttaggttacctccactctgtgcagcaaggatttatcaattgactaaagaattaggtcacaaatcagatggtgagactcttgaatggttgcttcaacatgctgagccatcgatactctctgctactgtaaatggtatcaaacccactgagtctgttgtttctcaacctcctctcacggctgatttgatgatttgtcatagcgttgaagaagcttcaaggactcaaatggaggcaaatgggttgtggagaaatgaaacaggacagaccattggagggtttgatctgaattacggaattgggtttgatttcaatggtgttccagagattggttttggagataatcaaacgcctggacttgaattaaggctgtctcaagttggggttttgaatccacaggtttttcaacaaatgggtaaagaacagttcagggttcttcatcatcattcacatgaagatcagcagcagagtgcagaggaaaatgaagctggcttgctgatagaatttggactacgctacgttttcttgggtgaaaaacaatccgcgtccttccacgagaacagtgaaactgttgctgagaacaataaaaacaaggacgtaacactctctgcatcaatggacaacaacaacaacaacatcaaaggaactaacattcatcttgaggttcatcaaaaggaaccagctttggtcaaacctgaatccgagacacgaaagggcctttacttcttgtcgaatcttgaccagaacatcgccgtgattgttcgtacaatctactgtttcaaatccgaggagagagggaacgaggaagcagtccaagtgatcaagaaagctctgagtcaagttcttgttcattactatcctctcgctggacgcctcaccatcagtcctgaaggtaaactcacagttgactgtaccgaagaaggagttgtgtttgtggaagcagaagcaaactgtaaaatggatgagattggtgacattaccaaacccgatcctgaaactctagggaagcttgtgtacgatgtcgtagacgccaagaacattcttgagatccctcctgttaccgctcaggtgactaaattcaaatgtggagggtttgttctcggactctgtatgaatcactgtatgttcgatggaattggagctatggagtttgttaactcatggggtcaagtcgctagaggcttaccattaacaactcccccattctcagacagaaccattctcaatgctcgaaaccctccaaagatcgagaatctccaccaagaatttgaagagatcgaagataaatccaacatcaactctctttacaccaaagagccaactctctacagatccttctgctttgatccagagaaaatcaagaaacttaagctccaagcaacagagaacagtgagtctctcctcggtaactcatgcacaagttttgaggctttatctgcttttgtctggagagcaagaaccaagtcgttgaagatgttgagtgatcagaaaacgaagcttctcttcgccgttgatggtagagccaagttcgagcctcaactgccaaaagggtacttcggaaatggaattgttctcacaaactccatctgtgaagctggggagcttatcgaaaaaccgttgagtttcgcggtgggattagtcagagaagccattaagatggatttgattttgctgatgcttacatccggaagagatccagggattatcccaagaaattctcatcctccagaaccagaagttgttgatggcaacacgggctcgggaacaagccaaactccaagattgcctcgtgttaaagaagtggaagttaatggaaaagtattcaagactacatatgagaatttcagatacagttatgatcggcatagcaacccacataacaaaggagtggttgataacttcaaagaaatctttttttctccaatacctccttcaaagaacaacttcagggctatggtaccaagggaaaatccaatgccgtcgagatcagttgttggcggttttatgagtccaaacatgggaaaggccaatgatgatattgaaatggggaggaagggtgtttgggcaatggctgaacatggtgatggcaaagatggcaataacaatgaacggtttcatgttaacgacaatgagttaaacgagttatcaccagacatggggaacatagtgaatggtgatgagcaaatcaataggccaaacaatcacccgaggaacgcaaactgggaaatgtcaccagaagttatggccttatcagcaagaagagcttag

SEQ ID NO: 32633 - DNA, 2142 bp, Zea mays
  Peptide Sequence Number=SeqID_74412
atggagacggagattcctaggtcaacggagatatcagagacattgttgttaccagaaacgaatctagatcacggtgaatatgtacccgagtggaaggaacagatcacgattcgaggcttgatctctagcgccttgttagggattttgttctgtatcattacccataagctcaatctaacaatcggaatcattccttcgcttaatgtagctgctggtcttctcggcttcttcttcatcaagtcgtggactgggttcttgtctaaattagggtttttatctaaaccctttactaagcaagagaacactgttattcagacttgcgttgtctcctgctacggccttgcttatagcggaggatttggttcgtatttgatagctatggatgaaaggacatataagctcattggttctgattatcctggaaacaatcctgaagatgttataaatcctggattgtggtggatgactggctttttatttgtagttagcttcctcggtctcttctgtctcgttccacttcgcaaggtgatgattttggattacaagcttacgtatcccagtggaaccgctacagcaatgttgattaacagtttccacaacaatactggagctgagcttgcaggaaaacaagtcaaatgtcttgggaaatacctgagccttagcttagtttggagttgcttcaagtggttctttagtggtattggaggtgcatgtgggtttgatcactttcccacacttggtttgactctattcaagaacacgttttactttgatttcagtcctacttttattggatgtggcatgatatgtccccatttggtgaactgttcggttcttcttggtgctatcatctcttggggttttctctggccatttatatcacagcatgctggggactggtatccagctgaccttaaagccaacgatttcaaaggtctctatggatataaggtatttatcgccatttctatcatccttggtgacggtctctacaacctcattaagatcattgttgtcactgtgaaggaaatctgcaacaaaagctccagacaacacaacctacctgtctttaccgacattttagataaaagtaagacctcagtattaatgcgggagaagaagaaaagagatatcatatttctcaaggaccgtatacccctcgagtttgcggtttctggttatgtgggtcttgcagctatttcaaccgctataatcccgttgatattcccaccattgaaatggtactttgtcctctgttcatacttagttgccccgggtcttgctttttgcaattcttatggagccgggctcacagatatgagcatgccttcaacctacggaaagactggtcttttcatcgttgcttcaattgtaggaaataatggtggagtcattgccggtttagcagcatgtggcattatgatgtcaatcgtctcaactgcagcggatctcatgcaggattttaaaacaggttacctcacactatcatctgcaaaatccatgtttgtaactcagcttttgggtacagcaatgggttgcataatcgctcctctcacgttctggctgttttggactgcttttgatattggagatcctgatggtctatacaaagcaccttacgcggtcatctaccgcgaaatggctattctcggggtcgaaggctttgccaaactgcccaaacactgtttggcactttgttgtggattcttcatcgctgctctgattgtaaatctaattagagacatgacaccaccaaagatctctaagttgataccacttccaatggcaatggctggtccattctacataggagcttacttcgccatcgacatgttcgtaggaaccgtgataatgctcgtatgggaacggatgaataagaaagacgcagatgattactcgggtgcagtagcttcagcgcccgaacccgttacttacgtctgcggagattgtggtcaagagaacactttgaagtctggggatgtgatccaatgcagagagtgtgggtaccgtattctctacaagaagcgtacccgtagagatgttgtaaacttgtttccggctaatttatttgatggtttattctcttgcagttgttcaatacgaagctcgctgagaactactactcctgaaggtggttcatag

SEQ ID NO: 32634 - DNA, 4017 bp, Zea mays
  Peptide Sequence Number=SeqID_74413
atggctcttagaactgtgctcgtctccgacgtccctagcctcccggattctgtctacggtttatccgaaggtttagagttgagcaaaccgacgtcgtttaggttaccggggttttcggtgattggacatagaggaatcggtatgaatgtgacaaaagatgattgccctgtcattttccatgatgatttcatctactctgaagaaaatggtattgttaatgagagtagagtgacggatctgagtctgtctgagtttctcctttatggacctcagaaggaaactgagaaaatagggaagacactgatgaggaaatctaaagaagggaaggttttgaaatgggacgttgatttggatgattctctttgtacgttgcaagaagcttttgaacaagttgaacaaactcttgggttcaatatcgagttgaaatttgatgatcagaccgtctatgaacgagagtttcttgtccatatcctgagatcagtactacagaaagctttaggacttcccatgaaagctcttactgtgcccgacgaatgtaatgatatcttctcaacacatcctcgcgacttgcctggctatggaagcgaagagcattggtacttctactgcaagaaacccaagaatcaagttactagaacgaaatcttataacctctggataccaacgggagaaaaaactgatgtgttagatccaaagaagaatggcggcgaattagtcggtatcaagcattcgtttactttcattgagaacgaagaagaagaagaatctgataacaagaacggcgatgaagaagaacctccacaatgcaattggttcttggatgaaatcagcctcccattgacagttgtggatactgattggactctgtgtcatatcttttacgagaaggttaaacctgaatttgttctatctggagatatgatgaaagcttcgtttggaaggttaagaagattcgcattacccaaagccgatgcgattgatataggagagctttttcccactgcacaaattgaaggtcttgctcgagccgccaaggatatgcaagatatgagagagggttatgatagattactcgaagtagctgctgctatggctaatagcgcatatgagttctctgaatcattgggggaaatgggctcatgcttggagcaaatcgcgcctcataatgatcaagaaagtggtggaattcttctaatgttaggtaaagttcagtttgagcttaagaaactcgtcgacacttatcgttctcaaatattcaagaccattacacgaccttcagagtcacttctcagtgaccttagaactgttgaggatatgaagcaacaatgtgaagaaaagagagacgttgttaagcacatgctaatggagcatgtgaaagacaaggtacaagttaaaggcactaaaggggagagacttattcgccgtcagctagagactgctcgcgatgagctacaagatgaggcgactctgtgcattttccgattgaaatctctcaaggaagggcaagctcgaagtctcctcacacaagcagcccgccaccacactgctcagatgcatatgttctttgctggtctgaaatcgcttgaggcagtagagcaacacgtcagaattgctgcagatagacaacacatcgactgtgtgctctctgatcccgggaacgaaatggattgtagtgaggataatgatgatgatgaccgacttgttaatagagatggagaactcagttttgactacataacaagtgagcagagagtagaagttatatctacacctcatggatcgatgaaggtaaatgcagaccctagagaagagcactcagtttcaaaccgtgatcgcagaacgagcagccattcagcacctctgtttccggataagaaagctgatttagcagatagatcgatgaggcagatgactccatctgcaaatgcttacatattaccaactcccgtcgactcaaagtcctcaccaatcttcacaaaacctgtcacccagacaaaccacagtgcaaacttatggcattcatctccactagaaccaataaaaaccgcccataaagatgcggaaagcaacctctattcccgtcttccccgtccttcagaacacgcattttctggaccactcaagccatcctcaacccgtcttccagtaccagttgcagttcaggctcagtcatcttctcccagaatatctcctaccgcttcaccgcctcttgcttcttccccacgaatcaacgaactccatgagcttccaagaccaccagacggtattaacagagggaacgaaggaagtttccgcttctctattggagagtctgataggaaaacagcagtggaatcgttggagtttagagatgacttatggagattccatgacactcggtctgttacctcattacctgctcacgaaccgacttatgcaatggataaggtaaatttgagtcgaactgaagttagaaggatagttggtttcgaatcaaatgaagttagctcagtgagtaatgaatacacaagtattactgttaatcgcactggtggatctaatgaggtagatattatcggtggatcgttagtcaggaaacgggtaagctctcctctgaataagcttttccctgagaaatttagaggcgactcgcttgatatcagccatagcaaccaaccgatgacttctgctggtcttcctaaaggatttcacattcctgttggacaagatcataaaaaagccaatatctctgggagattgcgtctcttcaccacttctaactgctctgaatgggggaatgacacatcacacacgggtaaactttcatcgactgttttcacggatggtccattgcttgactctaacgatctgcagcctagtcaagatgtacattgcttatattcaccagtacatgaaacatttcaagtacctaataagccattaccatgtcatagaaatatatctgtctctccgccactttctctgtcacctcttgggccaagattttctgagaggatgaaagctcttcaagggggcctaaatgggaatattttcgaagatgatgtttgtttaaagaatactggtgaagaagcagaactcaggactggtcacagatcgtttgatgatactaatggtatccagagagccttttcaatggatagagctattgaatcagttcctacatctccatgtaaaaggtttagtagaagcttgagtggacgtcccattcaaaggtcattggttggttcttttgaagagtccctcttttcaggaagattatcttatgggcaagctaatcagaagatcgacggttttcttgccattcttagtatagctggtggaaacatctctccaaaatcacagaagcttccattctcagtaacaagtgttggtgatgattgcttcttactatactatgcctccatagatctctctggaggatcattgccaagcaaattatggggtcagaaattgaaaaccaaccaaaacaagtctgatgctcagaccattaataaacgtcttcggattcctatgaagggtcggatccaactggttctgagtaaccctgaaaagacacctctacacactttcctttgtaactatgacttaactgatatgccacacggtacaaagaccttcctgcgccaaaaggttactctggcctcctctgttccgaccaaagccaaaaaatctgcaaataaaggtagtgaaggatccgagttagtggatgaattgcattcgccgaatgagtgtgggaacaagaattgtcgtgagacgtacagagaaacaggacaacgctgttcaaagtctggagtcttacgctacgcacttcatcttaaatttatttgccctttacgcaagaaagcctccaaattaggtcagaagaaaagcttggatgcaggagatgatggagagcggagattctatttatataatgaattgagagttgtgtttcctcaacgccacacagattctgatgaaggaaagttgaatgtggagtatcattacccagaaaatccaagatacttcgacgtgtaa

SEQ ID NO: 32635 - DNA, 1245 bp, Zea mays
  Peptide Sequence Number=SeqID_74414
atggtggtccacctcggtggttctctcccttggaatgtggcgcacgcgctccagaatctcctcttcttctctacttacctgggctcattcgccagcataagaggcttggagaatcttgtgaagctcattgagagaacagttaggtcagagtacttccgtttaccaaagagacccatatacatagttggagaatctattggagcttgtcttgctctagatgttgcagccagtaaccctgacattgatcttgtcttgattctagctaatccagtcacacgtgtcaacaacttcatgttgcaacctttatcgagtctattggaaattttgccagacggagttcccagcttcctggaggagaattttcggtttgaacaagcaatgttcgagactatgctgaatgaaactgatgccgcacagatcggtggagggctattaggagacctctttgcaacttcagttaacctgccgtatctggaattctttaaaactcttttgaaaaatggaattgattctcaggtggtcttcgattacaatgatcaaatgaagatccctttcctgaagaatcttataaaagagttatcacaagactctacttacttgaggaacggtgaagaaggagaagtaggaaaccaagatttgcatatgcctggaatagttcccaagatgccgggacggttttacgtatactttgggaaaccaatttacacagaaggtagagaggacgagctaaatgataaagagaaagctcatgaggtttacttgcaggtcaagtctgaggtagaaagatatattgggaagctcattgagaagacagttaggtcagagcactaccgtttcccaaatagacccatttatatagttggagaatctattggagcttctcttgctctggatgttgcagccagtaaccctgacattgatcttgtcttgattctggctaatccagcgtctgctaattctcagatggacacagtcaacgcccaaacactgatacttctgagtggacgtgatcaatggttaatgaacaaggaagacattgaaagactccgtggtgcattgccaagatgtgaagttcgtgagcttgagaataatggacagttcctcttcttggaggatggagtagatctggtgagtatcatcaagcgtgcgtattattatcgccgtgggaagtcacttgattacatttcggattacattctgcctaccccatttgagtttaaagagtatgaagaatcacaaaggtaa

SEQ ID NO: 32636 - DNA, 242 bp, Zea mays
  Peptide Sequence Number=SeqID_74415
tcgccctcctcttgctctccgacgactggtgggctgccgctgccgccgccgccgccctacgccaggtgctgaggctttcatcggtctcttcgtcggtgtctttgccggcgtcgagcacccgccaggctatccatgatttttgcctacaaaagcttttgggttttatgggctgtgaattggcggccatggaggttatacaggcgaaagggcctctagctgaattggttaggtggtctgagtag

SEQ ID NO: 32637 - DNA, 1524 bp, Zea mays
  Peptide Sequence Number=SeqID_74416
atgacgggtgttgctttgctcctgtcattctactctataatgctctggtggagaacacaatggcaaagctcaaaggctgttgcttaccttctccttctggcagtaggcctgctatgtgcctacgacttttgtgctatttatgtgacagctggtgctagtgcttccgagcttaattctccatcagggttcttcttcggggtgtctgtaatatcattggccatcaatatgctttttatatgtaaaatactgtttaatgtaagtggatttgatgttgatgaatatgtgcggaggtcatacaaatttgcctattctgactgtgttgaagtggctcctgtttcatgctctcctgagccaccggatcctagtgaattatacatgacaaaatccagcagctatgcttttgtagcatctgtgcttttatctgctgctgtttcttcctggctttctatttcaaacccctcagttgcaaggatagacgccctaagaagtacagtaataaagctacgagagggatttcgaagaaaaggacaaaatagttcttcaaattcatcagaaggctgtggctctagtgtgaagcgtagtagcggtagtgttgaagctggtcaaaatggtaatgcaacggattctatgtacagaagcaactcacaaagcgatggtgtcaattggagcagtattccttttgatcgatcaaacagttgtcaagaaggccggagctctgacaagaacatagatagtgcacgtgcaagcttagctcatcggagtaattcatgcttatctgctgtccaagactctgaaaccgctgttgtttcagtagataggcatggagatcccactacttcacttgtttgttctagcagtggtttggaaagtcatggctgtgagcctagtggatcagccaccacctcaggtaatcaacagctattggatttgaacctggcagcaatatttcaggacagattaaatgatccaaggatttcatctatgctaaaaaagaacggtggacttggagatgtagaactggctaatcttcttcaggataaaggactagatccaaatttttcatacatgctgaaagacaaagttatggatccacgtattttggctttgctacagaggagcagcttggatgcagatagagagcatcaagatgacgtagatgtcacagctactgattcagatagattggataccactattgcaaatcagatttctctgtcagaagaactaaggagaagtggtctagaaaaatggttgaacatttcaaggctaatattccatcatttagctggatctccaatacgtgcttttattgttttcacagtaatgtttataatagagactgctactgtggctatctatcgaccagagaccatcaaggtgataaatgcaacacatgaacagtttgaatttggtttctcgatactgcttctgtcaccagttgtctgctccattatggcattcatttggtctctgcgtgctgaagaaatgttgatgacatccaagccccagaaggtgatgcactaa

SEQ ID NO: 32638 - DNA, 2487 bp, Zea mays
  Peptide Sequence Number=SeqID_74417
atgcctaatgaggaaggtgacaagggcctagaaggccaaccacaggaaggcgtccttgtgaaggagcatggtgaggggtgtcgtgaggtggctgatgcattgcacaggtcgaacgacatgatgaggaactcagagaacctgttcaaatcatcagttatattgggcctgtctctcacggtaccacttatggtggcttgcctctcatttgctgttcccatatggatacgcaatggttacagtttctggattcctggaagggagtttgcaaatcgtgaaaatgttagtcaagctccaggagagaaagagcgggctctctttgttatcaccattgctgttttcactgcatcaattattggccttggtgcaatagtgtcagcaaagcctttagacgctctaggctataaagggtgggatgctgataagaacagctcctattctccctatgcaacatcaatgtatcttggatgggcattgtcttcaacaattgctgtgattaccacagggttgatacctattgttgcttggtttgcaacataccggttttcaccttcatcagctatatgtgttggcctctttgcaactgttcttgtgtctttttgcggtgcatcctactggggagtggtaaattcacgagaggatggtgctcctctaaaggctgatttccttgcagcattacttcccttgctttgcattccagcatttttctcactgttcactgggctttacaaatggaaggatgatgattggaagatttctcgtggcgtttacctttttgttggcatgggaatgttgctgttgtttggtgcggttgcagctgttattgtcacaatcaggccctggactgttggagttgcttgcctcgtagccattctgttccttgtatttgttattggggtcatccactactggacatctaacaacttctatctaacgaggacacagatgctgcttgtttgttccattgcttttctcttagccttggctgccttcctgatgggtttatttcacggaaagccttttgttggagcatctataggttatttctcatttatatttcttctcactggaagggctttgactgtccttctatcaccgccaatcgtagtgtattcgccaagagtattgcctgtatacgtttatgatgctcatgcagactctgctaaaaatgttagctatgcctttcttattctgtatgggattgcattagcaactgaagtttggggtgttattgctagtctaataatgaatccaccatttgttggggctggcgtttctgctactactcttgtaattgctttcagttttgctgtttctcgaccctgcctgactcttaagatgatggaggatgcagttcattttctcagcaaggatacagttgtgcaagcgatgtcacggtctgctaataaaactagaaatgctatatctgggacttactcagcacctcagaggtccgcaagttctgctgctcttttggttggagatcctgctcttacattggacagggctgggaactttgtgcttcctagggctgatgttatgaaactgagagatcgtttgagaaatgaagaaattgctgcaggatctttcttatgtggagtaaaagattgtttactaatttgcccccagtccctgtcaaacatagattatcggaggaatatgtgtgcccatgcacgtattttggctttggaagaagcaattgatacggaatgggtgtatatgtgggacaaatttggtggttatttacttctgttgcttggattgactgccaaagctgaacaaatacaggatgaagttcgtctaagactctttttggatagcataggcctttccgatttgagtgccaaagaaattaagaaatggatgcctgaagatcggaggcaatttgagcttattcaagaaagctacataagggaaaaagaaatggaagaggaggctttgatgcaaagacgagaggaagaagggaagggaagagaaaggaggagggcattgctagagagagaggagcgaaaatggaaggagctcgaaatatcattgctttcttccattcctaatactggaagcagggatgctgcagctatggcagcagctgtcagagctgttggaggtgattctgccctggaagattcttttgcaagagatagggtctcttcaatagccaatcacatacgaaaggcacaattggctcggcgagcagaacagatggagctaatccctgtcgctgcctccactacaacgctacatcgttggtgcgggcttgctgtccaccgccttcctccagggactcgtcaatcgggtacaccgaatgaggtgctgagcaccgacatggtatcagagtttgatgtgctgccaacgtggatgtgccatgccggggccagcacccgtgctgtagtcgccccgtggtcctgggttgaatatgtggataggaagggggaaggggattctagtagcagcaggttgagcgcaagccgcaatgatggctcgacttga

SEQ ID NO: 32639 - DNA, 1077 bp, Zea mays
  Peptide Sequence Number=SeqID_74418
atggcgaagctgggcccggggcaggggctcgggtgcgaggcggcggaggggtcgctcgtgcccagccggaagcgggagtacaagccctgcggcaagcacactgaggggaagcgcccgctatatgctatcgggttcaacttcatggacgcgcgctactacgacgtcttcgccaccgtcggcggcaaccgcgtgacaacttaccgctgccttgagaatggtagtttcgctcttctacaagcttacgttgatgaggataaggatgagtcgttctatactctaagctgggctcgtgaccatgttgatggctcaccactgctggtggcagcaggaagcaatgggatcattcgggtcatcaattgtgctacagaaaagttagctaagagctttgttggccatggcgactcaataaatgtgataagaactcaaccgttgaagccttcgctcatcatttctgcaagcaaggatgaatctgttaggctatggaatgtccatacagggatctgtatcttgatatttgctggagctggaggtcatcgcaatgaagtattgagtgttgacttccatcctagtgatattgaacgttttgcaagttgtggcatggacaacactgtgaaaatctggtcaatgaaagaattttggctatatgttgacaaatcatattcatggactgaccttccatcaaagtttcccacaaaatatggccagtttccagtcttgattgctgcagtacactctaactatgttgattgtacaagatggcttggtgacttcatcctatcaaagagtgttgtcaatgaaattgtgctttgggaaccgaagacaaaagaacagagtcctggggagggaagcatcgatatccttcagaagtatcctgtcccagaatgtgacatttggtttatcaaattttcatgtgattttcacttcaatcagttggcgatagcacaatccttggagctggtgaagacggcaccatctggcggtgggatgaagtggaccatccgagctccagaaactgaagaagtgttgccgctcaatgctggactgatggttacgctcggttggggttgtgatggttga

SEQ ID NO: 32640 - DNA, 1752 bp, Zea mays
  Peptide Sequence Number=SeqID_74419
ggacttccagcctgcggccgcatccgctgcctacttcgggttcggtgagctggaggaggccctcatccacggtggtggcgccgccagcgccggcggcggcgtcgatccgggcgtgatcatcaagaacgacgtcgcgcaggcaaagtcagcggcaggatatctcgcgggcgctggcaccggcaggccccccacgctggagatcttcccttcgtggccaatgaggcaccaacagcagctgcacagtgggaattcgcagtcagtagggagcaccggcactgactcgagctcagctcagaacacaatgtctcagatggagttggtgtccccagcctcctctgcgccgcggcaggaggtcatgatggtgaccactgatgattacagctacaagccaggcctcgccgctgcgcccgctgctgccgccccgccgagctttcagcagcaccacccgctcccgctgcagctgcacggaggagagggagggggagaccatgacaagaggaagcatggatccacaagaaaagatggcaagttggtagatgccaagacggaacggcggctggcgcagaacagagaggctgcgaggaagagcaggctgaggaagaaggcttacgtgcagcagctcgagactagcaggatcaggcttcagcaggtcgagcatgagctccagagagcacggtcacagagctttgatatgtcgtgggcttaccgtggtccagggcctgttcgttggagggtgcagcgccgccggggacatgagctctgctgtggcctgcagctgcagcttagctgccgcagccgcagcaggccgcagcgcggcgccgccatgttcgacatggagtacgcgcggtggcttgacgacgacaccaagcggctggcggagctccgaggcgggctgcaggcgcacctgctggacggcaacctgggactcatcgtggaggagtgcatgcagcactacgacgagctgttccagctcaaggcggcgctcgcgcgctccgacgtcttccacctcctcaccggctcctgggccacccccgccgagcgctgcttcttctggatgggcggcttccgcccgtccgagctgctcaagatcctgataccgcagctggacccgctgacggagcagcagctgctggggatctgcaatctgcagcagtcgtcggagcaagcggaggaagctctcgcccagggcctgcaccagctgcaccagtccctggccgacacagtcgccgcgggcacgctcaacgacggcgccgccgcccccaactacatgaacatcatggccgtcgcacttgagaagctcgccagcctcgaaaatttctatcaacaggtcaccatctttttaccctccatttcctgcatcgttgaccgccatcctcaagatcttattctcactgtagatcatgaactgcacagcaacgtaacagttgcaatggagctggtcctcgtcctacgagctacagggtctggtcctgctttctccatggcaggggcagcccaaccttttgtcagaaagctagctttaagggccccaagcgccgacaatctaaggcaccagacgttgcatcagatgcgccggatcctgaccactcggcaggctgcgcggtgcttcctctccattggggagtactacagccgcctcagagctctcagcaacctctgggcttcccgtccccgcgacaacttcatcgggacagagagcctcagccccacagcaacggaactgcaagccctgcaccaccagcagcagaacca

SEQ ID NO: 32641 - DNA, 1491 bp, Zea mays
  Peptide Sequence Number=SeqID_74420
atgactgatgggctccgtgtgcgctactgcttgggcagggacttccaccagcctgcggccgcggccgctgcctacttcgggttcggggagctggaggaggccctcatccatggcggcggcggcggcgtcgatcccggcgtgatcaccaagaacgacgtcgcgcaggcaaagtcggcggcggcggcggcaggatatctcgcgggtgctgctgccaggccgcccacgctggagatcttcccttcgttgccaatgaggcatcaacagcagctgcacagtgggaattcgcagtcagtagggagcaccactgactcgagctcagcccagaacgcaatgtctcagatggagctggcgtccccagcagcctcctctgcgccgcggcaggaggccatgatggtgaccgctgatggttacagctacaagccaggcctcgccgctgcggctgccggtgccgccccgccgagctttcagtttcagcagcagcaccagcaccaccacccgctcccgctgcacggagacggaggtggagaccatgacaagtgtcattcgcacgtacagaggaagcatggatccacaggaaaagatggcaagctggtagatgccaaggtggggatatatagcatggatccactggcgccattgaacttcataacaacccttccttgcatcgcagacggaacggcggctggcgcagaacagagaggctgcgaggaagagcaggctgaggaagaaggcttacgtgcagcagctcgagactaccaggatcaggcttcagcacgtcgagcacgagttccagagagcacggtcacactcacaggcgccgccatgttcgacatggagtacgcgcggtggctggacgacgacagcaagcggctggcggagctccgaggcgggctgcaggcgcacctgctgctggacgccaacctgggcctcatcgtggaggagtgcatgcagcaccacgacgagctgttccagctcaaggcggcgctcgcgcgctccgacgtcttccacctcctcaccggctcctggaccacccccgccgagcgctgcttcttctggatgggaggcttccgcccgtctgagctgctcaaggtcctgataccgcagctggacccgctgacggagcagcagctgctggggatctgcagcctgcagcagtcgtcggagcaggcggaggaggcgctcgcccagggcctgcaccagctgcaccaggccctggccgacacagtcgccgccggcacgctcaacgagggctccgccgcccccaactgcatgaacatcatggccgtcgcacttgacaagattgccagcctcgaaaacttctatcaacaggccgacaatctaaggcagcagacgttgcatcagatgcgccgcatcctgaccactcggcaggctgcgcggtgcttcctctctattggggagtactacagccgccttagagctctcagcaacctctgggcttcccgtcccggcgagtatgtttcacaagcttga

SEQ ID NO: 32642 - DNA, 1032 bp, Zea mays
  Peptide Sequence Number=SeqID_74421
atgtctcagatggagctggcgtccccagcagcctcctctgcgccgcggcaggaggccatgatggtgaccgctgatggttacagctacaagccaggcctcgccgctgcggctgccggtgccgccccgccgagctttcagtttcagcagcagcaccagcaccaccacccgctcccgctgcacggagacggaggtggagaccatgacaagtgtcattcgcacgtacagaggaagcatggatccacaggaaaagatggcaagctgacggaacggcggctggcgcagaacagagaggctgcgaggaagagcaggctgaggaagaaggcttacgtgcagcagctcgagactaccaggatcaggcttcagcacgtcgagcacgagttccagagagcacggtcacactcacagggcgtgggcgttggggggtgcggcgccgccggggacatgagctgtggcgccgccatgttcgacatggagtacgcgcggtggctggacgacgacagcaagcggctggcggagctccgaggcgggctgcaggcgcacctgctgctggacgccaacctgggcctcatcgtggaggagtgcatgcagcaccacgacgagctgttccagctcaaggcggcgctcgcgcgctccgacgtcttccacctcctcaccggctcctggaccacccccgccgagcgctgcttcttctggatgggaggcttccgcccgtctgagctgctcaaggtcctgataccgcagctggacccgctgacggagcagcagctgctggggatctgcagcctgcagcagtcgtcggagcaggcggaggaggcgctcgcccagggcctgcaccagctgcaccaggccctggccgacacagtcgccgccggcacgctcaacgagggctccgccgcccccaactgcatgaacatcatggccgtcgcacttgacaagattgccagcctcgaaaacttctatcaacagggaccaaagagggcaaagcttttgatcccttttttaagtgaagatttggcgatgcattgttcctga

SEQ ID NO: 32643 - DNA, 510 bp, Zea mays
  Peptide Sequence Number=SeqID_74422
atggcgtctcccgttgacgtggctggtctgcgccctaggttgggcgaggtggaagctcctccgaagctgaggtcgagtctgtcttccgtggccgaggccgagtccgagcccctggtcgggcgaggcggaggtcgtcgtctgaggccagggcggagtccgagccctggggtcgggcagagcggacctgagtccgagccctgggtcgggcggagcggagttcgacgtcttccggggctgagcccgagtccgagccctgggtcgggcggagcggagtttcctgtggtgccttctgcaggacctgactgcctgtcagcctcactctgtcgagtggcactgcagtcggcgcggcgcaggcggcgctgtccttctgtcaggccgctcggtgccaagatatgtggcgccgagctacgaggccgcgtcgccaccacgtcggtgtcagtgaaggccgggagtgggccgcccgcggccggcttcgcgctttctgctcggcacgcagatacggcacgctag

SEQ ID NO: 32644 - DNA, 510 bp, Zea mays
  Peptide Sequence Number=SeqID_74423
atggggcgcctgggcgaggggcgatgtggtggcgcggcgggggggcagggaggcggggggctgtggggctggatggtcgagtgggcggcggggtcgcagtcgcagtcgcagtcgcagggccggatcttgcgcgacaagcgcgcgggcggcgaggtggagccgcggtcgcccaaggtgtcctgcatcggcaaggtcctctccgaccgggagcggcacgggcggcgccgtggctggtggcacggcgtggcggccatgttccggtgcgacggctgcgcccgcgttgcccgcggcgcgtccaggaacatggcggcgctggaggacgatggcgtggagcagcagcagcagcagcaggcgggcgttgcgggaatgcggaggttcaagtccgggaggagagctgcttcgtggggagacgaggcgctggccacggcggcggtgggcgatgtggacgaggggatggagatgcccgacagccaggacgctgagcagtggtcccggcggccggtaatttag

SEQ ID NO: 32645 - DNA, 692 bp, Zea mays
  Peptide Sequence Number=SeqID_74424
atgaagcccgctgtttgggcccgcgtttcttgctcgtcaacagcgcagcagttgcatgcgggcgtcggcaagttcgccgccgccgcatgctggagctggaagaagaagcgcgaggagctcccctgcttcagggccagactggccggcaagccgccgcgcgcctcaccggcgaagggcggcattgtcccggccagcgacgatgacgacggcgttagcctcggcaccgtgaagctgccgggcaacatcgacaccgctcggttggagtccttgctcttccagtgggggaacagcctctgccaaggcgccaacctgccacttccggtgcctctcaagatttcttcacctgatgcgatcgaccaggtggacaaggttgagggcgggatcaggctagggttcgtcgcggtcgaggacggcgcgacgcggacgctggtgtacatcgattgcctggtctctccggccccggatggctctggtccggtgttccgagcgatcaggaacggtcctatgaaggacaaggagccacctggggagcccaggatcatgagaagcctccttcaggctctcgaaaagtctattcagatcgctccagttgtgtcaattgatctaagaagagatgatggttacaggctcaaacagcaagaaattatgtcaactgaatctaacagctggtacatttccaacccgcagttcaa

SEQ ID NO: 32646 - DNA, 1668 bp, Zea mays
  Peptide Sequence Number=SeqID_74425
atggtctctgtgcgctactgcttgggcagggacttccagcctgcggccgcatccgctgcctacttcgggttcggtgagctggaggaggccctcatccacggtggtggcgccgccagcgccggcggcggcgtcgatccgggcgtgatcatcaagaacgacgtcgcgcaggcaaagtgtaagtgtttttttttttgccttctccgtcttccttctgtctcaggagtccggccggactgggctacttgccaaaaaggctcgcgttcgatccttgctcggctgcgcacgggcacagcgccgcacagggcgagacatgcctcgccttttgtgttcctgccggtttccattcctatgcaaacacagtgtgcatactcctctagtgtcccatggagagagagagagaggagagagatgcatgaacagggaaggcatcgacgacactcggggaattcgcagtcagtagggagcaccggcactgactcgagctcagctcagaacacaatgtctcagatggagttggtgtccccagcctcctctgcgccgcggcaggaggtcatgatggtgaccactgatgattacagctacaagccaggcctcgccgctgcgcccgctgctgccgccccgccgagctttcagcagcaccacccgctcccgctgcagctgcacggaggagagggagggggagaccatgacaagaggaagcatggatccacaagaaaagatggcaagttggtagatgccaagacggaacggcggctggcgcagaacagagaggctgcgaggaagagcaggctgaggaagaaggcttacgtgcagcagctcgagactagcaggatcaggcttcagcaggtcgagcatgagctccagagagcacggtcacagggcctgttcgttggagggtgcagcgccgccggggacatgagctctggcgccgccatgttcgacatggagtacgcgcggtggcttgacgacgacaccaagcggctggcggagctccgaggcgggctgcaggcgcacctgctggacggcaacctgggactcatcgtggaggagtgcatgcagcactacgacgagctgttccagctcaaggcggcgctcgcgcgctccgacgtcttccacctcctcaccggctcctgggccacccccgccgagcgctgcttcttctggatgggcggcttccgcccgtccgagctgctcaagatcctgataccgcagctggacccgctgacggagcagcagctgctggggatctgcaatctgcagcagtcgtcggagcaagcggaggaagctctcgcccagggcctgcaccagctgcaccagtccctggccgacacagtcgccgcgggcacgctcaacgacggcgccgccgcccccaactacatgaacatcatggccgtcgcacttgagaagctcgccagcctcgaaaatttctatcaacaggtcaccatctttttaccctccatttcctgcatcgttgaccgccatcctcaagatcttattctcactgtagatcatgaactgcacagcaacgtaacagttgcaatggagctggtcctcgtcctacgagctacagggtctggtcctgctttctccatggcaggggcagcccaaccttttgtcagaaagctagctttaagggccccaagcgtaaacctgcagataaacggataa

SEQ ID NO: 32647 - DNA, 372 bp, Zea mays
  Peptide Sequence Number=SeqID_74426
atggctgagcctgcgccggggcatgcagtcatgcagggagggggacgaggtaatggaagccctgggcttccattagtatgggaagccccagtcaggctcgcaactgatgctcaacctgtgattgcttgcaactttcaaggccacaatctgactacaatgtttccagtttccacaaaagagattgatgcaagcagcagacagggatcaaagcgcattaggtacatcaggtccgaaggcaacctgctcctgaacgactcaaagcaacacgccgctgatgctccagaaccagacgctgctggagaagagccgtgggacttcgagagtagttcaaccatgcccatgtattacagaaaatgcagtcggccctgctga

SEQ ID NO: 32648 - DNA, 315 bp, Zea mays
  Peptide Sequence Number=SeqID_74427
atgccagtgccgccacagcagcactgtgatgtcgtcccagcaaccttgcaacagctcgcggagaggaaggcaattgcgagggcaagtgcctacaaggtgtttgcatcggcgcagctgcaggctgcgacgtgtggcctcctagtacggcggcggctgcgggaggtgcgtcggcatatgctcgaggcagccttggtggcggtcgacctcggcacacgggggcgcgacctcgtcctatcggacagccatcagcaatcgcactggcctgttgtctccaagcgcaagcatggtgcctgtcccgcaggcgacgaactctaa

SEQ ID NO: 32649 - DNA, 144 bp, Zea mays
  Peptide Sequence Number=SeqID_74428
atgaaggatgcaaagcttgctaaaacgccaatgggaactgacggacacttggaccttaacgcgggagatcccaaggaatgtcaccttgtggttgtgaagcgtattcttagatatttagttcgtacgccttacatcggactctag

SEQ ID NO: 32650 - DNA, 1752 bp, Zea mays
  Peptide Sequence Number=SeqID_74429
atggtgtggggactgggaggatgcttcggcggtgtcgccgtcgccgcggtgtcgcctgttgcagcaggccggaagcaatcggcgtcagaaggcggagcagaagccaagcagcagcagcagcagcgggtggcaccacgagaggaggagcagcaggcggcggcatcagtagcaggaggccgtaaggagaggaagaagaaggacggcctgcgcttccccttcctctcgcgattctcccatccactgtaccggagctccaccacgtcctccggtaagaaacagatgaaagacagcgacgacgagggcgccggcgatggcgtcaaccgcccgcacacgtccaacaaccttccactgccggctccacactccgacccgaacctccagttctcgggtgggacggacgatgagtcctcgaaccgggacagcagctcctctgccaccggcggcgcgagcccggggtactactccgactacccgtccagcttcagcggcgagtgctcgccgtacaacatgtccccctggaaccagaccatggcgtctccctggtcgcaccacagcgagcccgccgggctcggaggcggcccgcccacgatggcgccggggacgagcctcatcagctcgctggtgagggaggaaggccacatctactcgctcgccgccaagggcgacacgctgtacaccggctcggacagcaagaacatccgcgtctggcgcaagcagaaggactcgggagggttcaagtcctcgagcggcctcgtgaaggcgatcgtcatgtccggcgagcgcatcttcacgggccaccaggacggcaagatcagggtgtggaaggtgtcggccaagaacggcatgcacaagcgcgtcggcagcctgccccgcctgcgcgacttcctgcgcggctcgctcaacccgtccaactacgtggaggtgcgcaagaaccggtcggcgctgtggatccggcacagcgacgccgtgtcgtgcctgagcccgacggacccggcgcaggggctgctctactccgggtcgtgggaccgcaccttcaaggtgtggcgcatcagcgactccaagtgcctcgagtcggtggtggcgcacgacgacaacgtcaactccgtcgtggcggcgttcgacgggctggtgttcacgggctcggccgacggcacggtcaaggtgtggcggcgcgagcagcaggggaagggcaccaagcacacggccgtgcagacgctgctgaagcaggagcacgcggtgaacgcgctcgccgtgagcgccgtcgcgcccgtgctctactgcggctcctccgacggcctggtcaacttctgggagggcgaccgccacctcgtccacggcggcgtcatgcgcggccacaagaaggccgtgttctgcctcgcagcggccggcgcgctactgctcagcggctccgccgacaacaccatcttcgtgtggcgccgcgactgcggggtgcactcgtgcctctcggtcctcacgggccacaccgagcccatcaggtgcatcgccgtcgtcgaggacaacggcgagaacagcagcgagtccaacgccggtgactctgctggcggaggggggtcgtcggcgtcgcggtggatcgtgtacaccggcagcctcgacaagtcgatcaaggtgtggcgcgtgaccgacgaggcgccggacccgctgttccacggctccggcgatgcgccccagatattcgaccggtatcccggcgacgccttcggggccagtggctcgacgacgtcgttccgctaa

SEQ ID NO: 32651 - DNA, 576 bp, Zea mays
  Peptide Sequence Number=SeqID_74430
atggaaaagaaaaggataaaacaaaactgtgctattgggccaaacaacaccattctggcccaactagccatttcagcccccccccacgcgccgggcgatccactgacacgcgggccctccgcgtcagccaacccactccaggtcgcgctcgccctcactgccactgtctttatgggcccatgcatcagccgcagtctcgcgctcatccttttcttccgtccactgtcgcgtgggtccaagatgtcagccaacgagcgcgcggggtcatcaacaacctccgaacgacgcggcttgggcggtcatgccgaactccgcgtgtgcgccctcgttgctcggtcgtggggtctgcgaggtccgccggggcaagcgcttgcgaccagtgagccttcgaggggaattccagggagcatcggcgtccaatttctcgtcgggtccaagatccacgacggagctgcggtgcgccgtgggcctgggtccctgcctcacccccgaagctcgcgggtgagctccaccgcggggagggcctgccatcgcggctgggtgttcgggtggggaagaagggccatcagccgttaa

SEQ ID NO: 32652 - DNA, 1683 bp, Zea mays
  Peptide Sequence Number=SeqID_74431
atggaagcggcaccatccgcccgcgccttctccccgtcctcgtctccctccgcgggggctagacccagccttcccctcgcgggcctggcctcgcggcgcgcccgggtgctcgcggcgccgcccccgccccgcgccgtcgcctcctcccgcgcgccgctggtggtctccagcccgccaccgccggaggactccggcacgcacaaccccgcgcacgccaaggtcgaccgctccggccgcttctgcagcccccgcgccgcacgggaactcgcgctgatgatttcctacgccgcgtgtctggagggaaccgatgttgtccggctcttcgatcgcaggatcagcgcaaggcgagaacccgggtttgttttcaacaaggcatgcctattgaattacaaccatatgagctttggcgggggaccgctcgaggttggaacggagcaggaggctgagaagctggccagtcagaacgataaggattcagccaacgaagcagatgtactttcagctcctccaaaacttgtttacaacaactatgtattacgggaacttttagtggctgttgccagtggatgggataagcatgtggttatcatcgacaaaataattccccaggcttggaaggatgaacctgtggcaaggattcttgagctctgcattctacatattgctatggctgagatggcatcaaaaggaacaccccacaaagttgtcattaatgaggcagtagatctggcaaagcgattttgtgatggtggtgcccctcgggcgaataccttctgtctccaaggtttagccttcaacctaagggaatctaaaagctcggtcccgttgaaccgggggatgaagccattccttgcggccatctctgtgtcaccaggtgcgagcgcattcaaacggaggggcacatggggaagcttcgagctcaaggaaagcggaggaaatgagatggatggagaatatgcaaggcactggatgagcgcggacgtgaagagtagggtgagctccagcgtgggaaggagcgggtccgatgatctcttccggccatatgagatctctggttgggcaggttacgcatctctggtggcagcaattctgaaattgcacgagactgtgcgaatggattggccaaactcttgggcggctgtagttcccagctcttctgtgatgttgcgcgactgcggtacaatgttgaaaatcaggctttgctcacacgaagaaggcaacaaggataggaatatcgtatcaacagttaatttggattgtaaacttgacctcaaagcaatagctttgcaagcacgaaatgcggagtataacccaaagcgttttgctgcagtcatcatgagaataagagaacccaaaaccacagcactgatatttgcatcgggtaaaatgtatgcccgcattattcagaaacttggttttccagctaagtttaagaatattgttggctcttgtgatgtcaagtttccaattaggcttgagggccttgcatattctcatggtgccttctcaagcaagattgttttgactggagcaaaggtgagagaggagacctacactgccttcgaaaacatctatcctgtactgtcagagtttagaaaaattcagcaatgggtggatggctacagcgtgcagttgacttatgtcatgtactcatttatggaacatgtgtgggactgggcacct

SEQ ID NO: 32653 - DNA, 1551 bp, Zea mays
  Peptide Sequence Number=SeqID_74432
atggcgctcacgcgcgggcgagcgcgcactgcccccgccgtccccagcgcctgcttcctactactcctcctcctcctcctcacatcctcctcactcctcgccgcccccaccagcggcagggcagagtccgggggcgggtcagttctcggtgacgcctcgtcctcctccggaaaggcacggggggacagctgcgaggagctgcagtccatcagcggcggggaggcccggtgcgcgtacctccgcgcgcagaactcgccctgctccccggcggggtacgtggactacctgcgcctcttctactgcgccttcgccggcgcgccggcggcggccgcgtgcgccgcgctcgcgctgtggctcgcggtgctcttctacctcctgggcgacaccgcgtccgagtacttctgcgcgtcgctggagggcctgtcggcggcgctgcgcctgccccccgccgtcgcgggcgtcacgctgctctcgctggggaacggcgcgcccgacgtgttcgccagcgtcgtgtccttcgcgtcgggcgacgacggcggcggcggggtcaccgtctgggtggccgcgtcgttcgtctcgctctacgtcggctacgtcgtcctcgtctggacctcccactgctgcaccgagaagggcaagccggccgccgacagcctctcggcgccgctcctcctcgacgacgacgacgacgtgggcgacgtcgtcccgtcgctgccgtcccacaccaagacggaggcgtccagcacggccacgtcgagggtcattgcgacgctgcattgcctcgcggccgcgctgtgcatgccgctgtacctgccgcgccgcctgaccatcccggacatcgcggggcaccgctggtcccggccctacgccgtggcctccgcggcgctggcgccggtcctcatcgccgtgacctggagctcgcagcgccacaacccgacgtcgtggcacggcctcgcggtcctcgtaggaggcgcgctcctgggcctcctgctcgcggcgctcgcggcggccaccacggacgcgagctcgcccccgcgcgggcggaggcggcgcgtgccgtggctcgccgcggggttcgtgatgagcgtgctgtgggcgtacaccctggcgcgcgagctggtggcgctgctggtggccatcgggtacgtggccgggatcaagccgagcgtgctgggcgtgacggtgctggcgtggggcgactccctgggcgacctggtgtcgaacgtggcgatggcggtgcacggcgggcccggcggcgcgcagacggccgtgtccgggtgctacgccggcccgctgttcaacacggtggtggggctgggcctgtcgctggcgctggcggcgggcgcgcagcacccggccccgttcgcggtgcccgtggacgcggcggcgtacgaggcggtggggttcctgggcgcggcgctggcgtgggcgctgttcgtggtgcccgtccgagggatgcggatcgaccgcgtctacggggtcgggctcatcgctatctacctctgcttcttcgccgtgcgcgtctccgagacgctggggctctggagctag

SEQ ID NO: 32654 - DNA, 1425 bp, Zea mays
  Peptide Sequence Number=SeqID_74433
atggcgtgtgctgcagtttggtttaagctgcggaatcaatcagtctttcatggagttgttctacgtagagaccccccgttggctattcctagggaacagacacattcctccaaaaagttcagaccatgcctcaccgttatttctgcaagcacaactacattgcggcatcctggatatatgaacaatgatctggttggccttcttgcctccctgatccccactccaaggtgtcattttttgatgacaggctatactccactgactgttgagcgccaggttaacatgatacgcaaaacaacagtattggatgttatgagaagacttctgcagacaaagaatgtaatggtgtcatcatatgctcgaacaaaagaagccagccaggctaaatatatctccatattgaacatcattcaaggggaagtggaccctacacagactttcccaccacacggccgccgtccaggacttccccatcgcgatgtcgtcgtcgtcctggacttcgccaccactatgtcagtagccatgaatggagatgagcaagtcgagatggattggagtttgaatcagggaaacacaatagattcatcagttacattaccagagcaagcacctccactggtagattgggatttaatacaaattcaagaagaaaaagaagaggaaggaataacagaactttgcagtgaagaacaagtttatgcacttttgggtctgtctcgcgaggatgagagggaggaagaaatggctacagactcaaaatcaagagccgatggacccaatgcctctatagttcttgatatagagggtgttgaagatgtacctatggtagtgaatgattatattctacaggagactgtgacggaatatgacaaagataatcccagtctggatgtaggcaccatatatccttgtatggaagattttcgattggctgtgaggcaatatgcaataaataaagagtttgaattgggtattagggcaacaagcaagtcaaggtatagagggtattgcaaaggtggagattgtccttggtctgtttctggattcaagaagaagggtgaggtggctgttatggtactaacttctaaagtgaggtgccctaactgtggagagttaggacacaggaaaacaagctataaatgcccactaaatggaactaagaaaatcctattcggctaccaaggttttagagccatttttactgctcctgtgacatcgagcaagctctcacaaaatgctgatgtgagcttcttgttcagtgattttggttgccctgtcaagaaaatccccatatgttcaaacaacccacaagataagtccgtgcggcggaggatagacaacatgcaccagaggttgaggctcttggagcaacatatggagacgctgctgaggcccaaattggcaaaactactgacaatgtgctga

SEQ ID NO: 32655 - DNA, 768 bp, Zea mays
  Peptide Sequence Number=SeqID_74434
atggacccgaagctgctgcggcatggaaatctgagaagtattgtcctccccccagtccccagacttgcgcgcgcctccgctgctgcgactgcgagcccaagaaaaattttcctctacgagcgcatggaggtgtccgctgggctccggctgccgcccgtcgctgcggcagcgtcgctccttggctgtcggtccgcgtcggtgccgccgcgcgcggcggcttcccattctgtgcggtccgtgtcccgcgcggttaaggtgggcctcctttcgctctcccctcttgtcgcaccccctcgcgagatcagagcagctgcaattaacggcctccaaagaaacagaagtaatctcgaatcattattctgctacgacaaatctgtccccgagcaggacattggagaaccatctggtctaaatctggaaaagaagaatgtcggggacaagcctccctgctcaagctgtgaagctaaaggtgccttgctgtgtgcaacgtgcgctggttcaggcttgtacgtcgactcgatactagagagccagggaatcatcgtgaaagtcagatgcctagtgcttgtggatatgggctttcgctctcctccacaaatcacaatgctcgtgcatacggaatttcctgacggaccacgcagccgcaggagcagtccgccgccacacatagcgctcgacaaaatactcgtggctgataagctcattgttgactcgactcgttttcaattttatcgcgagctaaactaccatcttagctcggtttgttaa

SEQ ID NO: 32656 - DNA, 621 bp, Zea mays
  Peptide Sequence Number=SeqID_74435
atggcggtacaaaatcttgggaatcgggctttggcgctttgctcacccgaagaagacaagaataggaatattgtatcaacagttaatttggattgtaaacttgacctcaaagcaatagctttgcaagcaagaaatgcggagtataacccaaagcgttttgctgcagtaatcatgagaataagagaacccaaaaccacggcactgatatttgcatcgggtaaaatggtatgtactggagctaagagcgagcagcaatctaagcttgcagcaagaaagtatgctcgtattattcagaaacttggttttccagctaaattcaaggactttaagattcagaatattgttggctcttgtgatgtaaagtttccaattaggcttgagggccttgcctattctcatggtgccttctcaagttacgaaccagaactctttcctggccttatctatcggatgaaacaaccaaagattgttcttttaatttttgtttcaggcaagattgttttgactggagcaaaggtgagagaggagacctacactgccttcgaaaacatctatcctgtgctggcagagtttcgaaaagttcagcaatgcgttaacttgagtgctaacaagagtagataa

SEQ ID NO: 32657 - DNA, 300 bp, Zea mays
  Peptide Sequence Number=SeqID_74436
atggatgaaggaactcccctcggtggtctggagcctgaggacaacgccgagccgagccacgggcttctgaaagggaaatgtgcccttgggccatttctaagtattttggtgattgagtgtcaacacaagtgcttaaatgtgaatctatgccaatggatgaacaaagtgcaaatcaagagcaaagccccaaccaccaacttgaccgttggtggaggccgtctgtttgatggcgcaccggacagtccggtgccccctgccacgtcatcactgccgttggattctgaccgttggagcttctga

SEQ ID NO: 32658 - DNA, 207 bp, Zea mays
  Peptide Sequence Number=SeqID_74437
atgggagtgtgttataggtgcgtcatgatcgactacaaccttcttacggcgaggttggacaggttgatgcgatctatggttaaccatagcggctatgaacctcgcgacatcctatcaccattgcttagtgtctacttctccgattgcacctacttgaccgtaatatcgcccatcacatttaatgtgatagaagggagccttatctag

SEQ ID NO: 32659 - DNA, 1470 bp, Zea mays
  Peptide Sequence Number=SeqID_74438
atgggcgaacccacggccgtgccagggaggatattatcatcttcaatgcccacagcggcgaagaatatgcagatgaaagagcatccatacctcagaacacaactgtgctggcggaaagtcacagaagaattttctgtgccttgcaagtcagtggttactgactcaagctcaaagtcatgttcttccacggtagtgcaagatgaagatgctgcaattgctgcagtgattgatgccgctgaactcaaatcggaacaactcccgtctaaaaaaggacaaggcagtggaaggaaaacaagatacctccacctggatacatttgctacagatgccgaattccagggcattttatccatcgttgcccaagcattggtgatcccaaagtcgaagtgcatttgtggagtcaagacactagcagatgacctcattcccaatcaaacacttcggagcacaatcagcaatatgttgggaacacagactatcagtggtggaagtggtacaacaagacacagaagttcgtcaggcagcaaccctgaccccaaaatacagagccacactgcctcgacaagggaggtgaagcaatctagagaccaccagctaccagcagcatctgcacttgatgatgtgctccaggttgccacagaaggtgctctagtgaaccagcctcgggagaaattggtacccagtgctaaaatccttggtaaagatggaggcaattttgcacaagtgtcagcagagaagactgtagcaaatgctgaagccctcaaagtaaaggatggaactgaatcgacttcaaaggccaccactgtttcaggggcccgagaacacaatgtcacaaggacagatcaaccgaagaagtggaagaaggcagtcttaaccaagaactttcaacctaacaatgttggatatggttacaatgttccatttgaccctgcatattgcaatcccttcatcaatggatatccttgggcaactgaaccttacatgtatagctcaatgggggtgccagttctacttgctatttgtgacgctaatagtctatatggtggattcttcaggcctgaaactgagcccatgcatcgtgggggcactgcagctgcaccttcaaagcgccctgagaggagtgacaggcccaaggacactcgtcatcagccccaatcacgagagcacgagcgacaattgggctcttctcatgtctcagaatcgagaacgaggaacagaacaaggtcaagctccgagggaagggaccgtgggcattccgacagggcctctgttgaccaccatgaggaccactctactaggaagcggacgcgcgattcctctccgaagtacggtgatagacagagcgaccggaggtcgagtcacggttccaggagtatgatgactcctgaggaggatgcaagcgacgatgaatgtaatttcaagaggagatggggtcgcagatcatcaggaggcgtggacacaaggcactga

SEQ ID NO: 32660 - DNA, 432 bp, Zea mays
  Peptide Sequence Number=SeqID_74439
atggcgacgctgcagctcaaccacatcgcgcgggagacctccgacgtggcccgactcgccgccttctacgaggccgtgctggggttcgagcgcatcccttcgcccacctactcgggcttccaggtcgcatggctccgcctcccgagctcccccgacgtcgcgctccacctcatcgagcgggaccccgccgcggcacccgtcgcggtggggcctggcgccgagggcgcgccgccgtcgcagctgccccggcgccaccacctcgccttctccgtcgctgactacgacgggttcgtgaccgggctgaaggcgcgcggcaccgatgtgttcgaaaagtcgcagccggatgggcgcacgcgccaggtcttcttcttcgaccctgacgatgaagaagatcttgtcttcaccaaactgggacttgacgttcctagttga

SEQ ID NO: 32661 - DNA, 1023 bp, Zea mays
  Peptide Sequence Number=SeqID_74440
atggctatggattacgtattagttgctgtgctgtttgtgactttattgctagcaaccttgctgatccgcttggtcttggcatgggggctcggcgagcgtttcgatcaaaggctaccgccgggatcgaggggcttaccgctcgtcggagagacgctggagttcttcaccgcgtcaccgaccctcgagctgttgcccttcttcaagcgacgtttggagagatacgggccgatcttccggacgagcgtcgtcggcgaggacctgatcgtgtcgctggacccggagctgagcaggcgcgcgctgcaggaggaggagcgggccttccagatatggtacccgccgtccttcctgcgcgtcctgggcgccgacagcaccgtcagcgcgctgggccctctccaccgccacatcagggcgctcgtgctccgcctcttcggccccgagagcctccgcctggtgctgctgcgggacgtaccgcggagcgcgcgcgccgagctgcggtcctggctccggcggccgggcccgggcgtcgaggtccgggcggccacctcaaggggacgcaagagggtgatgggaacgctgaggcagcagctcggcgcgcgcaggagcaggaacgagccagagcacgaggaagagcacgagaacatccagaaaagaagggcggatccagactcggacgacgaagtcacatgggaggagtacaagtctatgaagttcacgtctcatgtcatacacgaggccctaaggctggcaaatatcgctcccgtagtgtttaggaaaacaacacaggatgtacagatgaaggagtacactgtaccgcaaggatcaaaggtcatgatctgttcagctgcagctcacctgaatccgaaggtgtacaagaaccccacggtgttcaacccatggagatggaaggatcgtactgtcgaatcagctggcggctcaaggatttcatggcctggtctgcggctatgcgttggtgccgactttgccaagctgcagatggctatcttcctccattatattgtttag

SEQ ID NO: 32662 - DNA, 721 bp, Zea mays
  Peptide Sequence Number=SeqID_74441
atggcaactgccccgtcactaccggaatcgcaggctttgccgagtgccggcggctttgccgagacgcactcggcaacgacacgtttgccgagggtcaaacactcggcaaaggtggctctcggcaaagcgccgttagcggccgtcccacagctgacggccgtcagtctttgccgagagccaactgctggcactcgacaaagaggattctttgccgagtgccacaaactcctctcttcaacccgcccggcgccgccgctcccaccgccgcccgacaccgccgcccgccccatgcccgcccgcgaccgccgcccgcccctcgccgcagctcccaccgtcgcctgcccctcgccgcagctcccaccgccgcccgcgaacgccgcccgccccacgcccgccccacgcccgccggcccctcgccgcccacccctcgccgcccacccctcgccgccgcccctcgcccgcccctcgccgcccgcgaacgccgcccgctcccaccgcccgccccacactctcggctcgacgccggcgccgcccgtcaagccgcccggcctccccacgcaccgttacggtcgtcgcgccgccatgccccgccaccgtcgtcgcgccgccgccatcgccgacccatacattaagaagatacttgtcttcctagccactgcgggtctgcctgcacagcgtcgcgtcgccactgcaccaacctgccacaacaccgtcaccttag

SEQ ID NO: 32663 - DNA, 540 bp, Zea mays
  Peptide Sequence Number=SeqID_74442
ggaggcgcgcgcccccgcgccgcccaccgcgacgggggctgggatgcgagccacgatcatcggctcccgcgcgacgacgggcgcgctggcgggccggcccgggggtgcagtcacgcgcgcgcgcaaagcgtcggctgcggcaggggtagcaaggatatacgctcagtcggcccgccctcctgccgcgctccgcgcgccagcgcgcggggctcaagcggcggggccacccgggtgcggagtcgcgcgactccgcgggagaagagtggggcagacggggggggtacgacggggagcggggcggcccgcaccataccgagcgagaagccgagccccgcagaccgccgcacgcagcccgcacagcggcgaaggacaccgcacgccggagcgcggcgcggcggggagagaagagaagacgcccacgcagcgcccccacctggcccgacagccgccacgccgagtgcggagtccgccagccggcacccgggcgatcttattcggggtctccgcccgccggtgccggccccccccccgggaaggtag

SEQ ID NO: 32664 - DNA, 1716 bp, Zea mays
  Peptide Sequence Number=SeqID_74443
atggcttctgtcacaagggccttactaatactcttcttccttgctcttcttcctcagctgcgcacaccaatactgctctctagcgcccaccacctccccgttccatttctttgccatccagaccaagcaaagcagctcctccagctcaaaaggtccttctccttcgttgattccaccaccacgctttcgtcgtggcaagacggtactgactgttgcctctgggaaggaattggctgcgacgcctcgtctggaaatgtcaccgttcttgacctcaacaaccgtggcttgttcagtcatggcttggaccctgcagtcttcagcctcacatccctccgccgcctcgacctcagcatgaatgatttctctggggatccagtggatgacggccgactgtggttgccggacaacataccggctactggattcgacaggttcactttgctaacccatctaaacctttcttatctgggcttgcgtggcccgatacctgatggaatcggtaaactcgtgaaccttctctctttagatctttccagctccattgtatctgatggatacgatgtaccagatgtaccagacgactcctacattgactattcttatcctctgtgggtgctcaactttgataccctagtggcgaatctcagcaatctaagggagctctaccttgacggagtggatttgtcttacagtggacatggttggtgcacaacactagctacatatgttccccgtcttgagatactcagcatggccaattgtgccctaactggtcctatttctaaatcactctcgagactcagttccctccttgttctcaacctccaagaaaactataatataactgctggtccatttccagagttcttgatggattttatcaatttaactatgcttcgactttctaatattaatctccagggatggttcccctccagaccctttcaatctaagaatctaagggttcttgatttgtcctttaatcagaatctcactggtcatgtgcccaacttttctaatgcaagttctcttgggagtttgatgctacatgggaccagccttttgcccgtcgaacttaaggcttccaccagtttcgtgtcattgaaggagttaagccttgatgggaatttagtttctgtggatttcctctcttcatttggtacactggggtccctgtgcaagttagacctggcgttcgacacagcgagtgaactaggcccagttttgtcatggattggacatcacaagaacatcacaagattggtaataatctatgccaatttcactgagatagcgcctgccttgattagcaattatttcaagaccttgagaagcttaattatatgtgcttgcacactccctaggcatgtacttcatgcggttggaaacctcaccggcttgcaaacacttcaactttttaactgcagaatgacggggagttccaccttgccatcttcaattggcaacctcacaaatttgagggatctgtatattgttcaatgtggattttcagggccaatgccggctgcaattggcaggctcacaaatttgagaaacatgtatgtatatagtgctcagttttcaggaccaattccggctacaattggcaagctcactaaccttgaaaatttgtacattgaagatgggatttctgggccaataccagctacaattggcaatcttactcacttgaacagtgttaaattttttggatag

SEQ ID NO: 32665 - DNA, 1530 bp, Zea mays
  Peptide Sequence Number=SeqID_74444
atggatgacttgaagcgaagactgaagacagacagggaccaagcaaagcagctcctcaagctgaaggactcgttctccttcagttattcgacgaccaccacgctttcgtcatggcgagatggtaccgactgctgtctatgggaaggcgttggctgtgacgatccctcgtctggaaatgtcaccattcttgacctccacaaccgtggcctggtcagttatggcttggaccctgcagtcttcagcctcacatctctccgtcgccttgacctcagcatgaatgatttctctggagctgcagtagatgacggcgacctcagcatgaatcagttttctggagatccattcaatgaaggcatacattggttggctgaaaacataccggccactggattcgagaggttcactttgctaacccatctgaacctttcttatatgggcttgcgtggcccaatacctgctggaattggtagacttgtgaatcttctctctttagatctttccagttcctttccaactgatggatatgatgtatcgaacagctattttgacaacgtttaccttctgtgggtacctagcttcgataccctgatggcaaatctcagcaatctaagagagctttaccttgacggggtcgatttgtctagcagtgaagaaggttggtgcacaactcttgctacatatgttccacatcttgagatactcagcatggccaattgtttcttgaatggtcctatttgtaaatcactatctagactcagttctctcactgttctcaacctccaaaacaactatattattggtggtccatttccgaggttcttgatggattttctcaatttaactatgctacagctttcaaataccaaccttcagggacagttcccctccagaccctttcaatcaaagaatctaagggttcttgatttgtccgacaatcagaatcttacagggcatgtgccaaaattttctaatgcaagttctctggagagtttgatgctagatgggaccaaccttttgcctgttgacaaagtcaaaccaacatctaccaccaatttcatgtcattgaaggagttaaggctcagtggaaatttagtttctgtggattttctctcctcatttgttggaaacctcatcggcttgcaaacacttgagctttttcactgcgacataatgtgggattccaccatgccttcttccattggcaacctcacaaatttgaggaatatgcatattgatgaatggccaattcaagctacaattggcaatctcactaaccttgaaagtttgcacattgaagatgggttttctgggccaattccagctacaattggcaagctaacaaacttgaggactatgggtctggagctgccatgtggcccatgggcgcatggcacaagccttcagatagaagcaagctcgcccacctgcatcaaatgttggcggctgagcgccgagtgcgtgggtggcaccatcatgagcaaccactggcttaggcagagcatccactacaacgactgccaaaggcaatag

SEQ ID NO: 32666 - DNA, 1113 bp, Zea mays
  Peptide Sequence Number=SeqID_74445
atggacattggaacatatgagtctagctctgacatggcatggagtccaaatgacaacatagaggaaggggagattccaccatttatttttactcttcctgcattatgttacttggatctttctaacaaccagctttctggccatgtacaagattttgacacgacaacttcacggttgaagagtttgttcttgagcaacaatgcattgtcaggatttattcccaaggcattctttgaactaacaagtctaggagctttagatgttagctcaaacaatttcactggttccttggacctttcacatttttggagacttcatgagctcaccatgttggatctttccaacaattggttgcatgtcatggatgcagatgacgataatctagtggatatcagctacctttcagaacttcaagatataaggctcgcatcttgcaatgtaattcgatttccaagatttctgaggcaagttaaatctatttcatatttggatctttcaaggaataaaatcgatggcaatgtaccaaattggttgtgggacaagttatggagctttgcaccatatttgaatctttcacataacatgttcacgggcatgcaacttatcaattcatatattctccctttcagtacatctatggaagtgcttgatcttagtttcaatagattttctgggcgggtccctatgccaagctcatcaggagaagtcttggaatattccaacaatatgttctcttcccttgtgccaaactggactttgtatcttagggacactatttattttagcatatccaaaaataatataaacgatcaactacctccctcaatatgtgatgcaattctggacgttcttgatctatcaaacaacaacttttatggcccaattccatcttgtatcatagaaaatatgacacacacaattttgaacttgaggggcaacaattttaatgggacattgcctaccgacataatgaccacatgtgatctacaggtgctagatttacatggtaacaagattgaagggcggcttccgaggggcctttctaagtgctttcacttggagattttggacatcagtagcaacagaatgctgatacttttccttcttggttga

SEQ ID NO: 32667 - DNA, 534 bp, Zea mays
  Peptide Sequence Number=SeqID_74446
atggcctctccccccatagatgggagggcgccctttcagcaagcacgtggaaaccttgtatccctgcggatactgaatttgtcgcgcaatgccttccccggaaagattccccctcaccttggtagcatgcctgatctagaagcactagacctctcctgcaaccaactctttggagagattccgcaagagctgcccgatctcacctttcttgagatcctgaacctgtcaaacacccacttggtagggaggataccacagtcacatcagttctctacatttggcagcagttcgtttggagggaatcctgggctgtgcggacccccgctatcagaattgccatgtggtgcttccccatacactccaagcgctcaacgtgtgcctagatcgtcgcctcattgtgtcgatgttgtcttgtttctcttcactgggcttggctttggtgttggatttgcagctgctattctggtgaaatggaatcgggtcggccgatggttctgcaagagctttgtgtggttgatccccattggaaggtga

SEQ ID NO: 32668 - DNA, 1431 bp, Zea mays
  Peptide Sequence Number=SeqID_74447
atggagtccgatcgtgagaaacaacagtctcatggcaagaaacaaggtgaccatggtagcaagatgcatgattctgatggcaataaaaatgtgtcagatgaaaagagtcaagagtctggtggtaaggaacacaaatccaatataaagaaacatgaatcacgtagaaagagcgcggcgccggcccagccacgccggaagaagtcgccgcgtgaggtcagtgtccccgttgctgccgcctctaacccgaagcctaggccgctgccggtgcataacaaggagaatcaggcggaggggaaagtagcagaggagggggcagcaactgaggagggggagaagtaccgggcggaaccggaaatcttgccgctgccgccggccatggcgaagctgggcccggggcaggggctcgggtgcgaggcggcggaggggtcgctcgtgcccagccggaagcgggagtacaagccctgcggcaagcacactgaggggaagcgcccgctatatgctatcgggttcaacttcatggacgcgcgctactacgacgtcttcgccaccgtcggcggcaaccgcgtgacaacttaccgctgccttgagaatggtagtttcgctcttctacaagcttacgttgatgaggataaggatgagtcgttctatactctaagctgggctcgtgaccatgttgatggctcaccactgctggtggcagcaggaagcaatgggatcattcgggtcatcaattgtgctacagaaaagttagctaagagctttgttggccatggcgactcaataaatgagataagaactcaaccgttgaagccttcgctcatcatttctgcaagcaaggatgaatctgttaggctatggaatgtccatacagggatctgtatcttgatatttgctggagctggaggtcatcgcaatgaagtattgagtgttgacttccatcctagtgatattgaacgttttgcaagttgtggcatggacaacactgtgaaaatctggtcaatgaaagaattttggctatatgttgacaaatcatattcatggactgaccttccatcaaagtttccaacaaaatatgtccagtttccagtcttgattgctgcagtacactctaactatgttgattgtacaagatggcttggtgacttcatcctatcaaagagtgttgacaatgaaattgtgctttgggaaccgaagacaaaagaacagagtcctggggaggaaaagttgagtgctctaatacccaccatcaactacttcaaacaggcaaccgtgaaggcaaaatctacgtgtgggaagctgtataatcagcagtgtaaatcgccgataagacaaactgcagtgtccttcgatggaagcacaatccttggagctggtgaagacggcaccatctggcggtgggatgaagtggaccatccgagctccagaaactga

SEQ ID NO: 32669 - DNA, 1050 bp, Zea mays
  Peptide Sequence Number=SeqID_74448
atgcggtggatgtgccaaggcatgtggcgcaaggccgtgaagcggctatctccggtgaactcatccgaagcaaccgtgactagctcagagcgtggcagaggctcgggcaaagtggccgaggtcagtgggttcgggcgaagcgcggtcaagagcaggagctcgggcggcacggagcgcgggcgtagaagctcgggtgagacggagcgcgagcgcaagctcgagcgaagcgaggcacgagcaaggtctcggacgaggcggatgcgagtgcgggctcgggcgaaacgcgaccgaggcagcgggctcaggggctcgggcgagacgggcgcgaccaagagcagcaggcttggtcaagacggagcacgaccgagatcagcgggcttgggcgagggcgagatggtggccgaggatatggagcccggattcttatatccccatggtcatgccatgtcaacggtgatgcctctagccataggtgtaggcagctccgacaacatggcctcctctcctctcgaaggcatggccaccctcatcggtgaaacaaggtcaatgacctcattcatcggtgacgtagtcacttccaccacagacacctccaccgaggccgccctgaccacttcatccgccaacattggaaatgtcagtacctccattgccaaaggtgcaaccgtaggtgtagaagatggggtcagcacctccacctcaatgtttggagtcgtagcaaatccttggcatgacaggggctccaacctcgaggatgaaggcagaggggttgagaccttcagtacatgtattgccataagagttagagtcaccgagtgggtcggaacctcaggcatcaagaccaccataggcactagggctgtcgtgcatgccagagcctcgagcactagggttgtcgtgaaagttggggtttttgcatgggttaatacttcaggtatcaaggacatcgagggaggagtcggacacctcgaccttggagttgtcatgcgctcttgtctcgatgccatcgaggaagcgcccaagcgctcccacctcagaactgttgtatga

SEQ ID NO: 32670 - DNA, 855 bp, Zea mays
  Peptide Sequence Number=SeqID_74449
atggcttctatcagaagggctttactactcttccttgctcttcttgctcagctgctgcacataccaccaccaataccactgtccagcgcccaccatactcacgctgataattacctcaaatcagctgatggtcacctccccgttgttccgtttctttgccgtccagaccaagcaaagagtctcctccagctgaagaagtcattatcctttgttgattccaccaccacgctttcgtcatggcgagatggtaccgactgctgcctctgggaaggtgttggctgtgacgcctcctcgtctggagatgtcaccgttcttgacctcaacaatcgtcgcttgttcagtcattatggcttggaccctgcagtcttcagcctcacatccctccgtcgccttgacctcagcatgaatgatttctctagaggtgacgacgacgtacagccgttgcctgacaacataacagctactacgccggcaggattcgagaggttttctttgctaacgcatctaaacctttcttatgcgggcttgcgtggtccaatacctgctggaatcggtaaactcgtgaaccttgtctctttggatctttcgagttacttttcaactgatgaagatggtgtaccggatgatctgtggactgtggggccaattccagctgcaattggcaagctcactagcctcgaaattttggacattgaagatgggttttcagggccaataccagctacaattggcaatcttagtcacttgaaccgttctaatttttctggacgcataccgggttcaatggcaaatttgactcagttaacagagatgattcttccatataattctctaaatggtaacagtacttactag

SEQ ID NO: 32671 - DNA, 456 bp, Zea mays
  Peptide Sequence Number=SeqID_74450
atggaagtgattgacacgggaactcctctcagtgttccagtcggtggagctactctcggacgaatttttaacgttcttggggagcctattgacaatttgggtcctgtggatactagtgcaacatttcctattcatagatctgcgcctgcctttatcgagttagatacgaaattatctatctttgaaacaggatcggaagtatccgccttattaggcagaatgccctccgcagtgggttatcaacctacccttagtacagaaatgggttctttgcaagaaagaattacttctaccaaaaagggatctataacttcgatccaagcagtttatgtacctgcagacgatttgaccgaccctgctcctgccacaacatttgcacatttggacgctactaccgtactttccagaggattagcttccaagggtatttatcccgcagtagatcctttagattaa

SEQ ID NO: 32672 - DNA, 327 bp, Zea mays
  Peptide Sequence Number=SeqID_74451
atgcaatgctctgaacacgaaagtttgcagttcagccctcttctcccatgcagagtcgcaggcagcgcctcggataaaagcacggacgagccacatgcagggaaacttgcacgtgtggttctggccggggaccccgccgcacctgagcccgcaactgctgcctctactccgcctacttcttgtgccgacttcgccagcctcgcggggtaccgatttcctcctgctttgtcggtcaaccccgggaacgcgtaccgccttgccaatgaacatggggatgaacttcctgaaccttggaatgacatgtacttgaaaaagtactacgcctga

SEQ ID NO: 32673 - DNA, 366 bp, Zea mays
  Peptide Sequence Number=SeqID_74452
atgaagaagaagagcaagagagatttagagatgaagcacaaaaccgcagctctcaagctcactcaaagattcctctccaaagatttgaaatgggagaggcaagagatgtgtgtgagggagagggaggcctggcagcctgtctgccagtctgactggcagactgacgcgcagactgaccgcagactggtcaaagttgaccaaaaccagttgaaccgcccagggggggcggttgaaccgtccctgatagctcctggcgacctgtttgccagtctgactggcagactgcagatcagaggtcagaggggtcagagaccagctgaactgcccctcaggaccagttcaaccggtcttgaccagagagtttag

SEQ ID NO: 32674 - DNA, 360 bp, Zea mays
  Peptide Sequence Number=SeqID_74453
atgaagaagaagagcaagagagatttagagatgaagcacaaaaccgcagctctcaagctcactcaaagatttctctccaaagatttgaaatgggagaggcaagagatgtgtgagagagggagggaggcctggcagcctgtctgccagtctgactggcagactgacgcgcagactgaccgcagactggtcaaagttgaccaaaaccggttgaaccgcccagggggggcggttgaaccgcccctgacagctcctggcgacctgtttgccagtctgactggcagactgcagatcagaggtcagaggggtcagagaccagctgaactgcccctcaggaccagttcaaccggtcttgaccagtga

SEQ ID NO: 32675 - DNA, 366 bp, Zea mays
  Peptide Sequence Number=SeqID_74454
atgaagaagaagagcaagagagatttagagatgaagcacaaaaccgcagctctcaagctcactcaaagatttctctccaaagatttgaaatgggagaggcaagagatgtgtgagagagagagggaggcctggcagcctgtctgccagtctgactggcagactgacgcgcagactgaccgcagactggtcaaagttgaccaaaaccagttgaaccgcccagggggggcggttgaaccgcccctgacagctcctggcgacctgtttgccagtctgactggcagactgcagatcagaggtcagaggggtcagagaccagctgaactgcccctcaggaccagttcaaccggtcttgaccagagagtttag

SEQ ID NO: 32676 - DNA, 366 bp, Zea mays
  Peptide Sequence Number=SeqID_74455
atgaagaagaagagcaagagagatttagagatgaagcacaaaaccgtagctctcaagctcactcaaagatttctctccaaagatttgaaatgggagaggcaagagatgtgtgagagagagagggaggcctggcagcctgtctgccagtctgactggcagactgacgcgcagactgaccgcagactggtcaaagttgaccaaaaccagttgaaccgcccagggggggcggttgaaccgcccctgacagctcctggcgacctgtttgccagtctgactggcagactgcagatcagaggtcagaggggtcagagaccagctgaactgcccctcaggaccagttcaaccggtcttgaccagagagtttag

SEQ ID NO: 32677 - DNA, 366 bp, Zea mays
  Peptide Sequence Number=SeqID_74456
atgaagaagaagagcaagagagatttagagatgaagcacaaaactgcagctctcaagctcactcaaagatttctctccaaagatttgaaatgggagaggcaagagatgtgtgagagagagagggaggcctggcagcctgtctgccagtctgactggcagactgacgcgcagactgaccgcagactggtcaaagttgaccaaaaccagttgaaccgcccagggggggcggttgaaccgcccctgacagctcctggcgacctgtttgccagtctgactggcagactgcagatcagaggtcagaggggtcagagaccagctgaactgcccctcaggaccagttcaaccggtcttgaccagagagtttag

SEQ ID NO: 32678 - DNA, 360 bp, Zea mays
  Peptide Sequence Number=SeqID_74457
atgaagaagaagagcaagagagatttagagatgaagcacaaaaccgcagctctcaagctcactcaaagatttctctccaaagatttgaaatgggagaggcaagagatgtgtgagagagagagggaggcctggcagcctgtctgccagtctgactggcagactgacgcgcagactgaccgcagactggtcaaagttgaccaaaaccggttgaaccgcccagggggggcggttgaaccgcccctgacagctcctggcgacctgtttgccagtctgactggcagactgcagatcagaggtcagaggggtcagagaccagctgaactgcccctcaggaccagttcaaccggtcttgaccagtga

SEQ ID NO: 32679 - DNA, 432 bp, Zea mays
  Peptide Sequence Number=SeqID_74458
atggtgagagaacgaagaacacgaataagcacaatgaacaagaacacaaaagacacaagatttatcccgaggttcggccacaccaccaaggtgccctacttcctcgttgaggcgcccacaaagagccgggtctctttcaaccctaatcctccctttgccgaccacaaagggcggttgaacctcccctggcaggcctggcagcctgtctgccagtctgactggcagactgacgcgcagactgaccgcagactggtcaaagttgaccaaaaccggttgaaccgcctagggggggcggttgaaccgcccctgacagctcctggcgacctgtttgccagtctgactggcagactgcagatcagaggtcagaggggtcagagaccagctgaactgcccctcaggaccagttcaactggtcttgaccagagagtttag

SEQ ID NO: 32680 - DNA, 360 bp, Zea mays
  Peptide Sequence Number=SeqID_74459
atgaagaagaagagcaagagagatttagagatgaagcacaaaaccgcagccctcaagctcactcaaagatttctctccaaagatttgaaatgggagaggcaagagatgtgtgtgagagagagggaggcctggcagcctgtctgccagtctgactggcagactgacgcgcagactgaccgcagactggtcaaagttgaccaaaaccggttgaaccgcccagggggggcggttgaaccgcccctgacagctcctggcgacctgtttgccagtctgactggcagactgcagatcagaggtcagaggggtcagagaccagctgaacttcccctcaggaccagttcaactggtcttgaccagtga

SEQ ID NO: 32681 - DNA, 360 bp, Zea mays
  Peptide Sequence Number=SeqID_74460
atgaagaagaagagcaagagagatttagagatgaagcacaaaaccgcagctctcaagctcactcaaagatttctctccaaagatttgaaatgggagaggcaagagatgtgtgtgagagagagggaggcctggcagcctgtctgccagtctgactggcagactgacgcgcagactgaccgcagactggtcaaagttgaccaaaaccggttgaaccgcccagggggggcggttgaaccgcccctgacagctcctggcgacctgtttgccagtctgactggcagactgcagatcagaggtcagaggggtcagagaccagctgaactgcccctcaggaccagttcaactggtcttgaccagtga

SEQ ID NO: 32682 - DNA, 498 bp, Zea mays
  Peptide Sequence Number=SeqID_74461
atgagcaagaacataagagacacaagatttatcccgaggttcggtcacaccaccaaggtgccctacttcctcgttgaggcgcccacaaagagccgggtctctttcaaccctaatcctccctttgccgaccacaaagggcggttgaaccgcccctggcaggcctggcagcctgtctgccagtctgactggcagactgacgcgcagactgaccgcagactggtcaaagttgaccaaaaccggttgaaccgcccagggggggcggttgaaccgcccctgacagctcctgacgacctgtttgccagtctgactggcagactgcagatcagaggtcagaggggtcagagaccagctgaactgcccctcaggaccagttcaaccggtcttgaccattcagctcagctgcagctgaaaaagctcaactcagctgaagttaagttcagctggaaagctcagctgcagttgaagaagttcagctgcttttcagcaagaacactctag

SEQ ID NO: 32683 - DNA, 459 bp, Zea mays
  Peptide Sequence Number=SeqID_74462
atgaagaagaagagcaagagagatttagagatgaagcacaaaaccgcagctctcaagctcactcaaagatttctctccaaagatttgaaatgggagaggcaagagatgtgtgagagagagagtgaggtgtttcttgggttagaaatggagttcaaatcgtgctccctgctatgggggcggttgaacctccccccagggcggttgaacctcccctggcaggcctggcagcctgtctgccagtctgactggcagactgacgcgcagactgaccgcagactggtcaaagttgaccaaaaccggttgaaccgcccagggggggcggttgaaccgcccctgacagctcctggcgacctgtttgccagtctgactggcagactgcagatcagaggtcagaggggtcagagaccagctgaactgcccctcaggaccagttcaactggtcttgaccagagagtttag

SEQ ID NO: 32684 - DNA, 327 bp, Zea mays
  Peptide Sequence Number=SeqID_74463
atgggagaggcaagagatgtgtgtgagagagagggaggtgtttcttgggttagaaatggagttcaaatcgtgctcactactttggggagagaggcctggcagcctgtctgccagtctgactggcagactgacgcgcagactgaccgcagactggtcaaagttgaccaaaaccggttgaaccgcccagggggggcggttgaaccgcccctgacagctcctggcgacctgtttgccagtctgactggcagaatgcagatcagaggtcagaggggtcagagaccagctgaactgcccctcaggaccagttcaactggtcttgaccagtga

SEQ ID NO: 32685 - DNA, 333 bp, Zea mays
  Peptide Sequence Number=SeqID_74464
atgggagaggcaagagatgtgtgtgagagagagggaggtgtttcttgggttagaaatggagttcaaatcgtgctcactactatggggagagaggcctggcagcctgtctgccagtctgactggcagactgacgcgcagactgaccgcagactggtcaaagttgaccaaaaccggttgaaccgcccagggggggcggttgaaccgcccctgacagctcctggcgacctgtttgccagtctgactggcagactgcagatcagaggtcagaggggtcagagaccagctgaactgcccctcaggaccagttcaactggtcttgaccagagagtttag

SEQ ID NO: 32686 - DNA, 423 bp, Zea mays
  Peptide Sequence Number=SeqID_74465
atgaagaagaagagcaagagagatttagagatgaagcacaaaaaccgcagctctcaagctcactcaaagattcctctccaaagatttgaaatgggagaggcaagagatgtgtgtgagagagagggaggtgtttcttgggttagaaatggagttcaaatcgtgctcactgctttggggagagaggcctggcagcctgtctgccagtctgactggcagactgacgcgcagactgaccgcagactggtcaaagttgaccaaaaccggttgaaccgcccagggggggcggttgaaccgcccctgacagctcctggcgacctgtttgccagtctgactggcagactacagatcagaggtcagaggggtcagagaccagctgaactgcccctcaggaccagttcaactggtcttgaccagagagtttag

SEQ ID NO: 32687 - DNA, 261 bp, Zea mays
  Peptide Sequence Number=SeqID_74466
atggagcacaaaaaccgcagctctcaagctcactcaaagattcctctccaaagatttgaaatgggagaggcaagagatgtgtgtgagggagagggaggtgtttcttgggttagaaatggagttcaaatcgtgctcactcctttggggagagaggcctggcagcctgtctgccagtctgactggcagactgacgcgcagactgaccgcagactggtcaaagttgaccaaaaccagttgaaccgcccaggggggggcggttga

SEQ ID NO: 32688 - DNA, 387 bp, Zea mays
  Peptide Sequence Number=SeqID_74467
atggagcacaaaaaccgtagctctcaagctcactcaaagattcctctccaaagatttgaaatgggagaggcaagagatgtgtgtgagggagagggaggtgtttcttgggttagaaatggagttcaaatcgtgctcactgctttggggagagaggcctggcagcctgtctgccagtctgactggcagactgacgcgcagactgaccgtagactggtcaaagttgaccaacaccggttgaaccgcccagggggggcggttgaaccgcccctgacagctcctggcgacctgtttgccagtctgactggcagactgcagatcagaggtcagaggggtcagagaccagctgaactgcccctcaggaccagttcaaccggtcttgaccagtga

SEQ ID NO: 32689 - DNA, 336 bp, Zea mays
  Peptide Sequence Number=SeqID_74468
atggagcacaaaaaccgtagctctcaagctcactcaaagattcctctccaaagatttgaaatgggagaggcaagagatgtgtgtgagggagagggaggtgtttcttgggttagaaatggagttcaaatcgtgctcactgctgtgggatcagaggtcagaggggtcagagaccagctgaactgcccctcaggaccagttcaactggtcttgaccagagagtttaggagagaaaaccccagctcaactgcccggaggcaagttcagctggtgtatggtcaaagaggttcacagctgaagttgagttcagctgaagttgagaaagctcaactcagctga

SEQ ID NO: 32690 - DNA, 603 bp, Zea mays
  Peptide Sequence Number=SeqID_74469
atggtgagagaacgaagaacacgaataagcacaatgaacaagaacacaaaagacacaagatttatcccgaggttcggccacaccaccaaggtgccctacttcctcgttgaggcgcccacaaagagccgggtctctttcaaccctaatcctccctttgccgaccacaaagtaccaaaagctcgaatgaagaagagcaagagagatttagagatggagcacaaaaaccgcagctctcaagctcactcaaagattcctctccaaagatttgaaatgggagaggcaagagatgtgtgtgagggagagggaggtgtttcttgggttagaaatggagttcaaatcgtgctcactgctttggggagagaggcctggcagcctgtctgccagtctgactggcagactgacgcgcagactgaccgcagactggtcaaagttgaccaaaaccggttgaaccgcccagggggggcggttgaaccgcccctgacagctcctggcgacctgtttgccagtctgactggcagactgcggatcagaggtcagaggggtcagagaccagctgaactgcccctcaggaccagttcaactggtcttgaccagagagtttag

SEQ ID NO: 32691 - DNA, 270 bp, Zea mays
  Peptide Sequence Number=SeqID_74470
atggagcacaaaaaccgcagctctcaagctcactcaaagattcctctccaaagatttgaaatgggagaggcaagagatgtgtgtgagggagagggaggtgtttcttgggttagaaatggagttcaaatcgtgctcactgctgtggggagagaggcctggcagcctgtctgccagtctgactggcatactgacgcgcagactgacctgcagactggtcaagttgaccaagaccggttgaaccgcccaggggggcggttgaaccgcccctga

SEQ ID NO: 32692 - DNA, 246 bp, Zea mays
  Peptide Sequence Number=SeqID_74471
atggagcacaaaaaccgcagctctcaagctcactcaaagattcctctccaaagatttgaaatgggagaggcaagagatgtgtgtgagggagagggaggtgtttcttgggttagaaatggagttcaaatcgtgctcaccgctgtggggagagagctgaagaagatcaactcagctgaagtcaagttcagctggaaggctcagctgcagttgaagaagttcagctgcttttcagcaagaacactctag

SEQ ID NO: 32693 - DNA, 393 bp, Zea mays
  Peptide Sequence Number=SeqID_74472
atggagcacaaaaactgcagctctcaagctcactcaaagattcctctccaaagatttgaaatgggagaggcaagagatgtgtgtgagggagagggaggtgtttcttgggttagaaatggagttcaaatcgtgctcactactttggggagagaggcctggcagcctgtctgccagtctgactggcagactgacgcgcagactgaccgcagactggtcaaagttgaccaaaaccggttgaaccgcccagggggggcggttgaaccgcccctgacagctcctggcgacctgtttgccagtctgactggcagactgcagatcagaggtcagaggggtcagagaccagctgaactgcccctcaggaccagttcaaccggtcttgaccagagagtttag

SEQ ID NO: 32694 - DNA, 393 bp, Zea mays
  Peptide Sequence Number=SeqID_74473
atggagcacaaaaaccgcagctctcaagctcactcaaagattcctctccaaagatttgaaatgggagaggcaagagatgtgtgtgagggagagggaggtgtttcttgggttagaaatggagttcaaatcgtgctctctgctttggggagagaggcctggcagcctgtctgccagtctgactggcagactgacgcgcagactgaccgcagactggtcaaagttgaccaaaaccagttgaaccgcccagggggggcggttgaaccgcccctaacagctcctggcgacctgtttgccagtctgactggcagactgcagatcagaggtcagaggggtcagagaccagctgaactgcccctcaggaccagttcaaccggtcttgaccagagagtttag

SEQ ID NO: 32695 - DNA, 393 bp, Zea mays
  Peptide Sequence Number=SeqID_74474
atggagcacaaaaaccgcagctctcaagctcactcaaagattcctctccaaagatttgaaatgggagaggcaagagatgtgtgtgagggagagggaggtgtttcttgggttagaaatggagttcaaatcgtgctcactaccttggggagagaggcctggcagcctgtctgccagtctgactggcagactgacgcgcagactgaccgcagactggtcaaagttgaccaaaaccagttgaaccgcccagggggggcggttgaaccgcccctgacagctcctgacgacctgtttgccagtctgactggcagactgcagatcagaggtcagaggggtcagagaccagctgaactgcccctcaggaccagttcaaccggtcttgaccagagagtttag

SEQ ID NO: 32696 - DNA, 261 bp, Zea mays
  Peptide Sequence Number=SeqID_74475
atggagcacaaaaaccgcagctctcaagctcactcaaagattcctctccaaagatttgaaatgggagaggcaagagatgtgtgtgagggagagggaggtgtttcttgggttagaaatggagttcaaatcgtgctcactaccttggggagagaggcctggcagcctgtctgccagtctgactggcagactgacgcgcagactgaccgcagactggtcaaagttgaccaaaaccagttgaaccgcccaggggggggcggttga

SEQ ID NO: 32697 - DNA, 393 bp, Zea mays
  Peptide Sequence Number=SeqID_74476
atggagcacaaaaaccgcagctctcaagctcactcaaagattcctctccaaagatttgaaatgggagaggcaagagatgtgtgtgagcgagagggaggtgtttcttgggttagaaatggagttcaaatcgtgctcactgctttggggagagaggcctggcagcctgtctgccagtctgactggcagactgacgcgcagactgaccgcagactggtcaaagttgaccaaaaccggttgaaccgcccagggggggcggttgaaccgcccctgacagctcctggcgacctgtttgccagtctgactggcagactgcagatcagaggtcagaggggtcagagaccagctgaactgcccctcaggaccagttcaactggtcttgaccagagagtttag

SEQ ID NO: 32698 - DNA, 393 bp, Zea mays
  Peptide Sequence Number=SeqID_74477
atggagcacaaaaaccgcagctctcaagctcactcaaagatttctctccaaagatttgaaatgggagaggcaagagatgtgtgtgagagagagggaggtgtttcttgggttggaaatggagttcaaatcgtgctcactgctttggggagagaggcctggcagcctgtctgccagtctgactggcagactgacgcgcagactgaccgcagactggtcaaagttgaccaaaaccggttgaaccgcccagggggggcggttgaaccgcccctgacagctcctggcgacctgtttgccagtctgactggcagactgcagatcagaggtcagaggggtcagagaccagctgaactgcccctcaggaccagttcaactggtcttgaccagagagtttag

SEQ ID NO: 32699 - DNA, 222 bp, Zea mays
  Peptide Sequence Number=SeqID_74478
atggcgaacggggccaaaaacggattttcggggcacggccgcgaaaacgggcacgtgggatggggcacgggaccctcccgtggtccccctcgcaactccccgaagtcctgggagggggtctcctcggccgagccccgcaccccctcgcggcctagccgtggccggtcggcaccctaccgcgcccagctccggctggcgctgttggctgcctggccggccatg

SEQ ID NO: 32700 - DNA, 258 bp, Zea mays
  Peptide Sequence Number=SeqID_74479
atggcgaacgggccaaaaacggattttcggccatggccacgaaaaccggcacgtggaagggcacgtgactctcccgtggtccccccgcatgagacgtggaagttcgggtccacccgtgagggaaaacggaactccccgaagtcctgggagggggtctcctcggccgagccccgcaccccctcgcggcctagccgtggccggtcggcaccctaccgcgcccagctccggctggcgcttttggctgcctggccggtcgtg

SEQ ID NO: 32701 - DNA, 258 bp, Zea mays
  Peptide Sequence Number=SeqID_74480
atggcgaacgggccaaaaacggattttcgggcacggccgcgaaaacgggcacgtggatgggcacgggaccctcccgtggtccccccgcttgagacgtggaagttcgggtccacccgagagggaaaacggaactccccgaagtcctgggagggggtctcctcggccgagccccgcaccccctcgcggcctagccgtggccggtcggcaccctaccgcgcccagctccggctggcgctgttggctgcctggccggccatg

SEQ ID NO: 32702 - DNA, 270 bp, Zea mays
  Peptide Sequence Number=SeqID_74481
atggcgaacgggccaaaaacggattttcgggcacggccgcgaaaacgggcacgtggatgggcacgggaccctcccgtggtccccccgcgtgagacgtggaagttcgggtccacccgagagggaaaacggaactccccgaagtcctgggagggggtctcctcggccgagccccgcaccccctcgcgacctagccgtggccggtcggcaccctaccgcgcccagctccggctggcgctgttggctgcctggccggccatggttcggccgtga

SEQ ID NO: 32703 - DNA, 393 bp, Zea mays
  Peptide Sequence Number=SeqID_74482
atggcgaacgggccaaaaacggattttcggccacggccgcgaaaacgggcacgtggaagggcacgggaccctcccgtggtccccccgcgtgagacgtggaagttcgggtgcacccgacccccgctgccgtgcggccgactcccggcgcccgtgtcccatcgctcgtgcgggcatcccgtgcctgctgcgttgagaagtgcttgcgtgctgctacccgtcccacgggaagccgtgctcgatacacgttgccttcgtcgagctcaccccccggggtgcggctcgtcggctcgagagcgcccgcggcgtttgcctcgtgccgccgtcagcctatgggccggcggcaccgaggacacctcgctggcgctttttggtctcggatgtggctcacgctga

SEQ ID NO: 32704 - DNA, 571 bp, Zea mays
  Peptide Sequence Number=SeqID_74483
ggaaaatgccactgattttctgaaggcagaacttccccgaagtcctgagaggggggtctcctcggccaagccccgcaccccctcgcggcctagccgtggccggtcggcaccctaccgcgcccagctccggctggcgctgttggctgcctggccggccgtgcggctacgctggcgcatgagttgtcttggacccgtgactgcttggaggacccccgctgccgtgcggccgactcccggcgcccgtgtcccatcgctcgtgcgggcatcccgtgcctgctgcgttgagaagtgcttgcgtgctgctacccgtcccacgggaagccgtgctcgatacacgttgccttcgtcgagctcaccccccggggtgcggctcgtcggctcgagagcgcccgcggcgtttgcctcgtgccgccgtcagcctatggccggcggcaccgaggacacctcgctggcgcttttggtctcggatgtggctcacgctgaaggccggagacgcgttggcgtcacgcgcccaagaatcggtccgcccgaacgaacgacggccagcccggcacgacgcctccgcgcgtag

SEQ ID NO: 32705 - DNA, 540 bp, Zea mays
  Peptide Sequence Number=SeqID_74484
aactccccgaagtcctgggagggggtctcctcggccgagccccgcaccccctcgcggcctagccgtggccggtcggcaccctaccgcgcccagctccggctggcgctgttggctgcctggccggccgtgcggctacgctggcgcatgagttgtcttggacccgtgactgcttggaggacccccgctgccgtgcggccgactcccggcgcccgtgtcccatcgctcgtgcgggcatcccgtgcctgctgcgttgagaagtgcttgcgtgctgctacccgtcccacgggaagccgtgctcgatacacgttgccttcgtcgagctcaccccccggggtgcggctcgtcggctcgagagcgcccgcggcgtttgcctcgtgccgccgtcagcctatggccggcggcaccgaggacacctcgctggcgcttttggtctcggatgtggctcacgctgaaggccggagacgcgttggcgtcacgcgcccaagaatcggtccgcccgaacgaacgacggccagcccggcacgacgcctccgcgcgtag

SEQ ID NO: 32706 - DNA, 642 bp, Zea mays
  Peptide Sequence Number=SeqID_74485
atggcgaacgggccaaaaacggatttttcggccacggccgcgaaaacgggcacgtggaagggcacgggaccctcccgtggtccccccgcaactccccgaagtcctgggagggggtatgcccctcaggtctcctcggccgagccccgcaccccctcgcggcctagccgtggccggtcggcaccctaccgcgcccagctccggctggcgctgttggctgcctggccggccgtgcggctacgctggcgcatgagttgtcttggacccgtgactgcttggaggacccccgctgccgtgcggccgactcccggcgcccgtgtcccatcgctcgtgcgggcatcccgtgcctgctgcgttgagaagtgcttgcgtgctgctacccgtcccacgggaagccgtgctcgatacacgttgccttcgtcgagctcaccccccggggtgcggctcgtcggctcgagagcgcccgcggcgtttgcctcgtgccgccgtcagcctatggccggcggcaccgaggacacctcgctggcgcttttggtctcggatgtggctcacgctgaaggccggagacgcgttggcgtcacgcgcccaagaatcggtccgcccgaacgaacgacggccagcccggcacgacgcctccgcgcgtag

SEQ ID NO: 32707 - DNA, 669 bp, Zea mays
  Peptide Sequence Number=SeqID_74486
atggcgaacgggccaaaaacggattttcggccacggccgcgaaaacgggcacgtggaagggcacgggaccctcccgtggtccccccgcgtgagacgtggaagttcgggtgcacccgtgagggaaaacggaactccccgaagtcctgggagggggtctcctcggccgagccccgcaccccctcgcggcctagccgtggccggtcggcaccctaccgcgcccagctccggctggcgctgttggctgcctggccggccgtgcggctacgctggcgcatgagttgtcttggacccgtgactgcttggaggacccccgctgccgtgcggccgactcccggcgcccgtgtcccatcgctcgtgcgggcatcccgtgcctgctgcgttgagaagtgcttgcgtgctgctacccgtcccacgggaagccgtgctcgatacacgttgccttcgtcgagctcaccccccggggtgcggctcgtcggctcgagagcgcccgcggcgtttgcctcgtgccgccgtcagcctatggccggcggcaccgaggacacctcgctggcgcttttggtctcggatgtggctcacgctgaaggccggagacgcgttggcgtcacgcgcccaagaatcggtccgcccgaacgaacgacggccagcccggcacgacgcctccgcgcgtag

SEQ ID NO: 32708 - DNA, 192 bp, Zea mays
  Peptide Sequence Number=SeqID_74487
atgactctcggcaacggatatctcggctctcgcatcgatgaagaacgtagcaaaatgcgatacctgtacaatggatcaagcagtctcattagctgcgagaagcagacgattcgaatcgagttttatccttgcaagtggccgcacttgtacccaccatatctagaatgggagacccagtctcaggtcgcatga

SEQ ID NO: 32709 - DNA, 351 bp, Zea mays
  Peptide Sequence Number=SeqID_74488
atggccggccgcgcgccgggacgctgcaccgagaacaacaacttgatgtcgcccaccacgtgctgcgcccggcgcggttcgccggcagcccctgcttcggcccacctcgccgtgcggcgcggggggccagacgccatgtccatcgacccgcgaaggggtgttgggagtgaagtattggtatttcacttgcgcccggaggctcccacttatcctacacctctcaagtcatttcacaaagtcggactagagtcaagctcaacagggtcttctttccccgctgattccgccaacccgttcccttggctgtggattcgctggatagtagacagagacagtggggaatctcgttaa

SEQ ID NO: 32710 - DNA, 702 bp, Zea mays
  Peptide Sequence Number=SeqID_74489
atgaagaacgtagcaaaatgcgatacctggtgtgaattgcagaatcccgcgaaccatcgagtttttgaacgcaagttgcgcccgaagccttctggcggagggcacgtctgcctgggcgtcacgccaaaagacactcccaacacccccccgcggggcgagggacgtggcgtctggccccccgcgccgcacggcgaggtgggccgaagcaggggctgccggcgaaccgcgccgggcgcagcacgtggtgggcgacatcaagttgttgttctcggtgcagcgtcccggcgcgcggccggccattcggccctaaggacccatcgagcgaccgagcttgccctcggaccgcgaccccagggaagcggatgggggctggcgacgcgcaccggccgtatgcggaacggctcctgctggtccgccgatcggctcggggcgtggaccgttgtcgcccgcgccggcggccaaagcccgggggccctaggcgcccccggcagccgtcgtcggcgcggacggtatccgcgcgcctctggcgcgcccctcggggcgctgcgctgcaacggcctgcgagctccccatccgacccgtcttgaaacacggaccaaggagtctgacatgcgtgcgagtcgacgggttcagaaacctgagatgcgcaaggaagctgacgagcgggaggccctcacgggccgcaccgctggccgaccctga

SEQ ID NO: 32711 - DNA, 1455 bp, Zea mays
  Peptide Sequence Number=SeqID_74490
gcgtgctccaactcgaacccttcacagaagatcagggtcggccagcggtgcggcccgtgagggcctcccgctcgtcagcttccttgcgcatctcaggccgttgcagcgcagcgccccgaggggcgcgccagaggcgcgcggataccgtccgcgccgacgacggctgccgggggcgcctagggcccccgggctttggccgccggcgcgggcgacaacggtccacgccccgagccgatcggcggaccagcaggagccgttccgcatacggccggtgcgcgtcgccagcccccatccgcttccctcccggcaatttcaagcactctttgactctcttttcaaagtccttttcatctttccctcgcggtacttgttcgctatcggtctctcgcctgtatttagccttggacggagtttaccgcccgatttgggctgcattcccaaacaacccgactcgttgacggcgcctcgtggtgcgacagggtccgggccggacggggctctcaccctcccaggcgtccctttccagagaacttgggcccggtccgtcgctgaggacgcctctccagactacaattcgggcggcgaggccgcccgattctcaagctgggctgctcccggttcgctcgccgttactaggggaatcctcggccgaatggccggccgcgcgccgggacgctgcaccgagaacaacaacttgatgtcgcccaccacgtgctgcgcccggcgcggttcgccggcagcccctgcttcggcccacctcgccgtgcggcgcggggggccagacgccacgtccctcgccccgcgggggggtgttgggagtgtcttttggcgtgacgcccaggcagacgtgccctccgccagaaggcttcgggcgcaacttgcgttcaaaaactcgatggttcgcgggattctgcaattcacaccaggtatcgcattttgctacgttcttcatcgatgcgagagccgagatatccgttgccgagagtcgtgtcgattaaggtgtaaccgctgccctgggagcggaaggcgggccgaccgctccgcggggcaggaggtagtactggtgttccttggcgcccggggcgccgtgggttctttttcgcggcaccccccttccccgcgggaggttcgggggggcagcgtgccgggccggagcccggcggcacgggtgactcgttcgcggtctgttttgtttaagggtcacggcaatgatccttccgcagacgggccagcgccgggcctacgcgcggaggcgtcgtgccgggctggccgtcgttcgttcgggcggaccgattcttgggcgcgtgacgccaacgcgtctccggccttcagcgtgagccacatccgagaccaaaagcgccagcgaggtgtcctcggtgccgccggccataggctgacggcggcacgaggcaaacgccgcgggcgctctcgagccgacgagccgcaccccggggg

SEQ ID NO: 32712 - DNA, 1294 bp, Zea mays
  Peptide Sequence Number=SeqID_74491
atggcccacttggagctcccgattccgtggcacggctcaccgaagcagccgcgccgtcctacctatttaaagcgtgctccaactcgaacccttcacagaagatcagggtcggccagcggtgcggcccgtgagggcctcccgctcgtcagcttccttgcgcatctcaggccgttgcagcgcagcgccccgaggggcgcgccagaggcgcgcggataccgtccgcgccgacgacggctgccgggggcgcctagggcccccgggctttggccgccggcgcgggcgacaacggtccacgccccgagccgatcggcggaccagcaggagccgttccgcatacggccggtgcgcgtcgccagcccccatccgcttccctcccggcaatttcaagcactctttgactctcttttcaaagtccttttcatctttccctcgcggtacttgttcgctatcggtctctcgcctgtatttagccttggacggagtttaccgcccgatttgggctgcattcccaaacaacccgactcgttgacggcgcctcgtggtgcgacagggtccgggccggacggggctctcaccctcccaggcgtccctttccagagaacttgggcccggtccgtcgctgaggacgcctctccagactacaattcgggcggcgaggccgcccgattctcaagctgggctgctcccggttcgctcgccgttactaggggaatcctcggccgaatggccggccgcgcgccgggacgctgcaccgagaacaacaacttgatgtcgcccaccacgtgctgcgcccggcgcggttcgccggcagcccctgcttcggcccacctcgccgtgcggcgcggggggccagacgccacgtccctcgccccgcgggggggtgttgggagtgtcttttggcgtgacgcccaggcagacgtgccctccgccagaaggcttcgggcgcaacttgcgttcaaaaactcgatggttcgcgggattctgcaattcacaccaggtatcgcattttgctacgttcttcatcgatgcgagagccgagatatccgttgccgagagtcgtgtcgattaaggtgtaaccgctgccctgggagcggaaggcgggccgaccgctccgcggggcaggaggtagtactggtgttccttggcgcccggggcgccgtgggttctttttcgcggcaccccccttccccgcgggaggttcgggggggcagcgtgccgggccggagcccggcggcacgggtgactcgttcgcggtctgttttgtttaagggtcacggcaatgatccttccgcag

SEQ ID NO: 32713 - DNA, 859 bp, Zea mays
  Peptide Sequence Number=SeqID_74492
atggcccacttggagctcccgattccgtggcacggctcaccgaagcagccgcgccgtcctacctatttaaagcgtgctccaactcgaacccttcacagaagatcagggtcggccagcggtgcggcccgtgagggcctcccgctcgtcagcttccttgcgcatctcaggccgttgcagcgcagcgccccgaggggcgcgccagaggcgcgcggataccgtccgcgccgacgacggctgccgggggcgcctagggcccccgggctttggccgccggcgcgggcgacaacggtccacgccccgagccgatcggcggaccagcaggagccgttccgcatacggccggtgcgcgtcgccagcccccatccgcttccctcccggcaatttcaagcactctttgactctcttttcaaagtccttttcatctttccctcgcggtacttgttcgctatcggtctctcgcctgtatttagccttggacggagtttaccgcccgatttgggctgcattcccaaacaacccgactcgttgacggcgcctcgtggtgcgacagggtccgggccggacggggctctcaccctcccaggcgtccctttccagagaacttgggcccggtccgtcgctgaggacgcctctccagactacaattcgggcggcgaggccgcccgattctcaagctgggctgctcccgggccgaatggccggccgcgcgccgggacgctgcaccgagaacaacaacttgatgtcgcccaccacgtgctgcgcccggcgcggcagacgtgccctccgccagaaggcttcgggcgctacttgcgttcaaaaaactcgatggttcgcggggattctggcaatttcacaccag

SEQ ID NO: 32714 - DNA, 267 bp, Zea mays
  Peptide Sequence Number=SeqID_74493
atgaccgggaaaaagaccacggcttcctctgacggcggcactccaaagaaagccaaggtggtggtggaggatgaggaagagtgcaagaacgggcattctggatgtgcaaagtgctgcatcctcatggacgggagctattgttctgccttgtccatcgtggcgtacccagggcatcgaattgcgtgggatgcttcgctcaacgttccttatcttggttggatggtctatgaaaagagacatgtcgttgaactggttaaaatcctctaa

SEQ ID NO: 32715 - DNA, 324 bp, Zea mays
  Peptide Sequence Number=SeqID_74494
atgaccgggaaaaagaccatggcttcctctgacggcggcactccaaagaaagccaaggtggtggtggaggatgaggaagaggcggggttgcaggatgaggaagaggcgactgtgacactatccgtggagaaggacgcgctgaagaacgggcattctggatgtgcaaagtgctgcatccgcacggtcgggagctattgttctgccttgtccatcgtggtgtacccagggcatcgaattgcgtgggatgcttcgctcaacgttccttatcttggttggatggtctatgaaaagagacatgtcattgaactggttaaaatcctctaa

SEQ ID NO: 32716 - DNA, 324 bp, Zea mays
  Peptide Sequence Number=SeqID_74495
atgaccgggaaaaagaccacgacttcctctaacggcggcactccaaagaaagccaaggtggtggtggaggatgaggaagaggcggggttggaggatgaggaagaggcgactgtgacactatccatggagaaggacgcgttgaaggatgggcattctggatgtgcaaagtgctgcatccgcacagacgggagctattgttctgccttgtccatcatggcgtacccagggcatcgaattgcgtgggatgcttcgctcaacgttccttatcttggttggatggtctatgaaaagagacatgtcgttgaactggttaaaatcctctaa

SEQ ID NO: 32717 - DNA, 324 bp, Zea mays
  Peptide Sequence Number=SeqID_74496
atgaccaggaaaaagaccacggcttcctctgacgtcggcactccaaagaaagccaaggtggtggtggaggatgaggaagaggcagggttggaggatgaggaagaggcgactgtgacactatccgtggagaaggacgcgctgaagaacgggcattctggatgtgcaaagtgctgcatccgcacggacgggagctattgttctgccttgtccatcgtggcgtacccagggcatcgaattgcgtgggatgcttcgctcaacgttccttatcttggttggatggtctatgaaaagaaacatgtcgttgaactggttaaaaacctctaa

SEQ ID NO: 32718 - DNA, 324 bp, Zea mays
  Peptide Sequence Number=SeqID_74497
atgaccgggaaaaagaccacggcttcctctgacggcggcactccaaagaaagccaaggtggtggtggaggatgaggaagaggcggggttggaggatgaggaagaggcgactgtgacactatccgtggagaaggacgcgctgaagaacgggcattctggatgtgcaaagtgctgcatccgcacgaacgggagctattgttctgccttgtccatcgtggcgtacccagggcatcgaattgcgtgggatgcttcgctcaacgttccttatcttggttggatggtctatgaaaagagacatgtcgttgaactggttaaaatcctctaa

SEQ ID NO: 32719 - DNA, 324 bp, Zea mays
  Peptide Sequence Number=SeqID_74498
atgatcgggaaaaagaccacgacttcctctgacggcggcactccaaagaaagccaaggtggtggtggaggatgaggaagaggcggggttggaggatgaggaagaggcgactgtgacactatccgtggagaaggacacgctgaagaacgagcattctggatgtgcaaagtgctgcatccgcacggacgggagctattgttctgccttgtccatcgtggcgtacccagggcatcgaattgcgtgggatgcttcgctcaacgttccttatcttggttggatggtctatgaaaagagacatgtcgttgaactggttaaaatcctctaa

SEQ ID NO: 32720 - DNA, 324 bp, Zea mays
  Peptide Sequence Number=SeqID_74499
atgaccgggaaaaagaccacggcttcctctgacggcgacactccaaagaaagccaaggtggtggtggaggatgaggaagaggcggggttggaggatgaggaagaggcgactgtgacactatccgtggagaaggacgcgctgaagaacgggcattctggatgtgcaaagtgctgcatccgcactgacgggagctattgttctgccttgtccatcgtggcatacccagggcatcgaattgcgtgggatgcttcgctcaatgttccttatcttggttggatggtctatgaaaagagacatgtcgttgaactggttaaaatcctctaa

SEQ ID NO: 32721 - DNA, 471 bp, Zea mays
  Peptide Sequence Number=SeqID_74500
atggaaaggagcttgggcaccgctcaccgaagatcgaaatccacagcgccatggcgtggtcggtccgggtttgtgcgttatcctgatggaggaaggggtcgcggggcattgctttatagccaggggagcgcggatttcggagacccgatcccgccggcaggttcggactccatttgcggtgtgccggtgaccacgcgatattggcggattctgttgaaacgagtcctaagcaaggagatggttatgacagcctggccccacctgccggtgtctcgtgataacacaggcacacgcagacgccggatggagccgccgaattgcgggccccacgccacagtgagcagggccgagcgcgcctggtgggctggtgtatatgtagatgttattgtggacattactccacaacccatcacaatcaatcaaagatccaaatcagacaagtatcataagaacaaacattcaagcacatag

SEQ ID NO: 32722 - DNA, 330 bp, Zea mays
  Peptide Sequence Number=SeqID_74501
atgaggatcacggtggaatctgttcaggtcgatctcttccttcttgagctttggtgtctccatccgggtttgggacaggaggttaagatagatctacaggttaaccttcttattgggtctgatttagggaccatcggtcgtggtgttagatgtcattatctgagttgggataacaattgcgggtacatgggatcatggttgttacactataatgagataagcaaagtggttgggatagatgtaattgtggatattacttcacaacccatcacactcaatcaaagatccaaatcagacaagtatcataagaacaaacattcaagtgcatag

SEQ ID NO: 32723 - DNA, 615 bp, Zea mays
  Peptide Sequence Number=SeqID_74502
atggggaagaagcccaaggcggagaagcggctcctagcgggaaaatatgttggcaaagagagcgatagtgataagaggggaggaaaaagggcaagaagggtgcacctagacaccaatatctcctccaagcccaacacggagaagaagcctaacggggagggcaacaaggagaaggccgctctagagatacttacgggcatgtttgttacttattgtgaagtaaagaggactaagtgtgttgctgaggaagtggagggcaaggcccgcacacgtgtcagcaccggacccctgcacacaccagggtccttctcgttccgggaccctgctggagttcggacctacccggaggctctagacttgtatgtatacaggggtccggtgtccttctgtggtggtccggacttactggggtgtggtgtctttccttgccacgtggcgccctttggcctgcccatccggtggggtcaggcgcggtcctccgcgtggctaggagacgtcgcatgggcgctgtgtcttcatgttgtaggagagggcggcggtgcagtttctttgcacacggtaaccggcgtgccagttacatggcgtgtgggcctgggccctgagttggaccgctag

SEQ ID NO: 32724 - DNA, 729 bp, Zea mays
  Peptide Sequence Number=SeqID_74503
atgggggccaggccccacatgtcatacagaccaaccctaagaaggagcgtgcaactgccctgtggttacgtgcccctccattttcggggcaaccagcggtcaggaaggcgaaccaccgcacatagggcatgcaactaccccacggttaggcgccccttcgtcttcgccgcacctagcgggcaaagaggcgaatcaccgtgcaagaagcgtacaaccgtcccacggctgtgcgctccctcagctccaccgcaactagcggtccaactcagggcccaggcccacacgccatgtaactggcacgccggttaccgtgtgcaaagaaactgcaccgccgcctgcgctaatgccacgtcttctcgggactgtcacgggattctgaaaaggctcgcatcctcccctgaggcgggaccgggggccactgtcggtaccctaaatcaggggtaccctctcctacaacatgaagacacagcgcccatgcgacgtctcctagccacgcggaggaccgcgcctgaccccaccggatgggcaggccaaagggcgccacgtggcaaggaaagacaccacaccccaattcaccagatcggtatggcccttttttcatggggcaattccctgtgtgccattgaaaattatactcatcccttgtgtggcactggtcccacatgtaatacacacacaaaatccctatatgtcactcaatggcacacaagcgatgagtataaattctga

SEQ ID NO: 32725 - DNA, 258 bp, Zea mays
  Peptide Sequence Number=SeqID_74504
atgcgcgccgcccggccccgcctcggccccggccgccctcgtcccggccccggctgcaccgccccggtcgtgccccccgccccgcccgtgcgccgtgctcgcccgcctgccccggtgtgccttgctcgcgtcgtgacggccccggcgcggcctcgagctcggcccagcgtgcctatggcgcgcggccttgagctcggccagcacgcggccccgacgtgcgcacgggaactcaatttagaaattggttacgttaggtaa

SEQ ID NO: 32726 - DNA, 777 bp, Zea mays
  Peptide Sequence Number=SeqID_74505
atggccccggcgcggcctcgagctcggcccagcgtgcctatggcgcgcggccttgagctcggccagcgcgcggcccccgacgagatagagtctgtgaggagctgctcccctgtgcttcccttggaggcgccccctgcaccaccactgggcgccccagcctctggagtagctgctggaggagacccagacgacggaggtggcgacgacagctcgagccacgacaccgacttttctgctgaccaggagccggaaggatgggttgctcgacccatcactcgcgacgctgctcgcgggtgtcacttccacgatgcgctcgacaccctgctacgtcgggcacttgaccgacagcactattctatctctgagcgggactcagctgaggtgaccatgcaagatgtcgcacggcgtgcacttttgcactactgctcagtgctcggtggggtagctgacggtctcaacctgaagtattacccccgccgtccatctggcagcacaggaggcgtgattgtctcacctgttggtgaggacaatcctaggttgagcagcacagtcaacctagccaccgtgctaaacacggagctggaccatgcgctagacgagctgagtagggctcgtgctgagatcgccctactgcgggctgagcgcgcggaacgtcgtcacctggatgataattcccccgctcccgttgggactcagcacccgtaccgctcacctcggcgtggacaccagtcttatggcaatcccgactgcaagaccaagataaatctagaaccatag

SEQ ID NO: 32727 - DNA, 750 bp, Zea mays
  Peptide Sequence Number=SeqID_74506
atgtctggacattggatgggcatcgtctcctcctccgacgaagatgacaagaacgacgacggcagcagtgacgaggacagcgacggcagtggcgacaatgacggcaatgatgatggcggggcaagccaatgcgatgagatgcctcccagcaagcgtcgtcggctacagcatggaaccgcttgtgtaaatcatttctatgggcggctagattttggaaccgcctgtgaaaatcatttggtagaagcacttccgtctgtagctgagttaccacagcccactgaagtccgctttcgggtgacttctcgcattcgacatgaccctccttcgtccccaaccctaacccgtcgttccggtgtctccgccgtcactttggactctccagctccaccatcgtccacccatcgccatgatatccgagagaaatccagtttcatcttcggtctaaagatccactgcaagaaagcaaactccatagccgataaggcaattggaaggatgcaagagattgcagacaagatattttctgtagcgagggaaacaatccatcctggacgagggctgacctcatttgaggctaccaaactccgtgtagcattggaggacattgcttgcaagatggagcaggactctcttgtgttgcaagagcatttggacaaggtcaacaacgaaaccaaccatgttcacaccgactatgaaccctcagacttgtcctcaccaatccctactgaagacgacctcgatgaagactag

SEQ ID NO: 32728 - DNA, 802 bp, Zea mays
  Peptide Sequence Number=SeqID_74507
atggagcaggactctcttgtgttgcaagagcatttggacaaggtcaacaacgttaccaaccatgttcacgccgactatgaaccctcagacttgtcctcaccaatccctgctgaagacgacctcggtgaagactgggattttgctgagcactttaaaaagttttggggtgttgaatacgaattagatcagatgccttcctttagtgataatgaggcaatgccagggtgtattatgttcaaaactgccccgcttgaaaatgtggacaaccttaagataatgtttggacccattgtgtgcaccaatgagacaacccttgttcctggagttgaggatgctaattcatcatctgatggccacgaagaagacatttttggtgcgggtgaaaacagcacacctaaccccagctctacagttaagggaaagcgtaaggttttgcatgactctcctaaacctaagaagaaaaaggatatgagggatgaatacatgaaacagattgtcgatgcttttgagtccaggggctcttacaagtccataacctcatctgaaaatgaccccgtgcgtaaagaggttgctgcccaattggaacaagtgatcaaagatggtgcagaggaaggaagcgacttacatttctttgcaactcatcttttaatggagaaacattatagagatatgtttcagcctgataccgaccatagtgatgatgatgatagggatcataaggaattattagtggcaacattgactttggatatttggggcagctcgtcaagtagggtacctagaagaaacatggtcgaaacag

SEQ ID NO: 32729 - DNA, 824 bp, Zea mays
  Peptide Sequence Number=SeqID_74508
gtgaggagttcagcctcgagtgccctggtgcaccggacactgtccggtggcacaccggacagtccggttcgacagccgcctcagagcattcgggctccgcgcccactactgatcagaggctggaccccgaagggttcgacagccgcctcagagcacgcagagcgagggatgactctaggtacgtccgatacatggccgaggctcgggctacgctcccgagggatgctctcgcaaacccgactccggccaaaccgttgacagcgtcaacataccagcccgagaacttggaacctgactatgcacccgggctacggccagacaacagcgccgcctgccccgctccgactgctgtgccactcgacagagtgaggctgacagcagccaagtctagcctcgggcgccataggaagctccgcctcacccgacccagggctcggactcagcctcgaccccgaaagacggactccgcctcgctcgacccagggctcggactcagcctcgaccccaaaagacggactccgcctcgcccgacccagggctcggactcagcctcgaccccggaagacggtctccgcctcgcccgacccagggctcggactcagcctcgaccccggaagatggactccgcctcgcccgaccccagggctcggactcagcctcggcctcggaagacggtctctgcctcgcccgacccagggttcggactcaacctcgacatcgggagacgaactccgcctcgctcgaccctagggcccagactcgacctcgacctcggaggagcctccgcctcgcccaacctcgggctcggacccgccacgtcatag

SEQ ID NO: 32730 - DNA, 1257 bp, Zea mays
  Peptide Sequence Number=SeqID_74509
atggaggttcgctgccaaaccaacttttgccagaatgaagatggtttccccaagttgttgagagcatgcacagttcgccttggaatcaggagccagccatatccacaccatgtggaatggagtgtcactgttgctgggcacagattcaaagacacctgccaagtcatcgcccgcaaggcattgagggccctgtgtcaaatttatgaagaagaagtggccgacaccctgctcagattctttccgccctttcagagaaaccgtcccgtttggatggccaggatgcgtgcattggaagggcagcagtttcttgaggacgacccaacagtcctgtacctcactgcatacctactcaccctggatgcgcaatatgatttcttggctcggcaccaccgtcagatgattgcccgagcagaagatgcagagaagcgcaaccgtcaactccatgtggatctcaccacagctcaagcccatgtagctgccttggaaagtcgtgaagtcattgttgtggaagccctaaagcaagctaaggatgagcacgtccagaagttgatggaggcctacttggtaacccatgaccaacgtagagccctgcagatccaagagcccgcttcatccaaccctattcaacccatcagagctgaagacccccagattcttgaaggtcacccggtctctatcagaggagagaagaaggcttgggaactcccagaaggagccatagtcttggaaggaattccagtcttccctcaggctatgaataagcaagagcaccccgagtcctcccaagattccctgccagagttgtttgagcccctcaccatgaagaagattccagcaccgtcccgtgaggtcaaagaagaagctgcaagcaccccgccagcaccatcgccctctgaggagctacaagagccagtccagcttgaagaagagttcgaccgcgtcttgccatctcagtcgccgccagaagaagtcatcaacatcagctccctcttgacccatccagcctgctcaagcagcaacaacagaagaagaccccgtaacacccttgttatgaggtacttcaaggagttcaaatccccaagattcaagagtactaccctcattcattttaagtggggtagtgttccagtaaggttcctgctatggagaaaaagaaggcctatagcaagcttgtggaggaccagatcaccgaagcttataagtttctggatgagaagtggtcacccaagttttgttgatgaagcaccagaagactaa

SEQ ID NO: 32731 - DNA, 237 bp, Zea mays
  Peptide Sequence Number=SeqID_74510
atgagaagtggtcacccaagttttgttgatgaagcaccagaagaacaatcaaggaaggaatccatgtgggagttcgcaagagaaagtgagactcgggtgcgtagctcggagacaactgatcaagccaaggacggaggcaagaagagcttcgaggtaccaagtgcacgggagaaggtcaagaaggctgaggaacccaaagccaagggtgaagaagaaggcttgcaaagtcaagggtga

SEQ ID NO: 32732 - DNA, 216 bp, Zea mays
  Peptide Sequence Number=SeqID_74511
atggagaaaaagaagaaggcctgtagcaagcttgtggaggaccagatcatcgaagcatataagttcctggatgaagaagtggtcacccaagttttgttgatgaagcaccagaagactagtcaaggaaggaatccatgtgggagttcgcaagaggaagatgctccgcaagggccagattttgttgaagttccatctcctcgaagagttgcaaagtga

SEQ ID NO: 32733 - DNA, 216 bp, Zea mays
  Peptide Sequence Number=SeqID_74512
atggagaaaaagaagaaggcctatagcaagcttgtggaggaccagatcatcgaagcatataagttcctggatgaagaagtggtcacccaagttttgttgatgaagcaccagaagactagtcaaggaagaaatccatgtgggagttcgcaagaggaagatgctccgcaagggccagattttgttgaagttccatctcctcgaagagttgcaaagtga

SEQ ID NO: 32734 - DNA, 630 bp, Zea mays
  Peptide Sequence Number=SeqID_74513
atggctcgcgcccgcgcctataaagcccacttaggcgtcgactacactcttccgcgcatgctccaacctcaccggagctcagttcaccatcgtttgcccgtgcgcgacgtgtccgcggccacccgacccactgccaccgtaaaccgggccagcctagcccttcccaaccatgtccaaccatctgaggcgagtgtgcacgccccagtgaagctccccgagcaaggaatcgaagcctacttcgccggagaggccagtccacgggtcgccgggagttcacaaccccgccggaactgtaaccttgctaacggagagtacgtcctcgtgccggagcaaggagctgctcaggaggtagccccagatccagcaccagagcctccaccagaggacctgcatgccactgctttggaaggcaagccccgatcttcttttggcgagtactggagtggcattcgacaaagcatgagtgcgagggcgaggatcccaagtcatcgacatggtgctgcgaccaagggtgatggcgaggtggagattgaggatgagcacatgaatggaaacaacgatgctgtcgcagacagtgcaaaggcgaatgacaatgacatggatagtgctagacggaaccaaatccgttaa

SEQ ID NO: 32735 - DNA, 294 bp, Zea mays
  Peptide Sequence Number=SeqID_74514
atggagcaatctggacttgggtacctctcatcatggtttgaatcttgtctcaatgcttcttgcaatgtgctaaggtatagaaatgtttcgaactgcctaagtatgtgcaaattggcgtctgaggccaaaattaggttcttgaatgagactcgggtgcgtagctcggagacaactgatcaagccaaggatggaggcaagaagagcttcgaggtaccaagtgcacgggagaaggtcaaggaggctgaggaacccaaagccaagggtgaagaaggaggcttgcaaagtcaagggtga

SEQ ID NO: 32736 - DNA, 309 bp, Zea mays
  Peptide Sequence Number=SeqID_74515
atgcccgccataccgagggatgtcgccaaacactcgctggatatccgggccggagcccgatccgtcagacagcctctgcgcctcggtcatcaaggaagggtcggcctcgccttggcagagcctgaccctccctcgggggctaaaaagggggaaaccctctgcgtcaagatcgggcatactcctccgtgtcaaaaattttcaatcaaaaaaggggcctcttgcgccctcccggctacgttctcccggctatgtcagaagcagggtctcgaggagcgaacgcgggtacatgtaaatggcaaggccgactga

SEQ ID NO: 32737 - DNA, 309 bp, Zea mays
  Peptide Sequence Number=SeqID_74516
atgcccagcataccgagggatgtcgccaaacactcgctggatatccgggccggagcccgatccgtcagacagcctctgcgcctcggtcatcaaggaagggtcggcctcgccttggcagagcccaaccctccctcgggggctaaaaagggggaacccctctgcgtcaagatcgggcatacttctccgtgtcaaaaattttcaatcaaaaaaggggcctcttgcgtcctcccggctacgttctcccggctatgtcagaagcagggtctcgaggagcgaacgcgggtacatgtaaatggcaaggccgactga

SEQ ID NO: 32738 - DNA, 657 bp, Zea mays
  Peptide Sequence Number=SeqID_74517
atgtacacctataggctgagctgccgatgtcgccatggacaaacacgggggcactgcgccgagccgccgaggcctcgagggcgagcgtttcgacagagtggggctaggacaccacagtgcactatgcttggtgccttaactaagcctagtgatgaatctgtgttgaagaagctttctactaggtggcaaaagaaatttggggaagagattgatcaagatcttttgtatttaatatctgttgaccggatcttgcacatggaagatttcaatgaggcaggacattcaacatataactatctggtaattatgtctggattactaatggatggcatgtgggtagttccatcagactacaccagtgcagaacctgatcctctacgcaattttgctgaaaacatcgtggaggaatttaacaacaaaaatgctgaagacgtccgtaggatatacaacatatatgtcgaatcagatttacagcatttgttcgtctttggggtcatcaccatcctcctcatagttctccatcttgctcaacctttggatattggacttaaacatatcttattcgcaacactcagagtagatattagtacattacttgtctcagttatcagaccatatatggagcttttagccgggcagatgagcgcgcacagatga

SEQ ID NO: 32739 - DNA, 882 bp, Zea mays
  Peptide Sequence Number=SeqID_74518
atgtacacctataggctgagctgccgatgtcgccatggacaaacacgggggcactgcgccgagccgccgaggcctcgagggcgagcgtttcgacagagtggggctaggacaccacagtgcactatgcttggtgccttaactaagcctagtgatgaatctgtgttgaagaagctttctactaggtggcaaaagaaatttggggaagagattgatcaagatcttttgtatttaatatctgttgaccggatcttgcacatggaagatttcaatgaggcaggacattcaacatataactatctggtaattatgtctggattactaatggatggcatgtgggtagttccatcagactacaccagtgcagaacctgatcctctacgcaattttgctgaaaacatcgtggaggaatttaacaacaaaaatgctgaagacgtccgtaggatatacaacatatatgtcgaatcagatttacaggtggcagacgtgaagatgatatgggttgacaggctaggtttcgatctccacgctcattctgcggaaggcgttttggctgttcgggtcccttttcctagggaggtctccgacgagaagggggtgaaatcgtcgttcaacatgatgtctcatcatgcgtgggaggtggagaagagctacgcgagcccagagtttgagaaggtgcagttcttgaagaaggacaatgagtgggtggacaatcaaaatgaaacagttagagaaggggatgatcttgcatgggctcatgtggatgatgcaatcggtgcttctagttcacttcaaggtcgcaacttcccaagaagagcccgatatgagtctgtttattcaaggcgttgtcaagctgctgctacacaggagagagttatggaatag

SEQ ID NO: 32740 - DNA, 270 bp, Zea mays
  Peptide Sequence Number=SeqID_74519
atgtgcattgtacttaatgcaaaggatatcagtgttacaggaaggaaaatgacagataagatttactattggcatacagggtatgttggccatttgaaggaaaggaggctcaaggaccagatggagaaagacccaactgaagtgattcgcaaagctgtgctgcgcatgcttccccgcaacaaactgcgtgatcagcagcttgacaacgccttgaataaacagactcatatcgggctcttcttgggaagttgcgaccttgaagtgaactag

SEQ ID NO: 32741 - DNA, 417 bp, Zea mays
  Peptide Sequence Number=SeqID_74520
atggcgaaagggcttaactcgctcattattctcgttttatgggagaaggttgaagcagcaccttgttgggtggacagtcaaaatgaaacaattagagaaggggatgatcttgcatgggctcatgtggatgatgcaatcggtgcttctagttcacttcaaggtcgcaacttcccaagaagagcccgatatgagtctgtttattcaaggcgttgtcaagctgctgctacacaggaggagagagttatggaagaggaagagcaaggcaatgagggcaatgaacaagatgacgaagagtacatgtctaattatgatgaagaagtggatgactttggtgaatccccacataacagtccaactcaagctggtgctggtggtgaagaaaatgcaatggatgatcttgatttgggagatatttag

SEQ ID NO: 32742 - DNA, 429 bp, Zea mays
  Peptide Sequence Number=SeqID_74521
atgaccaccgtccccgacacagtgtggttggcggtgcccctaatgcttcgacgagcaatttgccgagtatcgattgcccacgagctccggattccttccagagacgcccgtcgtgctccaatgaagccacccaggaacaatgcaagccccgatatacttcgcctctatgattcgaccatggcggcaatcatcgtttccctttctctcctctcggcaaaggggttttggggggactggacgctgaaacaaggaagcagagatgtgtgttcttataggcagggaagctcgggcagttgcaatggcccgaattcacggccggtgagggcggtatcgccaccatgcacggaattcgttcatggagcacgcgagtcggctgaggaagatgaccagtgggtcccgcctagaggtgagattgtggggggagggtga

SEQ ID NO: 32743 - DNA, 228 bp, Zea mays
  Peptide Sequence Number=SeqID_74522
atggagcacgcgagtcggctgaggaagatgaccagtgggtcccgcctagaggtgagattgtggggggagggtgacgactggcaaccaggtcccacggtgcagcgatgtgagcacatgagtgcgggtgggtccacacgccagtacgcgagcgtggaggatggagctagctgcgtgttcaccaggttcagcttctacttctacatggttgagttgcccccggttgactga

SEQ ID NO: 32744 - DNA, 516 bp, Zea mays
  Peptide Sequence Number=SeqID_74523
atggccggactgactgggggatcgagagaggatacagattactccactcacccaccgctcattgtgaccccccgatcacgcgcaagcgcaaccgacccctgccgcgattcccctccgcggcgaatcacctgcatccgcaacttccgctggagcaggggccccatctccggcctgctcaagggctacgtcggcctcagcaccgccatcttcatcgacacctgcttcgcgctcttcgccgacgacccggcctcgttcctcgtcatgctcgtcgtcgtgccggccgccgtctgcgcgctcgccatggtgttcctccgcgagggcaccgccgctgcggacgaggaggacgacgggcgctgcttcgctcgcaccgctccttcaaggcgggacaggcagcggacggtggagggctcggacgcgcggctaaagtgggcggcggggccgcgccgcgggagatctggaggttggcgagcgccccggagagagcccccaccccggagcctggtggccctggcttga

SEQ ID NO: 32745 - DNA, 741 bp, Zea mays
  Peptide Sequence Number=SeqID_74524
atggacgtcgatgtgccaggcttggatgaaggacagtggcttgagcgcctagcgaaggaagcccaaggagtagttgaaagtggaacatgttctcgtcgtcctcgacatagttgtggaagcctcagagacagcgcgcacgtagatcaacggggtggctccacgccgtcaaggaggttcatttggtggtcccagaagtcagaggagggtagaagagacaagctttcgatcgctactacgccgatgctagaagcgaaggccgctgccgccgttcgccgcgcaaaaccctaccgcgcagggctcaagccagggccaccaggctccggggtgggggctctctccggggcgttcgccaacctccagatctcccgcggcgcggccccgccgcccactttagccgcgcgtccgagccctccaccgtccgctgcctgtcccgccttgaaggagcggtgcgagcgaagcagcgcccgtcgtcctcctcgtccgcagcggcggtgccctcgcggaggaaaacaccatggcgagcgcgcagacggcggccggcacgacggcgagcatgacgaggaacgaggccgggtcgtcggcgaagagcgcggagcaggtgtcgatgaagatggcggtgctgaggccgacgtagcccttgagcaggccggagatggggcccctgctccagcggaagttgcggatgcaggtgattcgccgcggaggggaatcgcggcaggggtcggttgcgcttgcgcgtga

SEQ ID NO: 32746 - DNA, 321 bp, Zea mays
  Peptide Sequence Number=SeqID_74525
atggagatcatcgtttggacggcgcaccaagcaggtagcctcccattggtccagggtctcctccagcagctggggtgccttgtggtggtgcagggggcacctctagctaaggcacaggggaggtctgcctcccagactccacctcttgctgaggcgaggggaaagagtcctattgctcccgctcctggcatcgggactcctgctcctcgtgcaggcggcggtgcagtctctccaggtgactcgactgtcctatcaacgtgcgacgcagtggacgctccgcaaggcgagagggcaagaaagggatcaccaacttacgtgtag

SEQ ID NO: 32747 - DNA, 568 bp, Zea mays
  Peptide Sequence Number=SeqID_74526
atgcacatggtaccggtggaagttgtctctgaactcctcccaggtgatggcttcaatgtcagcatgggtggcgagctatcgctccaccatgcacaaccagtcttcggcgtccatggggttgaggttgctgctgcagttgttgcatggctgtcaggtcctatagtcaggggtgccataagcatgatgaccacggggcggcaagtggatgtggtccagctcagtgttgagcacggtgaccaggttgaccatgctgctcaatctaggatttccctcaccaacggcatcctacatggcttcctcgacagtgtcccactcagtgatagaaataatgctctgagtaggcctctgcaccatggagatcatcgtttggacggcgcaccaaagcagggtctcctccagcagctggggtgccttgtggtggtgcagggggcacctctagctaaggcacaggggaggtctgcctcccagactccacctcttgctgaggcgaggggaaagagtcctattgctcccgctcctggcatcgggactcctgctcctcgtgcaggcggcggtgcagtctctccag

SEQ ID NO: 32748 - DNA, 624 bp, Zea mays
  Peptide Sequence Number=SeqID_74527
atggacgtggactcacgcatggcgacggagtccgactccgactccgacgcgcgcggtggcagcgggttcgggagcgagacccccacggcgtcctcgtccccatccgtagttagcttggcgccgacagcttcctcatctccttctccttccacgcacccaacgccgaggaggacgacagcaaggtccaggccttcctcgcggagatggagagcgccccgaccaggagatcgaccacttgctcgaggtgaagccctgccctgcccctcactgaatcacgtgctccctcctcccccatcaacgctccctcctcacattccccgcacaccaagagacgaatttgtccatgctagggtttggattcgtgggtggagcccgagatgctcaagaatgatggtttcagtcatgtcattgctgaagaccgaactgaccagcttcatggttctctacaaccgcgacaacgtggagtccatcgggctggacgaagcggccaaatgcctcggcgtggagaggcgccggatctacgacattgtcaacgtgctcgagggcgttgggattcagcaagaggttaccagtgtgaactgcgaatacattctactgatatttgtgtcgtgcaattgtgaataa

SEQ ID NO: 32749 - DNA, 1260 bp, Zea mays
  Peptide Sequence Number=SeqID_74528
atggacgtggactcacgcatggcgacggagtccgactccgactccgacgcgcgcggtggcagcgggtccgggagcgagacccccacggcgtcctcgtccccatccgtagttagcttggcgccgacagcttcctcatctccttctccttccacgcacccaacgccgaggaggacgacagcaaggtccaggccttcctcgcggagacggagagcgccccgaccaggagatcgaccacttgctcgaggtgaagccctgccctgcccctcactgaatcacgtgctccctcctcccccatcaacgctccctcctcacattccccgcacaccaagagacgaatctgtccatgctagggtttggattcgtgggtggagcccgagatgctcaagaatgatggtttcagtcatgtcattgctgaagaccgaactgaccagcttcatggttctctacaaccgcgacaacgtggagtccatcgggctggacgaagcggccaaatgcctcggcgtggagaggcgccggatctacgacattgtcaacgtgctcgagggcgttgggtgcagctcgccatcgccgccatcttcgagcctccctaaagcacgggcgctgcggggtcgttcctcaccggcgtctccttggccaacctgtccatctccttccaccgtatgcctagggtcgagtgcctcccacccatcaaatccaagcatcaggaggtgctcacctttgacagcggccatccctcaaccctctgtagcatgtggcgccccgctgcgaatttgcctctatgacaattgccatcctcgcatcccaaaccgtcgatgcccacccctaacacggttcctgacctccctgacaggggacttctctaaaggatataacaagtggtggtcaagaaatccaaatggagtccctcaagaatctcttggatataagcaagctgggattccacatcttaagtggtttggggtggaggggcagtacaatgtcatggtgattgatctgcttggtccaagtctgaagggcttatttaactactgcagtagaaagttctcacttaaaacagtactaatgcttgctgatcagatgtgcttgagcaatcaggaacagatagtggagttacttgaacgtgaaaaattggagaagaagccgcaggatccagctgcagaaccaatatgtttgccaatagaatttttgaaagccatcacatgcaatttttcaactgaacgagaacttggcaggtgctttggagttgatatggtcggctga

SEQ ID NO: 32750 - DNA, 258 bp, Zea mays
  Peptide Sequence Number=SeqID_74529
atgagaatggtcgtttcgagatactctctgtctgggtcgtttcttcaatcagataacagtggccatcacagtcgaactggtgggcttgctagcgtccccaatggttgtgtcctgatcgtagtggaagcatcatggatgtttaatattgcagtccaagagcaaagcagaagagatgatctgaaatctctttgttatgtgctcatgtatttcttaagaggaagggtgactgatgatcagggggtgtccatgacattctaa

SEQ ID NO: 32751 - DNA, 1353 bp, Zea mays
  Peptide Sequence Number=SeqID_74530
atggagcacgtagtcgggggcaagttcaagctcgggaagaagatcgggagtggatcatttggggaactttacctcgccgtgaacgtgcagaatggcgaggaggtggctgtcaaactgggtggaactgggattccacatcttaagtggttcggggtggaggggcagtacaatgtcatggtgattgatctgcttggtccaagtctggaggacttatttaactactgcagcagaaagttctcccttaaaacagtactaatgcttgctgatcagatgatcagtagagtagaatacatgcacacaagggggtttctacatcgtgacatcaagcctgataattttctcatgggtttaggacgtaaagcaaaccagttgaatgatgttactgattatgaaatgcctattaacttgctggcaaaattgccatctgatgatctgaaaacagttgagcacactccacaggtatttgtcatcgactatggccttgcgaagaagtatcgagatctccaaactcataagcacataccatacagggaaaacaaaaatctcacaggaacagcacgatatgccagtgtaaatacccatcttggagttgagcaaagcagaagagatgatctggaatctcttggttatgtgctcatgtatttcttaagaggaagtctcccttggcaaggcctgaaagctggcacaaagaagcagaagtatgataggatcagtgaaaagaaaatgctgacgccagttgaggtcctctgtaaatcatatccatcagagtttactgcatactttcattactgtagatcactacgattcgaagataaaccagattactcctatttgaagagactcttccgtgacttatttatccgcgaggggtaccaactagattatgtatttgactggaccattatgaaatatcctcagtttagagataaaagcaaaattcagtggcacagctacatctctgacagattagtttctgcagctgaagctttgtttagaaggactggatctggttctggtcacaatcgagagcacaccaagcacagaagtcttctggagtcactgatgccatccaaggtggctgttgattcggataaagcaaggccacaatcatcgtcgcgcaacgggagcacatcaagaagagctgtcatttcatcaagcaaaccaagctcttctggggatctaagcgacccgaaccgcttggggggccgcctggcccctagtagcagcagccgcccaccgactgcccaaagggagatcagatcctcgtctttgtcaaaaatcggaaggtcttcacatgacgacgctatcaggaacctcgagctgctctcacttggtgctgacaagagaaaataa

SEQ ID NO: 32752 - DNA, 540 bp, Zea mays
  Peptide Sequence Number=SeqID_74531
atgtctaggcgtggtaaatatgctaaaccaaggaagggtcctttgaccggaactgccttcgacccgctgcctttgccaagtggtgttccagtgcctatgtgtttttgtggtgatccttataaggtcgataagtctgaagatcatgacacctatcgacagaggtattggatgcgtgctaactttgcatttgagccaactattgttcaacgtcggatgaatttaatgactcctccaccgctatgtgattttgagcagtggattaacacagaaatatcagagaaagacaagaagtggttggagaatcttcaaaagtgggatgcagaggacaaagagaggatggaaaaaagacgagaggagcttgctgccgagcaacaacgtgaagacgaagagaaaatgaggcgtgttgctgaatgcagggaagataaggagaagaagcttgagcgtgcacgtcgtgcaaaggaagcaatggaggagaaccctgatgcatttcgcaaaggcaaatggccccgttgtactcataagaattggtgttttatttga

SEQ ID NO: 32753 - DNA, 810 bp, Zea mays
  Peptide Sequence Number=SeqID_74532
atgaccccgcgcgccctccaggcagcaacccgcgccggcgtgctcggcccggaccgcgctctccccggcgtgctggcccccggccgcgcctggccatggccgcgccgcccttggcccacgccctcagccgcaccctcccttggccgtaatgacgaggatgatggttttgattatgattatgccggtggtgtgacctgggatctacgtggcatgtacctcggcgccatagatcttggcgccaaggtaggcgcccggtcaacgacgcctacctcggcgccaagatctatggcgctgaggcgtggtaaatatgctaaaccaaggaagggtcctttgaccggaactgccttcgacccgctgcctttgccaagtggtgttctagtgcctatgtgtttttgtggtgatccttgtaaggtcgataagtctgaggatcatgacacctatcgacagaggtattggatgtgtgctaactttgcatttgagccaactattgttcaacgtcggatgaatttaatgactcctccaccgctatgtgattttgagcagtggattgacacagaaatatcagagaaagacaagaagtggttggagaatcttcaaaagtgggatgcagaggacaaagagaggatggaaaaaagacgagaggagcttgctgccgagcaacaacgtgaagacaaagagaaaatgaggcgtgttgctgaatgcagggaagataaggagaagaagcttgagcgtgcacgtcgtgcaaaggaagcaatggaggagaaccctgatgcatttcgcaaaggcaaatggccccgttgtactcagtag

SEQ ID NO: 32754 - DNA, 522 bp, Zea mays
  Peptide Sequence Number=SeqID_74533
atgtctaggcgtggtaaatatgctaaaccaaggaagggtcctttgaccggaactgccttcgacccgctgcctttgccaagtggtgttccagtgcctatgtgtttttgtggtgatccttgtaaggtcgataagtctgaagatcatgacacctatcgacagaggtattggatgtgtgctaactttgcatttgagccaactattgttcaacgtcggatgaatttaatgactcctccaccgctatgtgattttgagcagtggattgacacagaaatatcagagaaagacaagaagtggttggagaatcttcaaaagtgggatgcagaggacaaagagaggatggaaaaaagacgagaggagcttgctgccgagcaacaacgtgaagacgaagagaaaatgaggcgtgttgctgaatgcagggaagataaggagaagaagcttgagcgtgcacgtcgtgcaaaagaagcaatggaggagaaccctgatgcatttcgcaaaggcaaatggccccgttgtactcagtag

SEQ ID NO: 32755 - DNA, 522 bp, Zea mays
  Peptide Sequence Number=SeqID_74534
atgtctaggcgtggtaaatatgctaaaccaaggaagggtcctttgaccggaactgccttcgacccgctgcctttgccaagtggtgttccagtgcctatgtgtttttgtggtgatccttgtaaagtcgataagtctgaggatcatgacacctatcgacagaggtattggatgtgtgctaactttgcatttgagccaactattgttcaacgtcggatgaatttaatgactcctccaccgctatgtgattttgagcagtggattgacacagaaatatcagagaaagacaagaagtggttggagaatcttcaaaagtgggatgcagaggacaaagagaggatggaaaaaagacgagaggagcttgctgccgagcaacaacgtgaagacgaagagaaaatgaggcgtgttgctgaatgcagggaagataaggagaagaagcttgagcgtgcacgtcgtgcaaaggaagcaatggaggagaaccctgatgcatttcgcaaaggcaaatggccccgttgtactcagtag

SEQ ID NO: 32756 - DNA, 447 bp, Zea mays
  Peptide Sequence Number=SeqID_74535
atggtgtcgctgatggaaggggactgcagggagcggggcttcgtgaaggagagtggggcacacgcgaggatggagggggcgccgcgatgcgagattgccgagggggagcgccgtgatgcgggattgcgccgccgcgccggggggaaggcgagggagggcgcttgccgaggagaggagaccgcggcgaggaggggaggcgaggggagatcgcggcagggaggggatctcgccggcctgcgcgggcagggaacggggcttcgtgaaggagagcggggcacacgcgaggatggagggggcgcggggaggggacgcgcgggcggaggaatcgggatggcggcgggggctgcgggcgcgaggagggaatcacgggcggaggaatcgggatggaggaggggaatagcgcgatggcagaaccaggcgttgtggacacctacactgaagacataa

SEQ ID NO: 32757 - DNA, 414 bp, Zea mays
  Peptide Sequence Number=SeqID_74536
atggcgggcggaaaagagctcgccggagcaaaggaggggtggctggccggtgatgcacctcctaacactgcaaagttaatgttcttccacgtcacagggtacttgcagatagatgttggctctacaaatgaacactcgaccaagtcaggtgaggattatgagggcctagccatgcgtgacgtgatggcgactggtccgacgatgagcagcaagctgagagcaaaaccaagaactcgcctgccctgcagagcaacatccataggagtgaggcaaaatggctggtaccaccacaacatggacctgttcctgaagatgtccaaggaggtggtagccagcaccataatgtcttgcgcgtcattgtgccacctgccggcaacacgctgcgctggtaccagcgggtgttgtgtttcttag

SEQ ID NO: 32758 - DNA, 359 bp, Zea mays
  Peptide Sequence Number=SeqID_74537
cacctcgtaacactgcaaagttaatgttcttccacgtcacagggtacttgcagatagatgttggctctacaaatgaacactcgaccaagtcaggtgaggattatgagggcctagccatgcgtgacgtgatggcgactggtccgacgatgagcagcaagctgagagcaaaaccaagaactcgcctgccctgcagagcaacatccataggagtgaggcaaaatggctggtaccaccacaacatggacctgttcctgaagatgtccaaggaggtggtagccagcaccataatgtcttgcgcgtcattgtgccacctgccggcaacacgttgcgctggtaccagcgggtgttgtgtttcttag

SEQ ID NO: 32759 - DNA, 351 bp, Zea mays
  Peptide Sequence Number=SeqID_74538
atggctggaacaagtcgcatggtgctcggcggcaagcacgccgtggccagggaaaacgaagaagcaatcgaagtaactgaagagaagacaccaccaccttcggaatctcaggccggaaactgtttctactttgacatctgcggatccgagcctgactcacctactaacgaaggcaagccccggttgtcttttgcaatactggctagctcaggggttatcctaaggaaggatggcttctacctgcaagaatatattttcattgggagcatggtgggatcttactgcaaagttccctgtgatgctcttttcatcctaaggaacacaaacaatcctaagggtggaaatacttaa

SEQ ID NO: 32760 - DNA, 222 bp, Zea mays
  Peptide Sequence Number=SeqID_74539
atggcttctacctgcaagaatattttcattgagagcgtggtgggatcttactgcaaagttccctgtgatgctcttttcatcctaaggaacacaaacaatcctaagtgtgaaagttttaactttgtgctgttgttgatggtgttaagtgccggtgggctcggccttcttataagtctaagtaactcttctatacttcttattgaggatgatcacttgagctag

SEQ ID NO: 32761 - DNA, 1826 bp, Zea mays
  Peptide Sequence Number=SeqID_74540
atggagactgccgagggtgccttcgccgggaccttgactccgtttggcgatggggcgctgggccttcgcccgtcgtcgtcattgacaacagtgaccccccttgccgctttgccctttgcgtggtcatcttgggcgggcagggccaagggctccatcgttgacaccggagcatccaacttaaagttacaactcccactagcaagcaaaacaaagcagttcaaaaggacttctggcagagcagaggtgccaattaagagcatcatgcgtaactctaagccgccgagcaaactggccatgctcatggtgttattgtttctgctttgttacggagttgagaaagtccattgctcgacggttcatgaaaacaaccaagattttcactctctgctcgatttcaagaagggcatcacccacgatccaaatggagccatgaacgattggatcaacaacacccacttctgccgatggaaaggtgtgaagtgcaccttaacaccgccatatcgcgtcacggagctcaacctctctcacaacaacttagctggccaaatctcctcctctcttggaaacctgaccaaccttaatttgctggctctaccaaataatagatttggtggaccaataccccttcttgacaggctccaaaacctaaattacctatccctggacaacaactccttaaatgtccttgagaagaagacttcaagaagagcacatcagtcacaactttcttttggtgagcattttgagaaagttacttacaatgatctagcgcaagcaacaagggacttctcagaatccaacctgattggaaaaggaagctatggcacggtgtacagtgggaaattgaaggaatcaaagacggaagtggctgtcaaggtttttgaccttgagatgcaaggtgcagagagaagcttcttggcagagtgtgaagcattgagaagtattcagcaccggaatcttcttcccatcataactgcatgctcaactgtagatacggcgggcaatgttttcaaggcattaatttatgagcttatgccaaatgggaacttggataaatggatacatcacaaaggcgacgaggcagttccaaagcgccgtctaagcttaactcaaagaattgcagttgtcgttagtgtagctgatgcattggattacttacaccacgactgcggaaggcccactgtccattgtgacttgaagccaagcaacatccttctcgatgacgatatgaatgctctcttggcagattttggcatcgcacgtctctatgccgatcctcagttgacttttgcaggttcaattagttcgatcggtattaagggcacaattggctatatccctccagaatacggaggtggtggccatgtttcgacgtccggtgatgtttatagttttggtatagtgttgttggagattttgaccggtaaaaggccgacagatcctatgttcaccgggggactagacatcatcagcttcgtggagaacagttttccggatcaaatatttcaagttattgatccgcatcttgtggaagaccgccagaagataaatcagccaaatgaagtagcaaacaatgaaatgtaccaatgcctggtggctctgctgcaagtagcactttcttgcacgcgctcattaccatctgaacggtccaatatgaagcaggtagcaagcaaactgcaagcaatcaaggcggcacaacttggaggcaaatccaaggagcacttgatatgcttcctcatttatcctaaggttggaaaggtgctggtgcttgactccttgaactacaacccttcgacctatgcaaaattcctcagtattttagagtt

SEQ ID NO: 32762 - DNA, 285 bp, Zea mays
  Peptide Sequence Number=SeqID_74541
atggaacaactcaaggcgccgtcaagcacgacttttggacgctattgtgtggaacctgatgctcaagagcatgcagacggagtattagagaaaaatgcaaagaaggtgcgcaaggatgcattttccaatgctcgtctacaagttgtgaatgagtacatgaagcgcagagggcattctatcaacaactttcgacaatattcggatgtctacttgactgtagaccagtacatggagatgcaggagacttacgggcagaagatggttaggaagtacggagatgactaa

SEQ ID NO: 32763 - DNA, 247 bp, Zea mays
  Peptide Sequence Number=SeqID_74542
acgctattgtgtggaacctgatgctcaagagcttgcagacggagtattagagaaaaatgcaaagaaggtgcgcaaggatgcattttccaatgctcgtctacaagttttgaatgagtacatgaagcgcagagggcattctatcaacaactttcgacaatattcggatgtctacttgactgtagaccagtacatggagatgcaggagacttacgggcagaagatggttaggaagtacggagatgactaa

SEQ ID NO: 32764 - DNA, 438 bp, Zea mays
  Peptide Sequence Number=SeqID_74543
atggcgagtggtcattgttgtcggtccacctctgctcacctccggtgtcgagatgatgccacaatccttgatataatagtcgtcgaacgcgcgcgatatggtgagtaccgatcactcttggctgggctgccaaatgaagtgcaccccgggctcatcagcgaggtagtacacctggtcgttgcaccaccggatgtgctactcctctacatacatcttgttcgaggacactcacacaacaacaacaatggtcgtcattccagcgcacaagaattcatggccggttgtgatgcccagaacaacccgagagtcgtcgacattggcgacgaccatgaggtccccatgtttgacgatggacagcgcggtgcagccgctctggaccacgtccaagcggcggctgcgccggagcttgccgtaccttttcgcgcatgggccatgtag

SEQ ID NO: 32765 - DNA, 831 bp, Zea mays
  Peptide Sequence Number=SeqID_74544
atggcgagtggtcattgttgtcggtccacctctgctcacctccggtgtcgagatgacgccacaatccttgatataatagtcgtcgaacgcgcgcggtatggtgagtaccgatcactcttggctgggctgccaaatgaagtgcaccccgggctcatcagcgaggtagtacacctggtcgttgcaccaccggatgtgctactcctctacatacatgttgttcgaggacactcacacaacaaaaacaatggtcgtcattccagcgcacaagaattcatggccggttgtgatgcccagaacaacccgagagtcgtcgacattggcgacgaccatgaggtccccatgtttgacgatggacagcgcggtgcagccgctctggaccacgtccaagcgacggctgcgccggagcttgccgtacacagcggcgcatgggccatcaacaaactctgtatagggcagcaggccagcaacacagcattggttgaattgggggagcaggagggacaacagcaagtcagcaaccatccactacatgcagtacaaagaaggaagggaagtggagggagcaggagagaccttcagatgatgtgctcatctcgccactgtgaggacggaatgggaatggcagaacacggaatggggcagcctaccccttaccgtcttaatagtgaggctaagctcgccactgctcgtgtccaagagaaggctgcgcaacatggcaaggaggacggtgctgccactaagaacagggttgacctgcttgccaaagctgtcgccactgccaaggctactgccgaccccgtgcctgtgtccttgctgcagacgaagccctga

SEQ ID NO: 32766 - DNA, 294 bp, Zea mays
  Peptide Sequence Number=SeqID_74545
atgggaataggctttgtgggagggagaatgagaaagacacgtgatagccgggaatggaaatgtgaatgggctttgcagggagggggaatgagaaagacagacagctgggaatgggaatggtctttgcatgaggctaagctcgccactgctcgtgtccaagagaaggctgcgcaacatggcaaggaggacggtgctgccactaagaacagggttgacctgcttgccaaagctgtcgccactgccaaggctactgccgaccccgtgcctgtgtccttgctgcagacgaagccctga

SEQ ID NO: 32767 - DNA, 456 bp, Zea mays
  Peptide Sequence Number=SeqID_74546
atgccgcttctccctccacgcagccgccgtcgcccgccactcctaccaagccccgcaagaacccccacgggagctcccgtggtggccgtgcacgaggagcggaagcccatctggacgccggccaacctcgcggccgccatccgcgcggcagcggacgtcaacatcgacgcgacagccgccctagccctgtctgcgcccccggacttgccgctaccgacgcactccctcgcgctcctgctccgccgcctgttcaccacccgctccatcgccgccgcgcggggcctcctcgacaagctccacccctccgacgaggacggctgcccgcgccccaacccggccccgcgcggggcgctgctggcgctcacggacgccgtgtgccgccgcggcgagccgcgcgagatctcccgtcgtctccaggtctctctctgtaccttcgtaccattagaggatgtataa

SEQ ID NO: 32768 - DNA, 449 bp, Zea mays
  Peptide Sequence Number=SeqID_74547
ccgtccgatcgcgctgtgctcgtcttctttcgacgcttccccgcgaatcccgctgcccggcttccggtctccgcttcccccgtacgcagtgggcaccatggacccttcggtctcctcgtcgcctctccggctctccgtcggaacccgcgccagcccgggtgcaggccccgcccccgcccctaccccgaggccgcccagcctcgtcgtcgcggccggccgccaacagcccgccaagatatatagaagcgcttggtgaaacttgggtcggggcgctgctagcgctcgcggacgccgtgtgccaccgcggcgagccgcgcgagatctcccgcgtcctcccggttctcagggaccacggtgtctgcgccgacgcgcacctctacaacgcgctgatgaaggcgagcgtcgcggcgtacgaccctgggccgtcctcagggtgtttcggtagatga

SEQ ID NO: 32769 - DNA, 558 bp, Zea mays
  Peptide Sequence Number=SeqID_74548
atggcaggggcagttgttgacggcgtgcgatggatggcgggggaggtcgttggtggcttggggacgaggatagcggggtcggacgaccgacgctatacggcgggcacgacaggcggcggatggggcgggaggttgcgcgagcgatcattcacaatgcttcagtatttttttcgagtaagtatatcatcctggaaactgttgggtcgtctactccagcaaaggcaaggcaaagcgcctgaaggagtgagcgtcgtccttgagcaggatttgccgctttcagctgaaccccatcctgcacatgataatggcgtagctgcagatgcagtcactccggtgacgaggtcggggtccacgccgttgctcctcatctaccgaaacaccctgaggacggcccagggtcgtacgccgcgacgctcgccttcatcagcgcgttgtagagacgaatcaacaagtgttctccagaagtctgaaggtgaatatcaaggacatcgctctttgctgatgcgtactcgtggtttgctctccacaatgcaacaacaagatgtttttgataggtag

SEQ ID NO: 32770 - DNA, 366 bp, Zea mays
  Peptide Sequence Number=SeqID_74549
atggcaggggcagttgttgacggcgtgcgatggatggcgggggaggtcgttggtggcttggggacgaggatagcggggtcggacgaccgacgctatacggcgggcacgacaggcggcggatggggcgggaggttgcgcgagcgatcattcacaatgcttcagtatttttttcgagtaagtatatcatcctggaaactgttgggtcgtctactccagcaaaggcaaggcaaagcgcctgaaggagtgagcgtcgtccttgagcaggatttgccgctttcagctgaaccccatcctgcacatgataatggcgtagctgcagatgcagtcactccggtgaatgaatgctctccccaaactgtgcattaa

SEQ ID NO: 32771 - DNA, 483 bp, Zea mays
  Peptide Sequence Number=SeqID_74550
atgtctacctggaaagctcacacgagaggtgaaaatccaggcaggacagcagacggctcacgggcaggcatggtcactaaaatgacagaagaggcgaggaaaatggaatttgggcactcggctcggaaacgatcgctcaaaacagagaatttggtgaaattgaagcctgttatccgccatttgtcgctgttgcttattggaccccgtggtgatgcaggagatggtttagctggcatgaagcaaggggatcttatcatctggtatgttgagcagcagaatgccaaaggggcatatagttctactgcagaggtgaaggaagaagtgaagtgtatcaaggccattatagagagacttatacagcgggaaggccatcttatagtcattgacgacggtactgcagccgcagccgaagatggcagtggcgcaaggagaacatcagagagtagaatactggcagttaacccgaactatgttattgattag

SEQ ID NO: 32772 - DNA, 1149 bp, Zea mays
  Peptide Sequence Number=SeqID_74551
atgagccgtctcctgtcctgcctggattttcacctctcgtgtgagctttacagttgtcaggttaggatgccatgcacgaagaatgtgtcagcgccagggggaggagatgacgaggatcctcctcgccccttcaggcaggtcaagggaaataccgtgtatttggagcagcaggaaggccgcaagaagcggcgtctggacagggctgctcgagcaacggcagcagcagcagccgctgagcaggcagagcaaggagctcagttgcaaattccttccgatcaaattgcctatcgagttcgtcgcctcgcctctcgtcctcgctcctccgctcctaccactcccaccactgctaccactcctccacccacttcgcctgcccctgtcactcctgcgccatccaccacctcagccatacccaccacctctactactccagcttccactgctcctcctcccgcttccgctcctcctatcccacctgctcgcttccgggagcgcgatgagactgaggtgcgaccacttgctgcagatcccagactgtttgatcttcagcgtgctacaacggcacgggtacgtcggttcagatacgtacccgtggagtcttggttacctgcacatagagaccctgcagcggcagatccattcagcattaggattcaggagtctttctacagagcacagttgtcagctcagattgttctgcgagcgcaccggctattggatctccctgccttcctactagcagccggtgccgactctgaggttcacctctcctatctgcctggacttctcactcttttgactaccagcggcaaatatgttgaggaatggggtactcttgaggcctctcgcctcatctttgggtcgtaccgtccagctccagaggatcctgtgccggcacctgctccagtgattgatactcaggccgaggataccaccttccatcagtttgagactcagggcgtagcagtccatgattatgatgatgatgatgattttggggttccacctccgcctccgcctcctatgcctcctcgcactcatgatcatgaggatgggagttccagttgtgctgcccctgctgccctcctgccattgaccctgctcttgcggcgatcctccagactcttactcagcagcaggctcacttag

SEQ ID NO: 32773 - DNA, 600 bp, Zea mays
  Peptide Sequence Number=SeqID_74552
atgaatgcgctctcccgggaagggtgccggcacttcgaggtcttcgaccaagtcgaagaagattttgagcgagatatctttaaggttgaggaccccgttgtgaaggaatccgccggagctatcttcgaccggctatggggcgaacacagtcgcgaggtggttcaagattttgggcctgcgcacacaaccgctactactaaaatttggcggcttcgaccgcggaagatgtttttggattgtgctgactctgggagctcggttgagtggactgaggagtcgtcggaggaggacttggactactttgcggccttggatgaggctacggcggaggcttcggcgcacgccgcggacgcaggagatgtgccaggtcctagcaccgggcgacgacgacgaagggcggttgcgaagcgtagagttagtgggacggagggggctcggcttcgtgtgagtgggactggccgacatgaactgttgtctttgccgaccgccgtgaatacaggtgaaggggaactgcgaagtctttttgcgggtgaggagcttaggataatgttatttaattatagggagatgggaattattcctaaggttgagccgatgtag

SEQ ID NO: 32774 - DNA, 1482 bp, Zea mays
  Peptide Sequence Number=SeqID_74553
atggatatagtggtggaggaaggaaatgccgatgttggcaatactgctgaaccatcgtatgaggttgtggctagaagtggttgttcagcacaattgtcaactaatgacactgatgaacatgaactggctatagagagcgaggatagtaaggtcagtgttggtaatgctgcaaaacaatcacacgatgttgtgggagtaggcattgactgtattttcaatcatgctaaagtgtcaactgaagccgatcttggaccacaaccggatgtgatacacttgacatctttggatgttccaaatgaatcaagtcaaataagttctgatgcggatatggtagagcagaacaaacaagatgctttggacacacttattagaatatcacaacataaaaaaccaaagaaattgaatgtagctcgagttgtctctgaagattataagtgcaccccagaagatgttcagcttattgaatacattaaaacattaccggggaaacaagttgtggtgaacatcgacagcgcatggttaaatagaaatgatatggaatgtctttttcatggtgacatcgaattgtttggcgaagccctcagtgcatatatacactgtattagggatgaagagcatttacttcatagagaaggtggaaaggtcttcttggagaacacattcatttccagtctgcttaagcgtgatggcgaccctaaggtgttcattccaatgaatatagaaaattttcactggtacctggcagttctgaatgcaaaaaaagtgagggtatcttgcgggctatggatgataaactatatggaatactggacaggatcctccctatctgataacgtaactcaggatgatataacaatgtttaggtttaagctacctgcaatattatgggactcgagattaaacacaaagaaaagacatcaaaatcttgaccacaatgtggatgaagatggagagagttcaagtgatgttcaaataatcgatactccattaacatcaacaaacacgcaagaactgatgtttgtattatgcacatatatcatggggatagacaacgccacatatttaaagaaacattggattcagagtactaaaccttatccaatttctttaagtcttcaaaaacttaaagatatattggatgtaaataagccgatggatacaaattgttttaacatggctgttcggatgatcgcatgcaatgatgccttgttcttgttggaagacaaatatcactacatggatctacaattatgttccataactaaatttggtcgagaccctcgccttcgtgcaaagccagatatcaacatgttggcaaaattattagaatgttggcctgacatggagtacgatgtttcagattacaaacaaggatttatctggctttctgttgggaccatgcttcgtcgccgaaggtcctgcaggaagaaacagcttcggctgaagctgtttgtacgagataccgaaggatgcagttcatga

SEQ ID NO: 32775 - DNA, 378 bp, Zea mays
  Peptide Sequence Number=SeqID_74554
atggaggaggagagggcggcacggcgggggtggaggagggcggcgtgcggcgtgggtggaggaggagggcggcacggcggggcaggaggagagggcggcatggcgtgggtggggaaggaggtcggcgcgcggcgtgacggcggagcggcggaggagagcggcacgggtagaaagggaggcggcggggtagagagtgagatggagagaatgattcaaccgggcaggtataacgggagccctgaccttccaatagttaaaggaagcccaggccgatcacccctgcaacctggttcaacccagcgcaccgactggactaggctgtcggttgcaccactcgcgtccacgtctgtgcgcgcaaaaaaggaaatgcatgcatga

SEQ ID NO: 32776 - DNA, 662 bp, Zea mays
  Peptide Sequence Number=SeqID_74555
atggcgcacgggctcatcggttcatctaggcggttggccgcctcgggcagtggcggcaggtataacgggagccctgggcttccaatagttaaaggaagcccaggccgaccacccctgcaacctagttcaacccagcgcgcgactcaagcaggccgtcgggcactcggcaaaggctattttacactcgacaaaggctttgccgagtgtaacactcggcaaagaacgctcggtgaactgtacatcggcagcggtctctttgccgagtactttttgtcgggcactcggcaaagaaaagtcaccgtcacggcgccaagtgacggtgacggatccttttgccgagtgtcttctttggcactctgcaaagaggccaattttgccgagtgcctgctatcatggccctcggcaaagacgggtccagtgggccccaccaccagtccctgtgccgagagctctcgtaggcactcggcaaaggaggactctttgctgagtgtctggtggaccggtactcggcaaagagtcctccagtgggcccctttgccagtccctttgccgagtgccttgacaacagcactcggcaaagatggctttgccggttcccaggtttccttctttgccgagtgccatggtcagcactcggcaaagatggctttaccggttcccag

SEQ ID NO: 32777 - DNA, 153 bp, Zea mays
  Peptide Sequence Number=SeqID_74556
atgggcgagggcaagattgcagcagcatccgccatgaggccctcgctgctgcagttcggccacccggagcgggggtcgttgtcgttgctgccggagcgggcgacgaattgtttgtgcgagcgagagttgcttctcacagaaggtgatgagtga

SEQ ID NO: 32778 - DNA, 145 bp, Zea mays
  Peptide Sequence Number=SeqID_74557
atgcgcagcaagccgcatgctgcagcagccctcccgttcgttctccacttcccacgtcgcgtctcgtcgctctcgtgctcgctacgcagccccatccgcgacgcagtcgaaaaaccgtgggggagaaaaatccccgctgtccttg

SEQ ID NO: 32779 - DNA, 432 bp, Zea mays
  Peptide Sequence Number=SeqID_74558
atggggctgcgtagcgagcacgagagcgacgagacgcgacgtgggaagtggagaacgaacgggagggctgctgcagcatgcggcttgctgcgcattttgtcgagcacctacgacgcgtcgatttggtggggctgcagggaaaacttggttgcggggcgctgcgctgcctggagagggagccgagcagaggcgctgcgcagggcgcccgaccatggagagactcaccattgggagctgaggggagggggcttccctactggtttttccatggaagaaaatggggacatgctggagaggaaagggctgggcgccatgggctgctgtactcggccatgggagggagatggcagggaggtgctccacggctgcgtgagctcggaccagagaagtgccatgcacgcaaagagcagaggggcccgtgaccaatggtga

SEQ ID NO: 32780 - DNA, 351 bp, Zea mays
  Peptide Sequence Number=SeqID_74559
atgcccgtggatgctgccgtcgctgggctcgggcagggtgcgggattttgccagcatataggatttcacgtgttcggatttttgagattgggaaccacgggccctggcggaattgcttgccggagtgccgcggattctagccccccagaagacagtgctcttcgccgcgccattggaagcaggcttctgtgcggtcgaaccactggtatgatgcccgtccctattctcggaatcactcgacgttgcgtagcacctactcgatttggggattgccggcctgggcgccttgacattttcgccaacgagctccacggaggttggcggcgccgctgtctagctgggaagggatag

SEQ ID NO: 32781 - DNA, 291 bp, Zea mays
  Peptide Sequence Number=SeqID_74560
atggaccctccccgcaaagctgtgcagcaccaccgagctccagactgcgcgtcttctccttgtctaatgatatccgccgcgccattggaagcaggcttctatgcggtcgaaccactgcacctactcgatttggggattgtcggcctgggcaccttgacattttcgccaacgagctccacggaggttggcggcgccgccgtcttgggagcttacttcgccgtggagagacccgaggaagaggatgagtgccaaccgttggatctgtgttatccggctcggattagatcatga

SEQ ID NO: 32782 - DNA, 666 bp, Zea mays
  Peptide Sequence Number=SeqID_74561
atgcgcctcatcctgcggtacctgttctcgacctgtggggggtgtgagacagcaagagtgagctcacatacgttcatcgctcaacaagttgtggggaataatgtgcatgaactcgccaaaggtgggagctcacgtgaagtaggttgcgcatctttacccacaagtcatgttacccatctgccaagggatcgcgacttcccatacacctctaccgaggaggcgaggcaggcatccacggatgagaagcgatcccaccccgatcaatcctcctccgtccgatactacgccaacgttccagatcccccccccagcgaacagatccaacggttggcactcatcctcttcctcgggtctctccacggcgaagtaagctcccaagacggcggcgccgccaacctccgtggagctcgttggcgaaaatgtcaaggtgcccaggccgacaatccccaaatcgagcttcggcaggttgttcgggtaggtcgttaccgctgcgaggaatcggggaagaagatccacagggcgcgcggcgggatctacggcaagagctccggagagaagaacgcacgacatctgacaaggcgggcccgcgttccagatagcagaagggagaagcgagcgcacgcggttccgtttccagctcgcaaccgagaaggacggaagacctga

SEQ ID NO: 32783 - DNA, 258 bp, Zea mays
  Peptide Sequence Number=SeqID_74562
atgccttgcttctctcccactcgcgacatcctctcgcatccgagctctctgcgcccctttgccttcaaggtctctgctttgcgttgccgtagtttgccatggccttcatcctctaagcgcctcatcctgcggtacctgttcttgacctgtggggggtgtgagacaacaagagtgagctcacatacgttcatcgctcaacaagttgtggggaataatgtgcatgaactcgccaaaggtgggagctcacgtgaagtgtaa

SEQ ID NO: 32784 - DNA, 3201 bp, Zea mays
  Peptide Sequence Number=SeqID_74563
atgactgaaggagtagacgttgggatgcaacaacagataaccccgaatgtcaccaccaatgagaatcatgacgaggatgtacttttcgaagatgatgacgaagaagatggatacctattcgctgggcaagacgtacctgacccgtatgataaggtgtatagtaacatacctgaagaaacacattcgttggacattgttgctgactgcgtttactgcaaatcaaataagtttcagtatgaaccacctggattttgttgtcgtaatggacagattgatctagccccgttcgagacaccacctcaacttaggaggctgtgggagtgctcagatgctgatgcgagacacttccgtgataacattcaattttttaatggccatttctctttcacttctctgtactgttgccttgacagtatgactacaaacatgaattgtggtatttacacgttctgtgcacatggcatgatgtaccacaatgtaaggtcgttcggtagggaagctggggcagaacataaacaccttgaactttacttctacgatgatgatcctagcctcgagcatagatatcgtaaatgtcgtcaagatcaacttgacaaagacaaggcagttattaaacagttggttgaaatacttaagggaaacccatactctgagcaccttaggagtatgggacacgttgataacattgaagactaccatatcgccttgaaccttgaccaaacgctgaaccagaatttatataatgcacccatcacttcggaggtcgctgcagtttggattaaggggagtgaacgacgaggtgaacttggatggcatgcaaatattcctaagtccagtgtttccatggacgaagtagacgcgtaccttgagcaacataggacaagggatgcaaacgatgacgatacagtacttcatgggaagcggcttttccaacagttcacggttgacacctacatcaagattgagagctctcgtttggatttcatacgtaaaaaccaagacagattaagggcggatctatacaagggtttggtagatagcttgcatgaaggcgagaacagagcagacaaaattggaaagcgaaccgtgttgtctacatcatttatcggtggtcctcgtgacatgagacgccggtatatggatgctatggcccttgatcgtccggaccttgttgttcgcatattccgtgcaaaactagaggaactgaagaagagattgactaagcatcatattcttggaaaatccgggcttatgtctatgtcgtggagttccaaaagcgagagaaagtataagctaaattgccccgatcagtatgatctccttatctccgctgagatccctgacaagaagaagtaccctgaactatacaagatggttatcaagcatatgatgcatggaccgtgcgggttgctaaatcctaaatgcccatgcactaagggtcgtgcttcatgcaaaaaccattatcctagagcttttagcaatgcaacgtctcaaggaaaggattcatatcctatttatagttgtcgtgatgatgggcgtaaggaaacggttcgaggttgtgaattggacaacagatgggtcgtcccttataacccttacctcctccggctcttcaactatcacatcaatgttgaggcgtgcgggagcatcaaggctgtcaaatacttgttcaaatacatatacaaaggccacgatcgtgcgtctgtggctgtgacagatgcaaacaaggctgatggtgacgttgatgagatcaagcagtatagagatgctaggtgggtgacccctctagaagccctttggaggatattcagctttgatcgaagtgccgataggtcaatgcttacggcatattttgaggcaaataggctacatgaggaggctcggggcatcctttaccgtgattttcctgagtggtacactttgcagcaaggcaaagtgtggcaaaggaggaaacgaaacacgggtggacaggttggtagaatagtctctgctcatccagctgagggggagcacttttatcttcgacttctcttaaaccatgtgatgggtgctacctcctatgcggatctaaggacagtagatgacgacacaatagatgagtgtctcaacgaagccgctatttaccaaatgccgtcagcactacgaaggttgtttgcaacaatactggtatactgcgagccgaacgatgtggcagaattatggcagagacaccttgattcaatgtcagaggactatcaccgtagtactcaaagcaaaacccatgtgcaacagatggtcttgattgacattagaaacattttgcagtcaatgggtaaagacataaagacattccctctccctgctatcatcgacaaatatgacgattcacatggtactgatagagagatttacaaggaggaaagtatcgagccgatagtagaagacgttgctatgaaagaaaacctaaatgaggagcagaggtctgcctatgataagatcctatctgtcgttgacaccaataacggtggagtgttctttgtggatgggcctagtgggactggcaagacctatctgtataaggcactgcttgcggcactacgcagtcaggacaagaatgcagttgcaacagctacatctggtgttgcggcttccatattgcctaggggaggactgccccattcacgcttcaagataccacttactattgatgatggtgatgtatgtagcttcacgaaacaaagcgggacagcaaagttgctacaaaaagcatcgctcattatctgggacgaggcatcgatgactaagagacaagcaattgaggcgctagacaatagcatgtgtgatataatgggacagcctgggctgccctttggttggaggactgttgtgttcgggggtgatttcagacaagtactccctgttgtacgcaaggggtcaagggctcagatagttgctgcctctctacagagttcttacctctgggaatccatgtaccacctaaagcttgttcaaaacatgagggcacagagcgacccatggtttgcagaatatttgttgcgcgtcggtggtggaactgaggtagcgaacaacgatggtgatgttcgtcttccagatgagatgatgtaccatagttttgacaccgcggtggatgatcctaataactattacccatcggagtttctaaacacgctgactcctaatggactaccccgcacgttctga

SEQ ID NO: 32785 - DNA, 3039 bp, Zea mays
  Peptide Sequence Number=SeqID_74564
atgactgaaggagtagacgttgggatgcaacaacagataaccccgaatgtcaccaccaatgagaatcatgacgaggatgtacttttcgaagatgatgacgaagaagatggatacctattcgctgggcaagacgtacctgacccgtatgataaggtgtatagtaacatacctgaagaaacacattcgttggacattgttgctgactgcgtttactgcaaatcaaataagtttcagtatgaaccacctggattttgttgtcgtaatggacagattgatctagccccgttcgagacaccacctcaacttaggaggctgtgggagtgctcagatgctgatgcgagacacttccgtgataacattcaattttttaatggccatttctctttcacttctctgtactgttgccttgacagtatgactacaaacatgaattgtggtatttacacgttctgtgcacatggcatgatgtaccacaatgtaaggtcgttcggtagggaagctggggcagaacataaacaccttgaactttacttctacgatgatgatcctagcctcgagcatagatatcgtaaatgtcgtcaagatcaacttgacaaagacaaggcagttattaaacagttggttgaaatacttaagggaaacccatactctgagcaccttaggagtatgggacacgttgataacattgaagactaccatatcgccttgaaccttgaccaaacgctgaaccagaatttatataatgcacccatcacttcggaggtcgctgcagtttggattaaggggagtgaacgacgaggtgaacttggatggcatgcaaatattcctaagtccagtgtttccatggacgaagtagacgcgtaccttgagcaacataggacaagggatgcaaacgatgacgatacagtacttcatgggaagcggcttttccaacagttcacggttgacacctacatcaagattgagagctctcgtttggatttcatacgtaaaaaccaagacagattaagggcggatctatacaagggtttggtagatagcttgcatgaaggcgagaacagagcagacaaaattggaaagcgaaccgtgttgtctacatcatttatcggtggtcctcgtgacatgagacgccggtatatggatgctatggcccttgatcgtccggaccttgttgttcgcatattccgtgcaaaactagaggaactgaagaagagattgactaagcatcatattcttggaaaatccgggcttatgtctatgtcgtggagttccaaaagcgagagaaagtataagctaaattgccccgatcagtatgatctccttatctccgctgagatccctgacaagaagaagtaccctgaactatacaagatggttatcaagcatatgatgcatggaccgtgcgggttgctaaatcctaaatgcccatgcactaagggtcgtgcttcatgcaaaaaccattatcctagagcttttagcaatgcaacgtctcaaggaaaggattcatatcctatttatagttgtcgtgatgatgggcgtaaggaaacggttcgaggttgtgaattggacaacagatgggtcgtcccttataacccttacctcctccggctcttcaactatcacatcaatgttgaggcgtgcgggagcatcaaggctgtcaaatacttgttcaaatacatatacaaaggccacgatcgtgcgtctgtggctgtgacagatgcaaacaaggctgatggtgacgttgatgagatcaagcagtatagagatgctaggtgggtgacccctctagaagccctttggaggatattcagctttgatcgaagtgccgataggtcaatgcttacggcatattttgaggcaaataggctacatgaggaggctcggggcatcctttaccgtgattttcctgagtggtacactttgcagcaaggcaaagtgtggcaaaggaggaaacgaaacacgggtggacaggttggtagaatagtctctgctcatccagctgagggggagcacttttatcttcgacttctcttaaaccatgtgatgggtgctacctcctatgcggatctaaggacagtagatgacgacacaatagatgagtgtctcaacgaagccgctatttaccaaatgccgtcagcactacgaaggttgtttgcaacaatactggtatactgcgagccgaacgatgtggcagaattatggcagagacaccttgattcaatgtcagaggactatcaccgtagtactcaaagcaaaacccatgtgcaacagatggtcttgattgacattagaaacattttgcagtcaatgggtaaagacataaagacattccctctccctgctatcatcgacaaatatgacgattcacatggtactgatagagagatttacaaggaggaaagtatcgagccgatagtagaagacgttgctatgaaagaaaacctaaatgaggagcagaggtctgcctatgataagatcctatctgtcgttgacaccaataacggtggagtgttctttgtggatgggcctagtgggactggcaagacctatctgtataaggcactgcttgcggcactacgcagtcaggacaagaatgcagttgcaacagctacatctggtgttgcggcttccatattgcctaggggaggactgcccattcacgcttcaagataccacttactattgatgatggtgatgactgttgtgttcgggggtgatttcagacaagtactccctgttgtacgcaaggggtcaagggctcagatagttgctgcctctctacagagttcttacctctgggaatccatgtaccacctaaagcttgttcaaaacatgagggcacagagcgacccatggtttgcagaatatttgttgcgcgtcggtggtggaactgaggtagcgaacaacgatggtgatgttcgtcttccagatgagatgatgtaccatagttttgacaccgcggtggatgatcctaataactattacccatcggagtttctaaacacgctgactcctaatggactaccccgcacgttctga

SEQ ID NO: 32786 - DNA, 909 bp, Zea mays
  Peptide Sequence Number=SeqID_74565
atggcctcccccgacctgctcttcaatctgtggaacttcttctacctgggcgcctatcaggcagccattaacatcgacatcccgggcctcgacgccgacgccgtcgctgagcgcgacgccatcgtctttcgctcctacatcgccctcggctcctaccagctagagaagaagactcgcagggctagtaagaggaggttcggagatgcccagggcccagttgttgttgcccctttgtgggttctgttgttcccggtggccattgttcctaatgggttcgcgtgggttttcaacaggcctatggagataagcacgaaagtgcggccaccaaaattgagggaggtgatacaggttcccaagaaggttggaagggatccaagatttgagcctgtttatggatctattgacaaagaaggctgtaagcttgatgaattcttgaaacttatcgatttggttggtatgcagagactccaaaaaatgattaagaaatctaaggacctagacgccattggagaaatgaagagtcgtgtcacgtggattttcagtcccagtaggcaaaaaggcaatgttggccatactgcatcactagaaactagaaagagtatattcatcgtgaaactcttggatatctatgtttatccgctaaaagataagcagttgaagtctcatcctccaaagaacgttgaatcagaaatcttgtgtgagcatatcaagaaagagagggagacagcaaaggctggaaaacgaccatactatctgaagaaacctgaacttcgcgaaaggaagctaatgaacaagtacaacgagctcaaggaggcaggaaagcttgatgcattcatggaaaagcggcggaggaagaatgcctccaaagatcatcggttcatgccgtaccgacgcagtggagatgcataa

SEQ ID NO: 32787 - DNA, 447 bp, Zea mays
  Peptide Sequence Number=SeqID_74566
agactccaaaaaatgattaagaaatctaaggacctagacgccattggagaaatgaagagtcgtgtcacgtggattttcagtcccagtaggcaaaaaggcaatgttggccatactgcatcactagaaactagaaagagtatattcatcgtgaaactcttggatatctatgtttatccgctaaaagataagcagttgaagtctcatcctccaaagaacgttgaatcagaaatcttgtgtgagcatatcaagaaagagagggagacagcaaaggctggaaaacgaccatactatctgaagaaacctgaacttcgcgaaaggaagctaatgaacaagtacaacgagctcaaggaggcaggaaagcttgatgcattcatggaaaagcggcggaggaagaatgcctccaaagatcatcggttcatgccgtaccgacgcagtggagatgcataa

SEQ ID NO: 32788 - DNA, 213 bp, Zea mays
  Peptide Sequence Number=SeqID_74567
atgcagcaaggaggcaacaatcgtgggcagcctcatgcccagtatggaaaggtgaaccacttagaggccgacacagttcaggagactccaggagtggtactagatttcccagatgtgtttcccgaggagttaccgggtatgccacctgttcgtggagtgaccacccgggataacagtgcaaccatgagggtggaatgggacgcccttagctga

SEQ ID NO: 32789 - DNA, 300 bp, Zea mays
  Peptide Sequence Number=SeqID_74568
atgtgcccggaccccattgacggccctacggcaaagccaactactcctctatttcctctaattaatcagctaagggcgtcccattctaccctcatggttgcattgttatcccgggctgtcactccccaaacaggtccttacggagaggtcaacgacgaggacgagtggtcgttcgggtctgcgagatcagcagccacgtgttcagttgcccccgcaaggaagaaccccatgtacacctattgggaacgcatcgtcctcagggagaccgagtgcggcatactggatcctacggggcattag

SEQ ID NO: 32790 - DNA, 192 bp, Zea mays
  Peptide Sequence Number=SeqID_74569
atggggaagagcttcttcgcgattgccagcgaccgacagttgggcgtgcgtcttcagaccatcgctgctgacttcgagcaggtgttcaggatccatgataggtaccatcggttgttcttcaggcacaacatgtatcagctgcgccaggagagggacatgaagcctgagacttttgccatcttgtctctgtga

SEQ ID NO: 32791 - DNA, 1269 bp, Zea mays
  Peptide Sequence Number=SeqID_74570
atggccgctagagccagcgactatttgacgatcatccccaagaagaaccgcaatgagatctgcaaagggcgtgttgtatgccaagaaggactacaacctggcgaagcatccgcagatcgatgtgcccaacctccaggactccaggtgatcaagctcatgcagagctttaagtccaaggagtatgttagggagaccttctcctggcagtactactactggtacctcaccaacgatggcattgagcacctacgcaactacctgaacctccggtctgagatcgtgcctgccacgctcaagaagtctgccaagccaccgggccgcccatttggctctggccctcctggtgaccgcccaaggtaccattggttgttcttcaggcacaacatgtatcagctgcgtcaggagagggacatgaagcatgagacttttgccatcttgtctctgggaaggtttcaaggacagcctctgtataagctcagaccaagcaaattccgtgcagcaattgaggaggctttccttgctgaacgtggttttttttatctccaaacggatgaggaagaggctgcttcaaataacgagcaagaatgccaatctgagtctcaggttgttggcaaagggaaagatcattccttacttaacccatccatagtccctgccatgcccgttagcaggattttgattgtggttgcaggactgtggatcctttctgtccatgggagctgctgcaattttctcaccttgtcttacatagtgttatccagttatggctttcttcatgcagtttttgtggtattgtacacagtgctggtcttgtacgagcatttactccttagtagaaattgccgaccaccgccgcaccttgaagaccgccgtgctgttcgtcgtggtggcccgtctcaggcaacgacgactacgtcggtcgtggcctcaaagacctcccgccaccgctgtgacttgaagccctcctccatgccaatcaaggtgattgacaagtcatttggatttcacgctgctgtggaggaggcccaaagggccctcaatgccgctcatgtcgaggctgaaagtgtagacaatggcattggtgttgtgaagctaatgggtcacaactgttgttttactgcaagtcacccttctacctcgaagggaagagacgactcctcgagttcatttagagacgacgtgaggacaagggtcatgtggttcatcgtgctggctgagggtgctgatcaggacctcatcgtgagaagtatgaatttcatggacacctaa

SEQ ID NO: 32792 - DNA, 711 bp, Zea mays
  Peptide Sequence Number=SeqID_74571
atggcacgacgacgtttcgagacgcagggcgcaacagtccctgacgatgatgatgatgatgatgatgatgatgatgatgatgatgactttggggttccacctccgcctcctatgcctccacgcactcatgatcatgaggctgggagttccagtggtgctgcccctcctgccattgaccctgctcttgctgcgatcctccagactcttactcagcagcaggctcacttagcagcggtccagcagcagatgtccgagagaatgctctcgatgtttcagatgattcaggataggcaggatactctacagcagcaactcctccaggaccgggcgaagaacagggcattcatgactctcatgcttcagcataccggtgttccggttcccccagttcagtctgcaccgcctccacctcttcaggctgctgttgtgccagccattcaggcaggacatcctcttcctacagtcggtccttcctcctctccgctctggccggtcaccctagttttttcgtcaccagtcatcagctctcagccgccagtgccaccagctcctgctgttaccactgctgttgtggcagtgtctatgacttcttcagcttctacagcagatcttggatccgagactgactctgacccacagctggcgttcgctctactgccacgaccgcgaccggatgcgcccccgccacctcctccctcttctgatgtgtag

SEQ ID NO: 32793 - DNA, 1392 bp, Zea mays
  Peptide Sequence Number=SeqID_74572
atggctcggcaagcatcacagagcaaccagagtgctcaaacaaaggagagaggagcgagcggtggtcgcgaatttggacgagacacacggcggctggaggagaggaagctttactggcgcaagggattcgtggcccctaccgtggcggtcattccggcgatcaacggagaggctagaggaagtcatggcgatgcggtggcgcggttgagacacgcggtggacaacagcgatggcacgacgacggtgagcagctttacccgcgggcgggttttccagggttccaaatggggtttttggtatcccagggatgggtcgcgacgttctccggcagacttcaccacagcggccaagtttctctatcagctcatgagatggactcttctaccgcggatgggttaccgggaggctgctactcatatccagctttggctacttggtgccctggtctctcactcagattttgatgttgtggatttcctcatttgtgagatcgaggacaccgtactggatggtctacgtgctcatcgacagctatcgtttgctcactatctttgtcacatctttgctcagctgattcgaccaccacagtttaagggtactcttgaggcctctcgcctcctctttgggtcctaccgtccagctccagaggatcctgtgccggcacctgctctagccgaggataccgtctttcaccagttcgagacgcagggcgcaacagtccctgacgatgatgatgatgatgatgatgatgatgatgatgatgatgactttggggttccacctccgcctcctatgcctccacgcactcatgatcatgaggctgggagttccagtggtgctgcccctcctgccattgaccctgctcttgctgcgatcctccagactcttactcagcagcaggctcacttagcagcggtccagcagcagatgtccgagagaatgctctcgatgtttcagatgattcaggataggcaggatactctacagcagcaactcctccaggaccgggcgaagaacagggcattcatgactctcatgcttcagcataccggtgttccggttcccccagttcagtctgcaccgcctccacctcttcaggctgctgttgtgccagccattcaggcaggacatcctcttcctacagtcggtccttcctcctctccgctctggccggtcaccctagttttttcgtcaccagtcatcagctctcagccgccagtgccaccagctcctgctgttaccactgctgttgtggcagtgtctatgacttcttcagcttctacagcagatcttggatccgagactgactctgacccacagctggcgttcgctctactgccacgaccgcgaccggatgcgcccccgccacctcctccctcttctgatgtgtag

SEQ ID NO: 32794 - DNA, 216 bp, Zea mays
  Peptide Sequence Number=SeqID_74573
gcgatccttgcattgaatgctcctgcgatacggtcggttagcgaggcgatctggccaaggttgcttctccgcgaagcctacccgagctgggcctcgggcgagtcaaagctttgtgctgatggtgattaccagccgagtttaggagtcttggggaaccaagacctcccgcttcctgttgcccacgtcgtcggtcagcctgctcggccactcgagtag

SEQ ID NO: 32795 - DNA, 819 bp, Zea mays
  Peptide Sequence Number=SeqID_74574
atgtggctgttggagaggtgttggcgccctgttcatgtgatgtcgtggccgtcggaggagcgcttaaaccctgtagaagcacagctgtcggggctgtcggggtccttgctgacgtctccttgcttccgtaaggggctgaggaccgtcgtcgtcatggagcacgcgggggtaatgacttaccccctgcgacgtggtcggtccgagcccaaggtcgggcaaggcggtgactcctccgaggtcgaggctgagtccgagccctggggtcgggcgaggcagagaccgtcttccgaggtcgaggttgagtccgagccctggggtcgggcgaggcggagaccgtcttccgaggtcgaggttgagtccgagccctggggtcgggcgaggcggagaccgtcttccgaggtcgaggtggagtccgagccctggggtcgggcgaggcggagaccgtcttccgaggtcgaggtggagtccgagccctggggtcgggcgaggcggagcttcctatggcgcctgaggttggactcggcggctgtcagcctcaccctggcgggtggcacagcagtcggagcagtgcaggcagcgttgttttcctgtcagacgatccttgcattgaatgctcctgcgatacggtcggttggcgaggcgatctggcccaggttgcttctccgcgaagcctgcccgagctgggcctcggacgagtcgaagctttgtgctgatggtggttaccagccgagtttaggagtcttggggggcgccgaacatggtgtctccagtgagttgctaacgggtgatccgagtggacgcccgtgccctgttcgataa

SEQ ID NO: 32796 - DNA, 564 bp, Zea mays
  Peptide Sequence Number=SeqID_74575
atgatgaccgcgtcaaaaaaggaaaggggatattctgaaaaggatccttcccagcgaaagaaacgggcccgagctctcctactgatcaggggttcgaaggttgcgccctccgtggttcggcgaccgccccagagcattcgggctccaagcccactactgatcaggggtttgaaggctggcccctcggaagggttcgacagccgccccagagcacacagagtcagggatgaccctgggtacgtccgttacatggccgaggctcaggctacgctcccgaggtaccctaggacatttccgagaccacgcgcctctgggacactagccgacccttatcgaacggggcccggtcgtccactcggatcaccagctagcaactcactggagacaccatgttcggtgccctccgaggaggcttgggggctgctctcgcaccaggctacggccaaactgttgaccatgtcaacaaaccagcgtgaaaactcggagcctgaccgtgcacctgggctacggccaggccgcatgaggaaacaacaaggccgactgaggcatcgcgaaaagaattaa

SEQ ID NO: 32797 - DNA, 264 bp, Zea mays
  Peptide Sequence Number=SeqID_74576
atggaggcccgggcccacgtgtcatgtaaccggcgcaactgttactacgtgcaaggaaaccgcaccgccacccacgccaatgttgcgtctactcgactgcagaaccagtgccgcgactcgagggcaagcgacacctccggcaggagaagcgagcgtcgtttcacctccgtcatgatggccgcgtcaaaaaagggaccgggaaaggggatattccgaaaaggatccttcccagcgaaggaaacgggccccaagccctcctactga

SEQ ID NO: 32798 - DNA, 558 bp, Zea mays
  Peptide Sequence Number=SeqID_74577
atggcccgctccgtctaccaccacttctcacctcgtcgacgatcttatcttgtagcggcgatgcacatggcgagcgagaccatctccgagggtggcaagtttgaccatgcagatcgtttgttccaaagcattgagagcgcttatataaatagcttatcaaatacaagtgacgtcaaagagcttattccagaattcttttacatgcccgagtttcttgaaaattcaaattcatatcatcttggtgtcaagcaggatggggaacctataggcgatgttgctctccctccatgggcaaagggttcacctatgtccccctattcaatttatctctttatggtttttactctactgtatgtatggatccctaacaagtacccttattatagggatgataactcaagtgacgagtttgacaaagattctattgagagtgatgatagatctcttgaagagctaagctgggagacacagaacttcttgtggtacctcatatattcaggaatttggacctacatgttttgtactcatctatactacttattaaggctgcaagggtag

SEQ ID NO: 32799 - DNA, 588 bp, Zea mays
  Peptide Sequence Number=SeqID_74578
atgggaatcgttcttcattacatgcttaggctcgagccatttacatctctgtatctaaattttcagggtggcaagtttgaccatgcagatcatttgttccaaagcattgagagcgcttacataaatagcttatcaaatacaagtgacgtcaaagagcttattccagaattcttttacatgcccgagtttcttgaaaattcaaattcatatcatcttggtgtcaagcaggatggggaacctataggcgatgttgctctccctccatgggcaaagatacacagggtatatctagctttcacatacatgttacatttcctatcccatctatcaactacagacggcaagaagtttgttgactgcttgaaggatcagaatatcatgcctggcatcaaggttgacaagggtttggttccattgcctggatccaacaatgaatcatggtgccaaggtcttgatggtttggcttcaaggaggactgttgctagcatcccttgtggtccatcttcattagcagtcaaggaagcagcatggggacttgctcgatatgctgctattgctcagatatacactatgtctataatagtataa

SEQ ID NO: 32800 - DNA, 738 bp, Zea mays
  Peptide Sequence Number=SeqID_74579
atggccgctccgcccgggctcgcgccccgggttttgcggcggccgccgcgccctcctactcatcggggcatgtcgctcgcccagatggccgggcgtgctccaactcgaacccttcacagaagatcagggtcggccagcggtgcggcccgtgagggcctcccgctcgtcagcttccttgcgcatctcaggccgttgcggcgcagcgccccgaggggcgcgccagaggcacgcggataccgtccgcgccgacgacggctgccgggggcgcctagggcccccgggctttggccgccggcgcgggcgacaacggtccacgccccgagccgatcggcggaccagcaggagccgttccgcatacggccggtgcgcgtcgccagcccccatccgcttccctcccggcaatttcaagcactctttgactctcttttcaaagtccttttcatctttccctcgcggtacttgttcgctatcggtctctcgcctgtatttagccttggacggagtttaccgcccgatttgggctgcattcccaaacaacccgactcgttgacggcgcctcgtggtgcgacagggtccgggccggacggggctctcaccctcccaggcgtccctttccagagaacttgggcccggttcgtcgctgaggacgcctctccagactacaattcgggcggcgaggccgcccgattctcaagctgggctgctcctggttcgctcgccgttactaggggaatcctc

SEQ ID NO: 32801 - DNA, 853 bp, Zea mays
  Peptide Sequence Number=SeqID_74580
gcgtgctccaactcgaacccttcacagaagatcagggtcggccagcggtgcggcccgtgagggcctcccgctcgtcagcttccttgcgcatctcaggccgttgcggcgcagcgccccgaggggcgcgccagaggcgcgcggataccgtccgcgccgacgacggctgccgggggcgcctagggcccccgggctttggccgccggcgcgggcgacaacggtccacgccccgagccgatcggcggaccagcaggagccgttccgcatacggccggtgcgcgtcgccagcccccatccgcttccctcccggcaatttcaagcactctttgactctcttttcaaagtccttttcatctttccctcgcggtacttgttcgctatcggtctctcgcctgtatttagccttggacggagtttaccgcccgatttgggctgcattcccaaacaacccgactcgttgacggcgcctcgtggtgcgacagggtccgggccggacggggctctcaccctcccaggcgtccctttccagagaacttgggcccggtccgtcgctgaggacgcctctccagactacaattcgggcggcgaggccgcccgattctcaagctgggctgctcccgcgggtagtcccgactggacctgggggtcgcggtccgaggggaaagctcggtcgctcgatgggtccttagggccgaatggccggccgcgcgccgggacgctgcaccgagaacaacaacttgatgtcgcccaccacgtgctgcgcccggcgcggcagacgtgccctccgccagaaggcttcgggcgcaacttgcgttcaaaaactcgatggttcgcgggattctgcaattcacaccag

SEQ ID NO: 32802 - DNA, 243 bp, Zea mays
  Peptide Sequence Number=SeqID_74581
atggcgagccgctgcgccactcgctccaccaccgcacctcctcgattgcggaaccggtacccgcgattcgaggcgaccccagccccgcgacccagcagcgccagcctggcgcagtggtcaaacgcggttaaaagtgggccgggcagtagtgacggtggcaggcgcgcgagagcagcggtcacgccatctgccaagctcatgtcccatccggaggcggcaagagaaccccctctcacgacgtga

SEQ ID NO: 32803 - DNA, 936 bp, Zea mays
  Peptide Sequence Number=SeqID_74582
atgacggtggcaggcgcgcgagagcagcggtcacgccatctgccaagctcatgtcccatccggaggcagcaagagaaccccctctcacggcgtgaagacgacgcgccccgctacgggcggaagcggctggcgacgtttcgccttcgccaaaacggccgcgccaaaaaagggaccgggaaagggggtaccctcaaagggatccttccccgcgaaggaactaggctccgagcctccctactgatcaggggttcgaaggctggccccccgaggggttcaacagccgccttagatcgcgtgcgcccgacacccactactggtcaggggttcgaaggtcggcccccgaaaggttccacgaccgcctcaggctactcgggctccgtgccccctactgatcaggggttcgaaggctggcctgtcgaagggttcacagtcgccccagacgccgagcgagggatgaccagggatcacccgcagctcaccggagacaccatgttcggtgcccatcgagggctcgggggctgctctcgcaaacccggctccggccgaaccgttgacagcgtcaacataccagcccgagaacttgggccccgaccgtgcacctgggctacgccctgctcgcatgagggaaccgccagaccagccgaggcattacgcaaggcattaagacctcggaggagtgaaaccactcctccgaggcctcgggggctacacccggcgggtgcgctcgcgcgcacccaccggaaccaagtaccactgagaaaggctggtccccttgcaaaaaagtgcgacgcaagcctccaagcgagtgttaacactctcttcgaggctcgggggctactgtcggggaccataattaggggtaccctcaagacgcctaattctcagctggtaacccccatcagcataaagctgcagaggcctgatgggtttgattaa

SEQ ID NO: 32804 - DNA, 555 bp, Zea mays
  Peptide Sequence Number=SeqID_74583
atggtcccaacagatagcaagtggtggtataactcgtgcagaaaatgcgcctgcacagctgtcactcacagagactcttacaaatgcataaaccgtgattgtgctaacattgctatgcccatccaaaggtataaaatacttgtcactgcaagagacgagacaactgatacagacttcattctctttgggcgcatggctcaaagaattgtcaaaaggtcttgtgatatgctcatagcgaacactccatcaggcttcattccagatgcaatcacaaagctgcttgaaaggacgttcatttggaacgttagcttctctgggcacacaattaactctggaaacgtctgcttccaggaaaccgttgacgctggagatgctgagcatgtgactactcagtcctcaacaactaggaagagatcatgctcttcgcctggcaaatcaatagcgaaaaaattgttcgttgctgacgatgaggaaggaagcattagtcaatccagtggaggtggtgttggtggatccaggtcaggttgtttgagctctgattattgcaactcatga

SEQ ID NO: 32805 - DNA, 1252 bp, Zea mays
  Peptide Sequence Number=SeqID_74584
atcaacggtcacaagaccttcttcctccccccagtcagcacaggcggcggcgccaaaactcccacggcggcgaccgatgagcccccacccagaccagcctcctggagcgcgatactttatccccagaagtctctacccgaaaaagaggctatggtgaacttgagatcactggtcttaccgtacatggcggggcagtggagctgcccacggcgtggagctaccggcggcgacagtctcacgacgatgagcatctcagggcacacccaggggaagcagcagtttggttccggccggatcgacgaggttgttgcggtgaatcgggatctcagcgcgcaatacggtattctgttgcgtttctccggtgttcggttcaaggaagatgacgaccctgccaaggtggcccaccagcagcagcgggacaacgacgcgagtgagctgtgtgggaacctgtctgtgacgatatgcgtccgtgtttctcggttttgggacttttctgatcctcaggatgctgcaaggctgctacactgtgatatggtgttgctcgatgaagagggaaatagcatacatgctacgatatacccacccttcatagagaaattcaggccactcataaaagaaggcagcgtgtacaacatgacatactttcgagttcgagcgtcgaacaacttgtataagccagttccaaatgatatcatgattaccttcacgaattggacaaagttagagcaggttattgagattcctcctgcatttcctacacttacctactccctcactcacatagagcagatccattcacgcatcgaccataaagactactatacaggagacgagacagctgatacagacttcattctctttgggcacatggctcaaagaattgtcaaaaggccttgcgatatgctcatagcgaacactccatcaggctttattccagacgcaatcacaaagctgcttgaaaggacgttcatttggaacgttagcttctctgggcacacaattaactctggaaacgtctgcttccaggtcaatgctactgtaaaggaactaggcaatcaaaatgttgacatttcaacatcaaccatagggacacaccagtcttcgcttatgttctcacaaggtgcaagcagcagcatggaagacactcctcacaagacagacaccttgccttcacctctgacacctttgacgccccagggtagcgtcgccactacaaagtatttggtacgtgttccaaacgcctacataaatg

SEQ ID NO: 32806 - DNA, 324 bp, Zea mays
  Peptide Sequence Number=SeqID_74585
atgcaggcggcatgcaaccgcgccaagtgggcgcacttctccgacttccaacacgcccagcatggaggcccaggcccacgcgtcatgcaaccggcgcgccggatgctacgtgcgagcaactgcaccgccactcatgccactgccacgcctcctcaactgcggaaccagtaccgtgactcgaggcaaccctacgcacgacccagcagcgccagcctggcgcgatggtcaatatggccaaaaatgggccggcgggaccgggaaagggggataccccgaaaaggatccttctccgtgaaggaaccaggctccgagcctccctactga

SEQ ID NO: 32807 - DNA, 921 bp, Zea mays
  Peptide Sequence Number=SeqID_74586
atggctgaaaggtaccaactcccacgaagttgtgttcctccaacgacaaggcggaaggattgcgggtgtcccctatccgggggctcggaaggtggaaagacgcgatacataagggagcgcaaagacatggtcgcctttcaaggggatcaccctccttttaaaggcgactctccccacttgcgtcctcagccatcgcgggctgagtcttctccaacacgctccaaggtcctccccctacggcaggggggctgggtcccacgcgtcatgcaagctggcctagggcagaagaagccaaaccgctgcgcgcggtgcatgcaactgcccagcggttacaagcattcctccactttcgcccagaccagcgggcccacacgtcatgcgaccggcgcgccggttgctacgtgcgagcaactgcaccgccactaccgcgcctcctcgactgcggaaccagcaggcagaagcagtggtcacgtcgtcagccaagcttacgtcccttccagggacaacaaggggaccctctcccacggcgtgaagatggacaggcggcacctttggcaggagaagcgggcgacgcttcgccttcgccataatgaccgcatcaaaaaagggaccgggaaaggggataccccgaaagggatccttccccgtgaaggaaacgggccccgagcccccctactgatcaaaggttcgaaggctggcccctcggaggggttcaacagccgccttagagcgctcgggctccgcgcccactactggtcagaggttcgagggtcggcccctcggaagggttcaacggccgcctcaggccactcgggctccgcgcccactactgatcagggcgggaacgattttgtaacggaatcccatcagagggaggcatcgagccctcggaccccgtcaaaaggggaccgggtccggtag

SEQ ID NO: 32808 - DNA, 414 bp, Zea mays
  Peptide Sequence Number=SeqID_74587
atgggcgggggcagcaggttggggaggaagaacaggacgaaggccaggaagacgaatgggacgtccgacgacggcgaaaacgatgcgggctatccgttggcgtttcccgaagctggcgagttcctgaggccgacctcccttggcgcaccggacactgtccggtgtacaccggacagtccggtgaattatagccgagtcgccctggaaattcccgaaggtggcgagtttgagtctgagtcccctggtgcaccggacagggaggaggcgcctgctactacgccctctgtcgagaatgtggtggtgcgaaggtggaggcatgaggggagagagaaaagaagcaggatggtgaacgaggtagtgacaactgagacgaggatcatcattatcgtgcggagatacgacctctttatttaa

SEQ ID NO: 32809 - DNA, 133 bp, Zea mays
  Peptide Sequence Number=SeqID_74588
atgcgcgcaccatcgttttcgccgtcgtcggacgtcccattcgtcttcctggccttcgtcctgttcttcctccccaacctgctgcccccgcccatggtcacagccgcgagccgaccgacgcacgttgacacgg

SEQ ID NO: 32810 - DNA, 537 bp, Zea mays
  Peptide Sequence Number=SeqID_74589
atgacaaccgtccccatcgattccccgttcgcgtccaggcctcaccgccttggcatacaatgctccactgaccccggctgccgccgtgcagtgaccgcacttcgagattgctccggtgaagtggtcgaggacgtaggggaggtctcggggatcacaacgggaggttcacgggatgccagagaagatatgagcgcaaggaattgggcggagactcactggatagctcggtccacgcgcagcggcggaagaccgaagtccggtgaggtcgatctcgggcctccggtgaagtctggccgggtccgagggcttggcaagcttcacgggctactggcggagctagccgaagcactggctcgacttgagggtggctggagtgggctggccacggtggccgaagctctggcggcaatggcgggcggaattgagcttgccggagctaaggaaagggggctggccggtgaggagatatggagccaggaaatccggtctgtctccctgcccaaatccgaggcaaatcctaggttttgtcgtgtctag

SEQ ID NO: 32811 - DNA, 219 bp, Zea mays
  Peptide Sequence Number=SeqID_74590
atggcagccggggtcagtggagcattgtatgccaaggcggtgaggcctggacgcaaacggggaatcgatggggacggttgtcatgtgtggtgtcggagtaccctgacatgccgtaccattcaggaaatggttgatggtgtgacttggcctaccaccctgccaccgggttggacggtcgagtgggatgttgctccggcaggagaggagcacgaggagtag

SEQ ID NO: 32812 - DNA, 765 bp, Zea mays
  Peptide Sequence Number=SeqID_74591
atggggtgcacctgcgttgccttctttttgctgctgtttgaggagcgcgaccccgtggggttggcgctcttcagtcaccgctcggcttcaaggattttcatcatgcagcccggctgcagtccctcaccaatggtcatccgtagggatgatcaccagccttgtggtggggagaagcaagccgggctgcggcctctgccccgccctcagcttcaaggatgttcatcatccgggctagggaggagggcgcgccgagttgggtcctacctcccacgtgggccggtggcccgcttcttcctccaacattcgggggagaagggcatcctccagccctgtggaggagacgtcctccagctatgcaagggaaggcgaactgctactgcctggtcagggtggctgctgtcgccggtgctgaagtggtggccgccgctggtgaggcttcccaccgcagcggtggttgcttccgccgacgagaccgtcagtgccacctgcgctccggacctccagctctttggctttaatccgcccgagacggaggtcgttgtcgcgctgctggtgcagtggttgccggcgagccacctggagtttgttatcccgcaggccttccagtcgggacaaccgccgagggcgctgccgacgtctaagtctaggtaccattgttaccccaaaatcacttatccgagcatgagctacctttcgcggaaggtgacgagtgagaaaacttttccggggaaagatttgacgcaaagggggcttccccctttctaa

SEQ ID NO: 32813 - DNA, 345 bp, Zea mays
  Peptide Sequence Number=SeqID_74592
atggccacgctggttcgtcccgagcgtttccagactgaggaggcgctcgacgtggtgcgccgcctgctcgaatggagcacgccggcgttcgccgtgaagatctggtccgccaagaaggaggtgcacttgggccagagggaggaagtcatcatggagctccagacgaagctgaatgcctacaacaagatgctggaggagcagcgggaccagcaggtcgcggctgtggagaacctgcgaaaggtgcagcaggggcttgatgacagggccagcagccttgccctggccgaagagaacctcaaggagaaggatgcctccctggataagcgggcggcggatctcgcctag

SEQ ID NO: 32814 - DNA, 705 bp, Zea mays
  Peptide Sequence Number=SeqID_74593
atgctggaggagcagcgggaccagcagaccacggctgtggagaacctgcgaaaggtgcagcaggggcttgatgacagggccagcagccttgccctggccaaagagaacctcaaggagaagaatgcctccctggataagcgggcagcggatctcgcctggcgggagaaggacctcgccttcagggaggaaatgcttgaagaggcggaggagaaggagcggacgctaggggagcagatccgccagttcgtggcggcgcaggtggccccaggctcccaggctgtggaggcgatgaggaagacacttgaagatctccgggtggagcatcacgctggggtccaacgtatcaccgcctgggccggcgaggcgagctcggcactggtgccgctgggggtgagccccatcccagtgtcggagcagccagcgtccatctccaacgcgctcccggtgctggattccaccgccaaccgcctccgacgcctggaccagatccttggcgcccgcctggaggccaagggcaacagactctgccggtcggtaatagagtacatcctgacgtgctttcgaagccacgacccggccgtctccttggtgccggtgatcgcaggtctggtggccgacaccgaagatgtcgcccgagagggcgtacaagatgttgtggatgcggtggtcgagcgcttccagcgggatcccgcttatgatgagtag

SEQ ID NO: 32815 - DNA, 282 bp, Zea mays
  Peptide Sequence Number=SeqID_74594
atggcagtcggggtcagtgaggcattgtacgccaaggcgctagtgcttttggcaaccaaaccccacagccaaacagctgcatgtctagaggtagagggagtagactcctcacaccggatgacttctcacgtatcctcggacgaagggaatgcacagtcccacactgacgggcttgcacgagagggattcccccgtattttgtgggaagtgcttcagggagctggttacacgacgcctcctcagtacgcggtgcagcagttcgagaagcaccgagtgccctga

SEQ ID NO: 32816 - DNA, 441 bp, Zea mays
  Peptide Sequence Number=SeqID_74595
atggggaaaagcagcgatggcatgaggagcagtgaaggggcgagctcggatcagagttatggcgcagcacctccaaagggaaaaagcagagggaggcagatgcagtggagaaagggcgcagggagtcctggacgccatggccagccgacggtgtggccgagcagaagggggtgctggccatggaaaggctgctggcggccatggagatcaggggcgtcgacgtgctcccaaggagctcctgctccagcgggaggtgagctcggccatgggaatggcgctcacgccatggctggagctgcagctgccgtgggaaaaaccagagaggcggactgcgtacgtgagaagaaggtggctggtggcggctgggaaaagaataggggtgggagtgcaaaaatgcctccacttgcaaggagatggctcctatttatagagaggcactag

SEQ ID NO: 32817 - DNA, 228 bp, Zea mays
  Peptide Sequence Number=SeqID_74596
atggctggagctgcagctgccgtgggaaaaaccagagaggtggactgcgtaggggagaagaaggtggctggtggcggctgggaaaagaataggggtgggagtgcaaaacagccaacggcaagggagaggtcggagaaggcgaatcgtgatattttaaaatcgctgtcgatacggggttttgagttcagtccagacatgagatatttggccgagtggagtaagaattaa

SEQ ID NO: 32818 - DNA, 912 bp, Zea mays
  Peptide Sequence Number=SeqID_74597
atgccgccagccagtagcctcaccgccgaccagctcagcttcttcgaggccaatgggtacctcgtgatggactcgttctcgagcgcggaggaggtgcgggagatgcgggaccgcatggccgaccttgtcgctgggttcgatggcgccaactccgcggtgttctccaccaaggatcatcggcagttaaaggacgactacttctttaagagtgctgagaatatctcattcttctttgaggaaaaggcatatggagatgatggatgcttgaaacagccgaaagaactttcaattaataaagttgggcatgcattacatgaacttgatccggtgttcaaaaagttttctttctcagagagtgttgcaagcttgttctcttctttaggctacaagaggcctgcagtcattcaatctatgtacatatttaagcaaccaggtattggtggtgaggtcgtgccgcaccaggataatacattcctttacacggaacctcgtacatgcacagggctgtggcttgcacttgaagatgcaacaatcaacaatggttgcctgtgggcaattccaggatcacataaaaagggtttggtgagacgtatggtcagagatgaaaatggtacacattttgatcggccctccccagtctatgatcagaaagaatttgtaccgctggaagtaaaatctggtgctttggtggttatacatggagatcttatacatcagagttttgagaacctttctccagcgtcaagacatgcattcagcttacatgtagtggatactgaaggatgtaaatggtccgaagacaactgcaggagagttcgtccctataggtcagatctttactcgtgctttgagtcctctaagtctctacacgatgatccacctctcatagttcagtccatatcatgtgcctag

SEQ ID NO: 32819 - DNA, 1269 bp, Zea mays
  Peptide Sequence Number=SeqID_74598
atggtcagagatgaaaatggtacacattttgatcggccctccccagtctatgatcagaaagaatttgtaccgctggaagtaaaatctggtgctttggtggttatacatggagatcttatacatcagagttttgagaacctttctccagcgtcaagacatgcattcagcttacatgtagtggatactgaaggatgtaaatggtccgaagacaactggcgcaagcaagctacgcctacaaaagaagcatctgctctttacgctgctcagtctcatctcgtgcaaggcgaaagttcgttcaatgctcatacctcactactggcaagggataagctttatgatggtgaacaacctctgagtgcagagttgggtgaagagcttggaaagactcagccactcagtgggtactattcctcactgcttacagatggcaaagacagaatagaagatgggaacaggatagaagtaccagttacaaaagatccaatagaaattccctcaataaagcaaacggagaggaatttcgaattgtggcaggtgctgcctccacctggtaacggtgggctgaaatactatggttatttggaagagtggtcagaaaatcatgattcctttcgccacgagcagaatttggttcagtggactgagaaaaaacggccatatgttgaagcccttttcatcgtggtttatattcagtatgtgcactctcatttttgctcatatggccctgcagatttggttgtcctcaaatggtttcacctaatacgtttagtgtcgaaccaaatatttgccagagtcgtactggaagacgggatctcgctgacggaggtaggagggctgctgcaggagtgggatggcagggaagagccagcaggacagcatgccctggaggacagcctcgcatccgaggatctggggagcatgctggagtccatcaaagtggagagggccaaatattcactgatgtgctttcagttccctattggacgtatccaccgtcagctgaagcaaaggactcaggcaaatggtcgtgttggtgccaccacagccgtctactcagctgccatcctggagtacttgactgccgaggttctggagctggctgggaatgctagcaaggatctgaaggtgaagcgtatcacccctcgccatttgcagctagctattcatggagacgaggagctggacactctcaccaagggcaccatcgcaggcggaggtatcataccgcacattcacaagtccctggtcaacaagtcatccaaggagtga

SEQ ID NO: 32820 - DNA, 744 bp, Zea mays
  Peptide Sequence Number=SeqID_74599
atggccgggagatccgcacccaccttgcctccactcaacaaccgcacacccactccgcatcccaatccactagctccggcctcgccccctcacccgcgtgttcccctcccccgcctcgttcgcccctaccgcaccatcaacgtgcctccccaccgcccttgtcctccccatgcccgccactcccacccgagatggttagcgcccctcctccttccggtcccttcccctgcctccgctctcaacgtggccggccagccatggagtaaggctaggggattcgccggattcaccaagcgggctctggtggcggccggcgccgccgtcgtgtcctccattcccgtcaaccccctcgacgtcgccaagaaaccttttgtgcacagatatgtttaccagagcctatacatccaactagagaaacagctagccaagacatggagaagcacaaggggtcgtacaaccagggaccgagggaggactgggagatcgaactcgccaagcttctgtcaaccaaaagaaaatcatgttcctcaacagatagcagaacatcgtagaattatgtgtggtaaaaagagcctgactgcaaaaggatatgaagtcgtctccaatgggattgacaaccatttagtttcagtgaatctcaagaataaggaagcgaagggtactagagctggattaatgggaacaaccattttagcaatggtaaattgcattgatgattcccctactaattttgaacacaattaa

SEQ ID NO: 32821 - DNA, 324 bp, Zea mays
  Peptide Sequence Number=SeqID_74600
atgcaccgtgctacacattgctccatcctctcctcacctgtgaagatatgcagcaaaatgcaaagcctgactgcaaaaggatatgaactcgtctccaatgggattgacaaccatttagtttcggtgaatctcaagaataagtgtggcaacagacatttagactgtgctagaagaaacccagctgaaattttaggaggaaaggttgccaaaaaagctttagatatggtacttgcagatgataacttcagtactatagttgcagtagttggtgaagggaggtctatttacaacaacatcaaggcttttaatatcaagagattatga

SEQ ID NO: 32822 - DNA, 1833 bp, Zea mays
  Peptide Sequence Number=SeqID_74601
atgggcgaggagtggtccctcgccgccttctctggatggatgccgctcggcaacacgcacgccatgctcggccgcatggacgactccatcacctgctacggcaaggggctccaaggaaccacaaggtcatcagagcgctctgtgtgggattattatattgtttttggtttggatttggaatggtttggggtccacaacgatgatgcgtcagagctgttccaaggattggatgatttccattcccccgctgccaattcgactaggctcgccgtctccgctccgccaaccctggcaccaagcagccaatggaacttgaggaggttcattggccgtcgaggcttgatgcctaaccgacagttggttattctccgaactgcttcgacgcttcaactcaatccacatgtacccagcaaaaggagttcagcaaagggagcaaacctggcccgaatagttgtcattttagtttctgggctggagaaggacgagaggagtggtgaaggtgcggaggatcaggcgatcgacgactggctcccaatcacctcatccaggaatgccaagtggtggtactccgcgttccacaacgtcaccgccatggtcggcgccggcgtgctcagccttccttacgccatgtccaagctcggctggggacctggcatcgcggtgctgatgctgtcgtgggtcgtcaccctgtacaccatgtggcagatggtggagatgcacgagatggtccccgggaagcggttcgaccggtaccacgagctcgggcagcacgcgttcggcgagcggctgggcctctggatcgtcgtgccgcagcagctcatcgtcgaggtgggcggggacatcgtgttcatggtcaccggaggcaggtcgctgaagaagctccacgacgtggtcgtctgcgacgctgccggcaggtgcagcgagggcggcggcgacatcaggctcacctacttcatcatgatcttcgcgtcctgccacctgctgctctcccagctccccaacttcaactccatctccggcgtctccggtctccatcgccgccgctgtcatgtcactcaggtacgtacttactcgaccatagcttggggagcgtcggtgcacaagggcaagctgcccgacgtggactacgaggttctggcggcggcggcgacggcgtcggagaaggcgttgagctacatggcggcgctgggggacgtggcgttcgcgtacgcggggcacaacgtggttctggagatccaggccaccatcccgtccacgccggagaccccgtccaagaagcccatgtggaggggcgtcgtggtcgcctacgccatggtcgccgcctgctacttccccgtctcgctactcgggtactgggccttcggcaaccaggtcgacgacaacgtcctcgtcacgctcagcaagccccggtggctcatcgccctcgccaacgccatggtcgtcgtccatgtcattggcagctaccagattttcgcgatgccggtgttcgacatgatggagacggtcctggtgaagaaactgcatttcccgcccggccttgccctccgtctcattgcccggagcacctatgtcgcgttcacgacgttcatagccattaccatccccttcttcggcgggctgcttggtttcttcggcgggttcgcctttgcgccgacaacctatttccttccctgcgtcatgtggcttgcaatctgcaagcccaaaaggttcagtctctcatggttcgccaactgggcctgcattgttcttggagtggtcctgatggtcctggcgccaatcggagcactccggcagatcatcctgtctgccaagacgtaccgattctactcgtaa

SEQ ID NO: 32823 - DNA, 315 bp, Zea mays
  Peptide Sequence Number=SeqID_74602
atgggcgaggagtggtccctcgccgccttctctggatggatgccgctcggcaacacgcacgccatgctcggccgcatggacgactccatcacctgctacggcaaggggctccaaggaaccacaaggtcatcagagcgctctgtgtgggattattatattgtttttggtttggatttggaatggtttggggtccacaacgatgatgcgtcagagctgttccaaggattggatgatttccattcccccgctgccaattcgactaggctcgccgtctccgctccgccaacctggcaccaagcagccaatggaacttga

SEQ ID NO: 32824 - DNA, 309 bp, Zea mays
  Peptide Sequence Number=SeqID_74603
atgtccagattcgcgccctgctcgcctagatccgaccgcgactttgatttcccaaccgacgcaggagcggtgggtctgaccggccgcgacccgtcttctcatgggcgcttgctggtgtggtttgctgatcaaaatggggatggtgcgatgcttccgttgcgccgtgctaagcccacaaagagtgcgaatgggcaggtctgccagatttgtggtgactctataggtgtttcagccactggcgatgtctttgttgcctgcaatgagtgtgccttccctgtctgccgcccatgctatgagtatgagcgctag

SEQ ID NO: 32825 - DNA, 384 bp, Zea mays
  Peptide Sequence Number=SeqID_74604
atgcccggattcgcgccgtgctcgcccatatccgaccgcgactttgatttcctaaccgacgcaggagcggtctgccagatttgtggtgactctataggtgtttcagccactggcgatgtctttgttgcctgcaatgagtgtgccttccctgtctgccgcccatgctatgagtatgagcacgaggggaaccaatgctgcccccagtgcaagactagatacaagagacaaaaatgttggtttcctggcaacttctttgagtgggactacaaggacaaggatggtgtcaagggcatatatgcgtatgagaacatcattgcatcatgccactgggcatacaagggtgttgaggaagactcaaccctagaagatccatatttcttataa

SEQ ID NO: 32826 - DNA, 420 bp, Zea mays
  Peptide Sequence Number=SeqID_74605
atggatcatcttccttactgcgctccacataaccccatccactatccgaacagcggcgcacccagggcggcgctggccacgtacaaggcgaagtcacggcgcagggaagacgacggcgagaaattccttgaagtccaggatataatccagcgagatttgctttgctccgacgagcacccatactcacgggcgattctccccagccttccgccttggtccgtaagccgacgtgcccgcatcccttggcgggcagggcgtgcgtccgtggcgaccttcacgggtcgttggcgaagatgccggtccgcagctgaggagctggcggtatctgactggcgggttccaccagacagtgccaaggcgcgcggcatctcaatgggccggggtgggccgacgtgtgcgataggagttgggctggcgtga

SEQ ID NO: 32827 - DNA, 1683 bp, Zea mays
  Peptide Sequence Number=SeqID_74606
atgcatcgtgtcttcccaccttccgagcccccgggcgggggacgcccggaatccttccgtcttgtagtcggaggaacacaacttcgtggaagtcggtaccttttagccatcgttcggcttcaaggattttcatcatgcagcccggctgcatcccctcgccggtggtcacccaagacggtgaccaccagcttgatggcggggagaagcgagccgggctgcgatcttggtcccgccctcagcttcaaggatgttcatcatcctcgctggggcggaggccagactgaaccggagctctacctcccgcgcgggttcgtgggtcagcctccccttcagcatccaagggagagggcgctcactagccctgcgagcggggcagacttcgacaacgcggggccgatcgacggtgggtgtcgccagctccagcatgttgggctcgccggcttggctcccgggctgtcctgcctttgcaatggtacagggcctccgcgcggaggtcggtgctctgctcgtccgggaggatccgagtggggatctgccgatgggctgatgctccactcgaaggcgccgaggtggatgcggcccgagaagtccccgtcgccgacgggatcactgccaccatccgtgctctgggcctccggctctttgtacttgtcctcgcccctcgagcgtcggcgcgggcgagggcaaggttgcagcggcttccgccctagggccatcgctgctgccgtggggacggaaccggagttccgtttgtattggcaccttgaatgccgcactgagactcgccttgtcgattatctgaaccgcttcaccgagcgtgagttgcctcgtgcaaaggtgacgagtgagagttggcttcgaaaaggaggtgtagttggccagagcctggccgggtcgtccactggcggaaccgacgccggagttgagctgccgaggccacaagccgatatgatgtctttggggagtgggggccctccgaccgcgtcgccatccgaggctaggtcagaccccgccgaaggtgtagttgatgccgagggtgctgctgcccccttcggctgtcgacgtccgagcctgcaggatcagtatccggactcatttgtcggtaacagaattgtttgtgcgggcgagagttgcttttcacggaaggcgatgagtgagatacaccaccactcgacgcagaaaaagccgaggaccgccatagccatagaactcgaaccagggggagggcaccgcagtcatcccctccactcgacgctcgtcggccacctcgggcgaagccatgcgcccccaccaagctatcgtcaaagagagaccgagagtgagagcgatacctcgccaagggatgcgggcacgtcggcttatggaccaaggcggaaggctggggagaatcgcccgcgcgtatgggtgctcgtcggggcaaagcaaatctgcgccgccgcgtggatgctcagcaccgtcgtcatccaagccttcggtaccgtgccagcgacttcctcgggcctgagggaaagaggtcgtggccgtgccacctgggaatttctaccagagctacctgaattgctcgccggagcaactccattgccgttcacccgcgctgcgccgtggcgggacctccaccgaggcggaacacgactctggcgaaggtactggggcattgatctggtgattgacggcgtagattag

SEQ ID NO: 32828 - DNA, 283 bp, Zea mays
  Peptide Sequence Number=SeqID_74607
atgtggcaaaccctgcccttcgtctcctccccacggtacccagctaactgggagactgcaggagccgcgccgccactgctagccttgccacccccgtctgaattcgtttggagtgaagaccctgttgagcgctgcgttgtcggtgtctgctcgctctctggtgtcgccagatcgcgttggggtcggtgcaaggagagaagaacggtctcggtggccgtattcgctgccgccgccgctacttcgccccacgccgtggaccaccgtcgattcgtcgtccctgctg

SEQ ID NO: 32829 - DNA, 354 bp, Zea mays
  Peptide Sequence Number=SeqID_74608
atgcggcaaaccctgcccttcgtctcctccccatggtacccagctaactgggagactgcaggagccgcgccgccactgctagccttgccacccccgcctgaattcgtttggagtgaagaccctgttgagcgctgcgttgccggtgtctgctcgctctctggtgtcgccagatcgcgttggggtcggtgcgaggggagagtaaagggattgtcgccgtgggctaatttcctatccgtgctagcgctggtgcttcaattgtggccgggtagaattgccagagcgcatggaaggcacggcgaccatcaattcgtgaagtacgacgtcaatgctggggtgattcctcgccggacttga

SEQ ID NO: 32830 - DNA, 525 bp, Zea mays
  Peptide Sequence Number=SeqID_74609
atggcgtttccattagcttgggtaacagctaactcatctgtggcagtccgagtatgccttggtcctgttgtcttaatatctaaaatgattaaaccaaggcaagaaaatattcctattcctgctactaacttggttgatgatccgcctgttcctccatctgccttcaacactgggatagattttaaactgaaggatgaagaagaacttaaagaaaggatggatgagatctgtaattgggcgtcttataggggtcaaactctcaccagaaaagtaagaggaatgatgtactacagaaaggcacttgaaatccaatgccttcaagatatgacagatcctgctttggataaatttaggaaagagtttggacgcttccctggtgttgcttgtggtctggatgcccaaaggttgtcaactgcttcatgcttaggagttagatctatccaggttgccaactgcttcattcttactgataatttcacagcgatggtagatcaaacaagcagagtatatatgaacagtaaatga

SEQ ID NO: 32831 - DNA, 723 bp, Zea mays
  Peptide Sequence Number=SeqID_74610
atggcttatcggagagcttggtccacgcgcggcggcgggcgaccgaagtccggcgagggcgatctcgggcttccggtgaagttctgccgtgtccgaggacttgggaagcttcacgggctaatggcgaatctaaccgagaggctagggacagggagttgtagcgtcaccaaggtgccagtgtcagaatgcctggtcccgaggtcaagctacgccaaaaccgtatcaaatgaatttggtttgagttcaaaattttctagagcgtgttcaaggaaatttggcacaactttgatatttggacttcctggttttgagtttcgaaaaacagagaacgcaaaggatctttggaacttccttcagtggatagattttaaactaaatgatgaagaagaacttaaagaaaggatggatgagatctgtaattgggcgtcttataggggtcaaactctcaccagaacagtaagaggaatgatgtactacagaaaggcacttgaaatccaatgccttcaagatatgacagatcctgctaaagttgaccgagacagatcaataggatcctaccaagagttgcaatctgatattgaaatggcacaagctattgctgatatcaaattcacatatgttgtctcatgtcaagtttatggcatgcaaaagacatcaaaggatttaaatgaaaaaaggcgctatcagaatattatcggtctcatgataatgtacagaagctaa

SEQ ID NO: 32832 - DNA, 1416 bp, Zea mays
  Peptide Sequence Number=SeqID_74611
atggtgaagaaatcccagctcggccggaccctcggcgaaggcaccttcgccaaggtcaagttcgccaggaacgtcgagaccggagagaatgtcgccatcaagatcctcgacaaggagaaggtcctcaagcacaagatgatcgcccagatcaagcgagagatctcgaccatgaagctcatcaggcaccccaacgtcatccggatgtatgaggtgatggccagcaagacaaagatatacatcgtcatggagctcgtcaccggtggcgaactcttcgacaaaatcgcctcgcgtggaaggctgaaagaggatgacgcaaggaagtacttccagcagctgatcaacgctgtcgattactgccatagccgaggcgtctaccaccgcgatctcaagcctgaaaatctcctgcttgatgctagcggcacgctcaaggtttcggattttggactgagcgcactatctcaacaagtccgagaggatggtctgctgcacacaacctgtggaactcccaactatgttgctcccgaggtgctgaccacggctacgcttttaattacgttcttattcccactcagtgaagtatcttgttctcattgtccagtgctcttgcgtctacaggttataaacaataagggctatgatggagctaaggctgatctgtggtcatgtggagtgattctctttgtcctcatggcggggtacctcccatttgaagattcgaacctgatgtcgctctacaagaagatcttcaaagcggatttcagttgcccgtcctggttctccacaagcgcaaagaagctcatcaagaagatacttgatcctaatgctaacaatagaataactattgcagagctcattaacaacgagtggttcaagaaggggtatcagcctcccagatttgaaacagcagatgttaatctggatgacgtgaactccatcttcgatgaatccggggagccagcacagcttgttgttgagaggagagaagaaagaccatcagtgatgaacgctttcgagttaatctctacgtctcagggcctcaatctcgggacgctcttcgagaagcaaacgggttctgttaagcgagaaacaaggtttgcgtcaaggcttcctgcaaatgagatactgtcgaagatcgaagcagcagcgggacccatgggcttcaacgttcagaagcgcaactataagctgaagctgcaaggggagaaccctggaaggaaaggtcagctggccattgcaacagaggttttcgaggtcacgccttccctgtacatggttgagctgcgcaagtccaacggcgacacccttgaattccacaagttctaccacaacatctcaaatggactgaaggacgtgatgtggaagccggagagcggcatcgtggaaggcgacgaggcgcggcaaaggaggtccccgtga

SEQ ID NO: 32833 - DNA, 945 bp, Zea mays
  Peptide Sequence Number=SeqID_74612
gaggatggtctgctgcacacaacctgtggaactcccaactatgttgctcccgaggtgctgaccacggctacgcttttaattacgttcttattcccactcagtgaagtatcttgttctcattgtccagtgctcttgcgtctacaggttataaacaataagggctatgatggagctaaggctgatctgtggtcatgtggagtgattctctttgtcctcatggcggggtacctcccatttgaagattcgaacctgatgtcgctctacaagaagatcttcaaagcggatttcagttgcccgtcctggttctccacaagcgcaaagaagctcatcaagaagatacttgatcctaatgctaacaatagaataactattgcagagctcattaacaacgagtggttcaagaaggggtatcagcctcccagatttgaaacagcagatgttaatctggatgacgtgaactccatcttcgatgaatccggggagccagcacagcttgttgttgagaggagagaagaaagaccatcagtgatgaacgctttcgagttaatctctacgtctcagggcctcaatctcgggacgctcttcgagaagcaaacgggttctgttaagcgagaaacaaggtttgcgtcaaggcttcctgcaaatgagatactgtcgaagatcgaagcagcagcgggacccatgggcttcaacgttcagaagcgcaactataagctgaagctgcaaggggagaaccctggaaggaaaggtcagctggccattgcaacagaggttttcgaggtcacgccttccctgtacatggttgagctgcgcaagtccaacggcgacacccttgaattccacaagttctaccacaacatctcaaatggactgaaggacgtgatgtggaagccggagagcggcatcgtggaaggcgacgaggcgcggcaaaggaggtccccgtga

SEQ ID NO: 32834 - DNA, 888 bp, Zea mays
  Peptide Sequence Number=SeqID_74613
atggagagtaagacagaagactgtactccagcagggatagctcagcgatgtaattggccaggaactccagatgcagagcaggatcctgtacaaacaaagagtaggggcattatcacagaatccctgcctgccacatatacatggatgatgcaaaattacagtatattgaatgaagttgatatcaagcggcgccaagaggatgacataaatagggtttcaactgttctttcaatttccaaaccagaggcatgtgtcttctccgcaactataactggtacagtcctcacctgcaagaagattgctatcaaaattaggaagggcgggcctggtgcagcggtagagcctacagtctgtaaccggaaggtcccgggttcgagccccagcctctgcatattatgcggggcacatggtgcttatctgtcatttttcgtgttgttaattttagtgttcgattctaatgttcaccctataggagtgttaaatatgcaccagggctatcccaaagaaacactggtgcatttccttaaggctagagagtggaatgtagcaaaggctcataaaatgattgtagaatgtttgaattggaggattcaaaatgaaattgatagtgtgctggagaggcctatagccccagtagatttatacagatcaatatgtgattcacaacttattggcctgtcaggatacacaaaggagggtctcccaatttttggcattggtgttgggcatagcacatatgacaaagcttcggctacaactacagccaaaatcataaaagtgtctggtttgaagctatcagcactaagccaaataaagaaaagagttaagaacgtgggtacccacgttcttaaggttaagaacgtgggtaccgtcgaacttattgtgtag

SEQ ID NO: 32835 - DNA, 369 bp, Zea mays
  Peptide Sequence Number=SeqID_74614
atgggtacccacgttcttaaggttaagaacgtgggtaccgtcgaacttattgtccgcgtagacctccgcaggacacataagttcgacggccacgtgaccccgtcgaacttaacattaagaacgtgggtgccgtcgaacttatgggaaaaaattcgacggcccccgtcgaacttaaaaacgcacgttcttaatgttaagttcgacggtaccaacgttcttaatgttaagttcgacggtacccacgttcttaaggttaagttcgacggggctgtcgaacttacttctctaagttcgtccaaaaatcaccgtcggctatattcgtcggtaaacccacgttcttacggtaagttcgacggcttattacattaa

SEQ ID NO: 32836 - DNA, 738 bp, Zea mays
  Peptide Sequence Number=SeqID_74615
atgggagccatggctgagctccctgttcctctgctccaagggcgcgacgccccctgctcctactccctcgcgcggcagcagctcccatggacgcccagaaatttttccagcgcctccctgttcatcttcctcccagccggcttccctcccctactgctgctcgcccctttcctccttttccctggtgtggtagcaaggagcctctgctcggactgcagccacggcgtccaagtccctgcgcccagccctccgatccaaaaacagcagccctgcgcagagccccttcccttgctcctttccgatgagaggaaccccgtgttttgcgaggagaaggcaagccgctcaacgctcgtcgatgtgtggagctatgcacaaatcggaatcgccatcgttcttacaaacgtcgattggttgaaatgcgtgtggttctggtcgcgggtaaaaattagtagtgctcatgtggtgtctaagttaaaatgtgaactagtgggtgaaaagcgtttcgacatacatgcacgaaatgacttgaacaaaatttgtaagtcgactgttagccctcatttgattaatttagctctaacaaatgaaaagtcatatggaagagttgtagataacatgattatcttgcttgcactagaatttgacagccctaaacctgatcgtttaggagttgtgcttttcacaagcccagcacctgaatctgtcgaatttctgaacagatttcagaaattgccatag

SEQ ID NO: 32837 - DNA, 532 bp, Zea mays
  Peptide Sequence Number=SeqID_74616
atggcggcctcccttcctctcctcggctccattggtgtaggtgagcagcagttcctcctctcctccagggcgtcgcatctccagtcggccttattcctcccccccatccgagcgcccaagcctgcgcccttccctgctccatgggcctccctactcgtcttccaccccgccggcagcttggggtccgagcaggcacaacaggagcatagccccatggcgcccagagccgagctccattcctggccgtgcccaggaagtcctgtccgtgggttggggccaaggctttccctggttggcctcgccgtgagcagcacccccgatatctgcgcgcgctgccggctcgctgttttgggaagcccagtggacaacacgacgtcgacgctcaccgggtgtttgctgtttttgcgcagccccatccgcgacgtcgttcacccccggagaaggcaagccgctcaacgctcgtcgacgttcggagctatgcacaaatcagaatcgccatcgttcttacaaacgccgattgagtttgtttatg

SEQ ID NO: 32838 - DNA, 225 bp, Zea mays
  Peptide Sequence Number=SeqID_74617
atgccatgcatgcctgagcctgatggaggcgagggcggtgagggaccgccggccgccggacaggatctagaagacgaagggttccggagacctgctctcctgatcgcagatgcacctctgcggtcgggacgaagggaactaaaaggcggctcagctatgaagagaggcgaaagcgaaatgggatctgggatgatatggaggctggctgccgggctccttttatag

SEQ ID NO: 32839 - DNA, 456 bp, Zea mays
  Peptide Sequence Number=SeqID_74618
atgcaagagccaaagttgaatgatgttggaccttcatcaaacttaaacatgcatgttatgtatggacacaccgaagatagtttgctttctattgatcttgaaggggattggattatagaagagaaaccaagaactgaaactacattgcttggagatagttcagcggagatccttgatgacgctcacatggtgatgtctgctgaacctttcaatgtgcctggttatttgaacttggaggatctagaagacgaagggttccggagacctgctctcctgatcgcagatgcacctctgcggtcgggacgaagggaactaaaaggcggctcagctatgaagagaggcgaaagcgaactgggagctggggatgatttggaggctggctgccgggctccttttatagggccgagtccgcgacccccgtgcttatccgcccacgaaaatctcgcaatcagttga

SEQ ID NO: 32840 - DNA, 1179 bp, Zea mays
  Peptide Sequence Number=SeqID_74619
atggatatgatcgacgacgatcagctctgggtggatgggggcggagtcgttcgtgcgtgcgtgaaggtgttcggggatcgatgcttctggttctggttatttataaggcctaggggtgacgatagatctgcattgattcattccttggacatcttcaagaaggagttcggcgccagggtctgggaccgcgagaagctcgtcgtcatcccggaccactacatcttcaccagcgacgaccgcgccaaccgcaacgtcgacatcctcagggacttctgtgcggagcagaacgtcaagtacttctatgacatcaaggacctcaggcagcgatttcggagctacaaaggcgtctgccactgccgaccaggcgaggttctcttgggcactgattctcatacatgcaatgctggagcctttggtcagtttgcaactggaatcggaaacactgatgcttataagctgtgctacatttgttcctttcttaggatctaccatattattggtgagatttcagtatctggtgcaacctacaaatcaatggagtttgttggatcaactgtagaaagtctaaccatggaagagcgtatgacactatgcaacatggttattgaagctggtggaaagaacggtgttgtgcctgctgatgaaactacatttaaataccttgagggtaagacatcagtcgattatgaacctgtctacagtgatgctcaagccagattttttagcgactaccggtttgatgtatcaaaactggagccagtagttgccaagggaaagaaggttaaagttcccacatttcttgtccctgccacgcaaaaggtgtggttggacgtatatagcctccctgtaccaggatctggtggcaaaacttgctcccaggtatttgaggaggctggttgtgacacaccagcaagtcctaattgtggtgcttgtttgggtggccctcgtgatacatatgcacggatgaatgaacctactgatcagctgagtcgacgatgtcagaagatcacgagcagtcgcgtgaagacgcttcccaaaaaccttattcgtcctctcccggtgcaggatctagaagacgaagggttccggagacctgctctcctgatcgcagatgcacctctgcggtcgggacgaagggaactaaaaggcggctcagctatgaagagaggcgaaagctaa

SEQ ID NO: 32841 - DNA, 156 bp, Zea mays
  Peptide Sequence Number=SeqID_74620
atggcgcatcaaatgctgccgctgtgggttcctatttatacgcccaacgctttgcaacttggtgggccccatttgtcattgactttcgctattctagagaagggaagatcattgtatcctaagagagataatgcttcgaaggacgaaggtctttaa

SEQ ID NO: 32842 - DNA, 258 bp, Zea mays
  Peptide Sequence Number=SeqID_74621
atggcgcatcaaatactgccgctgtgggttcctatttatacgccaaatgctttgcaacttggcgggccccgtttgtcattgactttcgctattctagcgaagggaagtcacagggaccttcggcctcggaatgaagttgtatacgatatgaaaagcatgttcgggaagaagattgaaccagttctgaagctacgcgtagggaagcttcggcttagcggcggaaaatggaaccgacttaaagaggaaaaggctatttag

SEQ ID NO: 32843 - DNA, 828 bp, Zea mays
  Peptide Sequence Number=SeqID_74622
atgggagaccacgtctcaggtcgcgtgaggggatatgtccactgccaggttcactcaggtttaaacagtacccgcgagaaagaaaagggtggcgcggcttaccggcggcgagagaggtccggcgaggggcggggttggctccgggagttcctggtggtcacaacggtgtacggctcgacggcgggggtggccggaatcgcccggtccacgtgcgcaggcgggtgctctcgtcggcggcgggtgtgccggccaaaccatggcgacctagtccaatccaatggcacggaatcgaggaatggagcagaggattacccggtctacgctcgccagcggtcgggtggagtccagcgaccgtggactggcctctccggcgaagcaaactccaattcctcgctcggggagcttcaccgaggtgtgctcagtcttctccaagggtcggatggggttgggaaaggctcggttggccggtctacggtggcagggggatcgggcagccgcagacacaccgtgcacgggcaaacgccggtgggtttgggctccggtgaggtcgagcgtgcgcggaggggtacggccgaagtccctgggggctttataggcgcgggcgcgggcaacggcgccggctgggctttggcgcgacgcaggcacgcgaggtcgggcgcgggcgtgctctggcgcgcgcagaacgcgtcgaacacgtggaggtgttcatctgcccgtgttcaaaagcttgctgagatcgcaaacatgcgaatcgtggcaaaaatccggcgcagacctcttcctggcacctatggctatctcttatatgtgagttccaagggaagataa

SEQ ID NO: 32844 - DNA, 360 bp, Zea mays
  Peptide Sequence Number=SeqID_74623
atggactggcctctccggcgaagcaaacctcgattctttactcggggagcttcaccgaggtgtgctcagtcctctccgagggctggacggggttgggaagggcttggctggccgatctacggtggcagggagatcgggcagccgcggacacaccgtgcacgggcaaacgccgcgcagacctcttcctggcacctatggctatctcttatatgtgagttccaagggaagataagccctaggtcagaagatatgcggacgccaaatctggcttgtccccctgcccgctgcgcgacaaaagtggtgccaagacatgtcaaatgtcaagggctcggtcccaactttttccagggggtgccttag

SEQ ID NO: 32845 - DNA, 543 bp, Zea mays
  Peptide Sequence Number=SeqID_74624
atgactgaagaacgccaacccccacgaagtcgcgctcctccaatggcagcaagaagaaggcaacacaggtgcaccccatctgggggctcggaaggatcgagaaaagggggatatttcgaaaggattcttctcagcgaaggaagcgggccccgagccctcctactgatcaggggtttgaaggttgcgccctgcgaggttcggcaaccgccccagagcactcgggctccgagccctttactgatcaggggttcaaaggctggcccctcggaagggttcgacagctgccccaaagcatgcagagtcagggatgaccctgggtacgtctgttacatggccaaggctcgggctacgctcctgaggtaccctaggacatttccgagaccagcgggaatgatttgtaatggaatcccaccggagggaggcgccgagccctcggaccctatcaaatgggttcaggtccaacaaatcaactgcagaggctcagaggctgctctcgcaccagactacggccaaattatcgaccacgtcgacaaactagcttaa

SEQ ID NO: 32846 - DNA, 612 bp, Zea mays
  Peptide Sequence Number=SeqID_74625
atgatgatcgtcggcctcgtggtggggaagagtgagtcgggccgtggcttctcccttgccctcagcttcaaggatgttcatcatccgtgctggggaggagggcgagccaagttggggccctgccttccgcatgggctggcgacccgcttcttccttcagcatttgggggagaagggcatcctccagccttacgggggaggcgaactaccacctgctgcccggtcggggtgtggctgtccgtccaccgcacgggcgacggtcgcgccgtgcgcaggccggccatgttcatggcccttcccgcgccgccggccgcaccggggggtcgcacaacacgtcgtacgccgcgagggcggtgttcgtgttctgggacagtctcgtcctcgcacctgtggcgaggacgggagtgaggacctaccggtgcgcattggggcggccgccattcgccggtgtggcgttggcgcgcaggtggccgctgtcgtcggtgctgaggtggtggtcgccataggggacatgagcgagggccttttcgcagtagcgtttgccctgaggcaatcactgcagctgtctagccgcccgaggcggaggtcgttgtcgctgctggtgcagtggtga

SEQ ID NO: 32847 - DNA, 308 bp, Zea mays
  Peptide Sequence Number=SeqID_74626
atgaccgtgatgagcgtgatgaggatcggtggctacgcgtctttggagatcgggagaggagctccccgctcctgcctcgtcggccgcttcttcgccaccggtctcttcgaggaaaatgctgagaggatgcgaacatgtgctgagaggatgtgcatgcctgcaccttctatcgagcagtttattgatgcagtaaaacaaaccgttctagcaaataagagatggattcctcctacaggtaaaggttctctgtatattaggcccttacttatgggaagtggggctgttcttggtcttgcacctgcttctga

SEQ ID NO: 32848 - DNA, 300 bp, Zea mays
  Peptide Sequence Number=SeqID_74627
atgtactttggtgcatcctacttggcatggttgtctcagtacgaaggaagggagcaaagctacgaattcattgtccaagcttaccttgggggaccagagaatggattgtttgagggcctaaaggcgtataagaaaactgatggatccatcctattatttcgcccagaggaaaatgctgagaggatgcgaacaggtgctaagaggatgtgcatgcctgcaccttctgtcgagcagtttattgatgcagtaaaacaaaccgttctagcaaataagagacagtgctatgcccattacttatga

SEQ ID NO: 32849 - DNA, 492 bp, Zea mays
  Peptide Sequence Number=SeqID_74628
atggccgagctcccttggagcaggcgctctcccgccatggcgcgacgccctactctcctccatggccggcgctcgagctccactcctccccatggtgccggcgtatctccagccgccccctcggctccttcctgcatggacgagctccatctctgcagcagccgagcacctccacagccatggcgtcccctgcccttctcctcccatgggcgcgagctccacttcccctgcagctcctcgtcttgtgggattgggctagtagctttcctttgctggcttcgggattatcttaggaggattccatcttggttggtatctagaggagcaaggacaacccctgtccccgttgtcttcttcagcggcatgatgaaggtggttgtggtcgaaagtgagttcaccggaggacctaagactgagacagtggaagacaattatgtggtgtcaaaattcccagatatattcaccaaggaactacctagaatgtcgacatag

SEQ ID NO: 32850 - DNA, 494 bp, Zea mays
  Peptide Sequence Number=SeqID_74629
atgaggaaactcgagctcgagccatggagaatggaagggagctcgcaggggcgaactgctgggagatgggagcggctgctccctgctcttagggaagaagggcgccccacttgccgttgtgcagaaccagggaggaaggagggggcgcggtggagagagcctgcagagctgcggccgagccagggatggctgctccctgcgccaagctccattggaggagacagcaggggcgtcagcgttgagggaggaggttgcagggagcttggagctgctgctgggtgccgggccatggagaagcttctgcgcggcgtccaaggcaggggaagtggagctcgcgcccatgggaggagaagggcaggggacgccatggcctggccaagggaggaccaggcctggggcgcccttgaaaagagcattggctcccctgcttgctgctggcctgggaaggaaaaaaaaatggaggctgtggcggctgaaatttttgaagggggggg

SEQ ID NO: 32851 - DNA, 1342 bp, Zea mays
  Peptide Sequence Number=SeqID_74630
aaccctggaggttgtcagtggggacttcgcccgtgacactaaggggtgcaagcgaggaggtctgcctataaaagggggacttcgatcccctaggcagtggccaagccttcgtcctcccctcatgccttgcgcccttccgccttttgagcccccggatggggtgccccagcgtcgccttgctcttgctgtcgttggaggagcacggactcgtggagatcggtacctttcagccatcgttcggcttcaaggattttcgtcgtgcagcccggctgcattccctcaccaatggtcagtttggtggggagaagcgagccgggctgtagcctccgccccgccctcagcttcaaggattttcgtcatccgggctgaggcggaggagcgcaccgagtggggggttgcctccgcgtgggccggtaacccttttcttcccccagcgtttgggggagaaaggcatcctccagccatgcgggggaaggcgaactgctacttcctggacaggtgcagctttccgtccttcgtccgggcggcggtcgtgccgcacacgggccggccacgtccaggtcttcctcgcgccgtcagccgtgccagagggttgcccagcacgtcgtacgccgcgagggcggtgctcgtgttatggggcggcctcggcgaggacgggagtgaggacctaccggtgcgctttggggcgaccggcgctcgctggtgtggtgttggtggacaggtggacgccgccgtcggtgctgtggtggcagcagccggagaaggtttctccgccgacgagatcgtcggcgccagctgcgctccgggcctccggctcttcggctttaatggctggttctcgtcctcccgtgagaggatacgaacgagagccttccatcggtggcgttcgccctggggccatcgccgctgtcgcagaggttgccgttttcggaaacctcggctgctctgcgatgagccgaagccgaaggcagcggtgctagcgcgggcagacgcggagtcggctcagaaggagacttcgtcggcccgggagatggcggcttcccaggccgaggaagatgtggcagcagctgctggagcttggccaagacatccgctggcgcggtgctggcgtcctcccttaggtggaggtccttttgctcgggtcgtcgtccgaggccgggcctggttccgccgagggtggaatcaacgccgaggaatcgtttatccgaacgagagttacttttcatggaaggtgatgagtgaggatcccgctatcaatacggaagtcgaaagcacaaaggttgttttggtagaaaatttttccgaggaaaattttgacgcagagggggttccccccttctag

SEQ ID NO: 32852 - DNA, 843 bp, Zea mays
  Peptide Sequence Number=SeqID_74631
atgaggggaggacgaaggcatggccactgcccaggggatcgatcccccttttataggcagacctcctcgcttgcaccccttagcgtcacgggcgaagtccccactgacatcctccagggttctccccccacgacacgaggttgggacccacatgtcatacgagctgatccgaagcacgaagaaggcgaaccgccgcgcgcgaggcatgtaaccatcccgcggttacaagcgctctcccatcttcacagaaaccggtggtcgaaagggtggactgccacgcgacaagcatccaactgcaccacaactgtgcgccccttcggctccgtccacatccggtggaccagcgcaaaggaagcgggcccgcatgtcatgcgaggcgggcgtcgcttcgtcttcgccataatgaccgcgtcaaaaaagcccaccccggcaacgactgacaacaagtcacgatcaaccaccgagctcaagcctcgggcgcaacaggaagctccgcctcgccccgacctcacgctccagccttgggaggaggtcttcgcctcgcccgaccccccggactcagcctcgaccccggtctcggggggaatcacgtcctcgcccgaccccagcctcggcctcaagagaagtctccgcctcgaccgaccctgggctcggtctgaccgtgctgataggggatgcagcattcccctattcctagcctgctcaagctacaagaaacaagaccggcatcccatctggcttaccccggcgatgggtaatgatgcgcccaagctctcccccaacggccacgttggcatgtacacagggcttaggcgctccactgccggacacgttagcgcatag

SEQ ID NO: 32853 - DNA, 240 bp, Zea mays
  Peptide Sequence Number=SeqID_74632
atggccccctatgacgtgggtctcggcctctcgggcgagctcgccgcctcctccctctgccgcgtgcggggcctggtcgcgctgagcctcgcgtccaatgacttcgagggccaggtgcccgtcggcctcgccgcgctcggcggcatcctccaggtgctcgacctcagggagaacctgctctccggcgtgctccacccggcgctgttcggcaacctcaccagccttttgaactgttattaa

SEQ ID NO: 32854 - DNA, 339 bp, Zea mays
  Peptide Sequence Number=SeqID_74633
atggccacggcgagatctccgttccgcggttcagttgtagccatcagggggaagatggctcctggcgacaaggcccacaagtcagccaccaatgagggtggggccactgtttttgggctttacagcctcgcccgacccaggggctcggactcgaccacggccacggaagacagactcgacctcgacctcgacctcggaggagcctccacatcgcccaacctagggcgcggaccgaccacgtcgacaggaggcgccatcattaccctaccccaagctgactcaggctatggggaagaagaccggcgtcccatctggctcgctccgctagataggcaatga

SEQ ID NO: 32855 - DNA, 1050 bp, Zea mays
  Peptide Sequence Number=SeqID_74634
atggcccccgggcccgcctcaggggagggaacgagcttgcaggtggggccaaagtttgattggcgattggctcgctgcttctgtgtgctcgctgtcgaaccggcgcctaaggagagtgactcgtgggccggggcccccgtgtcagtctgggctgttggtttcaacggaggcgaagaggaacactaccgcaggcggtggcgtattccttacacggcagactggttcgctgctttcggtggaggtgaagggacgcaccaccacaggcggtggcgtgctcctcatgcgacggttcgccttctccgcatacggaggccgacgcccaaggagtatgactcgtgggcccgagcccccgtgccagagactggcgccattttgcccccgagctctccgcactcttatgtcattgtagctgccatggccttgctagaccctcccaagcgcctccagcccgaggtggcactcaacttagtgcgcaacccgctcagatggggtgtgctggcgtttgctggaaggacccatatcggtgtcgctccttacggtgacctcaccgccggggagtttgcgttcttcgtttccaaactccctagcgggttggcgctgccgatcctgtctttcttcgtgctgctgctagaggggcttggctctagcctctacacgttacgccctgcttcatccttcaggcgaccatcattgcctacctccgcgggatgtccgtggaggcgacgctccttcccacttcttcctccagcattcggggggaaggatgatcaccagcctcgtgaaggtggacatcgggttgagccacggttccatccctcgcgccccgactctttggggtccaccgcatccgctgcaccccctgcaccgctggccaccgcaggacacgctgctccaacgccgcccggggggtcgtacaagacgtcgtacgccgtgggggtggcggccgcgttcttggatgaggtggtcaccgccgctggtgcagaggtggtcgccgccgctggcaagctgctcggagctagccttcaacgcgaccctgttggtgcagagtag

SEQ ID NO: 32856 - DNA, 1221 bp, Zea mays
  Peptide Sequence Number=SeqID_74635
atgaccaccagccttgtggtggagagaagcgagtcgggctgcggcctccctcccgccctcagcttcaaggatgtccaccacatccacggtgtctcccgcgccgccggccgcattgcttcgacatcgccctgggggttgtacaagacgtcgtacgccatgggggtggcggccgcgttcttggatgcgccgacgtggtcgccgccgctagtgtggctacccacttcagaggtggttgcctccgctggtgagaccaccggcgccacctgctgccgagcctcccactctttggctttaatggcctcattgtcgtcccccgtaggaagacgggggcgaggacctcttcgcaatggcgcatgtgctgaggtggtcgccactgctggcgagtcgttggtgcaaaggtggccgctgtcgtcggtgctgatgtggtcgcctccaccggcgagccgctcggagctagctaccatgcggcctactggtgtggaggtagttcatacctgtagagtagagatggagctggggctccgcttgaaagcggatgtaatacttttgctttttgtaagacttgatgtgtcgaggttgtataccagcacatctgaaacggttgtcaacaactctcaggaggcagcctcgcgaggatctggatctgtacacagctttagccggggagcagtggtggagcgtgtaggcccacggtacgggactaggctgagcggctacacgggctccggaccaccccaagagacaaatgctaagcggccacataggctccgggccaccccatggaacagggtcccgttctctagagccggctcccaggttgtcgacatatgggaaccgtgcgggtgggttagacaaaaggcattatctgaaaaactgcaagaccaacaggccgggtttatggggacggacctcaccgggttggcgtacacagatgctccagcaccagagggaggcactccttcagtcatagccagatggttaccctcgagtcggcgtattcccgttaccttgaagagtccttcccagctgggggagagttgcggagcccttcttggtttggtacttgccgtaggactaggtcccgaacttaggttcccatctgcattcgacgagggagccctcgtcttcgaatgtggccgtttctgcatgaacctgtcggaagtctgggcccgcagggagtccagaagggtttccggggggaggcaggcttcggccccgtaa

SEQ ID NO: 32857 - DNA, 276 bp, Zea mays
  Peptide Sequence Number=SeqID_74636
atggaggtgaggataatggcggagcgggcggcgattgatcaaaggatggcagatatgttccagtacatgcagagccttagcgcgtcccagggtttcgctccgccacctccatttgttccctgcagtttgaccctggtctattccaaacccctgaccaatctagggcggcatccaacaaccctcatgaagggttcagcccaacacagcaccagaccaaccgcccacctccatgagttttatgttttaactgttgaatacttatgtctgtgtgtttga

SEQ ID NO: 32858 - DNA, 198 bp, Zea mays
  Peptide Sequence Number=SeqID_74637
atggaggtgaggataatggcggagcgggcggcgattgatcaaaggatggcagatatgttccagtacatgcagagccttagcgcgtcccagggctcacaacccttaagagttgtccccagaggaggtggcggcaccaaggaccaacgaggtggatcagacaccgtcgcacaccgagaggagcctgtggagcaggcctag

SEQ ID NO: 32859 - DNA, 276 bp, Zea mays
  Peptide Sequence Number=SeqID_74638
atggggctcggtgtatgcggctcgctctgccaagtttgggttcgccccttggggaggagtgcggtgcatttaggaaacctaacgggtggctacagccccggggaatctttgttaaggctacgtagtgatgccctgctaggccacctaggtggctatgagatcgatggttttggttatgactatggtgctggttgtcagcattgcaaccactgctcagacgaagatgaagctgtggaaggagactttcaagagttccaagactacgacgagttctag

SEQ ID NO: 32860 - DNA, 298 bp, Zea mays
  Peptide Sequence Number=SeqID_74639
gaatcgacagtcaagcttcggcgaccaagagatcgaactcttcgagttctacgaggctgaagatcctgagcatctgtttggtgaaggcaagaactggggtgtagttcgtttcgccgtcgtgccattaatggggctcggtgtatgcggctcgctctgccaaggttggttcgccccttgggggaggagtgcggtggtgatgaggatgatggttttttattttgattatggtaatggtaaagaagagggtgtcgaggcagatctccagaagttccaggacttcgacgagttcaaggattag

SEQ ID NO: 32861 - DNA, 257 bp, Zea mays
  Peptide Sequence Number=SeqID_74640
atggccgttgcgcagcgtctcaccgcgctggagctccaccattgctgctgcccaacacctcgtcatacgtcgcgcctagacttgagctcgctgcgcgctgggagccccgccgagttcgctgttgagcaccgccgcggaagactcttcctgccgtgcgtcgtcgcaaggaatcaacagtcaagcttcggcgaccaagagatcgaactcttcgagttctacgaggctgaagatcctgagcatctgtttggtgaaggcaa

SEQ ID NO: 32862 - DNA, 909 bp, Zea mays
  Peptide Sequence Number=SeqID_74641
ctaacgcctccgcgctcctctctcacgtcggccccgggctcttcggccctcggcgcgcgcagcccacccagcgcgctctttcctcggcccacccagcaggcgctctcgtgcccccgcagcccacctcacgcggccctttcccgctttccccctcgccctcttctcgccccctgcgcgttcccagccagcacgcttgcccagccgccgccgggcccacccaccaggcgacgtcttccccaaccgccgggtcgatctcttcggcgcccacgacgcgcacgctcgcggagccgccaaccccccagccctcttctctcccacctcaacgcccagccggccagcccgctccccgtcggtggcctgtccgccgtggcggagatcccaggctcgatcccctccccgcgctcctcaccccttcccaacgcgacagcaagcctgcgcggcggccagccgagcgcgaccgtcgcgtcctgcccacggctaggtcccagcgcggctcgcctggagcgcctggcgcggccctcgcgcgtcgacgcgacccgctgcccgtggccaggttgtgctccggcgcggcccgtgcgtgtgcccccggcgcggcctcgtgctcgtgtccggcgtggcccgtgtgtgtgcccccggcgcggcctcacgctcgcgttcgacgcggcctgtgtgtgtgccctcgacgtggcctgcgtgtggctggcgtgcccgcgactcgctcgcgcgtgcccgcacgtccccgtgctttgccgcgagctcgtccggccgtccgccgtcgtcgcggggaatcaacagtcaagcttcggcgaccaagagatcgaactcttcgagttctacgaggttgaagatcctgagcatctgtttggtgaaggtgaagaaggtgtcgaggcagatctccaggagttctag

SEQ ID NO: 32863 - DNA, 768 bp, Zea mays
  Peptide Sequence Number=SeqID_74642
atgaggcggaaagacggcgggtatcccccatccgggggcttggaaggtggaaagacacgatgcataagggagcgcgaagacatggtcgccttccaaagggggagaagcaggcgacgcttcgccttcgccataatgaccgcgtcaaaaaagggaccgggaaagggggataccccgaaaaggatccttccccgtgaaggaaccaggctccgagcctccctactgatcagaggttcgaaggctggccccccggaagggttcgacagccgcctcagatcgcgtgggccctacacccactactggtcagaggttcgaaggtcggcccctcggaagggttccacggccgcctcaggctactcgggctccgcgcccattactgatcagggcgggaacgatcttgtaacggaatcccatcagagggaggcatcgagccctcggaccccgtcgccaggggaccgggtccggcagatcacccgcagctcatcggagacaccatgttcggcgcccatcgagggcaacatggcgctttcccccctcctccttgcagaaaggcgacgcaggggcgtatgtaaaaaagccgagtatgtccctgatcgccctctcgccctgtgcagaggctcgggggctgctctcgcaaacccggctccagccgaaccgttgacagcgtcaacataccagcccgagaacttgggacccgaccgtacacccgggctacggccagctcgcatgagggaacaaccagaccagccgaggcattacgcgaggcattaa

SEQ ID NO: 32864 - DNA, 1191 bp, Zea mays
  Peptide Sequence Number=SeqID_74643
atgaacaaaagaccggcattcaaggtgccattacaaatggaactccggttccacctccgcagcggcgacgacgacgacttctgctccggggggccgaacaacagcagcgatgacctcagggcggacgctgctgccatgaggccctcgcccgtgcccaaactcgtgaggcaaggacgggcagaaggccgtagagttggaggtcggtccgtgggcagccccggctatctcgtcggcggaagaacctcttccagctgccgtggcggaaggcggtgccgggagcggctccgaagccactcaggtcagagagccaggcacgcggcatctgcctgcgcctcgaacggcgaacgcccttccccccgatcactgatggaaggagcgggccgccgcccgcgtaggggccgacccctaatcggcacactcccctccctagcactggtgatgaaaatccttgaggctgagggaggggtagaggtcgcagcctggggctcggaaggtggaaagacacgatgcataagggagcgcgaagacatggtcaccctccttttaaaggcgactctccctacctgcgtccccagccgtcgtgggctgagtcttctccaacacgctccaaggtcctccccctacggcgcgggggctgggtcccacacgtcatgcaagctggcccagggcagaagaagccaaaccgccgcgcgcggtgcatgcaaccgtccagcggttacaagcgcccctccactttcgcccagaccagcggacgaaagggcgggcagccatgcaggcggcatgcaaccacgccaagtgggcgcacctctccggcttccaacacgcccagcatggaggcccacgcccacgcgtcatgcaaccggcgcgccggtcgctacgtgcaagcaactgcaccgccactcgcaccactactgcgcctcctcgactgcggaaccagtaccgcgactcgaggcgacccagcgcacgacccagcagcgccagcctagcgcgacggtcaatacggccaaaaatgggccggcagtaatggcggtggcaggcgggcaggagcagcggagaagcaagcgacgcttcgccttcgccataatgaccgcgtcaaaaaaagccgcctcagagcccgtgggctccacacccactactgatcaggggttcgaaggctggccctcgaagggttcacagccgcctcagacatag

SEQ ID NO: 32865 - DNA, 108 bp, Zea mays
  Peptide Sequence Number=SeqID_74644
atggcgctcggcggtattgggactaacagttcgattaaagctaaaggggtcaagtccgttgagtcaaccatcgggactaaggccactgcgtgtcatcctagtggatga

SEQ ID NO: 32866 - DNA, 828 bp, Zea mays
  Peptide Sequence Number=SeqID_74645
atggcgctcggcggtattgggactaacagttcgattaaagctaaaggggtcaagtccgttgagtcaaccatcgggactaaggccactgcgtgtcatcctactccaccaaaagacaggggggcatatgttgagcaccgaattgagcctgcggacggtccggccctgaggccggatggtccgcagtccggacagtccgcgcctggggggccagacgctgaacttaaacttcaaccggggtccagggcaagttcaaccggggtccagagaggttcaaccggtgtccagggaaagttcagccggggtattttccccggacctcactggtcaaaaccggttgaaccggtcctaggggaggttcaaccggtgtcagggtcacctgaccggtctgacctcctggctggcagactgactgccagtgtgaccccccaggcggttgaactggccctaggggcggttcaaccggtgtcaggacctgtttttttgcagtctgacctaagaaagagactcactaaccatgtagcaaacaagaagcaaggcaaggagtcttgcaaaattaaaaatcagatttgctacacttgccgaagaaagggacacctatgcaaggattgtcccatgagtaagtatcctaagtctaccatgtcaattcattcatattcgcttaggagacccaaaaatgacatttgtgctagaaagggaataaggattaacctttgtgggaatcaagcaaaaggcctacaaccaagtgatatccaaaggatgccacataggaaaaatgaagcacttgagaatgaacttaaaagattttaccttgctttggaaaggatctaa

SEQ ID NO: 32867 - DNA, 381 bp, Zea mays
  Peptide Sequence Number=SeqID_74646
atggagttgcggccaccggcctgggaatcgccgccaccgcacaagggcgccgccgccgctcgccctctggatcgagggccgccaccgccggcctggaaaccgccgccaccgcataagggcgctgccgccgccgctcgccctctggatcgggggccgccaccgtcggcctggcaaccgtcgctaatgaatcgagatggggccgggtcgagggtcagcgaagaggtggtgaatggtgtgcgcccccgtctggaacaacttcgtgctccgtacacagaggacaatgtgctgcgggtggtgttgtcggccatgtacagcatgaggtgtgtgggcatagggttgtccgagaacgacctcattgtgggagtcgactgcgtggtgtag

SEQ ID NO: 32868 - DNA, 486 bp, Zea mays
  Peptide Sequence Number=SeqID_74647
atgaccgccgccagcgcaggccacaccgccacccatcccacggcgcgcgtcttcatcccgcgcgcgtcgctcgcgccgcgcgccgtgatgcccgcgcgagccatcccgcccaccatccccggcgaggagaacatcccgtgcgtcgcttgctcgccggccttggaagtgccgcctcctcggggcttcggggacgccgccgcttgcctgcacaagggcctcgctgcggatcgaggaacctccgcaccgcgcgtcgaggtaatggagttgcggccaccggcctgggaatcgccgccaccgcacaaggacgctgccgccgctcgccctctggatcgggggccgccaccgccggcctggaaaccgctgccaccgcataagggcgctgccgccgccgctcgccctctggatcgagggccgccaccgtcggcctgggaaccgccgccaccgccggcctggcaaccgtcgctaatgaatcgagatggggcgtaa

SEQ ID NO: 32869 - DNA, 321 bp, Zea mays
  Peptide Sequence Number=SeqID_74648
atgtacgacggaacttctaccggcaggccgacggtggcggccctcgatccagagggcgagcggcggcggcagcgcccttatgtggtggcggcggtttccaggccggcggtggcggcccccgatccagagggcgagcggcggcagcgtccttgtgcggtggcggcgattcctaggccggtggccgcaactccattacctcgacgcgtggtggcggaggttcctcgatccgcagcgaggcccttgtgcaggcaagcggcggcgtccccgaagccccgaggaggcggcacttccaaggccggcgagcaagcgatgcccgtcgac

SEQ ID NO: 32870 - DNA, 654 bp, Zea mays
  Peptide Sequence Number=SeqID_74649
atgaccatgagtcttagcgtcgagacatcccttccggtgacggaggagagatccggaatcaccgtatttgccgatatattgatatggccgaattgctttggaggctttccgtttagacccagcaaagttgggaggggaagcaagcagcatggccataggttccttcgggagaattcctttctcgatcgttttgagctcggtggagactcggagatccaagcgacggttgccaggccggcggtggcggcggttcccaggccgacggtggcggccctcgatccagagggcgagcggcggcggcagcgcccttatgtggtggcggcggtttccaggccggcggtggcggcccccgatccagagggcgagcggcggcagcgtccttgtgcggtggcggcgattcctaggccggtggccgcaactccattacctcgacgcgcggtggcggaggttcctcgatccgcagcgaggcccttgtgcaggcaagcggcggcgtccccgaagccccgaggaggcggcacttccaaggccggcgagcaagcgacgcccgtcgacatgcgagtagcgacggcgacgcgtgaggcgcgatgttcgagcgagcgacgtcacagaaggggcgagatgcgcgcagcgatgatcgcgcgtgacatcctctga

SEQ ID NO: 32871 - DNA, 168 bp, Zea mays
  Peptide Sequence Number=SeqID_74650
atggaggcggagaggatgaggtgcgcggttttctcttctctggctattttcttaggttgcggaaaaccaaagcagaaggcaagcacaaatggcaggggatcaggaaaggggatatttcgaaaaaggatccttctcagcgaaggaaatggccccgagccctcctactga

SEQ ID NO: 32872 - DNA, 351 bp, Zea mays
  Peptide Sequence Number=SeqID_74651
atggaggcccaggcccacatgtcatgtaaccggcgcaacggttactacgtgcaaggaaaccgcaccgccactcgcgccaatgtcgcgtctactcaactgcagaaccagtgccgcgactcgaggcagccctgcgcggaccgggaaaggggatatttcgaaaaaggatccttcccagcgaaggaaatgggcccgagccctcctactgatcaggagttcgaaggttgcaccctccggggttcggtaaccgccctagagcactcgggctccgtgccctttactgatcaggggttcgaaggctggcccctcggaagggttcgacagccgccccagagcacgcagagtcagggatga

SEQ ID NO: 32873 - DNA, 312 bp, Zea mays
  Peptide Sequence Number=SeqID_74652
atggcgcgacgacggcccgggtcgacggtggcggacccctgcggcggcacggagggcggcggcgtgggggaggtgagagagaggcctgctggtgcgcaaatgagggaggggggaagagggcgagtggggttctgggctcaagtggccgggggcggggcggttgcgagctccacgcgcgacgtgggcgcggagtccacggcagcgcgcagctcgggcggcggttacgcggggaagacggggctgacagcccgggcccgcgagcagagagagagaggaaagcgggcgcgggcgcggagaaggcggccgcgctga

SEQ ID NO: 32874 - DNA, 1224 bp, Zea mays
  Peptide Sequence Number=SeqID_74653
atgacttcccacggatcctccgatgacggaaatgcactgtcccacactgacgggcttgcacgagagggctttccccgcattttgtgggaggtacttcaggggggcagatacgcgacaccccctcagtacgcggtgcagcagttcgagaagcaccgagtgccccgctgtagggtgaggatgactttggagcctcatcccctacagccaggctggcgctctttggactccgagtcttttggataccgagctgaggacaccatcgaggcgattgccttgcatgggttgaccactttctgcggattccatccgttggagctgtctacccaccccattggcttgttccccgccgagaaggaggacgacccaatgtggaaggatcgggtggagcatgccaaggatatctgggccatctacccaggacagactgcgcacttgactgtacgatgcatgaatgctctgtaccgtctgcaggtgatgcgcggtgaggcgatgtcccacctgatggcactgctggaggcaacaaagattacgttggacaacagagaggaactcgtggttgacttgtcccaagaaatggtggagaaggacttgcaggtggagcagctatccactgatatccaagagttggaggagctagtgggcaccagggagaacaccattgaggttctcgaggatcagctcattaacactcagtgtcacacccggttttggaaggcaaaccgaatgcgaactatgtacgtgccaggatcagaactcacgcagctgactgggggttgccgccaacccacacctagaattcgtcgtagtcctggaactcctggaagtctccttccacggcttcgccttctcctgagcagtggttacaatgcggacaacctggtgttttgtggggaggttccttacctcaaggcggactccggggactcctcggtggcggcaatggcgcgacgacggcccgggtcgatggtggcggacccctgcggcggcacggagggcggcggctcagcctttacctatcaccggctggtgctcgcgagtcgcgaacaaggccgccgtggcgatcctgggcgcgccgctgctcgccgactcgccgtgacggccaagagcgccgccaggcaggtgccgaggataagcgacgccatggagcaggtgcccacgctgctgctcgccaccgtcatctccgtcgggctcatgctcctgcaggacgccaggacgtccgactag

SEQ ID NO: 32875 - DNA, 204 bp, Zea mays
  Peptide Sequence Number=SeqID_74654
atggacttcaggaacaccgtgatcatcatgacaacgaaccttggcgcttggcacctcctcgccgggatggtcggcaataactccatgaaggttgctcgtgatctggtcatgcaggagtattctgactatcataatataagccgtatgacttcatttgttggtttccaacccttcaccagggaaaaagaatgtgagggtgattaa

SEQ ID NO: 32876 - DNA, 204 bp, Zea mays
  Peptide Sequence Number=SeqID_74655
atggtgggcaagaactccatgaaggttgctcgtgatctggtcatgcaggagatcctggctgaggcgaccattccagcagctggttcacgtggactcaatcagtttctgaatgatgacattgacctcgacgatgacatggaggacctagactcagatgtcgatcttgacctggaaagcagtggggagatcgtctatgctatttga

SEQ ID NO: 32877 - DNA, 414 bp, Zea mays
  Peptide Sequence Number=SeqID_74656
gatcccatcgagctcaccaccaccaaaaagccgggactcgtgcgccggtaacctcgaccgtgaccgtcgccgcggtccactaccctgcacgccgttactggccacctgggagcgtccgaccgttgtcgctttgggcgtctgggaggttctcctcgcgtgtccgttgacgcgggggctgggcttcctcaccgcggacggaaccaagctgggcggccttcaccatgggactccaccggtgattgcaattgggggcttgaatcaagtcacgggggttcgctggcagttgtggagtctaattcatgttccaattgagctcgggaacgaccggttgaaggccaatcgatcgtcgggatccatggcgttgcttcggtccgcacttctccgtggacatgatggcgacaaccattataccct

SEQ ID NO: 32878 - DNA, 919 bp, Zea mays
  Peptide Sequence Number=SeqID_74657
tcagatggaggttcgctgccaaaccagcttttgccagaataaagatggtttccccaagttgttgagagcatgcatagttcgcctcgaaatcaggagccaaccagagtatgatggtcgtgaattcgtcgagcatggcacagagaaatgtgtcgtgactgtgtacattggatccagtccgcaccatgtggaatggagtgtcactactgctgggcacagattcaaagacacctgccaagtcgtcgctcgtaaggcattgagggccctgtgtcagatttatgaagaagaagtggccgacacaccgctcagattctttccgccctttcagagagaccgtccagtttggatggccaggatgcgtgcattggaagggaagcagctgcttgaggacgaccccacagtcgtgtacctcactgcatacctgctcaccctggatgcacagtatgatttcttggctcggcaccaccgtcagatgattgcccgagcagaagatgcagagaagctcaaccgtaatgattataaatcgcgtgccgcctcgctccttggaccagcccataaccaatctgcgcgctcgcctaggatcccatcgagctcaccaccaccgaaaagccgggactcgtgcgccggtaacctcgaccgtgaccgtcgccgcggtccactaccctgcacgccgttactggccacctgggagcgtccgaccgttgtcgctttgggcgtctgggaggttctcctcgcgtgtccgttgacgcgggggctgggcttcctcaccgcggacggaaccaagctgggtggccttcaccatgggactccaccgagcgtgttcgacgtatttagcgctaggaatcgtactctgggcgttgggagcgttgaccaccggcgaaggcgccgccgtctggcctggtctcgccactggccggagtag

SEQ ID NO: 32879 - DNA, 1059 bp, Zea mays
  Peptide Sequence Number=SeqID_74658
atgtcttcgcactcccttcatgcatcgcacccttccaccttccgagcccccggatggggagcgcccgcggttcttccgtcttgtcgtcgttggaggaacgcaacttcgcggaagttggtacctttcagccatcgttcggcttcaaggattttcatcaggcagctcggctgcatcccctcgccggcggtcacccaagacagtgaccaccagcttgatggtgggcagaagcgagccgggctgcggcctctgccccaccctcagcctcaaggatgttcatcatcagtgctggggaggggagtgcgccgagttggggcccgtctccgcgggcggcagcccgctccttccctcggtgatcgggggggaagtgcgttcgccttccgtggcgctggcagctgccgcgtgtctggctctccggcctgggcggctttggcgctgcttccggtgccacctcccaccgaggcagtcggaagaggtttcttcgccgacgagatagtcggcgccacccgcgggctgacctccagctctacggccttggtagcttgtcctcgcccctcgagcggggacgtgggcgaggggcttgtcgcagcagcgtccgccctgaggtcatcgctgctgctgtttggccacccggagcggaggtcgttgtcgctgctgccggagcgggcgtcggcgagccacctggagtttcgtcgccccgcaggccctccaatagttggctcgaaaagaagcttcatcggccagagcctggccgggccgtccactggcgggaccgacgccggagtcgggttgccgaggccacgagccgggctgatgtcctcggaggacagctggctgaggctatggagcggccggtcaagccgtctgatcgggccgggttcccggaggagaccccgacgacgatggcccaggcgtgatgccgacaggttccttcgaggtagagatcctccgaccgtgttgccgttcgaggccgggtcggattccgccgaaggtggagtcgacgccgagggtgctgctgctcccccactgatgtctgatcctgtaggaacagtttatctgtag

SEQ ID NO: 32880 - DNA, 327 bp, Zea mays
  Peptide Sequence Number=SeqID_74659
atgttgccgtctgaggccgggtcggattccgccgaaggtggagtcgacgctgagggtgctgctgctcccccactgatgtctgatcctgcaggaacagtttatctgtactgtgtaattgcttatctgagcaagagctacttttcacggaaggtgatgagtgagaaggtgatgagtgaggatcccgctttcgaagtagtcgaaaagcacgaaagatgttctggcagaaagactttttccgaggaaaattttgacgcagagggggtgcccccccttctagcccccgagggagggtcggcctttgccgaggcaaggctgacccttccttga

SEQ ID NO: 32881 - DNA, 519 bp, Zea mays
  Peptide Sequence Number=SeqID_74660
atgtggaaggatcgagtggagcatgccaaggatgtgtgggccctttacctagggcagactgctcacctgacggtgcgatgcatgaatgccctgtaccgtctgcaagcggtgcgaggagaggcaatgtctcagctaatgggcttggtggaggctaccaagatcaccctggacaacagggaggaccttgtggtagacttgtccactgagctggtggagaaggccctccaggtggagcagatggccacccagatccaagagcttgaggagcaagtaggcgccagggagaacaccatcgaggttctcgaggatcagctcctaaacactcagcagcaacttgaggaagccaaccagcacctcgatatgcatcatcaggaaatccaagacatggaggccgaaggggccgacgaggatgttgatatcgagggaggagaggagccggagcctgcatccagtttggacaccgctggctcaaggagaccaccttcccccgagtccagtgttgcctcgtttgcccattag

SEQ ID NO: 32882 - DNA, 645 bp, Zea mays
  Peptide Sequence Number=SeqID_74661
atgacctctcacggttcctcgaaaggagggaacgcacattcccacacggacggacttgcacgagagggttttccccgtatcttgtgggaggtacttcagggagcaggttatacgacgcctccccattacgcggtgcagctattcgaggagcaccgggtgccccgctgtagggtgaggatgaccctggagcctcatcccctacagctaggctggcgttcgttggactctgagtctttcggataccaggctgaggacactatcgaggccattgctctccacgggctgacaaccttctgtggttttcaccccttggagctgtccactcaccccattgggcagactgctcacctcacggtgcgatgcatgaatgccctgtatcgtctgcaagcggagctggaggatttagtatggaccagggagaacaccatcgaggttctcgaggatcagcttctaaacactcagcaacaacttgaggaagctaaccaacatttggatatgcaccaccaggagatccaggacatggaggccaacgaggatgtcgacatcgagggaggagaggagccggagcctgcatccagtttggacactgctgactcagggagaccaccttcccccgagtccagtgttgcctcgtttgctcactag

SEQ ID NO: 32883 - DNA, 816 bp, Zea mays
  Peptide Sequence Number=SeqID_74662
atggcaattgctattcttgcagcagttgtgggaagccaagccgtcatcactggtacattctcaatgatcaagcagtgcgcttctctgggctgctttcctcgggtgaagataatccatacatctgccaaagcacacgggcaaatatacatccctgagatcaattggattatgatgatactgtgcttagctgtaaccattggttttaggaacacaaaacacttgggaaatgcatcaggcactgtacttcttagccgcactcatcaagttcatgaggcactgtacttcttagccgcactcatcaagttcagggagggagcctgggtcccaatcgttcttgctctcatcttcatcttgataatgtgcgtctggcactatggcaccatcaagaagtacgagtttgacgtccagagcaaggtctccatcaactggctccttggactcagcccgaaccttggcattgtccgcgtccgtggcattggcctcatccacaccgagctcgaaaccggcatcccagctatcttctcgcatttcgtcaccaacttgcctgcctttcaccaggtggttcgaagttctatgatcataagacgcattcaggtcgatctcactcttcatgttcgtccccgctgcgcagaacgccactgcagcaccgatggaatcgtacggtgtcatcaggctcgactagatctagatgggatggactctacttgtgttgaaggagaggaagcacgtgtttggcttgcggggagcggggacatatttctgttcaacttttcttatgggttatgttacttgtcatgtcagattatacaactttag

SEQ ID NO: 32884 - DNA, 1230 bp, Zea mays
  Peptide Sequence Number=SeqID_74663
atgtcccagtcagtgactaccctcgacccttgcaggcttgcagatactacccagaataaaatgcagaaagatcattttctaagatgcagaatggagcgccaattggccaatttggaaagtgcatactgtaaatttagcaatatcatttgcaaagaaatgttcttccgtgagatggtacagattttgcaagtatatattgagaagaatgtattgctattccagggttttgagcacagcaataaagattctacaggaataggctgtggatcaagtgcatcatgccttaggggaagctggttctggtcactggtggaaccaacggcatcgtgtctcttactacaaggtgaccctttcactctttcaggttctgaagcaatgtttgctgatttggggcatttcaaccagttgtcaatacagtgcaccatttcagagaaaattaggtggcccattatgacaattgctattcttgcagcagttgtgggaagccaagccgtcatcactggtacattctcaatgatcaagcagtgcgcttctctgggctgctttcctcgggtgaagataatccatacatctgccaaagtacacgggcaaatatacatccctgagatcaattggattatgatgatattgtgcttagctgtaaccattggttttaggaacacagaacacttgggaaatgcatcaggattggctattataaccgtcatgctgttcacaacgtgtctgatgtctctggtgatagtcttgtgttggcataagagcatattccttgcgattggcttcatcctgttctttgggaccattgaggcactttacttcttagccgcactcatcaagttcagggagggagcctgggtcccaatcgttcttgctctcatcttcatcttgataatgtgcatctggcactatggcaccatcaagaagtacgagtttgacgtccagagcaaggtctccatcaactggctccttggtctcagcctgaaccttggcattgtccgcgtccgtggcattggcctcatccacaccgagctcgaaaccggcatcccaggagttattggttcttgccacatccgtaaaaatgacccagggtgtatgagcgcagacagaagggggatgaacgggtggcaacgacattggtgcggcgacataactggtgagagcaaaatgggagctaagtgtggcatcaacattggggataaagtcaggacgagtacaacaaggggatggtga

SEQ ID NO: 32885 - DNA, 1040 bp, Zea mays
  Peptide Sequence Number=SeqID_74664
gcgtccacaccacggctgtggtgcacggttctgcctccgcgcctttccatcgccagcgcgttcttcgtgctctgtcaatctcgcagcagcgccactctcttccccacttccccaccgtggtccccccttccccacccaccggagaccgcgccattccccccttccccaccgcgaccaccagaccggcatggcgcatacctgagattgcgctctccccaccggatccggcttggcgcacaccggagaccacgcccttcacccttccccaccgtggccaccggatcccgcacacgcgcgctccggcatggcgcatccacagcacgaacgcccggaatggagcagcgtgcgtccatgtacccaccggagaccaggccattcaccaccgcagtgcccccaccctcatcatcctcgcgtccccccgtcgctacagccgccaagttggtctgcagggaggtccccccctcaccgcgccacgctcgccgcgcccgccgctcggtcctcgccgcgacatgcgcctaccctcacctacacgatgctcactcctccgcacatcgcaaagccgaaggtccacgccccctccgtgctgtgaccccctcccttgtgtgcccatgatgctggaagggaagtcctaccttgtgccgcgctccctgctaagctcctgcgagatagagacacagtgggcgtacttcgcccacgaggtccacggcggcaagcgcctggcgccggaagactgcgaggtcgaagacctggacaaagctgacgtcggcggcaagcgcagcaagccgccgtctccacagccgcacacgccggacatctccgagggtcgcggctccagccgccatgcctccggttgcggagagcagcagggcactgggagcaaccccatgaattcaatcgaccgtgacgaaaagatccttgctggaagctgcgccgtcgcacctgtggtcaaggtcgagtctgagccgatccagacgtcggtcgacaggtcgctggcgtcagtggaccacgtcgcctatcgcggttgtggagcggagctgtga

SEQ ID NO: 32886 - DNA, 1107 bp, Zea mays
  Peptide Sequence Number=SeqID_74665
atgacgagttccggaggctgcggttcgttggcgcactggacatgtccggtgcacaccggacagtccggcgtccacaccacggctgtggtgcacggttctgcctccgcgcctttccatcgccagcgcgttcttcgtgctctgtcaatctcgcagcagcgccactctcttccccacttccccaccgtggtccccccttccccacccaccggagaccgcgccattccccccttccccaccgcgaccaccagaccggcatggcgcatacctgagattgcgctctccccaccggatccggcttggcgcacaccggagaccacgcccttcacccttccccaccgtggccaccggatcccgcacacgcgcgctccggcatggcgcatccacagcacgaacgcccggaatggagcagcgtgcgtccatgtacccaccggagaccaggccattcaccaccgcagtgcccccaccctcatcatcctcgcgtccccccgtcgctacagccgccaagttggtctgcagggaggtccccccctcaccgcgccacgctcgccgcgcccgccgctcggtcctcgccgcgacatgcgcctaccctcacctacacgatgctcactcctccgcacatcgcaaagccgaaggtccacgccccctccgtgctgtgaccccctcccttgtgtgcccatgatgctggaagggaagtcctaccttgtgccgcgctccctgctaagctcctgcgagatagagacacagtgggcgtacttcgcccacgaggtccacggcggcaagcgcctggcgccggaagactgcgaggtcgaagacctggacaaagctgacgtcggcggcaagcgcagcaagccgccgtctccacagccgcacacgccggacatctccgagggtcgcggctccagccgccatgcctccggttgcggagagcagcagggcactgggagcaaccccatgaattcaatcgaccgtgacgaaaagatccttgctggaagctgcgccgtcgcacctgtggtcaaggtcgagtctgagccgatccagacgtcggtcgacaggtcgctggcgtcagtggaccacgtcgcctatcgcggttgtggagcggagctgtga

SEQ ID NO: 32887 - DNA, 366 bp, Zea mays
  Peptide Sequence Number=SeqID_74666
atgtcgctgcgtgacccagcccagatgggtcggcgcgaggccgagcgcgaaggggggagaaaggtggccgaagatgggcgtgagagaggtggaaatcccgcggacttcgtgttcgtcccgcgcccaggtcggggtaagaaagaatgttttgtttcttgcctcttcatttgctacgacctgatccggccggatgtcgctcttgagcttgcatggatgaacaacatggtggactttgccttcccgtacctgttacagttcattcgtgaatacactagcaaggtggatgatttagtgaaggacaagatcgagtcgcagaaggaagaaagagctaaggagaaggaggagaaagaccttgtggctcagtag

SEQ ID NO: 32888 - DNA, 1425 bp, Zea mays
  Peptide Sequence Number=SeqID_74667
atggcgtcgaccaaggctcccggccccggcgagaagcaccactccatcgacgcgcagctccgtcagctggtcccaggcaaggtcttcgaggacgacaagctcatcgagtccaggagtgctacgaggtctcggccgactacgagggcaaagaagacacgacgaagctgggcgagctcagcgccaagctcacggggctggccccccgccgacgccatcctcgtggcgagctccatcctgcacatgctcaacctcgccaacctcgccgaggaggtgcagatcacgcactgccgccgcaacgacagcaagctcaagaaaaggtggcttcgccgacgagggctcagccaccaccgagtccgacatcgaggagacgctcaagcgcctcgtgtccgaggtcggcaagtcccccaaggaggtgttcgaggcgctcaagaaccagaccatcgacctcgtcttcaccgcgcatcccacacagtccgcccgccgctcgctcctgcagaaaaacgccaggatccggaattgtctaacccagctgaatgccaggacatcactgacgatgacaagcaggagctcgatgaggctatgcagagagtgattcaagaaatggaggtgatacttcgaatgaggcccataaaaggaattctacagatggcaacaataaacaaacaagctggtcagttgcatcttgtgaaaccatatatggttgcagttcagagtaacaatgtctctgccgtgaatgaagccttgaatgaactttatgtcgaagatgaggactacgagagactccgtgaatcagttgacatgcatgacaactttgaccagattggtcttgcccagaagcttgagaagcatgaattgctggagatgaggaggatcgccgcctacatttacaagaaggctggcaggtggaagcagtccattgctctatcgaagaaagacaacatgtacaaggactgcatggagacatgctcacaatctggcgaccgtgaactatcagaggacttgctcgtgtatttcattgagcagggtaagaaagaatgttttgcttcttgcctcttcatttgctacgacctgatccggccggatgtcgctcttgagcttgcatggatgaacaacatggtggactttgccttcccgtacctgttacagttcattcgtgaatacactagcaaggtggatgatttagtgaaggacaagatcgagtcgcagaaggaagaaagagctaaggagaaggaggagaaagaccttgtggctcagcagaacatgtatgcgcagctgcttcctctcgctttgccggcgccaccaatgcctagcatgggtggccctccacctccgatgggtggaatgggcatgcctcccatggccgggatgggtatgctgccgatgggccctggtccgatgccagcattcggaatgggaggctactga

SEQ ID NO: 32889 - DNA, 384 bp, Zea mays
  Peptide Sequence Number=SeqID_74668
atgacagggatagcctatgaccctttaagaactcatctagagcgaagagcagctgagcagttggatatattcaaggaaatggtatctttgcgtgtatttgagaggatacaagttcattctgtgtttttcagatgttctaagctctccatgattaggaaatatctattgtttctgtgcaccaaatccaagttgcagtttgagatgatgatgtgcttatgtgaagttaatgctgacaacaatactattggatgcttgagaaggccgaggtccaaatggagctccaccagttccactgagattctgggcgcctccacgacgccggtaaacatagataagtggataaaacaacaagctatttggataaaaagcaggggacagagttag

SEQ ID NO: 32890 - DNA, 600 bp, Zea mays
  Peptide Sequence Number=SeqID_74669
atggcgcaccggacagtccggtgcacaccggacatgtccggtgcccctaccacgtcatcagtgccgttggaatctgaccgttggagttctgacttgtgggccacccttgatgtccggtggcgcaccggacagctcctgttcattgtccggtgcgccagtatgggcaaacctgacgtctgcgcgcgctgcggcgcatttattgcttctgcaggatttttagtgaactcctatactgattacaagttcattctgtttttcagatgttctaagctctccatgattaggaaatatctattgtttctgtgcaccaaatccaagttgcagtttgagatgatgatgtgcttatgtgaagttaatgctgacaacaatactattggatgcaatatgggcatgtcggcgctacagaaagctgtagcagcggtagtccatgatgtcaacgctgagggctgggatcgaggattggagggcttgagaaggccgaggtccaaatggagctccaccagttccactgagattctgggcgcctccacggcgccggtaaacatagataagtggataaaacaacaagctatttggataaaaagcaggggacagagttag

SEQ ID NO: 32891 - DNA, 444 bp, Zea mays
  Peptide Sequence Number=SeqID_74670
atggagtcgcgcccagccgccgaacaccgccagaccccggggagcacccgcgcccctgcagcgcgacgcgccaggaaacccgccccgagccgtccaggtgcccctgcgtccgcaaccccgacggccgcgctccgtgccctgcttccggacccgcgccaggccttggccacgcagccaccggcgcgcataccgaccgccgcgccctgtcccgaccccacgcgacctcgcgcagcgagcgcccaacccgacgcagccgcgacaccgaccctgcccctccctgcactcgacgctcctggagccccgccagccgagtaccgtgaagcgcgccaccgaccggcatccagacccgcgccgagccccagcccgacaccctggcttccccgcgtctacgcagcagcgccctgctcatccgccccgacgtccgcgcagtttggtctcgtttaa

SEQ ID NO: 32892 - DNA, 945 bp, Zea mays
  Peptide Sequence Number=SeqID_74671
atggagtcgcgcccagccgccgaacaccgccaggaccccggcagcacccgcgcccctgcagcgcgacgcgctaggaaacccgccccgagccgtcccggtgcccctgcgtccgcaaccccgacggccgcgctccgtgccctgcttctggacccgcgccaggccttggccacgcagcgagcgcccaacccgacgcagccgcgacaccgaccctgcccctccctgcactcgacgcgcctggagccccgccagccgagtaccatgaagcgcgccaccgaccggcatccagacccgcatcgagccccagcccgacaccccggcttcctcgcgtctacgcagcagcgccctgctcatccgcaagaattggcagcgaagcttgtcgttaaggaagaggaagcaaaaatgactgtatgggagaatatgcagaaaggtgaagcagaagcagccatacaaaagcttgtgataaaacttgaaaagaaaaggccatactcgctggagaggattttcaacacccttaggtctggctctcggaagacacaggtggctaaagatggtgctgctgtggaaacagttgtgcagcataatctgtatgctcttctattgaattgtttgattgaggggaagtcatattcccacaagatgcaggatctatgcaacttggtcaatgactatccaccaatggacatttttgcatatgaatgcattttatcccaggaaagcaggcttcctactgagtttgaaattaccaattgttgtcatccttgtgtttcggacaaggaaaatgttcttgttgttcaagttatgagatggagtggtggctcttatcttgaagatcaggatcactggcggttgtctgtttacttcttcaaagcaaccttggatgaaaattccagtttagctgatattgaggtcgctctgatcccaatcttggcaaggtcatgtgaatag

SEQ ID NO: 32893 - DNA, 201 bp, Zea mays
  Peptide Sequence Number=SeqID_74672
atggcgccggctcctcgtgctctgtttacctcgcctctggcagccgcgtctacaggatcgaggaaggtcagtcttcttcgagacaagaaaacaataaggagttgtggaaacagatggaagataagactggatgctagtgtgatgctgtccaaaggaaacgagagcctcttgattcctgataatgcacagatgactgtttga

SEQ ID NO: 32894 - DNA, 252 bp, Zea mays
  Peptide Sequence Number=SeqID_74673
atgccgctgcacccgaacgataggtgcccgtgctcgttcagctcggcaacccgacccagggagaggggagaagtcaatggcgccggcgcctcatgctctgtttacctcgcctctggcagccgcgtctacaagatcgagataagactggatgctagtgtgatgctgtccaaaggaaacgagagcctcttgattcctgataatgcacagagtgtagctcatgccgagggcgaaggtgctgtcttcaacatttga

SEQ ID NO: 32895 - DNA, 453 bp, Zea mays
  Peptide Sequence Number=SeqID_74674
atggcgccggcgcctcatgctctgtttacctcgcctctggcagccgcgtctacaagatcgagatggaagataagactggatgctagtgtgatgctgtccaaaggaaacgagagcctcttgattcctgataatgcacaggtcatcagttcgtcggttgtggatcgctgcccacatcgttctgagacccagagtgtagctcatgccgagggcgaagatgactgtttgattctgggaacgattgactcatatggtcatcttattgtatctcgtttggacatcatggctgatgacagccaattgaaaatgaaaattggtcttttttatgggcgaagtgttaaagatggctttggtgaaggaaatgtattgttagcatcaagttttgtgaatgattttgttgtggtgcttgttgatggtttatgtgatgtggatctatcattgtgcaatactaattaa

SEQ ID NO: 32896 - DNA, 255 bp, Zea mays
  Peptide Sequence Number=SeqID_74675
atgaagaagatggtcaataccaggaagacaggaggaatcgatctaccagccaactcccacaacaggaggattattaggcaacaacaaatagaaatgaatccccaaaatcctccaccagctgggaccgatccagtggttgccgcccaaatgcaggtatcttcgggcttggatcagaactacaacatgaagaagcacaaagaacacgaaggttggcgcagagccgaagctatgtgcaggagagcttcggcatgttag

SEQ ID NO: 32897 - DNA, 207 bp, Zea mays
  Peptide Sequence Number=SeqID_74676
atgaagagtatatgtgatcttgacaagacccctggacctggccgtcaggtgaagtacgacaatttggagttacttttgtattcagtgaactgtttggtaatgcggttccttttgtatttagtgaactgtgtggtactgcgtacacactgtagttccttttgtattaagtgtagtagtgatgaggaactattgttgagtttgtcttga

SEQ ID NO: 32898 - DNA, 618 bp, Zea mays
  Peptide Sequence Number=SeqID_74677
atggcgggaatggtgagcgggtcgatgcatcgctcgggcaggcaacttttatcgttcgccaagaatgacagcaagaaggtcgttgccgcggcatcttgtgtgttgcagctcagcattgtcttgggcatgggtctcaccgtcgtgctaggacttgctatgagttttgggactggcattttcacaagtgacgtgcacatgatccgagtcattcacagaggcatcccatttagccataggttccaaacacttgctcagataagactacagaaacaatcgaagcagttagcagagtggaacactacttccttcacatctgaacttacaactactaaacacaaagaggacaatgttgattgccctgtcactcgactggttggcacaccccgctggaagttttttacttccaaaatcatgaagagtatatgtgatcttgacaagacccctagacctggccgtcaggtgaagtacgacaatttggagttacttttgtattcagtgaactgtttggtaatgcggttccttttgtatttagtgaactgtgtggtactgcgtacacactgtagttccttttgtattaagtgtagtagtgatgaggaactattgttgagtttgtcttga

SEQ ID NO: 32899 - DNA, 507 bp, Zea mays
  Peptide Sequence Number=SeqID_74678
atggcagcggcagttgtatcaacgggcaggaaaagaaaaggtggagcagcgattctcacaattggtggagcacttaccttctttcatggaactggaaatcggaggtgtctcgaggtatctataaccctggaaacatcagaaacaattaatccccgtgcattacatccttcgagaaggggctcaccgacggtaaccaagctacacagtgaacaccatgaggttgtttcagatcttcaccacacaagctttctattttccatccccattgatggccctatgtcattttctacctcaaaggtcactgtacagtggtctcttcgatttgagttcttcacaactcctgaaggaacagacccagctaggtatgaacacccactccttgttgagaaaagagagaagggtgaatgggtcctccctgtaactgtttacgcacctccactgcacagacgagctactcgtgggaggaatgatagatctggcttacctggaaacatcctcgactcttga

SEQ ID NO: 32900 - DNA, 231 bp, Zea mays
  Peptide Sequence Number=SeqID_74679
atggcggcggcagttgtatcaacgggcaggaagagaaaaggtggagcagcgagtctcacagtgcgataccgggagggagaaagtgcccattctttaaggagccgaactccaggaagttacgcagggggtggcgtggatttcggcgggagccgaacagatcggccggtgttgcatatagatagtactcagcagtgcacacaccacattgttactttacacatcgaatcatga

SEQ ID NO: 32901 - DNA, 972 bp, Zea mays
  Peptide Sequence Number=SeqID_74680
atgaataactcacaacacgtagattgcctacgtgggaagatcagctcagcgaacacgaagttctgtcccagaaaaccaattccgccgcccacgtccgggcctgcacggcgggaggttgacggagatactagagtcgctgccggagccgagggagacgtccacggcaccagaccgagaagaggaacaccgcgcagcaggaagcccaagcaccaggccacggtggacaaagaccagccagagtgcacggcaccacacagatacccaagcacagtaacagagaggaatacaagaggaatacaatcctccacaagtgcggcagccacagcaagcaatggcagcggcagttgtatcaacgggcaggaaaagaaaaggtggagcagcgattctcacagtgcgataccgggagggagaaagtgcccattctttaaggagccgacctccaggaagttacgcagggggtggcgtggatttcggcgggagctgaacagatcagccgaattggttacctcagttctttcattgcagattggtggagcacttaccttctttcatggaactggaaatcggaggtgtctcgaggtatctataaccctggaaacatcagaaacaattaatccccgtgcattacatccttcgagaaggggctcaccgacggtaaccaagctacacagtgaacaccatgaggttgtttcagatcttcaccacacaagctttctattttccatccccattgatggccctatgtcattttctacctcaaaggtcactgtacagtggtctcttcgatttgagttcttcacaactcctgaaggaacagacccagctaggtatgaacacccactccttgttgagaaaagagagaagggtgaatgggtcctccctgtaactgtttacgcacctccactgcacagacgagctactcgtgggaggaatgatagatctggcttacctggaaacatcctcgactcttga

SEQ ID NO: 32902 - DNA, 351 bp, Zea mays
  Peptide Sequence Number=SeqID_74681
atgaataactcacagcacgtagattgcctacgtgggaagatcagctcagcgaacacgaagttctgtcccagaaaaccaattccgccgcccacgtccgggcctgcacggcgggaggttgacggagatactagagtcgctgccggggccgagggagacgtccacggcaccagcccgagaagaggaacaccgcgcagcaggaagcccaagcaccaggccacggtggacaaagaccagccagagtgcacggcaccacacagatacccaagcacagtaacagagaggaatacagtacgcaaccgagcagcaccgtgcaatgcagtacgcaatctagcagcaccgtgccacctctaa

SEQ ID NO: 32903 - DNA, 489 bp, Zea mays
  Peptide Sequence Number=SeqID_74682
atgtcctggttgcaatgcatgatggacaggggtcttgttggctctggaactctaaaagatcttttgtccaacagaaaatatgttacaccacatctacatctcatgattttcgagctggtgaagaactcccttcgcgcggtacaggaacggtatatggattctgataagcttgcacctccagttcgaatcatagttgctgatggagcagaggatgtaactattaagattagtgatgaaggtggtggaataccaaggagtgggctctcaagaatttttacgtatctctatagtacagcagaaaaccctcctgatctggacggacataatgaaggagtaactatggctggatatggttatgggatccctattagtcgcctttatgctcgatatttcggtggggacttgcagatcatctctatggaaggatatggaactgatgcttacctccacctttcacggctgggagattcggaggaacccttgccgtaa

SEQ ID NO: 32904 - DNA, 1863 bp, Zea mays
  Peptide Sequence Number=SeqID_74683
atggcgttggagccggtggcgcgggcggtggcggaggaggtggcgcgctggggcgcgatgcgccagaccggggtcagcttgcgctacatgatggagttcggggtgcgccccacggagcggaccctcctgctcgccgcacagttcctgcacaaggagctccccatccgcatcgcgcgacgggcgctcgacctcgactcgctccccttcggcctctccaccaagcccgccatcctcaaggttgttttcgtttcctgccttctacctcttcctcatctctccctcggcgcggactgttcgtggctctgggccagatggtccgcgaccctgctgcaggagcaagtcttctctgcgcgttattcggacgacccgcactctaggtcggacggactaatttttggtctatttgcgtctgcaaaggtgagagattggtatgtggagtcattccgtgacatccggtccttcccagaggtgaagaaccaggaagatgaactcgccttcacccagatgatcaaaatgatcaaggtgcggcacaccaatgtggtgcctgcggttgcattgggtgtgcagcagctgaagaaggacttgggtggtccaaaggcgttcccacctggaatccatgagatccatcagttccttgatcgcttctacatgtcaaggattgggatccggatgctgatagggcagcacgtcgctttgcatgaccctgatccagagcctggtgtgatagggcttataaacacaaaaatgtcacccatgacagtagctcgaattgctagtgaagatgcacgtgctatttgcatgcgggagtatggatcatctcctaatgtcgacatatatggtgatccggggtttacattcccatatgttacaccacatctacatctcatgatttttgagctggtgaagaactcccttcgcgcagtacaggaacggtatatggattctgataagcttgcacctccggttcgaatcatagttgctgatggagcagaggacgtgactattaagatagaaaacccctgggtgattaggacttcctattgctcagaggaggaaggctttcctcaccttcttcgaagctgcgcactgcgcttggggatccgcaagaagcccaaatatgtctggaaggagtaccgtgaaaatggaatggaaaagtgctctatggcggtctacttgggagaaagccggaactacccaaaccaccctcctttccaaattaccttcatcgggcaccgcttcccagacacatgccagactgttgctcgaaaagccctcaaacaactatgccaaaactatagccgagagacctttgagactcccctccgatatttcccacccagcaacaaaaacacccccacctggaagaaaagactccaggctctgtcagaaggagatcccatagaagatgatcccactatcgtctacatggtcggatacctccacaccctcgacaaccactacgatgagctctcctcccattatacccacctaaactcccgagtggaaagcctagagcagcaagtcaaagagcttacgcaagagaaggtatccctccaggagagtctcagcatagcggaaggcgaggaagccaacacccgtgaggcctatcggaccttgaagatagactttgacaagaagctaaaggcactcgcccccaaaaggaagatccagaagaagaccactaaccaaggatgccagacagagaagaagaagaagaaggcccctctagccctacctccccccagaatcgatgactggtctgacgaagaagatgtatccctagccagcctcgatcttctcaaggcatttggggacaccttagacaaggaactcgctagcacctcgaagaacgccctcgtgtag

SEQ ID NO: 32905 - DNA, 477 bp, Zea mays
  Peptide Sequence Number=SeqID_74684
atgtcggacgaccttgttgttcctgtccactttgaagttggccaagaactttgcttttgcctcctagatcatctgctccttgtgctcttcgaactggaactgttcgtcagccggcaagagccatcccttgaaccggtcattgagggccgatttgataagtctatatttgttgtccccagcggagtcgccagaaagtatgttgacgccttttcggagcgccaaacactcaacaagaaccgtggcggtgctctctggtcaggcgcggacgtcttaggaatggaactctctgatatcctgctagtacaacctcccaatgcatcatctcgggcgcttgctgctgcagctaagatggtcggtctagctctgggaaaaccttacagcaggagagctgctgctaccagagccgccgcctgcaagaagtgtgctaggttgcaagctgcatctgaacagttcagataccttgaagagctcacatag

SEQ ID NO: 32906 - DNA, 747 bp, Zea mays
  Peptide Sequence Number=SeqID_74685
atggagagccgatttgataggtctatatgtgttgtccccagcggagtcgccaaaaagtatgttgacgcctttttggagcgccaaacacttaacaagaaccgtggcggtgctctctggtcaggcgtgaacggtccgcggcctggggccggacgagaagctgggggaggttctatcacaccgcatgtccaaaatttccttttggagacttgcactggctcaaacgtagaaagatgtcgagactctacttatacaacaattatttttaaaaagattatatctgaggttgaattatcttcaaatgttgtgattgatgaactttatgaggagtttgctcaacgtatgttgtccgaagcaatctatagtgagcttaaacccagtttacatatgcagatgatcatattttcccaaagcgagtgttcaatttggccatcaagtttattcttgtctgaatttgttctttcataccctaaaattttctccacaaagtgttgcttcgagctaggttccggtgtcggtctggtgggcatttgtcttaatcatgttggtgcctctaaggttattcttactgatggtgacccatgtacactcagaaacatgaaggaaaatatggaactgaataacttatgcattgagcaggaagattctagagcgctaaaagaaagtaagaataaggtcgagtgcaaatatctttcttgggaagaagtgtccgaaagtgatttatggggctaccagccggacgtagtgtga

SEQ ID NO: 32907 - DNA, 159 bp, Zea mays
  Peptide Sequence Number=SeqID_74686
atggagttcaaatcgtgctcactgctgtggggagagagtgagtttaggagagaaaaccccagctcaactgcccggaggcaagttcagctggtgtatggtcaaagaggttcacagctgaagttgagttcagctgaagttgagaaagctcaactcagctga

SEQ ID NO: 32908 - DNA, 228 bp, Zea mays
  Peptide Sequence Number=SeqID_74687
atggtgagagaacgaagaacacaaacaaacacaatgagcaagaacacaagagacacaagatttatcccgagactgttggttagaggtcagaggggtcagagaccagctgaactgcccctcaggaccagttcaactggtcttgaccagagagttcagttggtgtatggtcaaagaggttcacagctgaagttgagttcagctgaagttgagaaagctcaactcagctga

SEQ ID NO: 32909 - DNA, 363 bp, Zea mays
  Peptide Sequence Number=SeqID_74688
atggaggagcagttcatcctccgcgtgccgccatccgtcgcagagcggatcgagcgcctcatgaatgaatccaccgcctcctcctccaacccccacgaggcctccctggacctctccttctcaggtcaggtgcagtggggcttccaagcgctgggaacgcgtgaggctggtaaccggttgtatgtgggggcttccaaggcgctggcgacgcatgaggttgtatgtgggggcttccaaggcgcttgctccagactttgtggtgataggtttatgtgtggtgctagactgttggtttattattcaattggcgttgggattatggacttagcatggatcagcttgcttgagaatttaagagattag

SEQ ID NO: 32910 - DNA, 408 bp, Zea mays
  Peptide Sequence Number=SeqID_74689
atggaggagcagttcatcctccgcgtgccgccatccgtcgcagagcggatcgagcgcctcatgaatgaatccgccgcctcctcctccaaccccgacgaggcctccctggacctctccttctcagaggatggaagaaatggcacatttatgatcggtaatgagagctttcctgcatctctcttggatctacctgctgtggtggagtcatacaaaacatatgatgattctgtactaattaaaactgctgatgttggtcagaacgccagtgcgacaggaggcgaagaaggtggtgatcgtaagaaacctccagtagctcgtgcagcaaagcagcctggggttcaggagcccgccgcgaatggagaggaagctgatcctgagaggagcgacagtgatgattcagataactga

SEQ ID NO: 32911 - DNA, 1308 bp, Zea mays
  Peptide Sequence Number=SeqID_74690
atgggggctaaaatatccctcgaggcctcgacacaggttaccgagctgcgcgcgcagaagatctggggcgggaccgcggtgacaaggaaatgtttggaggcaccgagcaagaggatatggacggccacaggatctccgtcctatttagagatggcaatgggtaaatacccaccggccaatctcagccgtccgttcgtcgagcatcaccctcgcgcccgctgcaccgttcgtttgctcgaccgccctcccctccccacctccctcgcagctgcaaccgacaccgcctcagcctcgcatcgcttcaccctcctcgcatcgcccgcccgtaactcgccgaaggagaatatcgccaccgatgcccccgtgcggccggtgatgcagccggcgagcttgtctgcgatgagagccgtcctcatccccacacgttcctctatccatggcaactcgtccaacaccatcatccccattcccgcaccctcctccctccacctcttgctccatgctccatccccacgcccagcgtgcgtgccttgtcgcccccgtcgcggccacgaccttggcagcgtcgacgacctccctcaacttccccaccacgggcaccgtcctggggaactgcatggtgcgctcatcgtcagatccaggaccaaggttaggtgcgctcatcgtcagatccaggaccaactgaccaaggtcagctgcaacgtattcaaggcatccgagggcaggctttgcgtcatcagtgtcgtgaacggtgtcgaacatggatttgggactgcgatggaggagcagttcatcctccgcgtgccgccatccgtcgcagagcggatcgagcgcctcatgaatgaatccgccgcctcctcctccaacccccacgaggcctccctcgacctctccttctcagcgtgtggcaagaagccccttcggaaaccgcggttcatgaatttgctgctcgggaatgaggtgcagtggggcttccaagcgctgggaacgcgtgaggctggtaaccggttgtatgtgggggcttccaaggcgctggcgacgcatgaggttattcagatagatgttttgaaagctacacttacatcggccccgtacatcggccccacgcgcctgcccgtgctatgtgcggcgcgcgagcgcttagggtatggccagggcatgagctatgctgtcataagtgagagcttgattgttggctcacagcctcagaagcctgaagatattgatcacttgaaaaatgaagagcgagtagcatatattctttgcttacagcaggacaaggacatatactacctattaaggctctaa

SEQ ID NO: 32912 - DNA, 975 bp, Zea mays
  Peptide Sequence Number=SeqID_74691
atgagcgcacctaaccttggtcctggatctgacgatgagcgcaccatgcagttccccaggacggtgcccgtggtggggaagttgagggaggtcgtcgacgctgccaaggtcgtggccgcgacgggggcgacaaggcacgcacgctgggcgtggggatggagcatggagcaagaggtggagggaggagggtgcgggaatggggatgatggtgttggacgagttgccatggatagaggagcgtgtggggatgaggacggctctcatcgcagacaagctcgccggctgcatcaccggccgcacgggggcatcggtggcggtattctcgttcggcgagttacgggcgggcgatgcgaggagggtgaggcgatgcgaggaggacgacatcgtgggtggccaaggaggactgaggcagtgtcggttgcagctgcgagggaggcggggaggggagggcggtcgagcaaacgaacgccccaccaggccaccactcaccctctaagcgaacctcgtcgccctacacccggtgcagtttggtcaaaccacgcagtatcctcgcgtcacagctctgcccgttcttatccacaatttcttcgtcccgattcctccgccgacgcccacgctgcggacaaatcagccgccgtcgccctctcgggatcgctggctcccctgcctctgtgcacactcctcaccaggacccaagccagctccgtcgggcgccgtggggaactgctgggaggggcggtcgaccggcggtgcctctgcttcgggttctccgtaccggcgtcggaggggatcggatggcataagattcgttttgttctttgtaatgccctagttgtttgccagccaattggtgtgggttgtatcagtactagtaatttgtctgtgccctgcgcgggtcattggtttatttgtttacaacaacaacaacaacaacaacaacaacaaagcctttttgtcccaagcacgttggggtag

SEQ ID NO: 32913 - DNA, 867 bp, Zea mays
  Peptide Sequence Number=SeqID_74692
atgccaggcataccgagggaagtcgccgagcactccttggacattcgagccaactccaggccggtgaggcagcacttgtgtcaattcaacgaggagaagcgtggggtcatcggggaggagatccacaagcttttggtggctgaattcatcaaggaggtgttccatcatgagtggttagctaaccctgtactagttaggaaaaagggagggaaatggaggatagttcgaataaaggttattacaatactggggtacaagctcgagagagctagaacacaaagcgcggtagaagggaaggatggacttgccttcgtcgaagctttcctggcacaaaagatttatctccgggaggtcgggctcctgcccttcttccgggtctacgggttccggatcgacgagaaggctgggagggggctgaccgcggggaagtggtggagctccgcggcgggagtcgtcgccggtgaggttcgtgcggggatcgggggcagaggagtggtgttccaagctcgctgtggtgtggcgaaactgatgagcctagctatttgctcgctgaacaaccagagaggggggagagatggggaggggcttaccggagtggaggaggacggcggagctagcgcgattgagctcgagcgagggggagatgagtggctgaggccggtgcggggcaaggagggcatgtactgctacacgactatgctcttcgggttgcgcaacgcaaggggcacgtatcaacgttgcatgaaccatgtgttcagcaaccacataggctcaacggttgaggcctatgttgatgatatagcagtcaaaaccagaaaggctaactacctcatcaccgacctggagaccgccttcacttgcctctga

SEQ ID NO: 32914 - DNA, 282 bp, Zea mays
  Peptide Sequence Number=SeqID_74693
atgcccaagaaccgggtcaccggtggcgaaccgccgtcgagcccaccgggggctggttttttccctgcggccgaccggttcgcctcgccccaagaagcggggaccatcgatccggaacccgtagccccggaagaagggcaggagcccgacctctcggagataaatcttttgtgccaggaaagcttcaacgaaggcaagtccatccttcccttgatgcataattacctattctttctaccactacctaagccaggattacggggtggaatatttgcattgtga

SEQ ID NO: 32915 - DNA, 855 bp, Zea mays
  Peptide Sequence Number=SeqID_74694
gtgaactacaagactggtaagagccatagggtaattgacagtggatgtactcaacatatgactgaggacgtcctgctcctcaaggacacgctcaagccatttaccatgggactcccttgtcccatcggagacgaagccgatggcggccagagagccgcctcgcctcttgctgcccctactccatgcccgtgttgtctaggaggaaggccttcagccgacattccatggggtcagtgcgcgcgggggcccatgtcggcctcgcctcgcggcggtcagtcgatggaggcatcgcggacggttgcttcaacaacggcaagtattgatatgtcgcggctgcttcctcagcaacgcgtgagtcatgatgagtgtagtgcatgcggcagtatggatgtgccgcctgcccaatggaatggacaggcacgccgcctgcgggatggtctggtcgctgcccgtcagcggagtggacagggctcattaaatgctgaggcggcacatcgcctgccagtggaatggacagggctcattaaatgccgaggcggcacatcacctgccagtggaatggataggcggcacgccttatccgcaacaaatgcagaggccgcgcggcccagaggccttacgtcaggctccgcccgttggcttacgtcacgggaagtaggccacgtggcagcatcaggtctccgcctaggcggggagcggaagcaatcccaggaccccgctgtgaggggctcggacccccacactgaggggtccggaccccatccggggggtccggttttctcatgtggaggtcctggaccatacccagaggcctgggttgagccgacgcccaaggagtatgacttgtgggcctag

SEQ ID NO: 32916 - DNA, 1218 bp, Zea mays
  Peptide Sequence Number=SeqID_74695
atgcccgtgttgtctaggaggaaggccttcagccgacattccatggggtcagtgcgcgcgggggcccatgtcggcctcgcctcgcggcggtcagtcgatggaggcatcgcggacggttgcttcaacaacggcaagtatggatgtgccgcctgccaatggaatggacaggcacgccgcctgcgggatggtctggtcgctgcccgtcagcggagtggacagggctcattaaatgctgaggcggcacatcgcctgccagtggaatggacagggctcattaaatgccgaggcggcacatcacctgccagtggaatggataggcggcacgccttatccgcaacaaatgcagaggccgcgcggcccagaggccttacgtcaggctccgcccgttggcttacgtcacgggaagtaggccacgtggcagcatcaggtctccgcctaggcggggagcggaagcaatcccaggaccccgctgtgaggggctcggacccccacactgaggggggtccggcaccctcccatggtgatccagactcactgatgatgctttggagtatattacctctctggccacgtggcggccctggagccgtccacgtgggtaccgatagtggcccccgggcccacctcaagggaggatacgagcctacaggtggggccaaagctttattggcgattggcccccgtgtcatagactgggccgttgttttcggcggagatgaagaggcgcgctaccgcgggcggcggttcgctcctcgcatggcgtctgagggggcactcaacctgatgcgcagcctgctcggatggggcgcgctgtcgctcgacggaaggatccgcgccggcgccactcccctcggcgatctcgccgccggggagtacgtgctcttcgtctcctacctctccttgaaagggaaatacagtgtccggtgcgccaagctgatctccggtgaaaaggccgctctcgggaaaagatcagcggtgtacgactataattcaccggattgtcggtggtgcaccggactgtccggtgagccaacagtcgccagcgcaatggtcggccgtgcaatctgcgggcgacacatggcccgcaccaacggtcgacaggggcaccggactgtccggtgtgcaccagacagtgtcaagtgcgccaacgggcccgaagctgcaacggtcaactacgcctgttttggaaggcaatcgcgcaccggacagctacagtga

SEQ ID NO: 32917 - DNA, 186 bp, Zea mays
  Peptide Sequence Number=SeqID_74696
atggggaagcctgtcccatcactcctcatgctcctcctcggccgagggcttgccttccaaggctgtggcaggcagatcctctggtgcgggctcgggtgctggatccggggctacctcctgagcagctccttgctccggcacgaggacgtactctccgtcagcgaggatttaataacattatgctaa

SEQ ID NO: 32918 - DNA, 312 bp, Zea mays
  Peptide Sequence Number=SeqID_74697
atggggaagcctgtcccatcactcctcatgctcctcctcggccgaggcagggtcccactcgacagtccaacccggtggcaagatggacggccaagtcactccagcaaccatttcctccagagaacctgtaaaaattatgccacaagcaaggctgagtatactaatactcagctagacttacccgggcttgccttccaaagcagtggcaggcaggtcctctggtgcaggctcgggtgctggatctggggctacctcctgagcagctccttgctccggcacgaggatgtactctccgtcagcaagggtttctag

SEQ ID NO: 32919 - DNA, 420 bp, Zea mays
  Peptide Sequence Number=SeqID_74698
atgggtgtcggggtgcatacaaggcacgagtttttgccatcggaaccatttcgtcgttttttgcaacgaacatgcccaatccactactttaggtccaaaactcatgtttggggtggtttcgcgcaatttcgttgccgcacgtcaccaattccgaaacgggtgttggggtgcatacaagcacgagttttcgccaccggaaccatttcttcgtttttcgcaatgaacatgcccaatccactactttatgatgaggacatcaacaccaacacgagcacatctacaccagcagcaccttctctagcccaggcaccatcttcgccagtccaggcgccaccccttccacctggtccagtgactcgggcccgtgcaagagaattgaactacatcatgttgttaaagaacgaaggcccggaagaatag

SEQ ID NO: 32920 - DNA, 447 bp, Zea mays
  Peptide Sequence Number=SeqID_74699
atggaggtggaaaacttgttggagaacgacgttggctgcccgactaccacaaccaagatggtgtggcgccttgagcgacaggtacaccgtctcctgataactacgatttggggtggaggtcgacgttgtgctatccgactacaacaaccacaagggtgctgcgccttagcgatagttacaccggctcctgttgttgctgctcttgccgtgccaagaacaaccttgaacctgcaagcaatcgagaacaagcaagaacaagataaaaagcagacgcatttcttcgttgtcgcacgttacccattccgaaaacgggtggtttcgcgcaatttcgttgtcgcacgttacccattccgaaaacgggtgtcggggtgcatacaagcacgagtttttgccaccggaaccatttcttcgttttttgcaacgaacatgcccaatccagtactttag

SEQ ID NO: 32921 - DNA, 432 bp, Zea mays
  Peptide Sequence Number=SeqID_74700
atggcccgaatgtctgatattgactggtgtcaactagtttacacggatttgtgtgatgctgccgcacgttggcataaaaggaacaaaacaaacatcacagcaacaatatatggatgctcactcattgttctaatttactatcttgatcacctacatcaccctgcatctcctgttaacaaatatgatgttaaaatattattactgctaactgttctatatggctttatacagtttcgtagccgttcagaaacgtgttacgtcattgctccagaacggcatgtttctgccgttttcaacatatatgtgccacgtatcaagaatttgattggcaacaagttgcaatgtttgccctcccagcagcggccaatgtttcaatcattgtttgatgctcatgacaaagaggtggataaatactgtgattccctcagctga

SEQ ID NO: 32922 - DNA, 999 bp, Zea mays
  Peptide Sequence Number=SeqID_74701
atgagcgatcggcagcgcgatgctgtcgctaggttgggattttcaagaatatttgatttgcgaactgatgccttagagagcagatcacttatcaggtggttgatggataaattggatccacatgacatgaccatacgcccaggggctggcaaggaactgaagataacaaaagaaacggttcatctgattttgggtttgccatgtgctggaggaggcatggagtttactgattggtatggtgaagtggatgctgctgcaaaactgagacgtgatctcaatgttggtaaagaagaattcgatgttgtcaagcttcaagacaagatagtgcttggcaacgatgatgagctatcaaatagatgcttttttctgattctattcaatcggcttctttttccttctgcttcttggggcattacaaacaatgaggtactcatgacttcaaacatggcctggatgtctaatattgactggtgtcaactagtttacatggatttgtgtgaggctgccgcacgttggcataaaaggaacaaaacaaacatcacagcaacaatatatggatgctcactcattgttctgatttactatcttgatcacctacatcaccctgcatctcctgttaacaaatatgatgttaaaatattattactgcagcgtccaatgtttcaatcattgtttgatgctcatgacaaagaggtggataaatactgtgattcccttcagctgagccatcagatgattgtttcgaagcagattgaactctctgaaacatttggtgaaatgatcgatgaagttctgagagctgcaacgcagcgtgattcacagccagaagtatccacaccaactgctccaacacctgataaacagcaacatgatcaggaaagccatgttcctactgatcatatcaaagtatcagatgatgctcccacaacagacaagcctgctgctcctaagttaacaccagatataatagtggaggacaaaaatcttgttaccacatga

SEQ ID NO: 32923 - DNA, 1541 bp, Zea mays
  Peptide Sequence Number=SeqID_74702
atggggcacgggcgtccactcggattacccgccagcagctcaccggagacaccatgttcggcgccctccgaggggatcggtccattcgagggactcgatcacgcctcgcccgagcccagcctcgggcaaggcagccgaccccggaggatctacgtctcgcccgaggcccccctccagcgacgaacatacttccggctcgcccaaggcccagtcttcgccaagaagcaaccctggccaaatcaccacagccgaagtgaccgcagtcacttcgccgctccactgaccggcctgacagaaggacagcgccgcctgcgccgctccgactgctgtgccactcgacagagtgaggctaacaggcagccaggcccgacctcgggcaccataggaaactccgctccgcccgacccagggctcggactcgggctcagccccggaagacggcgaactccgctccgcccgacccagggctcggactcgggctcagccccggaagacggcgaactccgctccgcccgaccaagggctcggactcgggctcggccccggaagacggcgaactccgctccgcccgacccagggctcggactcgggctcggccccggaagacggcgaactccgctccgcccgacccagggctcggactcgggctcggccccggaagacggcgaactccgctccgcccgacccaaggctcggactcgggctcagccccggaagacgacgaactccgctccgcccgaccaagggctcggactcgggctcggccctggaagacgacgaactccgctccgcccgacccagggctcggactcgggctcggccccggaagacggcgaactccattccgcccgaccccagggctcggactcgggctcagcccctgaagacgacgaactccgcttcgcccgaccccagggctcggactcagccctggcctccgccgacggtctccgcctcgcccgacccaggggctcggactcgacctcggcctcggaagacagactcgacctcgacctcggaggaacctccacatcgcccaacctagggcacggaccgaccacgtcaacaggaggcgccatcattactctatcccaagctaactcaggctacggggaacaagaccggcgtcccatctggctcgctccgccagacaagctccagcgctcctccgacggccacgacaccacacgaaccgggtgccaaaacctcttcggctgccacgatggcatatatggaattaggaagtacacgtacgaccactcgctacggtctgaggaattcacggtccagccgctccagcgtgtggaaaatcgcttcgaccaacccggtagcactgcacgtgccccacaccatcgtggacccacgggcagtgggagagctatgggtcaacagcggtgcccgatggacgccggcaaggtcacgagagggcgctttgctctctccctgtcccgccctcaccgcggccgccgccacgacgacgacgacctgcggtgcgcctgtgcctgggttcggatcgtccggcgcctctccgttggccactg

SEQ ID NO: 32924 - DNA, 231 bp, Zea mays
  Peptide Sequence Number=SeqID_74703
atgagtggttcgctctttacaaattccaattggtttgcatttgacgaggacaaggcactgaatgatggtttggttagctcagaagcatccccatctccaaattcggaaatatctgcactaaaagaggacgatgaacacgatgaagtcattcttggcaaaattatagatgaaataaaaggttctgaaccaactctaccagtcatcaagatatcgacgacccttagctcatga

SEQ ID NO: 32925 - DNA, 2053 bp, Zea mays
  Peptide Sequence Number=SeqID_74704
atatggaattaggaagtacacgtacgaccactcgctacggtctgaggaattcacggtccagccgctccagcgtgtggaaaatcgcttcgaccaacccggtagcactgcacgtgccccacaccatcgtggacccacgggcagtgggagagctatgggtcaacagcggtgcccgatggacgccggcaaggtcacgagagggcgctttgctctctccctgtcccgccctcaccgcggccgccgccacgacgacgacgacctgcggtgcgcctgtgcctgggttcggatcgtccggcgcctctccgttggccactgtttgcgggacaaggttcaagtggaacaattactccgctacattgtagaggaggctcctgaagatgcagaaaagaaaaggatatttagatttccgtttatagcttgtgaaatatttacatgtgaagtggatgtcatcatgaagacattagtggaggatgaagatcttatgaatttacttttctccttcctgaaacctgaccacccccatgggacattgtcggctggttactttgccaaggtagtgatttgcttgatgatcaggaagacactcccactagttagttatgtgcagggccatcctgaaatagttagccaacttgtcgatcttattgggattacttctatcatggaggattctcctgaggttcatgcaaatgctgctgaaatcctttgtgcagtaactagatatgcccctccagcacttgctgcaaagatttccagtccaagctttgtggggagattatttcaacatgcttttgaagattcaaggccaaaatcggtgctggtccactcattatcagtgtgcatatcgttgttagatcctaagagacttgtatcggcttcctatcaggctttccgtagtcagttgagccatggaacacttgtcaccgcaagtccagagacagtaaatggcatgctggatagcctaggggatttattgaagctgctggatgtttcatctgctgaaaatgttctgccaacaacatacggtagcttacaacctccactcgggaaacatcgcttgaaggatcgactgattggccatgtccttgatgactgtaaacttgttacaagaattctggaagcagagaagaactctgctctgtcgtcagatttaactaagcatactatgtcttcagagggaagatctcccccaaggataggaattgttggtcatatgacacggatagctaacaggctccttcagctgcaaaattctgattggattgagtggcatgccagtaccctgacgaagcgtaatgcattagaaaatgtttaccagtgggcttgcggtcgaccaacatcactgcaggatcgtggtagggatagcgatgatgaagacttccgagatagggactacgatgtggctgcacttgctagcaatttaagccaagcatttaaatatggtatttacagtagtgaggatattgacgaggctcaagcatcacttgagcgggatgatgaggatgtatattttgatgatgaatctgcagaggttgtaatctcctcccttcgccttggagacgaccaagaaagtggttcgctctttacaaattccaattggtttgcatttgacgaggacaaggcactgaatgatggtttggttagctcagaagcatccccatctccaaattcggaaatatccgcactaaaagaggatgatgaacatgatgaagtcattcttggcgaaattatagatgaaataaaaggttctgaaccaactctaccagtcttcaacaaagatgcaaacaaagaatctggttccaccggcttggcaaatggtaccgttgacaaattcgaagatgatatcagaccaccaactccggatgtaaaagagagtcaacctgagtttgttgaatggaaggaggaagaagctgaacctggtgatattgccgagaaggataccgcagttcctgatattgaggttgaaaatgagaagcagctggattccatggatgatgttatgctttgcgatgcaaagttaggagaggaaaagaagagtgatgagcttggcatatga

SEQ ID NO: 32926 - DNA, 1741 bp, Zea mays
  Peptide Sequence Number=SeqID_74705
tttgcgggacaaggttcaagtggaacaattactccgctacattgtagaggaggctcctgaagatgcagaaaagaaaaggatatttagatttccgtttatagcttgtgaaatatttacatgtgaagtggatgtcatcatgaagacattagtggaggatgaagatcttatgaatttacttttctccttcctgaaacctgaccacccccatgggacattgtcggctggttactttgccaaggtagtgatttgcttgatgatcaggaagacactcccactagttagttatgtgcagggccatcctgaaatagttagccaacttgtcgatcttattgggattacttctatcatggaggattctcctgaggttcatgcaaatgctgctgaaatcctttgtgcagtaactagatatgcccctccagcacttgctgcaaagatttccagtccaagctttgtggggagattatttcaacatgcttttgaagattcaaggccaaaatcggtgctggtccactcattatcagtgtgcatatcgttgttagatcctaagagacttgtatcggcttcctatcaggctttccgtagtcagttgagccatggaacacttgtcaccgcaagtccagagacagtaaatggcatgctggatagcctaggggatttattgaagctgctggatgtttcatctgctgaaaatgttctgccaacaacatacggtagcttacaacctccactcgggaaacatcgcttgaaggatcgactgattggccatgtccttgatgactgtaaacttgttacaagaattctggaagcagagaagaactctgctctgtcgtcagatttaactaagcatactatgtcttcagagggaagatctcccccaaggataggaattgttggtcatatgacacggatagctaacaggctccttcagctgcaaaattctgattggattgagtggcatgccagtaccctgacgaagcgtaatgcattagaaaatgtttaccagtgggcttgcggtcgaccaacatcactgcaggatcgtggtagggatagcgatgatgaagacttccgagatagggactacgatgtggctgcacttgctagcaatttaagccaagcatttaaatatggtatttacagtagtgaggatattgacgaggctcaagcatcacttgagcgggatgatgaggatgtatattttgatgatgaatctgcagaggttgtaatctcctcccttcgccttggagacgaccaagaaagtggttcgctctttacaaattccaattggtttgcatttgacgaggacaaggcactgaatgatggtttggttagctcagaagcatccccatctccaaattcggaaatatccgcactaaaagaggatgatgaacatgatgaagtcattcttggcgaaattatagatgaaataaaaggttctgaaccaactctaccagtcttcaacaaagatgcaaacaaagaatctggttccaccggcttggcaaatggtaccgttgacaaattcgaagatgatatcagaccaccaactccggatgtaaaagagagtcaacctgagtttgttgaatggaaggaggaagaagctgaacctggtgatattgccgagaaggataccgcagttcctgatattgaggttgaaaatgagaagcagctggattccatggatgatgttatgctttgcgatgcaaagttaggagaggaaaagaagagtgatgagcttggcatatga

SEQ ID NO: 32927 - DNA, 906 bp, Zea mays
  Peptide Sequence Number=SeqID_74706
atgacgtggcagggggcaccggactatccggtgtgcactggactatccgtttcgccctattcacccccctctaggcgactatcagaaagaaaaggcgagcttgacgagctcggactggagcgcgcaggtgacgtcgaggtcctggagctggcggaggacgtggacccaggcgtcgagcgtggagaggaagaagccagctgggagaggtccagctccgcggaggcctgcgggtcgaaggcgatgccggagacgttgagctccagcacgcccgagtgggagaagccgaactcgtccagcgggatgatgctccgcaggtcggcccggattgcggtctcccggatctcggccgccgcagggggaaccagcaccatcgcggcgacgaggaagaggagggcggtcagggagggcccccgactaaaggctgatcttgaggaagttgttgtcgctgaagctgatattatgaacttgcagcaaaaggtttctgatcttcggggacaactcaacaaccaagttcagttgagttccacctcgttatgtgaatcatgcaacaacaagcgatccataaatgcagacaagcttgtcgaaggtgaacaaaacgctgccctttctccacagattgcctcagtcgaagcaccaccaattgtagggtcttattctgtacctgacatgttctgggctacaaaccaaatggttcagaagatgttgtattcaaagggtgagattgcgaaggatggccaagacggatcacttacatcaagatggaactttgcacagagaccacactcaaatagtccagtcgtgagcagggttcaaggttctgatgcctattcaagtactaaaaccgaggaatctggaggcgcaccttcctctgcattagccaagctgacatatgtatctttcaagtag

SEQ ID NO: 32928 - DNA, 324 bp, Zea mays
  Peptide Sequence Number=SeqID_74707
atgccgacgtcgaccttcaatcactcggcgctgcctctaaagcgccgaccacgtgttcgattgctcggcattacttctaaaatgccgacgccgaccttcaatcactcggcgccgcctctaaagcgccgaccacgtgttcgattgctcggcattacttctaaaatgccgacgccgaccttcaatcactcggcgatgcctctaaaacgccgaccacgtgttcgatcgctcggcattacttctaaaatgccgacaccgaccttcaaatcactcggcgccgcctctaaagcgccgaccacatgttcgattgctcggcattacttctaa

SEQ ID NO: 32929 - DNA, 405 bp, Zea mays
  Peptide Sequence Number=SeqID_74708
atgccgacgccgaccttcaatcgctcggcgctgcctctaaaacgccgatcacatgttcgattgctcagcattacttctaaaatgccgacgccgaccttcaatcactcggcgctgcctctaaaacgccgaccacgtgttcgatcgctcggcattacttctaaaatgccgacgccgaccttcaatcactcggcgctgcctctaaaacgccgatcacgagttcaatcgcccggcattacttctaaaacgccgacgtcgaccttcaatcactcggcgctgcctccaaagcgccgaccacgtgttcgatcgctcggcattacttctaaaaatgccgacgccgaccttcaatcactcggcgctgcctctaaagcgccgaccacgtgttcaatcgctcggcattacttctaa

SEQ ID NO: 32930 - DNA, 429 bp, Zea mays
  Peptide Sequence Number=SeqID_74709
atggggagtagctctctccgggcagaatgggaatcacggcttgtgggtaaagtgcacaacctctgcagagtgtttgaaaaaactgatatatcagccgtgctcgcggttatgagcggccaagggagctccagtggttatgagatcgatgattctggttatgactatggtgctgctagtccactacagccaaacaggatacttgctgagtatgttgatgtgtactcacccttgctctacacaccaaacccccccccccaggttgtcagcattgcaacccctgctcaggcgaagatgaagctgtggaaggagacttccaggagttccaagattacgacgagttctaggtgtgggttagcggcaacccccagtcggctgcctgtgaaggccgcggttatctacgtttcttttccgcactttgatttattgtaa

SEQ ID NO: 32931 - DNA, 354 bp, Zea mays
  Peptide Sequence Number=SeqID_74710
atggacaagatttgcaggttcgggccgcttagaagcccacgaaagaatgaccttacgaattattgggcccttgggccgttcgtgaggccttttacttctttaatggacccaggggatatctatcccccacattatgaaactgatataccagccgtgctcgcggttatgagcggccaagggagctccattgatttgagatacttgatcagagatgtttggtttacaggtggtgatgaggatgatggttttggttatgactatggtgatggttgtccgtgttgcaaccactgctcaggtgaggacgaattcatggaggaggacttccaggagttccaagagtacgatgagttctag

SEQ ID NO: 32932 - DNA, 486 bp, Zea mays
  Peptide Sequence Number=SeqID_74711
atggggatagaacatctccttggttctctcttccttttcaatccaacttgctccatctcttctcgatccttgctgcgtggaggagatctagaggatggagtaagcagtggacagggtagagggcggctgcaaatggggaggagaggaaaagagggagggggcgacggccaaaggggtggaaagggtggggggcggctgcaacaattggggagaaggagagggggtcggttagggttgggagggagaggggggctcccatccatcggatcgagatcagtggccccaaactcactctcccatctgagctcccgaccccagcgaaaaaaatgccaaaagatctactatttccctgaggaatgcctcctgaaactccaaaccccaatgccacagaacatgaaagaaaagagaaaaagaaatttaacttcttttcagaaaattgggtatcacaatggcgcaacaaaagcgtgtgtgggtcctaacccatag

SEQ ID NO: 32933 - DNA, 504 bp, Zea mays
  Peptide Sequence Number=SeqID_74712
atgacacatatacatgcttttgaagccctagatcgttcgcttcgtgatttactttctttgaaatctgcccaagcagctcaatttccttttggtgccgccctctaccctctccacgacttcctcctccctctagatctccccccacgcagcaaggatcgagaagaggaggagcacgttgaattgaagaggaagagaggatcaaggagatgttctaccccatctcttcttgcagtttttcttggggaaaccctagatgaagtattaattgaggtttgtattgatctgaaggcagatgaagtattgattgaggaggcattcctcagggaaatagtagatcttttgtcattttttccgctggggtcgggagctcagatgggagaccacccctccctcttcctctcctccccatttgcagccgccctctaccctctccacgacttcctcctccctctagatctcccccacgcagcaaggatcgagaagaggaggagcacgttgaattga

SEQ ID NO: 32934 - DNA, 900 bp, Zea mays
  Peptide Sequence Number=SeqID_74713
atgccggccttgagcagcttagagcccgcgtcgacgaccaccgcctccatggccggcgccggaggcggggaaaccctagaatgcggaggcgaggcgctaggattcgaagctagagatcttggattcttgggcactggggagaggtacaggagcgagcgcgtagaaacggggataacccggcgattctggccgccagaagctgaagccgcggccaaacgcctagcttctgggccagcttctggcggtcgcgcttcccacggaagccggccttgtacaggaaatcagaagccgcccgacccacgcgtccgctggaagccggctattcgagagggtttgcatccaccgcccgagccctgcgtcctctgcaagcctcagctctctccctcaaccgccgcctgctcctccgtcgcatcggtgcgacggcctcgaccacagtcccgtctccccttccgcggcattcgctcagcagatctcggggtgttagctgtttgtctctctgttgcatcacagaatctccactccaacgaagctgactccatagccgacaaggcaattggaaggatgcaagagatttcggacaagatattttccgtagtgagggaaacaatccgtcctagacgcgggttgacctcatttgatgctaccaaacttcgtgtagctttggaggagatagcttgcatgctggagcaagactctctggttttgcaagaacatttggacatcgtgaacaactttaacatcccggttgacagcagctatgaaccttctaccttgtcgtcaccacccccatctgacgacgacctgactccacattgggactttgcggagcatttccaaaacttctggggagttgaatatgactcagatcagatgccttcgtttagtgccaatgatgtttaa

SEQ ID NO: 32935 - DNA, 387 bp, Zea mays
  Peptide Sequence Number=SeqID_74714
atggaggcggtggtcgtcgacgcgggctctaagctgctcaaggccggcatcgcggcgcccgaccaggcacccccactggtaatgccgtcgaagatgaagctggatgttgaggaccaggagatggctgacggcgcggtggtagaggaggtggtgcaccctgtggtgcgcggcttcgtcaaggactgggacgccatggaggacctactcaactacgtcctgtacagggacattgggtgggagattggggacgagggtcagattctcttcaccgaacccctcttcacgccaaaggtgatgcatcctcctgctcgaatagagcttgtcgagaacctgaaatcagtggcggacgcaggacgaaaattcatgggggccaaaaggaccacatga

SEQ ID NO: 32936 - DNA, 657 bp, Zea mays
  Peptide Sequence Number=SeqID_74715
atgaagctggatgttgaggaccaggagatggctgacggcgcggtggtagaggaggtggtgcaccctgtggtgcgcggcttcgtcaaggactgggacgccatggaggacctactcaactacgtcctgtacagggacattgggtgggagattggggacgagggtcagattctcttcaccgaacccctcttcacgccaaaggcagccagccactgctctctggcgcccacagcagcccagcgccccagccgctggccactgctctctggcgcccacagcagcccacccgcgcccacagcagcccagccagcagccgttgctctcctcagtcagcagaccatattggtgagtactgattttgtgcaaccatattgcccaacagtgaatcaatcgttcaagctctatttgctcaaccaagttgatgaagctattggtgcatctgcacatctcagaggtcgtaattttcctaggagagctgctggtgggtgtgtaagaaggaatgaagaccttgaggaagaggatactaatttagcaaatgaaggtgacgaggatgaggaatatattcttgatgatcttgatgtggaagatgaaattgaaggaagcaatagtgaaaaagatggtgatgatcaaggcgtggatgctcatgggtcttcatattga

SEQ ID NO: 32937 - DNA, 296 bp, Zea mays
  Peptide Sequence Number=SeqID_74716
gtgctagtgactcccaggtgaatcaatcgttcaagctctatttgctcaaccaagttgatgaagctattggtgcatctgcacatctcagaggtcgtaattttcctaggagagctgctggtgggtgtgtaagaaggaatgaagaccttgaggaagaggatactaatttagcaaatgaaggtgacgaggatgaggaatatattcttgatgatcttgatgtggaagatgaaattgaaggaagcaatagtgaaaaagatggtgatgatcaaggcgtggatgctcatgggtcttcatattga

SEQ ID NO: 32938 - DNA, 528 bp, Zea mays
  Peptide Sequence Number=SeqID_74717
atggagatgatgtacactgacatcgcacaagctctcgaagccaacgggattgaagcaaacctcaatgactatctcactttcttctgcttagggcagattgggtacgccatagtcgccatgatcgcgaggggtctgatgcttgggccagaccagccggtggttctccacatgttggacctccctaagtcggcggacgccctgagcggcgtcaggatggagctgatcgatgccgcgttgcctcttctcagaggtgtcgtggcaacgagcgacgaggccgaagcgttccgaggcgtcagcttcgccgtcctgatcggcggatggccgaggaaagaggggatgcagaggaaagacctcatcgccaagaacgtccccatataccagtcccaggcttctgcgctgcagcagcacgctgccccaaactgcaaggttcttgtcgtggcaaaccctgcgaacatgaacgcgctcgtgctgaaaggaattggcgccttcggtgcccgccaagaacatcacctgcctcacgcgtcttga

SEQ ID NO: 32939 - DNA, 609 bp, Zea mays
  Peptide Sequence Number=SeqID_74718
gattggttgctggacaagtttggtgttcttcgtgatgggaagaagtcgtacccgaccattctggcatattatgtcactgtcgaagctcgagatcttagtgtcatgtctggtatgttttttgtgaacacgctggtacgatttgtgacatttcgacgaattgcgctgagcctgcagttctcggttccaagtctgccactggctgggaggaggtacaggttcagcaggacgcccagcccgcaggatcacgccgagaaggttgctgccctgaaggttgggatgcaagttacaacaacaatttcacgtgggaaagtgggagatcaagtcagtgttactgtggaaatagctcatccacgtgatgatatattatcagtcggagaggttgtagaggacaccgaggattcagagtcaacagctggcaaccatatgtacactgacatcgcacaagctctcgaagccaacgggattgaagcaaaccccaaggactatctcactttcttctgcttaggtaaccgcgaggtgaagcaggagggagaatatgaaccagaggagcacccagaacctgacattgattacatccgggctcaagaggctaggaggtttatgatctaa

SEQ ID NO: 32940 - DNA, 639 bp, Zea mays
  Peptide Sequence Number=SeqID_74719
atggagcagcgtcccgggctggagaggttgctggagactacccatctggagcttgacgggaagctgttcgtcaacacgcaggggctgagaaccgccgtcttcatgggagcacgtggggtgccatcattacttgtttaccagggcgagccagatgggacgtcgcgtggtcggtccgagcccaaggtcgggcgaggcggtgactcctccgaggtcgaggttgaggccgagccctggggtcgggcgaggcggagaccgtcttccgaggtcgaggttgaggccgagccctggggtcgggcaaggcggagaccgtcttccgaggtcgaggttgaggctgagccctggtgtcgggcgaggcggagactgtattccgaggttgaggttgaggccgagccctggggtcgggcgaggcggagaccgtcttccgaggccgaggcgggggccaagccccgaggtcgggcgaggcggagcttcctatggcgcctgaggctggactcggctgctgtcagcctcaccctggcgggtggcacagcagtcggagcagggcaggcggcgctgttttcccgtcaggtcagccagtggaggggcgaagtgactgcggtcacttcggccttgccgactgaggaatgcgcgtcaggataa

SEQ ID NO: 32941 - DNA, 384 bp, Zea mays
  Peptide Sequence Number=SeqID_74720
atggggttgtattcttggctaaggtacctcactctgaggctggtaacccccatcagcacaaagctgcaaaggcctgatgggcgcgattccggtcaaggctccgtccactcaagggacacgatctcgtctcgcccgagcccagcctcgggcaggaacagtagaccaaggcagattcacgcctcgcccgagggtctcctcaagcaacggacgcaccttcgactcgcccgaggcccaggtcgggcaggctccgcggagaagcaaccttggccggatcgctacgccaaccgaccgtattgcaggagcattcaatgcaaggatcgcctgacactttatcctgaggccgaagtgaccgcagtcacttcgcccctccactggccgacctga

SEQ ID NO: 32942 - DNA, 420 bp, Zea mays
  Peptide Sequence Number=SeqID_74721
atgggcattttggttgaaccacaccgagtcaactggacacagtcacggcgccgttacccccgtgaaccagccacctctcccacgtttcctgtttctaaaaccgtactcgcgcattcaacggagataaaccagcggccatttgaagaaaaccccagccgcgcagagtttcctttcgtgggaggcgactcccctggcgatttcagcgtctccaaatcagcgcagcgccaatcctccgccgatccaatccagcgccattccattactccttacatccttcaatctcccagcattggagccgattcaagaagttccagtggatttgatggtaacccttattatccagctaaatgtgtgatttgtatccgcttatacatcactataatcaggagccccgatattaaggcaaaggctgtggattag

SEQ ID NO: 32943 - DNA, 1302 bp, Zea mays
  Peptide Sequence Number=SeqID_74722
atgggcattttggttgaaccacaccgagtcaactgggcacagtcacggcgccgttacccccgtgaaccagccacctctcccacgtttcctgtttctaaaaccgtactcgcgcattcaacggagataaaccagcggccatttgaagaaaaccccagccgcgcagagtttcctttcgtgggaggcgactcccctggcgatttcagcgtctccaaaccagcgcagcgccaatcctccgccgctccaatccagcgccattccattactccttacatccttcaatctcccagcattggagccgattcaagaagttccagaaaattgaatatccgatgcattcccttggatgttattgtatcatcatggataatgagcgatcggcagcgtgatgccgtcgctaggttgggattttctagcatatttgatttgcgaactgatgcattggagagcagatcacttatcaggtggttgatggacaaattagatccaaatgacatgaccatacgcccaggggctggcaaagaacttaagataacaaaagatacggttcatctcattttggggttgccatgtgccggaggaggtagagagtttactgattggtacggtgaaatcgatgctgctgctaatctgagacgtcatctcaatgtctgtaaagaagaatttgatgttgtcaagcttcaagataagatagtgcttggcaacgatgatgagctatcaattagatgtttttttctcattctattcaatcgacttctgtttccttctgcatcttggggcattacaaacaatgaggtgctcatgacttcaaacatggcccgaatggctgatattgactggtgtcaactagtttacacggatttgtgcgatgctgccacacgttggcataaaaggaacaaaactaacatcacagcaacaatatatggatgctcactcattgttttatttcgtagccgttcagaaacgtgttacgtcattgctccagaacggcctgcttctgccgttttcaacatatatgtgcctcgtatcaagaatttgattggacacaagttgcaatgtttgccctcccagcagcgtccaatgtttcaatcattgtttgatgctcatgacaaagaggtggataaatactgtgactccctacagtcgagccatcagatgattgtttccaaacacattgaactttctgaaacatttggtgaaatgatagatgaagttttgagagctgcaacgcagcgcgattcacagccacaaggttttagtatttatgtttatttttttaaaactaagcaagttctgtatttataa

SEQ ID NO: 32944 - DNA, 492 bp, Zea mays
  Peptide Sequence Number=SeqID_74723
atgaatccatgtttcttacttgaaaccccgaacaaacaccatgagcaggaggcactcacgttggcgtcgctcatcgatgacgagaagaagcttgacgactccgtcgcagtcgctggtgtccgcgctcgcactgcgatccactccgccgccgcccgcgtgctcaccgacatcaaggccgacctccgagatgccgaaggatccggagggcgtagccgagcgccgtccctggatcgggaggccgccgaagcgagcgccacggggcgggatccagacgtgaagtcgccgtcgccgctgtggctcagcagaatcgtgaagctctggattcaagctttgttgggctttgtcaatgctccaggacgcttcctggcaacatataaggacaactttctagcaacatggaatgactgggagatccgcatgcttgtgctcagcagtcccgccctccaccaggtgtctctcctcttctccgccgtgctgatcctgcttctatag

SEQ ID NO: 32945 - DNA, 477 bp, Zea mays
  Peptide Sequence Number=SeqID_74724
atgtcgcgcgcgttcgacgactactatatcgaggattgtggcgtcatcttagcgtcggaggtgacgcagaggaggatcgacaataccgtcgcagtcgctggtgtccgcgctcgcactgcgatccactccgccgccgcccgcgtgctcaccgacatcaaggccgacctccgagatgccgaaggatccggagggcgtagccgagcgccgtccctggatcgggaggccgccgaagcgagcgccacggggcgggatccagacgtgaagtcgccgtcgccgctgtggctcagcagaatcgtgaagctctggattcaagctttgttgggctttgtcaatgctccaggacgcttcctggcaacatataaggacaactttctagcaacatggaatgactgggagatccgcatgcttgtgctcagcagtcccgccctccaccaggtgtctctcctcttctccgccgtgctgatcctgcttctatag

SEQ ID NO: 32946 - DNA, 660 bp, Zea mays
  Peptide Sequence Number=SeqID_74725
atgttgattgcattgccgcaagcccctaagtgcagggcggatctcggtggctacgatgatgcttggcagcggaggcgacgatgtggtttggctcgacgggagcagcacacagaggtgtggagggagctacatgtagaggcttggcagaggtggaggtgcccatattccagacgcttcctggcaacatataaggacaactttctagcaacatggaatgactgggagatccgcatgcttgtgctcagcagtcccgccctccaccagctggcctacctgctcgcgtactccatctgcttcgagcgcacccaccgcatccagaccttctgggcaccattcctcctccacctcggcggccaggacaccatcaccgcctgccttctccaccgaagacaacgacgtgctctggaagcgccacctgctcagcctcctcacctagatggcctgatgctccacagcagtatcctggaaacaccctcctatgatgagtggaagaataatttcccagaccaagaaacagaggaagatcaacccatcataggccactctatcatccatggtgtgacagctgaccaacaattcctaacccagcacaaggatatccgtgtatcagcatgccgctatgctcaccaccacacagtgcatcacaacccacctatttag

SEQ ID NO: 32947 - DNA, 1002 bp, Zea mays
  Peptide Sequence Number=SeqID_74726
atgggtgggagccagtcaaggtcgagccgcatctcctccagcaacagttctgaagaatggcttgcactggtcatcaagtatgtatttgtcagagtcaccagatgggctatttcccttcccgccaactgggattccccgcagttttgcacagcacctcacggcctcaccttgaggttcttcagagatgacaagactccgctacagaccgaggctagctcaggaagctcccacaggtgcagcgactgcaacctagcaagagtatcctctcccaagctggcctacctgctcactgcttcgagcgcacccaccgcatccaggccttctgggcaccattcctcctccacctcggcggccaggacaccatcaccgcctgccttctccgccgaagacaacgacgtgccctggaagcgccacctgctcagcctcctcgcccagacacaaactaacgaggcttcgatcagtcattccgtctcttggctggtacgcacgccaatgactatcagccgtgtatgtctttaccaagtcgcaccctttgtcaccatgctgcatgggcaatctgcggatcagcattgtcacgacgccggagccagggcaccttccttcgtctcacgccagagcaggcctacaaggccatcgagatcgagctgtctgtcatgtacgacagagaaccttcactccaagtccaaggcggcagtgatacgcacctggtacggccgcctgttcagatgtcagagtccgacggtcctcccgaattctacggcctgcgtcctcttcaacgtgcttgacaagggcagatgtttccgaccggaaagcttggcgaagtggaccaatttgatggcccaacataatctcaccaacttctgcctcctggagaaaccaaccatgctcgccaaggttttgagcgtcctcggggcccaaagtacactgggacagttggctgtacatccggcacaacgacgtgtcgtcggagctcaagatagtctgcaggggcctaggccctag

SEQ ID NO: 32948 - DNA, 411 bp, Zea mays
  Peptide Sequence Number=SeqID_74727
atgtgtgaaacccaagctgctgcagcaccatggacatggagcacgccgaggtcgggcctgggagatcctgcgcgcagggggaaaggctccctgttggggaggttcgcaggggcgtgccatggagcagggaacagggaaggtcgcagccaagaggaggtcaagggcgccgacatgctcccagggagctcctgctcctgcggcaagaagcagagggaggaggagcggccgccatgggagggagctcactgccggagaagaggggcgccctgctgcagccgtggagaggaagggagagctgctgttgccgtgggaggactcctgcgtgaggtagaagaagacaggggaaatcggctggagaagagagaaggtgagtggcggctgaaaatttttaggggtgggattgcaaaatag

SEQ ID NO: 32949 - DNA, 297 bp, Zea mays
  Peptide Sequence Number=SeqID_74728
atggacatggagcacgccgaggtcgggcctgggagatcctgcgcgcagggggaaaggctccctgttggggaggttcgcaggggcgtgccatggagcagggaacagggaaggtcgcagccaagaggaggtcaagggcgccgacatgctcccagggagctcctgctcctgcggcaagaagcagagggaggaggagcggccgccatgggagggagctcactgccggagaagaggggcgccctgctgcagccgtggagaggaagggagagctgctgttgccgtgggaggactcctgcgtga

SEQ ID NO: 32950 - DNA, 978 bp, Zea mays
  Peptide Sequence Number=SeqID_74729
atgcccgccggtgggtctggctcccaacagcatacatctgttgggaacgtcgctggcgatccgtcagcggctaccacagcctcatcggcgtcgacgcgaggcccaccatcggcagcggccaaagaggttccagttgcgtttgcccccaccgtgcaggatgacgctggtgctgaggtggcaccgcggacccccaggatccgcctatcaccgtcgaggcaatgccttcggattcccaagttccagtgcacccaactggagaagcgtactaatgcggcgtcctgccaatttgcctcagagcgggccgagcttgagcaggagcgtgaggacttcaaggaggacatccggaaggtgtctgaccgagaggaggaggtgacccggaaggagagaagcttggtcaagaagaaggaacacttagaccaaaaggaggaggctgttacagcgctccatgataagctgaaagcttataacacagtactggagaaacagcgggtcaagcaggccgcggcagaggtgaagctgcagaagctgcagcaggaacttgccgacaaagccagcgacattgctcgcatcgaggagagcctcaaggcgagggaagcttccttggcgaaacgggaaactgacctcacctggcaggaggaggacatcgccttcagggaggagatgtgggcaaggcggaacaagctgctggatgagcttgagctcgaggcagaggaaaaagggaagcgtttggaggggaaagagcgggcactaaaggagcagattcttggcgcccgtttggaggccgagggtagcagactctgccggtcggtaatcgagtacctcttgacatgcttccggagccacgacccggctgtctccttggggccagtcattgcaggtccgatggacgacactgaagattctgcccaggagggcgtacaggatgctgtggacgcggtggtcgggcgcttccagcgagatcctgctgacgatgagtag

SEQ ID NO: 32951 - DNA, 1644 bp, Zea mays
  Peptide Sequence Number=SeqID_74730
atggaggcggtgctggcccgactgccgacccttgatgagagtggtgtggcggtccaccagatcggcggccgggacccccaccgggggatccactttcctggtgcaccggtcggaggctcccagtcagctgacgtgacccccaaggcttctcctgcggtccccaattcctcggacaagggtaaggggcccgcaagcagctcctccactccggacgccgccaggaggtcggaggaagtaaggcgacaccggctgcgtcgcgctgatgggtcctttgtttcggatttaccccgagattcggactccccccaaaagcatcagaagatagctggtgggactaaggaggcagaacctagggtccaggatgagcagaggggtaccgaccaccgtcaccacaggggcagcggcagcaacagcagtaggggtggcaacagcagcagcaacggcaacgggcaccccgcttacaagggcctcctcttcttcggcatccgtggacgctccttccccgccgggccaccatgcccgccggtgggtctggctcccaacagcatacatctgttgggaacgtcgctggcgatccgtcagcggctaccacagcctcatcggcgtcgacgcgaggcccaccatcggcagcggccaaagaggttccagttgcgtttgcccccaccgtgcaggatgacgctggtgctgaggtggcaccgcggacccccaggatccgcctatcaccgtcgaggcaatgccttcggattcccaagttccaggtgggggtccagaagtggcagcgttgccaacagccgttgcagacccaatggcggcgataccatcggatgcaccgtcattggtaggcgtggaggatgtgtccagctctgtccctccgccaactccggaaggtccggagattattcttgggtgaccgctccggtctggcgtcgaacctggagcaacgctgactcctctccctcagagcgggccgagcttgagcaggagcgtgaggacttcaaggaggacatccggaaggtgtctgaccgagaggaggaggtgacccggaaggagagaagcttggtcaagaagaaggaacacttagaccaaaaggaggaggctgttacagcgctccatgataagctgaaagcttataacacagtactggagaaacagcgggtcaagcaggccgcggcagaggtgaagctgcagaagctgcagcaggaacttgccgacaaagccagcgacattgctcgcatcgaggagagcctcaaggcgagggaagcttccttggcgaaacgggaaactgacctcacctggcaggaggaggacatcgccttcagggaggagatgtgggcaaggcggaacaagctgctggatgagcttgagctcgaggcagaggaaaaagggaagcgtttggaggggaaagagcgggcactaaaggagcagattcttggcgcccgtttggaggccgagggtagcagactctgccggtcggtaatcgagtacctcttgacatgcttccggagccacgacccggctgtctccttggggccagtcattgcaggtccgatggacgacactgaagattctgcccaggagggcgtacaggatgctgtggacgcggtggtcgggcgcttccagcgagatcctgctgacgatgagtag

SEQ ID NO: 32952 - DNA, 573 bp, Zea mays
  Peptide Sequence Number=SeqID_74731
atgaacaaagacactggcattcaaggtgccattacaaacggaactccggttccccctccgcgggtacgaacaaccccactccatgggggaaggcctgcggagcaacagaagaccgacgaacggcgcgccgtcacctgctccagcagcggcgacgacgacgacttctgctccggggggccgaacaacggcagcactgacctcagggcggatgctgctgccaggaggcccccgcccctgccaaaactcgtgaggcaaggacgggcagaaggctgtagagttggaggcggcgttcctggcaggagaagcgggcgacgcttcgccttcgccgtaataaccgcgccaaaaaagggaccgggaaagggggataccccgaaaaggatccttccctgtgaaggaaccgggctccgagcccccctactgatcagaggttcgaagactggccgtcagaggggtttaacagtcgcctcagatcgcgtgggccctacacccactactggtcagaggttcgaaggccggccccccgaagggctccacggccgcctcaggctacccgggctccgcgcccattactga

SEQ ID NO: 32953 - DNA, 735 bp, Zea mays
  Peptide Sequence Number=SeqID_74732
atggtgacctccggcttgatggtgggggaaagcgagccgggctgcggcctctgcccctccctcagcctcaaggattttcatcatcgaggttggggaggggactgcagcgtgcctggctctcggacgcgagtggcttcggagccgctcgcggcgctggcgtctgccacggcagctggaagaggttcttccgccgaagtcgtcgtcgtcgccgctgctggagcaggtgtcggcgcgccattcgtcggtcttctgttgctccgcaagccaacccccatcgagtggggttactcgtctgttgattatctgagccgcctcaccaagcatgagtcgccccgtgtcaaggtgacgagtgaggtatccgtatcccggaggcgtaggagttcctcggctcggtcggccttgctgtccgagactcttctagctcagttaaagggacccctcggccgctcttcgatgagccgaggccaggggtcgggctggcgccctcgggagatggtcggccgaggccccaggggcgactggccgagccgcctgctcgggtcagattcccgaaggagtcccaggcagcgattgcccgagcgtggtgatgacgtcgtccttcggagcagagaacctcggaccgcgtcgccgtccgaggctaggtcgggcctcgccggaggtgtcgtcgatgccgagggtgttgctgcctccttccagcgtcaagacccgagcctgcagggtcaaagtgtcttgtag

SEQ ID NO: 32954 - DNA, 207 bp, Zea mays
  Peptide Sequence Number=SeqID_74733
atgtatccaatcagctattgcacccgctcccaccctcaatcctccaccagcacgcgcgaatttctggtttcccccaaatccctctccgtcgccaagaactacaccctaccgtggccagccttccacaggtctgctcatggcctctttgttcctgttctagcttctctgtacgccggtgatgctcgacaacccacacaattgcgctag

SEQ ID NO: 32955 - DNA, 351 bp, Zea mays
  Peptide Sequence Number=SeqID_74734
atgtatccaagtagctattgcacccgctcccaccctcaatcctccaccagcacgcgcgaatttctggtttcccccaaatccctctccgccgccaagaactacaccctaccgtggccagccttccacaggtctgctcatggcctctttgttcctgttctagcttctctgtacgccgaacgtgaagaagagatagaagtcactgaagagcaagtacaaccacctttggacactcaggccgggaatagtttctacttcgacatttgtggatccgagcctgaatcacctgtaaatgaaggcaagccccggtgcatttgccacctcccttgctatttcaaaatctttctcacttga

SEQ ID NO: 32956 - DNA, 351 bp, Zea mays
  Peptide Sequence Number=SeqID_74735
atgttcccaagcagctaccgcacccacctgcatcccaaatcccccactagcgagctcgaatttctggttttccccaaatccctctccgccgtcaagaactacaccttaccgtggccagccttccacaggtctgctcatgtcctctttgttcctgttctagcttctctgtacgccgaacgtgaagaagagatagaagtcactgaagagcaagtacaaccacctttggacactcaggccgagaatagtttctacttcgacatttgtggatccgagcctgaatcacctgtaaacgaaggcaagccccggtgcatttgccacctcccttgctatttcaaaatctttctcacttga

SEQ ID NO: 32957 - DNA, 1107 bp, Zea mays
  Peptide Sequence Number=SeqID_74736
atgttcccaagcagctaccgcacccacctgcatcccaaatcccccactagcgagctcgaatttctggttttccccaaatccctctccgccgtcaagaactacaccctaccgtggccagccttccacaggtctgctcatgtcctctttgttcctgttctagcttctctgtacgccgaacgtgaagaagagatagaagtcactgaagagcaagtacaaccacctttggacactcaggccgggaatagtttctacttcgatatttgtggatccgagcctgaatcacctgtaaacggaggcaagccccggatccactttagtaagcatttctgcaaaacagagtctttgaatattgaaaagccttaccttgactcccacataaccagcatacccttgagagtcttttctttagtcgggtggttccaaaagaagaaaatcaagactgaagtgcgggaggactcggtcctccacttaggatcttttgcttttgacttctcgggaggagtttgtgcctccctgacgggggacaccttcctggtaaggctaacggcacgcaagtctacgggaccaattggggtgcctcggcatcaattggctccccgacatgaaagcagcagcagtggaagtaacgaccccatcggagaccttgaagctcgtgtgagtcgacttcaggcagcactgcaacataggactgatgcttgggtcaccgacggagatagaatcaacgaactgagaagggacatccgacacttgcaggatcaactcgctgatcgagacttagcacttaactgggccgtgcagtctcgtttgctaatgtgtgctaaggaagcaagggctcaggcccgaattaaagaacttagctcgactgttgatgacctgcaggtttactgcaatacgttgcacgaggaagtccatatactatactcacaactacacccaagtgagcctgcaccacctgctgaggccgaagctggaccatctcacgttgcgggacgtgcgctgggtggggagttagacctttttgagcctcctccttctttgaggttggttgatgtctggactcccacacctgacgatgaagccgccaagactgatggcaagcaggaataa

SEQ ID NO: 32958 - DNA, 945 bp, Zea mays
  Peptide Sequence Number=SeqID_74737
atggggaggctagaaccccgggcagaatgggaatcatggtttgtgggtaaagtgtacaacctctgcagagtgttagaaactggtatatcagccatgctcacgatggctcgtctcaggtgcactgcacgtaagtctgtgatcccctttttgccttctcacctggtagagcgtccactgcatcgcacggtgtcaggtcagtccaaccatctggagagactgcatcatcgcctgcatgaggagcaggagcagcaggactcttccccctcgcctcaacgggaggtggagtctgagaggccgccttcccctacacctcagccagagatgccccctgcaccaccacagggcatcccggctgctggaggagaccccgacggagacgaagacgacgacgacgccagtggcagttcgagccatggcacagagcgttcgaaggagccggagccggagggatggatcgtgagacccatcactcgttacgatgctcgtgggtgtcacttccatgatgctctcgataccctattgtgtcgggctttcgaccgacacacttggtctatcgagtaccgttgtgtagtctaccagcatcgtcgtgggctatacccggaccacggggtagctgatggccttgacctgaagtactaccctcgccattcgatcggcagtgctggaggtgtgattgtctcgccagttggtgagggcaatcccaggctgagcagcatggtcaacttggtcgccgtgctcaacacagagttggaccacgcccttgacgagttgggcaaggttcgggcagaggttgtggaattgtgtgctgaatgtgcggcacgccactatcttgatgatggttctcccgcccctgttgggattaagcacccttaccgttcaccgccccgtggtcgcttcgactatggtaccccagactgtaggacccgcatagatttagatccatag

SEQ ID NO: 32959 - DNA, 168 bp, Zea mays
  Peptide Sequence Number=SeqID_74738
atggagaggctagaaccccgggcagaatgggaatcatggcttgtgggtaaagtgtacaacctctgcaaagtgttagaaactggttgtcccctttgctctcagtgctcaggaggagaagctggcaacatggatgacttcgaggagttccaggaatatgacgagttttag

SEQ ID NO: 32960 - DNA, 183 bp, Zea mays
  Peptide Sequence Number=SeqID_74739
atggtggtggccccctgggtgaagtaccttagccaagaatacgaccccatgttaacgtgggttgccagcacctaccgctccccctcttgcccatctttcaggtatcttcggacacaagtcggcatcacagtagaccagaataatacgaaggttgatacagcgccgaaggtatgcccttcgtaa

SEQ ID NO: 32961 - DNA, 366 bp, Zea mays
  Peptide Sequence Number=SeqID_74740
atgacagaaggcaaaaatatgcagaagcaactaggggcttcatgggaagatatcattggagacatgtctgaaacattcaaaattcaagccaacgtgaagacaagccaagctagcctcaaggacaacatgatcaggcccaagatccatcttagtcgacgggtggccaacaagcttctgttgggggccttcggcttccgaaggtatcttcggacacaagtcggcatcacagtagaccagaataatacgaaggttgatacagcgccgaaggtgaacagtacccccgtactgttcacgctgacttggcattcacttttgcgtcacgcttgtactttcatttccttcaagtcaaagatacgcccttcataa

SEQ ID NO: 32962 - DNA, 147 bp, Zea mays
  Peptide Sequence Number=SeqID_74741
atggcggatgctggggatgtcgtggtccgtgtcccctcgctttcccttgccgccggagagcctctgtccggctattttgctctccccgtggagatacctggaggtagaagacggatggaccgcgggtacaaatttgaccaggtatga

SEQ ID NO: 32963 - DNA, 159 bp, Zea mays
  Peptide Sequence Number=SeqID_74742
atggcggatgctggggatgccgtggtccgcgtcccctcgctttcccttgccgccggcgagcctctggccggctattttgctctccccgtggagatacctggaggtagaagacggatggaccgcgggcacaaatttgaccaactctggtgctccaaatag

SEQ ID NO: 32964 - DNA, 123 bp, Zea mays
  Peptide Sequence Number=SeqID_74743
atggcggatgctggggatgctgtggtccgcgtcccctcgctttcctttgccaccggcgagcctctggccggctattttgctctccccgtggagatacctggagattttgtgctgcaactttga

SEQ ID NO: 32965 - DNA, 123 bp, Zea mays
  Peptide Sequence Number=SeqID_74744
atggcggatgctggggatgctgtggtccgcgtcccctcgctttcctttgccaccggcgagcctctggccggctattttgctctccccgtggagatacctggagtcataagtctgatcgtttag

SEQ ID NO: 32966 - DNA, 1074 bp, Zea mays
  Peptide Sequence Number=SeqID_74745
atggtgactcaaggaggtttgccaccgacaagcaatgaagctaatttgtgcaccaacgacaatggtagccaacttggtacacgaattgtggacgagattatggctgggaagaacatcttctttgatcttcctaataagttgactggtgagatatggaccttgaaattccattgcattggagcacaacctggaaaagaaattgtcacaataaatattgataaagcttatgttgccctttacaacgtggtgtacataaaatcgaaacttggatattctgggagggacttcttgttttacaagaaacgatgtggcattgatcgatccaggctattggcacttgattacatccaccaagaagaggccatgctatctgataacatggatgagagaaaaataagttttgtgctcacaaatgatccacctagtgatctagaggtaagcataactcccatcaagcgtccaagacagcgaacaaatgttgacaaagaaactatagaagtgtcgattgatgcatataaggagtggcttgcaatattacaacatgaaaatccagaaatggtattgtatgaacgacaaagtaatgatgacctaatattatcagatgaagaaattcatggcagcagcaaacctactgctaattggccatctcatgctagacgtcataggaaaagagatcctgatgttattggtatatatgtagataacgatggagtcttcaaaaaggaggggcgtggtacccttaagggtatagcagcagccaccaagcgaatcaagcatggtgatcacaaacttaagattgaattttcatctaagcttggaggtcccgtaggaccaaacactcgcacttttgtggatgaaatcgtattgtttacaaagaaaaaggcaccactcattggagtgaaaaagtggaaagatatagagttcaatgttagatcttctatagcctctgacgtactgcgaaggtgggagtttccaagcaatgaggacgcgcatgaaaagatctggtctattgccaaggagagatacaaaggatggcgatcaacgttaagctcaacatacaagggcatacaatag

SEQ ID NO: 32967 - DNA, 1062 bp, Zea mays
  Peptide Sequence Number=SeqID_74746
atggagttgatggggacatgcgcggcccccaggggaaggatgtcttcgcccgaactccgggagtcttcggcgcggatgctggaggttaccgggggtcgatggcccaagaacgttcctatcccccgcgcggctggcgaagacttctttacgtctcacatggctcgtgacttgagagtgtttccttacgggcggaatattgctgctgttgtgtcgacagtgatgaacaaggaccgtcaagatgctgcgcagaagcgccgggcggtcgtcaggatggtcgatcccgtgcgcgaggcgaagagggcgcgaggaagcacgaaggctgcagccttcggcagtggcaagctggtgccggctgctaaaacggctgcgcccgggggcagcaaagcgtcgacaggtgagaaggctgcggccgctggcggaaccaagcctctcccgggcgaaccgtcgcccgcgaagctgcctccgccgaggaagcgtgttgctgacttcggcacaaatatcagtgtcgaggattatctgggtgggtcgggcgagggacagttggttgttgtcctgccttcggtggcagccacgtcgccatcggcggtgttaaaggcgaagggggccatgcaggacctgtgggccgccttttgtgcgagcggcgagattttgacggccgctgccgctagggacgtggcgggcaccatgtcccagcggttgagggaagtgtctcagcagttgtcgcagcaggtgacgcagcagctgaagcaagctgcgcaagcggaggctaaggtggcgctggcgaagggtagcctcgccagccaacacgccgaggagtgggaggcgaggtacaatgccctgcgcagtcgcgtagacaaggccgagacctcggtgcgctcagaagtcatgcggacgcacgcgcagctcgtggaggcataccacgatctgggtgcgcggactgcagatttcgaagtgcccgaccgcgaggccagcctccgcttccttgaatggttgcaggaggagctactggtgctcccgacgattatgcaggccttcatgtcctacgcctccctcgtcacatga

SEQ ID NO: 32968 - DNA, 1095 bp, Zea mays
  Peptide Sequence Number=SeqID_74747
atggcgggcaccatgtcccagcggatgagggaagtgtctcagcagctgtcgcagcagctgacgcagcagctgaagcaagcggccgacttcgccgaccgtgttgcgtcgggcgtcctgactgcagacgtcgccgccgaagtcgagaatcttcgggcgcagcatgtggatgctttccgggataagtcggctgcggagagcaaaaaccgcaggctggcggagaaggtggccaccctggaagccgagaagacggacctccggcgccggctggcggaggagaggagggaggctaaccaggtcgtcgctgaagcgcaagctgcgcaagcggaggctaaggtggcgctggcgaagggtagcctcgccagtcaacgcgccgaggagtgggaggcgaggttcaacgccctgcgcagtcgcgtggacaaggccgagacctcggtacggtcagaagttgtgcggacgcacgcgcagctcgcggaagcataccacgatctgggtgcgcggactgcagattttgatgtgcccgaccgagaggccagcctccgcttcctcgaatggttgcaggaggagctggtggtgctcccgactattgtgcagggcttcatgtcctatgcctccctcgtcacatgcgagggggccatgaatgcgttgtcccgcgaggggtgcaaacactatgaggtctttgaccaatcagatgaaaactttgagcgtgaaatttttaaggtcgaagaccctgtggtaaaggattccgcgggtgcactcttcgatcggatgtggggtcatcatggccgggaggcggttagggagcggtctgaccgggcgagagagcagatggcgtgtgccgaggatgtcgaagaccttggagatctgaacagcgcgcaacccgagactgaggtcaacccggtgctgcccgaggctgaggtcaacccggcactgccctcggaagccggtgaaggctcctccgctgcacctgtgtctactatgtccggtgaaggctctttgccagcccctgcgccggtgacggaagaccccccaaaggcggtggcggagccggcagcagaggatcccatggcggcggccgagccttcgcaggtggcttag

SEQ ID NO: 32969 - DNA, 456 bp, Zea mays
  Peptide Sequence Number=SeqID_74748
atgggcaagaacaagaagggcagaagttcgtcgcaccactccggcgacaagcagaagcgcgagccgagtcccccttcggagggcttcgatgactccgagtactcggaggaggagttttcctctgagtccgaggggtcgccggtctacgcctctcccccggtgtcgtccgatggctcgaacgattcccaggggatcgctgccgaggtgtggacgtacatccgggccgtcgagcgctccgggctcgatggctcggatgagtcggagatctcctcagacgaggagaactcctccgactcgtccgaggaggggagcggtggtgacggcgacgacgagggcgacgacggcgatggaggcgacgacggtggtggaggcgatggcgacggcaagggcgacaacgacggcgacaagggcgacggcgacagcagcaaggccagtggcaaagcgccactggcataa

SEQ ID NO: 32970 - DNA, 579 bp, Zea mays
  Peptide Sequence Number=SeqID_74749
atggtgtcatgttacgtgaaacgacgtctgtcgcctgacttgtttccagacgatttgaatggcttattgaatacttgcgactgtttagtgaccgtggtaggagatgagcggttgcctcccgcctctataaatagactgcctgcttcgctggtgtcttcacacatctcctggccatttgttgcttattctcccacttttctcttctcttccaatcaaccatggcggaagttgaagggcggaagttcgtcgcaccactccggcgacaagcggaagcgcgagccaagttccccctcggaggacttcgaggtgtggacgtacatccgggccgtcgagcgctccgagctcgagggctcggatgagtcggagatctcctcggacgaggagaactcctccgactcgtccgaggaggagagcagcggtgacggcgatgacaaggacggcgacgacgatggaggcgacgacgacggtgatggcgccggcgacggcaagggcgatggcgacggcggcaagggcgatggcggcagtggcaagggcgatggcggcagcggcaaggccagtggcaatgcgccactagtttaa

SEQ ID NO: 32971 - DNA, 297 bp, Zea mays
  Peptide Sequence Number=SeqID_74750
atgggaaaccaaaaattagctaagtccatgatgagacaatctaccagagaaaaatgcaaacccatgaagaagaaatcatacacctttaaagtggtaaattttaaaagcacatatcgtatcatgcatatatcttacgccttgcattcattagattgtaatcttgccgacggagagtacgtgctcatccccgagcaaggacctgtccaagaggaggaccaggagcaggctccagaggctgctattgaggatctccccgcagccccagcaattgaaggcaagccccggttttatgcataa

SEQ ID NO: 32972 - DNA, 297 bp, Zea mays
  Peptide Sequence Number=SeqID_74751
atgggcaaccaaaaattagctaagtccatgatgagacaatctaccagagaaaaatgcaaacccatgaagaagaaatcatacacctttaaagtggtaaattttaaaagcacatatcgtatcatgcatatatcttacgccttgcattcattagattgtaatcttgccgacggagagtacgtgctcatccccgagcaaggacctgtccaagaggaggaccaggagcaggctccagaggctgctattgaggatctccccgcaaccccagcaattgaaggcaagccccggttttatgcataa

SEQ ID NO: 32973 - DNA, 276 bp, Zea mays
  Peptide Sequence Number=SeqID_74752
atggagctgcgcattttgtcgagcacctacggcgcgtcgatttggtggggctgcggggaaaaggagataggggcgctgcttcttgctgctcaagggggacagggagctcggccatggctcccatggctgccgcggccaccaagaccagccatccaaactggaaggagccgagcgcctagggcaggggtccggccatgggcaactgcgagctcgctgccatgggggaagcttcagcgcgccgaggatgagcaggggcgccatgagcagggaaaatga

SEQ ID NO: 32974 - DNA, 348 bp, Zea mays
  Peptide Sequence Number=SeqID_74753
atgggcaactgcgagctcgctgccatgggggaagcttcagcgcgccaagaaagaagggacagagagcacacagggaggtggatgcgccatggggaggaggcgagccgagctactggcttcctgtgcactggccatggaggaaggagtagggatgcccgcgaccatggagcagggaaacagggagccgagggaaggggcgccaagcacagggggcagagggaggcgctcgacatctgctggacagccgacaccggagggaagctgggcggccatgggaggggaggaagctccctacgcgcagccgtgaggaagaatggaacagggaaaaaaataggaagtggcggctag

SEQ ID NO: 32975 - DNA, 456 bp, Zea mays
  Peptide Sequence Number=SeqID_74754
atgcaggtggcgtgcaactgcaccacggggacgcacgccttcgacttcgacgcatccagcatggaggcccaggcccacacgtcatgtaaccggcgcgccggttactacgtgcgaaaaactgcaccgccacttgcgccaataccgcgccttctcgactgcggaaccggtgccgcgactcgaggcaaccctgcgcatggcccaacagtgccaaccgagcacatcggtcatggggaccgggaaaggggatactccgaaagggatccttctccgcgaaggaagcgggccccgagccctcctactgatcaggggttcaaaggctggcccctcggaagggttcgacagccgccccagagcactcgggctttaggctcattactgatcagaggttcgaaggctggcccctcggaagggtttgacagccgcctcagagcattcgggctccgcgcccactactga

SEQ ID NO: 32976 - DNA, 1059 bp, Zea mays
  Peptide Sequence Number=SeqID_74755
atgctggatgcgtcgaagtcgaaggggtgcgtccccgtggtgcagttgcacgccgcctgcatggcggtccgccctttcgcccgctggtttcggcgaagatggagaggaggcgtcctccagccatgcgggggaaggcgaactgctgctgcccggccagggtgcagcattctatcttctgtctggttgcaccggagggtctcacaacacgtcgtacgccgcgagggcggtactcgtgttctgggacggtcccgttctagttttcgtggcgaggacgggagtgaggacctgccggtgcgctttggggcggccggcgctcgctggtgcggtgttggtgggcaggtggacgccatcgtcgatgctgaggtggtggcagccggagaaggtttctccgttgacgagatcgtcggcgtcacctgcgctccaggcctctggctctttggctttaatggctggttctcgtcccccgcgaggggacacaaacgagagccttccagtggtagcgttcgccctgggccatcgctgctgctgcagaggtcaccggcgagccacccggagtttgtcgtcccgcaggccctccgatgtgggggttgttcgtacccgcaggagtggaaccggagttccgtttgtaatggcaccttgagtgccggtgtgacgagtgaggtatccgtatcccgaaggcgtaggagtccctcggctcggtcggccttgccactcaaggcttctcttgctcagttaaggaaccctcgactgctctgcgatgagccagagccagaggcagcggtgtcagcatggatagaggcggagtcggctcgaaaaggggcttcgtcggcccaggagcaggtgacttcccaggccgaggaggcgcaacagcagcggctggagcctggccgggtcatccgtgagcgggaccaacttcggagtcccgcttccgagaccgtgagccaggctgatgtcctcgggggacatctggctgaggctacggagcggccagccgagccgtctgctcgggccgggtttctggaggagaccctggcggcgatggcccaggcgcggtgctga

SEQ ID NO: 32977 - DNA, 291 bp, Zea mays
  Peptide Sequence Number=SeqID_74756
atgcggaaaactggggagcagcttacggagtcgaggagggagagcgcctcgcgggtggcctggtgctcgcggccgccgtcgcaggtgatgaagaagcctgcacgccggggcgcagtcgctgctgttaggtctagggacgcacgcacgggtgacggcgcgccggtctgctcgctcgccggcctgctcgcccgcgccggtctgctcgcccgcgccggcctcggccctctcaagcaccgccgcctagtcgtccgtgcaggcctcgcgaccttaatcggcgctgcctgttgctag

SEQ ID NO: 32978 - DNA, 273 bp, Zea mays
  Peptide Sequence Number=SeqID_74757
atgtggaaaactggggagcagcttacggagtcgaggagggagagcgcctcgcgggtggcctggtgctcgcggccgccgtcgcaggtgatgaagaagcctgcacgccggggcgcagtcgctgttgttaggtctagggacgcacgcacgggtgacggcgcgccggtctgctcgcccgccggcctgctcgcccgcgccggcctcggccctctcaagcgctgccgcctggtcgcccgcgccggcctcgcgaccttaatcggcgccgcctgttgctag

SEQ ID NO: 32979 - DNA, 210 bp, Zea mays
  Peptide Sequence Number=SeqID_74758
atggaggccaagtcacaccagcaaccaaaacaaggaggtacctgcaaaaattatgccacaagcaaggctgagtatactaatactcagctagacttacccggcctcaccgccttggcatacaatgctccactgaccccgaccgccgccgtgcagtggccgcacttgtacccaccatatctagaatgggagacccagtctcaggtcgcatga

SEQ ID NO: 32980 - DNA, 279 bp, Zea mays
  Peptide Sequence Number=SeqID_74759
atggaggccaagtcacaccatcaaccaaaacaaggaggtacctgcaaaaattatgccacaagcaaggctgagtatactaatactcagctagacttacccgtgaccgcacttgtacccaccataaccagaatgggagaccacgtctcatatcgcgtgaggggtaaagtctgcgggcaggaaacgatcttcgtgatcaggccgatctcgcatcagcaagaaaatctgaaatttttacaggagcttgttggcaccattctgaggtcggcaaagagaccatag

SEQ ID NO: 32981 - DNA, 282 bp, Zea mays
  Peptide Sequence Number=SeqID_74760
atggaggccaagtcacaccatcacccaaaacaaggaggtacctgcaaaaattatgccacaagcaaggctgagtatactaatactcagctagacttacccggttacaatggatcaagcagtctcattagctgcgagaagcagacgattcgaatcgagtttttaaccttgcaaggcctcaccgccttggcgtacaatgctccactgaccccgaccaccgtcgtgcagtggccgcaattgtacccaccatatctagaatgggagacccaatatcaggtcgcgtga

SEQ ID NO: 32982 - DNA, 381 bp, Zea mays
  Peptide Sequence Number=SeqID_74761
atggaggccaagtcacaccatcaaccaaaacaaggaggtacctgcaaaaattgtgccacaagcaaggctgagtatactaatactcagctagacttacccggtgtgaggagtctactccctctacctctagaccatgcagctgtttggctgaggggtttgtacaatggatcaagcagtctcattagctacaagaagcagacgattcgaatcgagttttatccttgcaaggttggacagattcagacttgcgacttcaaaaatttacaactacaggttcagacatccaaacaaattgatcctagactttctggaaagatcaccaaaaagagtcatccaagactttttggaaagcttggcaaaaagcactacatacttttataa

SEQ ID NO: 32983 - DNA, 252 bp, Zea mays
  Peptide Sequence Number=SeqID_74762
atgcccgctggatgtttactgtgctgcgcagccccatccacgacgtcgtcgacccatgcccttgtcgtcatgcctcgtgcattccatgctcgacaaaagccccaagctgtggacaacatgcagacatgcgcgacacgagtcagccagtcgcgggtaaaaattagtagtgttcatgtgatgcccaagtcaaactgcaaattgctatgtgaagagtgcatcgataaacacatatatgtcggatatgtgctatag

SEQ ID NO: 32984 - DNA, 597 bp, Zea mays
  Peptide Sequence Number=SeqID_74763
atggcgctgctgcccccatggtctacctgctgcaagttttgcctcgtcccactcgtcgtcaggctcgaaccgggtgtgcgcagcccgtccgcgacagcgtcgaccccgcggcggccttgtacttgtgttgcttcccgagctgagaccttgcacgcaacagcaagtcctggatcccctctgcatcgcgtgcttcgctgggtctgcgcagcgctgcgcgtcgtcgtcgaaaccctcggtgagcccctcgctgttctcattattccacactctagcctctcggtgtcgcgcctcacgcaccccgcgtccaacgagacgcctaaaccatggacgcatgcgcaactccacttgggtttcagccagtctaaatgcgcatggttacagtcgcgggtaaaaattagtagtgttcatgtgatgcccaagttaaactgcaaattactatgtgaagagcgcatcgataaacacatatatgccggttcagcatataatcaattcttggtgattatagaagtatgtagtgcttttgccaagctttccaaaaagtcttggatcactctttttggtgatctgaagattaagttatggatgtttaaagtctga

SEQ ID NO: 32985 - DNA, 1698 bp, Zea mays
  Peptide Sequence Number=SeqID_74764
atggcgcactgcatacgcatggttgggaagggagcaggacgctggtcaagtgagactcgtcggccaggaggcaactccggcggctcgccggagcgtggccgacggcgcaggggccagggcgagccgccgcactggctgaccaccgcgccgcgccctgcacaagggccgcgtatcggagggagagagaggttgccgcggggagggaaagaggaaaaatgggctcacctgagcttcggtgaaggtgctcggcatggggtgccgcgacggggtgggctcggcggggcgagtgggtgcagggaccggagcgggcgacttttggcgacgtgggcgcagggactcgaacggttggagaagaagacgtgcccttggcggctggagtggaggacgtgcagcggctgcgctagggagaggagggaggcgaatcaggccatcgctgaagcgcaggctgcgagagcgggggccaaagtggcgtgggcggagagcagtctcgccagtcaacgcaccgaggagctggaggaaaggttcaacgccttgcacggccgcgtggacaaagccgaggcctcgacgcgctcggaagttgagcggacgcacgcacagttcgtggacgcgtaccgcgagctgggtgcgcgaactgctgacttcgaagtacccgaccgagaagcaggccttcgcttcctcgaaaggttgcaggaggagctgctggtgctcctgaccattgtggagggtttcatgtccttcgcctccctcgtcacctgtgagggggccatgaatgcattgtcccgcgagggctgcaggcactacgaggtcttcgaccaatcatatgagaactttgaacgtgaaatttacaaggtcgaagaccctatggtgaagcagtcagcgagggcactctttgataggatgtggggtccgcacggtcgggaggtggtcagggagcggtccgaccgggcgatagagcagatggtgcatgccgaggacgttgaggaccttggagctctggtcggcgcgccgcccgaggctgcggaggtcaacccggtgccgcccctggatgccggcgaaggctcctctgctgctcccgtgcccacggtggccggtgaagaccctgtgtcggcccctgcgccgatggccgaagatgctttgaaggtggtggctgagcaggcagccgaagtccccacggtcgcggccgggccttcgcagggttttgggcctgcgcacgcaaccgctactgacaatgctaattttgtggcggctttgaccgtggttgctgaaggcgattctgatgattctgtgtctaagttttttgagtctgatgattctgggagttcgattgtgtggatggaggggtcttcggaagaggacttggattattttgcggcagtggatgtggctgcgatggagactcctccgcttgtgatgggtgctaagaatcatccgggtgcgagtgctgggcgtcggcggcgaagagtggtggcgaaacggagagtgggtgagttgtcgcgtggtgaaaggcgtcatcatggtgagatggagggtggtcgtcttcgtgcggatgggactggcaaatgggaattgttgtccttgtcggctggggcgagtgtgggtgagggggagctgcgaagtctgtttgcgagtgaggaattgaggataatgttgttcaactatagggagatgggtatcatcccgaaggttgagccgatgtaa

SEQ ID NO: 32986 - DNA, 1293 bp, Zea mays
  Peptide Sequence Number=SeqID_74765
gagaggagggaggcgaatcaggccatcgctgaagcgcaggctgcgagagcgggggccaaagtggcgtgggcggagagcagtctcgccagtcaacgcaccgaggagctggaggaaaggttcaacgccttgcacggccgcgtggacaaagccgaggcctcgacgcgctcggaagttgagcggacgcacgcacagttcgtggacgcgtaccgcgagctgggtgcgcgaactgctgacttcgaagtacccgaccgagaagcaggccttcgcttcctcgaaaggttgcaggaggagctgctggtgctcctgaccattgtggagggtttcatgtccttcgcctccctcgtcacctgtgagggggccatgaatgcattgtcccgcgagggctgcaggcactacgaggtcttcgaccaatcatatgagaactttgaacgtgaaatttacaaggtcgaagaccctatggtgaagcagtcagcgagggcactctttgataggatgtggggtccgcacggtcgggaggtggtcagggagcggtccgaccgggcgatagagcagatggtgcatgccgaggacgttgaggaccttggagctctggtcggcgcgccgcccgaggctgcggaggtcaacccggtgccgcccctggatgccggcgaaggctcctctgctgctcccgtgcccacggtggccggtgaagaccctgtgtcggcccctgcgccgatggccgaagatgctttgaaggtggtggctgagcaggcagccgaagtccccacggtcgcggccgggccttcgcagggttttgggcctgcgcacgcaaccgctactgacaatgctaattttgtggcggctttgaccgtggttgctgaaggcgattctgatgattctgtgtctaagttttttgagtctgatgattctgggagttcgattgtgtggatggaggggtcttcggaagaggacttggattattttgcggcagtggatgtggctgcgatggagactcctccgcttgtgatgggtgctaagaatcatccgggtgcgagtgctgggcgtcggcggcgaagagtggtggcgaaacggagagtgggtgagttgtcgcgtggtgaaaggcgtcatcatggtgagatggagggtggtcgtcttcgtgcggatgggactggcaaatgggaattgttgtccttgtcggctggggcgagtgtgggtgagggggagctgcgaagtctgtttgcgagtgaggaattgaggataatgttgttcaactatagggagatgggtatcatcccgaaggttgagccgatgtaa

SEQ ID NO: 32987 - DNA, 1059 bp, Zea mays
  Peptide Sequence Number=SeqID_74766
atgcgcctcatcctgcggtacctgatcttgacctgtggggggtgtgagacagcaagagtgagctcacatacgttcattgctcaacaagttgtggggaataatgtgaatgaactcgccaaaggggttctggactgggcacaatatttcttaagatatcaggggctaaatcgcaatttctcccaagactcaggattcccaccgcactggacggcgggtttattctacagaacaccaagggtttatttgcaaagagcgcacggtgaaggggtacgggtaaaccccagccacccgatgaagaatcaagagtccagattagaccgtgaaccggtacgaactacgagtcctcggattttgatcctacggtcagtgttttatgggtacgtgacctatcccacatcgtccactgtcagatcgatggcttggatcaaagccacgaagggggacgctcctgatctaatcgtgaccgtccagcgaacaatcaacggttcacagcccaccacccatttccagacagccgcgcggcggcctgagcgacggcgtaagcaaggatgcggtggcgccattgccacaaccaccgacccaccacgctggacatacaccttcgaatcggatgaagctacgggcagcggagaggaaagcgaacccaacagagggacccttaccggaggattaacagcgcgattaccccgaccacgacgcgaggtggtgttgcggcggagagaaggttccggcgagaaatccccagagccccaatctgacctagacgtagtgcttggaatagataggggaacacgacaaacgcgaagacataggtcatacctcaaatctcgctggggaacgcactccctgcgacgcgcgatggccagacaatggcgagcttcgggtgcagccgattccggcactcgtgtccacagttctcaccagccgcaggcacgagaagttcccagagagcgccaccaagcgcccaggataatcgccgcccagcagctggccacgacgccgcagccacttcctcacttgttctctctcttcctgacggcattcggtttctttccttag

SEQ ID NO: 32988 - DNA, 1059 bp, Zea mays
  Peptide Sequence Number=SeqID_74767
atgcgcctcatcctgcggtacctgatcttgacctgtggggggtgtgagacagcaagagtgagctcacatacgttcattgctcaacaagttgtggggaataatgtgaatgaactcgccaaaggggttctggactgggcacaatatttcttaagatatcaggggctaaatcgcaatttctcccaagactcaggattcccaccgcactggacggcgggtttattctacagaacaccaagggtttatttgcaaagagcgcacggtgaaggggtacgggtaaaccccagccacccgatgaagaatcaagagtccagattagaccgtgaaccggtacgaactacgagtcctcggattttgatcctacggtcagtgttttatgggtacgtgacctatcccacatcgtccactgtcagatcgatggcttggatcaaagccacgaagggggacgctcctgatctaatcgtgaccgtccagcgaacaatcaacggttcacagcccaccacccatttccagacagccgcgcggcggcctgagcgacggcgtaagcaaggatgcggtggcgccattgccacaaccaccgagccaccacgctggacatacaccttcgaatcggatgaagctacgggcagtggagaggaaagcgaacccaacagagggacccttaccggaggattaacagcgcgattaccccgaccacgacgcgaggtggtgttgcggcggagagaaggttccagcgagaaatccccagagccccaatctgacctagacgtagtgcttggaatagataggggaactcgacaaacgcgaagacataggtcatacctcaaatctcgctggggaacgcactccctgcgacgcgcgatggccagacaatggcgagcttcgggtgcagccgattccggcactcgtgtccacagttctcaccagccgcaggcacgagaagttcccagagagcgccaccaagcgcccaggataatcgccgcccagcagctggccacgacgccgcagccacttcctcacttgttctctctcttcctgacggcattcggtttctttccttag

SEQ ID NO: 32989 - DNA, 294 bp, Zea mays
  Peptide Sequence Number=SeqID_74768
atggggaacacccgcgatccttccgccttgtcgttagaggaacgcaacttcacggaagttggtacctttcagccatcgttcggcttcaaggattttcatcaggcagcccggccgcatcccctcgccggtggtcacccaagacgaggccgggctgagccggagctctacctcccgcgcgggttcgtgggtcagcctctccctcagcattcaagggagagggcgctcaccggcctagcgggagggtcggactccgacaacgcggggccgatcgacggcgagggtcgtcagctttag

SEQ ID NO: 32990 - DNA, 708 bp, Zea mays
  Peptide Sequence Number=SeqID_74769
atggctctgtgccaaaaatacatacatgttcaggccccgacagccatagagaacagacaccggcactcaaggtgccattacaagcggaactccggttccacctccgcaggtacgaacaaccccccacgttggagggcctgcggagcaacagaacgccgacgagactccaggtggctcatcgccgcccgctccggcagcaacgacaacgacttccgccccgggcggccaaacagcagcagtgatgacctcagggcagacgctgctgcaacaaggccctcgcccgcgtccccgcccaaggggcgaggacatgcagaaggtcgtagagttggaggtcagcccgtgggtagcgccgactatctcgtcggcggagaaacctctttcggctgcctcggtgggaggtggcaccggaagcatcgccgaagccactcaggccggagagccggacacgcggcagctgccagcgccacgaacggcgaacgcccttccccccaatcactaagggaaggagcgggccgctgcccgcgcggagacaggcctcaactcggcgcactcccctccccagcactgatgatgaacatccttgaagatgagggagggggcagaggccgcagcccgtctcgcttctcccccaccatcgaactggtgatcaccgttctgggtgaccaccggcgaggggatgcggccgggctgtctgatgaaaatccttga

SEQ ID NO: 32991 - DNA, 420 bp, Zea mays
  Peptide Sequence Number=SeqID_74770
atgttcttgggagcgggacctggtgtgatgatggggatgggggcgatccagatgtgcacgcgcggattggtacaggaactcgcccgccacctgcgctgggacctatgcccgtgtatgctcgccagggtccccggcggaatcgccatgcgtcgtggccgaagctgtgggctttgcgattcacggtatgtttcccaccctcttgtttgcacggttacccgcttcgtgttgcgcattcctacgctcgtgtttaccaccggaatcggctcgggggtgctcatcggtggtcccccgctgctcggtggccaccgcggatgtgtgtgcgctaccgtcctggtcgccgtgaggaagaagctgtatgggccgtgcgttcttagatcaatggtcgcgtgtggttatgaggataccgattcaggcgtttga

SEQ ID NO: 32992 - DNA, 420 bp, Zea mays
  Peptide Sequence Number=SeqID_74771
atgttcttgggagcgggacctggcgtgatgatggggatgggggcgatccagatgtgcacgcgcggattggtacaggaactcgcccgccacctgcgctgggacctatgcccgtgtatgctcgccagggtccccggcggaatcgccatgcgtcgtggccgaagctgtgggctttgcgattcacggtatgtttcccaccctcttgtttgcacggttacccgcttcgtgttgcgcattcctacgctcgtgtttaccaccggaatcggctcgggggtgctcatcggtggtcccccgctgctcggtggccaccgcggatgtgtgtgcgctaccgtcctggtcgccgtgaggaagaagctgtatgggccgtgcgttcttagatcaatggtcgcgtgtggttatgaggataccgattcaggcgtttga

SEQ ID NO: 32993 - DNA, 747 bp, Zea mays
  Peptide Sequence Number=SeqID_74772
atggatatgcaactgcagaagagactgttgcccaatgaaattgcagtagggaacaacagcacagaagagactattgtccagttctccactccattgtccaatgtccactactccactgtccactccacggctccaataggccaataccggttcatctctacagctttagttgggccatacattatcgctgatgagtggggccgccaggtcggactcatcccgttcatggagtcgttgcagagcacggggaaacctgacgacaaccgcgcgatttccgctatcctcaaccactacaaccgtggcgatttcctctattctcgagcatataagatggccctcgtgcccctatttattccctggttatccaggtccatacccacaccgagaagcacccaccacaggccgccgcggagaaaatctggacgccgtcgtggtcgcgtgcctacgccgtcaatagggattcatcgacggggtcgggagcttcaccgcacttacaggattgtgctcggggactatgcgagcgtggagccgcactggtgctcgatgtcagaggttaataccagctacctcgttctacaagctatggtcatgtggggaaatggttggcgaatggaatttgttagggatgcaaagattcttcgaaggaactttgtgattgatctattaagttacaagaacaattcatgccgttataccatccctgcaaacatacaacagagacttatcaatatctctacaaaggaatag

SEQ ID NO: 32994 - DNA, 321 bp, Zea mays
  Peptide Sequence Number=SeqID_74773
atgggggatacgggatatggcgacatcgtccccctcgacccctcctccatccccgacgcgacggcgccagcctgcaggtacggttcccttcccactccccaggatccatgtctccagttctccactccattgttcaatgtccactactccactgtccactccacggctccaataggccaatactggttcatctctacagatttagagttttggactgatgtgttgaatgctgatttgttgtggcctgttacgtcttcaccagttcatatattaaacttgaagaaccacgtggttgaagaaaagcctactgaaaatgagtaa

SEQ ID NO: 32995 - DNA, 234 bp, Zea mays
  Peptide Sequence Number=SeqID_74774
atggcgtgtcctgctcgcgtcgtgacggccccggcgcggcctcgagctcggcccagcgtgcctatggcgcgcggccccgacgtgtgcacggctagttcgcggcgcgtgacaatgagactgatggttcttggttttgactctggtaatggttgtccgcattgcagccactgctcaggagaggacgaagccgtggaaggagacttccaggagttccaggactacggcgagttctag

SEQ ID NO: 32996 - DNA, 246 bp, Zea mays
  Peptide Sequence Number=SeqID_74775
atgggggagacggcgagcaccgacgagctcgccatgggtacgggaatggcgctaacgccgattgggacggctcgggcaggccggggggggctcgagcggtttctcgagtgcctctccgtgacaatgagactgatggttcttggttttgactctggtaatggttgtccgcattgcagccactgctcaggagaggacgaagccgtggaaggagacttccaggagttccaggactacgatgagttctag

SEQ ID NO: 32997 - DNA, 246 bp, Zea mays
  Peptide Sequence Number=SeqID_74776
atgggggagacggcgagcaccgacgagctcgccatgggtacgggaatggcgctaacgccgattgggacggctcgggcaggccggggggggctcgagcggtttctcgagtgcctctccgtgacaatgagactgatggttcttggttttgactctggtaatggttgtccgcattgcaaccactgctcaggagaagacgaagccgtggaaggagacttccaggagttccaagactacgacgagttctag

SEQ ID NO: 32998 - DNA, 252 bp, Zea mays
  Peptide Sequence Number=SeqID_74777
atggcggcccctgccccggcgtggtggccagccgtggcctcgccggccatggcgcccgcgcgacagaacgatttggtcgaggaacccgaagaactcgcaggagaagcccctgagcagcagtcggtgacaatgagactgatggttcttggttttgactctggtaatggttgtccgcattgcagccactgctcaggagaggacgaagccgtggaaggagacttccaggagttccaggactacggcgagttctag

SEQ ID NO: 32999 - DNA, 411 bp, Zea mays
  Peptide Sequence Number=SeqID_74778
atgaggagagctcagccaagaaggagctcggctggcgaggcgagggaggatgtcggcgagggatgctcgctgcacgcgaccagcgaggacaggcagcgagtttggatgatgagatttccggtcaagtggaagacgccaactgtttcaaggcaccgcgggggctcctgcgccgaacagagagcagggaggaggggtgctcgcggtagagagaagagggacaagggatgtcggcatggagcaggggccagcgccgtggctgccagcggccaagagcagagagaaaaaggaaaaagaaaatggagcagggaggggcgccgatctagaggagggcgccgacatgggctcatccctggagacgagggcaaccagggaacatctatgcgcccaccatggctggggaaaggagcttag

SEQ ID NO: 33000 - DNA, 297 bp, Zea mays
  Peptide Sequence Number=SeqID_74779
atggcgcagggcccttccctggttcgagctcgagctggtgagccgccgtcgcccatggccaacgccctgctcagcgagcatcccttgccgacgtcctccctcgcctcgccagccgagctccttcttggccgagctctcctcatgcccgtcgcgcctattcccatccagatctcgtgccctttctccagtgcagtagcgcagctgcgaggttcgcctcgtcgcactcgtcgtcgaactccaatcgggtgtacgcagcccccaaccgcgctgtcgaaactcgtggttaaagtgggttaa

SEQ ID NO: 33001 - DNA, 951 bp, Zea mays
  Peptide Sequence Number=SeqID_74780
atgaaggctttgatgaaagtccttgtcgactgtaccgaggatgccacaaaatccctggggggtttagttgatcatgcattagaccacatgcatgatgaagaaatcctagctaggacattgtttgccatcaaagataaactagagttgcttcagcaggatgccttagaggcaaaagtccaagcctttccagaagtagctaagtacgagtgggatgacatcagtgttgatcccccttctccgtcaccccctccaacagttactgatccttctgttgacgaagaggagttctactgccccgacgtcagtgacgaatggaatcctcttgggccacctgaagttaacccatttcctgattgcattccaccatccaataccagtacaccattgcagggttccaatactataccttccatacctgtgaatttggactcagatgcagaaaacagtgttcaagacatcaatagtcctgaaaagaatgcacctcctatacataaacccaaaaagtctaaggaacaaaactttactggcccagaagatcttctactttgcacaacctggttgcaaattagcagtgaccctgttatgcacactggccaacgtactccgaatgctcccacaactgaaaatgatagtgcatctgcagggttgacagagtaccttagccgtttgcaagaaataactgaaaaacaaattcagaggtccatagaaaagggtcaaaagaaagagaagtgctcagaagaagatagggaaatggagaaaaagaggttagaattggaagcagaaaaggtcatcatacggaaaagggaattgaaacttcaagaactagattgtgctgaaaaaagattacaaaggctggaggcaacgaatgaagaagatgtcgaaccccaagtttggattatgatgcaaaatcaaaaaaagaagttgcaagaattcatatttggttacgagtga

SEQ ID NO: 33002 - DNA, 465 bp, Zea mays
  Peptide Sequence Number=SeqID_74781
atgagcacgcagtgccgttcgcgaccgaagacgaagaggggtcacatccgcttccgccgagcccatttgttaatggcatcctcccaagaagataagatgaaggctttgatgaaagtccttgtcgactgtaccgaggatgccacaaaatccctggggggtttagttgatcatgcattagaccacatgcatgatgaagaaatcctagctaggacattgtttgctatcaaagataaactagagttgcttcagcaggatgccttagaggcaaaagtccaagcctttccagaagtagctaagtacgagtgggatgacatcagtgttgatcctccctctccatcaccccctccaacagttactgatccttctgttgacgaagaggagttctactgccccgacgtcagtgacgaatggtatttcagtgattcagataggtctacccgtaatagctactggaatatgttttag

SEQ ID NO: 33003 - DNA, 411 bp, Zea mays
  Peptide Sequence Number=SeqID_74782
atgggggtccggacccactgttgttaccttggagcatatcgtcttctctggccacgtggtagccccggaaccgtccacgtggcggggttggatgctgtttaccacgcgactagagatagccgcgcggacaccgcgtcttcatactgtagaaaacatcatggcgaggcaacaatagaagcagttaggttgattgcagatcatgtgaagctcaatgattgccagcttcatcctaatagcattaaggtcttcctgtctttgagatttgatggagatattggaaaagatgaggttgaggagaaaaaggttgatgcagatcttagagcagtttccttcactcttgatccgaaggagagaaaagggataaaaaagaaacagtttctgctctgtttgagacttactttcgcattctga

SEQ ID NO: 33004 - DNA, 471 bp, Zea mays
  Peptide Sequence Number=SeqID_74783
atggcggcaacatcggcaggtgtcgaggccgacgacgttggtcatttgtggcctcgaggacgcgcggcccagaggccttacatcaggcttcgcccgctggcttacatcacgggcagtgggtcacgtgacagcatcgggtctctgcctgagcggggagcagaagtgtgcacggtacggtccggacgcgtgtcggctctggacccccgcctggccctgactaaggtccgggtactctttgtcccagaatcccggaaccctactgaaagtggcccggaccccacacagagaagtccaggacccgtcctgggggtccggtctgtacccgcggaggtcctagaccccgccccgaggtccgatccgtatatacaggggtccggcaccttcccatgggggtccggacccactgctgatgccttggagcatatcgtcttctctggccacgtggtgatccgagagtcgtccacgtggtag

SEQ ID NO: 33005 - DNA, 588 bp, Zea mays
  Peptide Sequence Number=SeqID_74784
atgtgggtcccacttgccagcccaaatctcttctgtcgcttccttgtggggtcggatgaccagtcgtctcccttccgcaacagctcgatcttcctcctccggtcagactcgggcatcgctatccggtttcctctgcccgtgattctcgccgccgaccttcgcgcgcgcgccatcctcacagccgtgcgggacttggtcagcttcatctccccgtccctatttcctctccgcttcgtgcgctgtttgttgaacgcagcggactccgcagaaatcgcgcgcgcgcaacaggaatccgggcttcacggcgggatcaagtcttcggagtccgactccaagctgtcgcgtggtgctctgcggtgcgatctgaatggtcggccaagcgctgtgaacaaatcgaacggagggctggggtgttggctgggcgcggccaccttcgactatgcgatgatggctctccagtgcgggcgtaacaccatggggtcgctgggtacctacgcttgggaccttcgcttcacgattggagagtcaggggaacgacgatggcgccgccgtgttgacagccaggggaggaagaagatggtcctgtag

SEQ ID NO: 33006 - DNA, 523 bp, Zea mays
  Peptide Sequence Number=SeqID_74785
atgtgggtcccacttgccagcccaaatctcttctgtcgcttccttgtggggtcggatgaccagtcgtctcccttccgcaacagctcgatcttcctcctccggtcagactcgggcatcgctatccggtttcctctgcccgtgattctcgccgccgaccttcgcgcgcgcgccatcctcacagccgtgcgggacttggtcagcttcatctccccgtccctatttcctctccgcttcgtgcgctgtttgttgaacgcagcggactccgcagaaatcgcgcgcgcgcaacaggaatccgggcttcacggcgggatcaagtcttcggagtccgactccaagctgtcgcgtggtgctctgcggtgcgatctgaatggtcggccaagcgctgtgaacaaatcgaacggagggctggggtgttggctgggcgcggccaccttcgactatgcgatgatggctctccagtgcgggcgtaacaccatggggtcgctgggtacctacgcttgggaccttcgcttcacgattggag

SEQ ID NO: 33007 - DNA, 1542 bp, Zea mays
  Peptide Sequence Number=SeqID_74786
atgtccgccgccgcgtcctctgccaccgcctgcttcctctccccgctcccgccgcctcgccgcccgcgtcatttcctcaggcacctcgcgcgcgccgcggtcaccaagcccgagcccgcctccgcctcctcgctcgccctcccctcgccgtggctttgggcccggcggctctgcgagctggtccccgccgaagccgggggccggcttctgtcgtcggccgcgggctccctcatcgtcgcgctcgcctcagcgtcgcttgtcctaggtgacaccggcgccgcctccgcgttcgtcgtctccacgccgcggaagctgcaggcggacgagctcgccaccgtgcgcctcttccaggagaacacgccatccgtagtctacatcaccaacctcgccgtcaggtgggcctccgcgtccccgttccttgctgcccctcccgctcagtcaccgggtctcttcgtcgtgtgtctgaactcgggagccctcagctcctccggattgcaatcagaggctggaggtggacctctaatctcttccgcgtgctacgtgtgcaggcaggacgcgttcacgctcgacgtgctcgaggtgcctcagggatccgggtccgggtttgtctgggataagagcggccatatcgtcaccaatttccatgtcatccgtggcgcgtcagacctgagggtgacacttgctgatcagtcagtgtatgaagcgcaagttgttggatttgaccaggacaaggatgttgctgttttgggtatcaaagcaccaaagaataaactaagacctatacctgttggtgtgtcagcagacctactggttggtcagaaagtgtatgccattggaaacccatttggccttgaccacactcttacaacaggtgttatcaggtggaacatttttttgtcaagctggttcatgtttgtctcattcatgttgcaatgcactgagagtctctgttttgttgtttcttctgatgcccctagtggcttgcgtcgagaaatcagttcagccgccacaggacgtcctatacaagatgtgatacagaccgacgctgctatcaaccctggtaacagcggtggtccactccttgatagttctggaaacttgataggtgtaaacactgctatatactcgccctcaggagcatcatctggtgttgggttttccattccagttgacacagtcgggggcattgtggaccaactcataaaatttggcagggtgacaagacctattctgggaataaaatttgccccagatcaatccgtagagcagcttgggttgagtggagtgcttgtcttggatgctcctccaaacggaccagctggcaaagcgggtctgcaagcaaccaaacgagatccctatggccggcttatcctgggcgatataattacctctgtgaatggtacaaaggtgacaaacggaagcgacttgtataggatactggaccagtgcaaagttggagacacggtgaccgtggaggtcttgcgtggcgaccacaaagagaagatccctgtggtcctggaaccgaaggctgacgaatcctag

SEQ ID NO: 33008 - DNA, 882 bp, Zea mays
  Peptide Sequence Number=SeqID_74787
atgtgttgttgggtgacacttgctgatcagtcagtgtatgaagcgcaagttgttggatttgaccaggacaaggatgttgctgttttgggtatcaaagcaccaaagaataaactaagacctatacctgttggtgtgtcagcagacctactggttggtcagaaagtgtatgccattggaaacccatttggccttgaccacactcttacaacaggtgttatcaggtggaacatttttttgtcaagctggttcatgtttgtctcattcatgttgcaatgcactgagagtctctgttttgttgtttcttctgatgcccctagtggcttgcgtcgagaaatcagttcagccgccacaggacgtcctatacaagatgtgatacagaccgacgctgctatcaaccctggtaacagcggtggtccactccttgatagttctggaaacttgataggtgtaaacactgctatatactcgccctcaggagcatcatctggtgttgggttttccattccagttgacacagtcgggggcattgtggaccaactcataaaatttggcagggtgacaagacctattctgggaataaaatttgccccagatcaatccgtagagcagcttgggttgagtggagtgcttgtcttggatgctcctccaaacggaccagctggcaaagcgggtctgcaagcaaccaaacgagatccctatggccggcttatcctgggcgatataattacctctgtgaatggtacaaaggtgacaaacggaagcgacttgtataggatactggaccagtgcaaagttggagacacggtgaccgtggaggtcttgcgtggcgaccacaaagagaagatccctgtggtcctggaaccgaaggctgacgaatcctag

SEQ ID NO: 33009 - DNA, 654 bp, Zea mays
  Peptide Sequence Number=SeqID_74788
atggagcatgtggtcccagagtggtcacatggcatggcatatgacgacactagacacacatacatggctaagaggggagatttccttttatcattaattgctgaactacggactgtgtctactaatattcaaaagctcagggtcagttttgcaatattcaagactgatcgattttcgtatcaactcgaggtcaaggtcttcggttccaagatcaactgggattctaggacttcggttccaacctccactgaagctaagagtatctcaatggatatggattcagcagactccatagccgacaaggcaatcggaaggatgcaagagattgcggacaagattttttccatagctcgtcaaacaatccgtccaggacgcgggttgacctcatttgaggctaccaaattacgtgtagcattggaggacattgcttgcatgcttgagcaagactctctggtgttgcaagagaatttggacaacgtgaacaacgtaaacaaccctgctgacagcagctatgaaccgtcagccttgtcctcaccacccccatctaacgagttccttagtccggattgggactttgctgagcactttgcaaacttctggggtcttgaatatgacttcgaccagatgccatcgtttagtgacaatgaagtttaa

SEQ ID NO: 33010 - DNA, 558 bp, Zea mays
  Peptide Sequence Number=SeqID_74789
atgagtgaggacaaagtgcgcacaaaagactcgcgttggtatgtggtgacaatatatgatcctagagagctgccaggagtaagtaccgccgatccagggattggatggggtgttacaagtggtatcagagctgaccctcgaggtttcacgggtgtgtgtgggctagggggttcgggtaaatggtgcatggcgcaagtgggcccagagtggtcgcatggcatggcatatgacgccactagacacacagacatggctaagaggggagggcattgggagctggttgttgctgagctgccttttttgggcaatgatgctcctagtggacttgttccccacagtggaaacatacgtagcctcctccttgcattggagctgattggttgttctggttggttgctggggcaggaaggcaaggtgcctggttgttctggtgctggtacggatttcctccttgttggttgttctgacgatactgttgctgctgatgctgagggaactatctctgttgctgttgctgctagtgctgatgatgatgctggtgctggtgaccttgcttaa

SEQ ID NO: 33011 - DNA, 333 bp, Zea mays
  Peptide Sequence Number=SeqID_74790
atggcgcgcccgccccggcgtgctctcccgcccgcccagatcgtgtcctgctcgcgtcgtgatggcctcggcgcggccttgagctcggcccagcgtgcttatgagaacgatccggttgaagagcccgaagaactcgcaggagaagcccctgagcagcagtcggttgtccgcattgcaaccactgctcaggagaagatgaagtcgtggaaggagacttctaggagttccaagactacgatgagttctaggcgtgggttagcggcaacccccagtcggctgcctgtgaaggccgcgtttatctacgtttcattttcgcactttgattatttgtaa

SEQ ID NO: 33012 - DNA, 399 bp, Zea mays
  Peptide Sequence Number=SeqID_74791
atggcggcccgccgtgagaacgatccggttgaagagcccgaagaactcgcaggagaagcccctgagcagcagtcggtggcaatgagactgatggttcttggttttgactctggtaatgctagtccactacaaccagacaggacacttgctgagtatgttgatgtgtactcacccttgctctacacaccaaaccccccccaggttgcccgcattgcagccactgctcaggagaagatgaagccgtggaaggagacttccaggagttccaagactacgacgagttctagacgtgggttagcggcaacccctagtcggctgcctgtgaaggccgcgtttatctacgtttcgttttcgcactttgattattataaagactatgtggatgtctcagacatatga

SEQ ID NO: 33013 - DNA, 348 bp, Zea mays
  Peptide Sequence Number=SeqID_74792
atggcggccaggaaactcacggccgcgagcttcacggcgaagcggctgcgcagccggatttcacggcagaatggagaaacagaacacacagcgactggtagtgggtcccgcacgctagagagacgctcacggagcggcccgagcagctatcctacacggctgacagcagctctggaccgcgtccaagcggcggcttcatgggagcttgtcgtacacagcggcgtatgcgaccacgtaggactgcttctagaggtcgaactggcagtcgccaagcttcttctcgtcatcgatgagcgacgtcaacgcgagtgcctccttctcatggtgtttgttcggagtttcaaataa

SEQ ID NO: 33014 - DNA, 382 bp, Zea mays
  Peptide Sequence Number=SeqID_74793
atggccgccagcagagccccgcggcagcggcagtgggacggctatgaaccagagaggagcggtgctgggttacggcggaggacagtccccacacacccgacccgcgcgcgggtggtcatggcgtctggcgatgcggggaaatctgagcatatgcgagcgaggacgagaagagaggaggaaggaaaggtgcgcggctcatttgtacccagcccgggatggcggccaggtcaactcacggccgcgagcttcacggcgaagcggctgcgcagccggatttcacggcagaatggagaaacagaacacacagcgactggtagtgggtcccgcacgctagagagacgctcacggagcggcccgagcagctatcctacacggctgacag

SEQ ID NO: 33015 - DNA, 390 bp, Zea mays
  Peptide Sequence Number=SeqID_74794
atggccgccagcagagccctgcggcagcagcagtgggacgactatgaaccagagaggagcggtgctggtttacggcggagaacagtccccacacacccgacccgcgcgcgggtggtcatgacgtctggcgatgcggggaaatctgagcatatgcgagcgaggacgagaagagaggaggtcgcgaggtcccggctagataacaaggcgaagtttaaatacctgttggggaccttcggcgtccgaaggtcctcaaaaacaggacttaacagtatttctgtagtacaatgtgtgaacaggtaccctcggactaaagtcggcattgcagtagaccggaataatacgaagcttgatacagagccgaaggtgctgagcaggaaagcttcggagtaa

SEQ ID NO: 33016 - DNA, 531 bp, Zea mays
  Peptide Sequence Number=SeqID_74795
atggccgccagcagagccccgcggcagcggcagtgggacggctatgaaccagagaggagcggtgctgggttacggcggaggacagtccccacacacccgacccgcgcgcgggtggtcatggcgtctggcgatgcggggaaatctgagcatatgcgagcgaggacgagaagagaggaggaaggaaaggtgcgcggctcatttgtacccagcccgggatggcggccaggtcaactcacggccacgagcttcacggcgaagcggctgcgcagccggatttcacggcagaatggagaaacagaacgcacagcgactggtagtgggtcccgcacgctagagagacgctcacggagcggcccgagcagctatcctacacggctgacaggtgggttctccatggcagtgcccccgcgcggtaaagagcaggcgcggtgcagcagcaacaggcaagtgggccctgcccggcagtcaccacgagtagagcacagacatgggccgaccagtagagaagatagagtgggccgaattgagtag

SEQ ID NO: 33017 - DNA, 2427 bp, Zea mays
  Peptide Sequence Number=SeqID_74796
atggtggcagaggaagacgaagacgaaggggcccttcgacatgctgcccgcctgagtagcgagagtgacttggttgaggaatttattgcctatggagtgtggcccttggcgcacggctgggtattgggcgaagtgaccccccatcggataccaaccctgggcgaccagctagtacgaagtccagccttcgtggtggatttacgcggccgcgacgcggccgcgtttgtgcgtgaagtggaggccgaggccacgaagattgtaggaaaatatgtgccgaagacggaaactctgaggagttgggatatccgcggttcaaatgttaggttgaaccgtgtttttgagttgaaccgtctgtcgtatgccggctacccgggggacgactataccgatgttgctgtccgccggggggaaaaggcgatgacaacggccgacgagggcccttcacggggaacagcgccgggcgcgaccgccaagaagaggaaattaggtacaacagctgaggggtcgagagcttccgatcgttttgcctcggatttgctagagacctgcatggttcccggggagacaatgtcttcgctcgagctccgggaaccttccgcgcgaatgctgaaggttatcgggggtcgttggcctaggaatgttctgattccccgggcggccggcgaggacatatttacatcgcgattagctcgtgagatgaaaattttcccttacggacggaatgttggtgttgttgtatcggcagtgatggagaaggatcaccaaaacgcgccacggaaacgtcgggcgttcgccaggttgggggacctgaggcgcgaggcgaagatggcgcgggcgagcatgaagcctgccgcccccgacgccagcatgcctccacctgtcgcgcccacacatgggcgaaggcctccctcgccaccgcgcgctggtgaggcagcggtggcgggcgccgaagactccatggatattttcgtggatgactaccttgtgggcggggtcgccatgttcgacgcccacacaggactggatcctactggagcggagtccgggcaactagatgttgtcccggcggcggtggcggctagtccggtggccgtggcaactgtggtcctcacaggacccgtggtccaagttctacgctgcgaaattgcctctaccgccgctgcgaaggacgtggccgcctcagttgcacagcagctgaaacatgcggctgccttagccgagcgcattgcatcgggggcgctgacctcagagttttctgccgaaaggcggcgacttgaggggaggattgagcgcctccgaacgcaacatacagaggctattcgagacaagtcggcggcggaaaacatgagtcgtaatctgcttgaaaagctgacggtggtggaggctgagaaggaggacctcagtcgttggcttgcggcggaaagggaggacgcgaaaaaggcccgtgccgaggcccaagctacctctgccgaggccagtcttgccctcaagcgcgccaccgatgcggagtcggggcagagaagtctgcgcggctacgtggacaggacggaggcctccacccgcgctgaggtcgaccgagtgcacgtgttgctcgtggacgcataccgtcagcttggaggagttggatttgctcccgtccatcgtgaccggtctcatgtccatcgtgaggagactgcgaatgccttgtcccgtgagggatgtaggcatttcgaagtctttgatcgggtaaccgaggacttcgaccgcagaatcttccaggtcggagacgaggtgctaaaatggtccgctggagcgctttacgataggatgtggggccatcacggtcgcgacactgtccaggagagggtcgaccgagcgctagagcagatgatgaacgaggaagaagtcgaggactttggtggcctggaaagctcggtgacccgggcagaagatgcgaggacatgggctgaagagcaaccggcaccacaagccgaccctctcggagaccctgcagcggcggctatgccggctggcaaagaccctgcagcggtggctgctccttcgcaggttctgatgtccgggcctgcgcaagcaacccctactgatgttgatattaattttgtggcggctgcgaatgcggtgcctgttaatggaaattcgtctcgttctgaagctgagtcttggtcatcagacgggggtgattttgggagcccgtttttgtggattgaggagtcttctgatgaagatttagattattttgctgcattggatgtggtcgcgacagagtccttggcgcggcctgaagtgcgtgaagggtctgctcccccgtctggggcgatagccgaagagcaccgtggtgaaaggtggtgtcgaagcacaatgttggtgagatgtcacgaagtgagaggcgtcgacggatggggatggaacgaccccgtcttcgactag

SEQ ID NO: 33018 - DNA, 855 bp, Zea mays
  Peptide Sequence Number=SeqID_74797
atggcggtgtcgaagcacaatgttggtgagatgtcacgaagtgagaggcgtcgacggatggggatggaacgaccccgtcttcgactagaccggggcggtcagcgagatttgctatcctcgacgtacgggacatgtattggggagggggatctgcggaatctttttgagggcaaggagttgaagatgatgttgtttaacttccgagaggcagaccttattccaaaggctgagccgatgttgtcccgacttgtaatcgtgctggcgtggcgcgtaaatgggatggggacctcgctttccacggcgatgttggacgcttatgacgcgtacctggctgcacccttatgtggtttttgttcgaccgtgtcagatagtagagactttgcacctttaaggagaaatcgagtcagagaaaagttggctgtgtacagccaaaaggctgttcggtctggagcaccggactgtccggtgttgcaccggactgtccggtggtgcaccggacagtgtccggtgcgccagactgactcgggcgaactggccgctctcgggaatttaccggcgacgtacggctataattcaccggactgtccggtgagccaacggtcggccgggccaacggtcggccgcacgatctgcgcgggccacgtggccgagccaacggctagaaggaggcaccggactgtccggtgcgccaacggctccaagtctgccaacggtcggcttcgccatttaaggaaagaaatcgggcaccggacagtgtccggtgtgcaccggactgtccggtgcgccagtcaacagaaggcaagatcagccttcctggattgctctcaacggctcctagctgtcttggggctataa

SEQ ID NO: 33019 - DNA, 732 bp, Zea mays
  Peptide Sequence Number=SeqID_74798
atggagtcttggtgcttagagatgatcaaaggatgcttgggtgcagctgtccgtcctccacccgggcgacggtcgtgccgcgcgcgggccggctacgtccaggtcctccctgcgccgtcggctgcacaacacgtcgtacgccgcgagggcggtactcatgttctgggacggtcccgttctcgttctcgtggcaagaacgggagtgaggacctgccggtgcgctttggggcggccaccgcttgctggtgcagtgttggtgggcaggtggctactgtcgttggtgctgaggtggtggtcgccataggtgaggctgcctctgccgaagcggttgcccccgctgacgagaccgtcggcgccacctgcggtcggacctctggctctttggctttgatggcttgtcctcgcccctcgtgtggggacccgcccgacgcggaggtcgttgtcgctgctggtgcagtggtcgccggcgagccacctcgagtttgttgtcccgcaggccctctggaccttcggccgctctgcgatgagctagagccagaggcagcagtgtcagcgtggacagaggcggagtcggctcgaaaagaggcttcgtcggcccaggagcaggtggcttcccaggctgaggaggtgcagcagcggcggctggagcttggccaggtcatccgcgagcaggaccaagctcggagtcacgctgccgaggccgtgagccgggctaaggtccccgggggatag

SEQ ID NO: 33020 - DNA, 525 bp, Zea mays
  Peptide Sequence Number=SeqID_74799
atgaccaccagttcggtggtggggagaagcaagccgggctgcggcctctgccccgccgttagcttcaaggatgttcatcatccgggctggggaggggggcgcaccgagttgggccctgcctccgcgtgggctggcgacccgcttcttcctccggcattcaggggagaagggcatactccagctctacgaaggaggcgtcctccagccatgtgggggaaggcgaactgctgcttcctggacagggtgcaactgtccgtcctccacccgggcgacggtcgtgtcgcgcgtgggccggctatgtccaggtcctccctgcgccgtcggctgcacaacacgtcgtacaccgcgagggcgttatacaaccttcggccgctctgcgatgagctggagccggaggcagcagcgtcggcgtggacagaggcggagtcggctcgaaaagaggcttcgtcggcccgggagcacgtggcttccctggccgaggaggtgcagcggcggcggctggagcttggccaggtcatccgctag

SEQ ID NO: 33021 - DNA, 204 bp, Zea mays
  Peptide Sequence Number=SeqID_74800
atggaaatacttaaattgagacttgggttaggaacaggtgatgttctacccagattgaaacatacccttgagagtcttttccttagtcgggtgaggaagcgacaaatttttgttgcttttgctccaaggtggtatcaaatgaagaaaaacaagagtgaagatgcgggaggacgtggtcctccatataggatctttttgttttaa

SEQ ID NO: 33022 - DNA, 201 bp, Zea mays
  Peptide Sequence Number=SeqID_74801
atggaaatacttaaattgagacttgggttaggaacaggtgatgttctacccagattgaaacatacccttgagagtcttttccttagtcgggtgaggaagcgacaaatttttgttgcttttgctccaaggtggtaccaaatgaagaaaaacaagactgaagtgcgggaggacttggtcctccacataggatcttttacttaa

SEQ ID NO: 33023 - DNA, 201 bp, Zea mays
  Peptide Sequence Number=SeqID_74802
atggaaatacttaaattgagacttgggttaggaacaggtgatgttctacccagattgaaacatacccttgagagtcttttccttagtcgggtgaggaagcgacaaatttttgttgcttttgctccaaggtggtaccaaatgaagaaaaacaagactgaagtgcgggaggacttggtcctccacataggatcttttgcttaa

SEQ ID NO: 33024 - DNA, 267 bp, Zea mays
  Peptide Sequence Number=SeqID_74803
atggcggttctcagccccctacggaagcaaggagacgtcagcaaggtcccggcagccccgacagctgtgcttctacagggctcaaacgctcctccgacggccacgacaccgcgcacacagggctctagcacctctccgacagccacgttggcatgtacacagggctctggcatctctctgccggacacgttagcgcatagctacacccccactgtacacctggatcctctccttgcatctataaaaggaagcttgttggaaatctaa

SEQ ID NO: 33025 - DNA, 2583 bp, Zea mays
  Peptide Sequence Number=SeqID_74804
atggattgtggtatctacacgtttcatgcacatggcatgatgtaccacaacgtaaggtcgttcggtcgggaagctggggcggaacataaacaccttgaactctacttctacgatgatgatcccagcctcgagcatagatatcgtaaatgtcgtcaacaacaatttgagaaagacaaggcagttattaaacatttggttgaaatacttaagggaaatccatactctaagcaccttaggagtatggggcacgttgataacattgaagactaccacatcgccttgaaccttgaccaaacgctgaaccagaagttatataattcacccattacttcggagaacgacctagccatctatgcgtgcctgtacgtgactattactgctacagattccaaatttgtccaaaagcgagttttgcctcatgtccatttcctactcatcatgcagagaaagtacaagctaacttgtcccgatcagtatgatcaccttatctctgctgagatccctgacaagaagaagtaccctgaactatacaagatggttatcaagcatatgatgcatggaccgtgcgggttgctaaatcctaaatgcccatgcactaagggtcgtgcttcatgcaaaaaccattatcctagagcttttagcaatgcaacgtctcaaggaaaggattcatatcctatttataggcgtcgtgatgatgggcgtaaggaaacagttcgaggttgtgaattggacaacagatgggtcgtcccttacaacccttacctcctccggctcttcaactgtcacatcaatgttgaggcgtgcgggagcatcaaggctgtcaaatacttgttcaaatacatatacaaaggccacgatcgtgcgtctgtggctgtgacagacgcaaacaaggctgatggtgacattgatgagatcaagcagtatagagatgctaggtgggtgacccctctagaagccctttggaggatattcagctttgatctaagtcaaaactctccaccagtgatgcaactgcagctccatcttgaaaacatgcatatggtgtcatttcacgagcgtgctaaagtaaatcatgttgtccaacgtccaggtgccgataggtcaatgcttacggcatattttcaggcaaataggctacacgaggaggctcggggcatcctttaccgtgattttcctgagtggtacactttgcagcagggcaaggcagcacaaaggaggggactgcttgaagcagacgacacaatagatgagtgtctcaacgaagccgctatttaccaaatgatgtcagctctacgaaggttgtttgcaacaatactggtatactacgagccgaacgatgtggcagaattatggcagagacaccttgactcaatgtcagaggactatcaccgtagtactcaaagcaaaatccatgtgcagcagatggtcttgattgacattagaaacattttgcagtcaatgggtaaagacataaagacattccctctccctgctatcattgatagatatgacgattcacatggtactgatagagagatttacgaggaggaaagtatcgagccgacgacagaagatgttgctatgaaagaaaccctaaacgaggagcagaggtctgcttatgataagatcctatctgtcgttgacaccaataacggtggagtgttctttgtggatgggcctggtgggactggaaagacctatctgtataaggcattgcttgcagcactacgcagtcaggacaagattgcagttgcaacagctacatctggtgttgcggcttctatattgcctggggggaggactgcccattcgcgcttcaagataccacttactattgatgatggtgctgtatgtagcttcacgaaacaaagcgggacaacaaagttgctacaaaaagcatcgctcattatctgggatgaggcatcaatgactaagagacaagcaattgaggcgctagacaatagcatgcgtgatataatgggacggtctgggttgccctttggtgggaagactgttgtgttcgggggtgattttagacaagtactccctgttgtacgcaaggggtcaagggctcagatagttgctgcctctctacggagttcttacctctgggaatccatgtgccacctaaggcttgttcaaaacatgagggcacagagcgacccatggtttgcagaatatttgttgcgcgtcggtggtggaactgaggaatcgaacaatgatggtgatgttcgtcttccagatgaggtatgtgtgccatatactggtaatgactgcgaccttgatagactgatagatgacatttaccccaatctaaatgaaaacatgtctaacacaagctacatcacttcaagagaaatattgtctacacggaatgactgggtggatatgataaatatgaggatgattgatcgtttccaaggggagcagatgatgtaccatagttttgacaccgcgacaactgatcaagccaaggacggaggcaagaagagcttcgaggtaccaagtgaacgggagaaagtcaaggaggctgaggaacccaaagccaagggtgaagaagaaggcttgcaaagtcaagggtga

SEQ ID NO: 33026 - DNA, 1011 bp, Zea mays
  Peptide Sequence Number=SeqID_74805
atgatgagtgctgaaaataaaaatgaattgaagaggcgtcgtcagtcaagcaaaaatgaaaatgttgtgcaccatgagcgttcaaaagacgaaaattataacaaatgtgccccaataactaaggatgttgacatggacaaaatgacacagtctcctagaagacaacgacatgagcatcatgtgtcgtctggcgaaagacagagcctgatatcttgtcaaaaccagaaatttcaatctgccattagaagaaactttgctactgcaactagggatcacggaatggaaggcgaaagtacaagcccatgtccagtcactgctccacatagtgacataatgactgaaggagcagacgttgggatgcaacgacagataaccccgaatgtcaccaccaatgatgccgatgaaggtgtgctctttgtagagaatcatgacgaggatgtactttttgaagatgatgacgaagaagatggatacctattcgctgggcaagatggtgaatctattgaggatatcgagattgatgaaacccaagatgcctttactgtcaaccctgacgtacctgacttgtacgacaaggtgtatagtaacatacctgaagaaacacatttgctgagcactgttgctgactgcgattactgcaaagcgaagaagtttcagtatgaaccacctggattttgttgtcgtaatggacagattgatctagccccgttcgagacaccaccccaacttaggaggctgtgggagtgctcagatgctgatgcgaggcacttccgtgataacattcgattttttaacggccatttctcattcacttctctatattgttgccttgatagtatgactacaaacatggattgtggtatctacacgtttcgtgcacatggcatgatgtaccacaacgtaaggtcgttcggtagggaagttggggcggaacataaacaccttgaactctacttctacgatgatgatcccaacctcgagcatagatatcgtaaatgtgagagcacctag

SEQ ID NO: 33027 - DNA, 1419 bp, Zea mays
  Peptide Sequence Number=SeqID_74806
atggcaaagaagaacgacgacggtgagaaatcaacagtccgccacaggtgctccttgccaatagatggttcctacaccttcctctatctctttccttcgacagatcgaatcgtgcttaccgagctttataccatcgtcatctcccgccagctgccgtgccgtctgctcgtccgattgttcgtgttcctcgcgccgccaccggcgcgggccacgaggcgccgggcgctcacccgccagccgtcggcctatgacgccggcggcgggcaccggagggcgatgctgtccaagaagtactcgtacataccggacacctacacgtcgcttgacgaggtggcggcggcgctgcgcgagcaggggctggagtcgtcgaacctcatcctgggcatagacttcaccaagagcaacgagtggacagggaggcagtcgttcggcgggcagagcctgcacagggtcggcgacacgcccaacccctacgagcaggccatcagcatcatcggcaagacgctggctcccttcgacgaggacaacctcatcccctgcttcggcttcggagacgccaccacccatgactacaacgtgttcagcttccacccggacaactcgccgtgccacggcttcgaggaggtcctcgcctgctaccgcaagatcgtgccgcacctcaagctttccgggccgacgtcgttcgcgcccatcgtggaggcggccgtcgacatcgtggaccggagcggggggcagtaccacgtgctcgtcgtggtcgcggacgggcaggtgaccaggagcgtcgacaccggtgacggcgacctcagcccgcaggagaagagaacggtagagtccattgtcacggcaagattcgacgacaagctccccgcgcgcgacttcgacaacttccagttcgtcaacttcaccgccatcatggcccgcgccgcgacggcacagcagaaggagtcggcgttcgcgctcgccgcgctcatggaggtccccatccagtacaaggccaccatggagctcggcatcctgggacggtccacggggaacgccaagcgagtcgcccccgcgccgccgccactgccgcacgcgcagcggcaggcgtcgtcgctgaggaggggcgccagcaacgtcggcggcgccgccgcggcgccgagagatgaccaggtgtgcccgatctgcctgaccaatgccaaggatctggcgttcggctgtgggcatatgctgtacatcgccgcgccgggaaccccatccttttcctcaacgttcgcgcctcggcgcggcagtccgaccacgaagctacttcttctcgcagagctacacgtcgccaagagcctcaacctctcaaataccgcggacgtcgccgccgtggggtgttgcgccatcgccaagaggctggccaatctcacggacgtggaggacaagaaggcatag

SEQ ID NO: 33028 - DNA, 558 bp, Zea mays
  Peptide Sequence Number=SeqID_74807
atgttctgtaatgtctgcaagacgggtgaaacgttcctggaaaggacaactgtaggtgggcctaattacttgggaggttccgtcacagccgtcgacgacgagggcaaggggcgcggtttggtggcgggctggctcggggtcagggttggtgggggcgcgtccgcggatcccgccatcacagagggcagtgccatcgagggcgagggcgagggcagtaggcgcgcgtgggagggagcagttcgcgatcgaatcgtccttacagagcttaatttataccatcgtcatctcccgccagctgccgtgccgtcggcctatgacgccggcggcgggcaccggagggcgatgctgtccaagaagtactcgtacataccggacacctacacgtcgcttgacgaggtggcggcggcgctgcgcgagcaggggctggagtcgtccaacctcatcctgggcatagacttcaccaagagcaacgagtggaccgggaggcagtcgttcggcgggcagagcctgcacagggtcggcgacacgcccaacgccccaaccccgcgatgggcatag

SEQ ID NO: 33029 - DNA, 1128 bp, Zea mays
  Peptide Sequence Number=SeqID_74808
atggaaagtcatgatcttcgggcagaaagggaatcacggcttgtgggtggcaatgagaatgatggttttggtattgactatggtaatggtaagtggcactctttccgtttggaaaggatggctcgtcttagacacactgcacggaagtctgtcatccccttcttaccctcccgtctcgcggagcgtccgcttcgtcgtccagtgaccggtcagtccagccacttggagaggctgcaccaccgcctgcataaggagcaggagcagcagggctcttctttctcgctccagcaggtggtagaatctgtgaggagctgctcccctgtgctccccctggaggcgccacctgcaccaccactgagcgccccagcccctggagtagctgctggaggagacctagacgatggaggcagcgacagcagctcgagcttcagcaccgacctttccgccgaccaggagttgggaggatgggttgatcgacccatcactcgcgacgctgctcgcgggtgtcacttccacgatgtgctcgacatcctgctacgtcgggcacttgaccggcgtacttggtccatcgagtatcgttgtgtggtcttccagcacagtcgcggggtctacccggaccgctgggaggcaacctgcttggtgcgccgtccggagaacagtctccggggtgcggagatctgctcagagcgctattccatctctgagcgagacacagctgaggcggccatgcaagatgccgcacggcgtgcgctttcgcactactgttcagtgctctgtggggtagctgatggtctcaacctgaagtattacacacgtcgtccatctggcagcacaagaggcgtgattgtctcacctgttggtgaggacaatcctaggttgagcagcacagtcaacctagccgtcgtgctaaacacggagctggaccatgcgctagacgagctgagtagggctcctgctgagatcgcccagctgcgggctgagcgcgcggagcatcgtcacctagatgatggctccctcgctcctgtcgggactcagcacccgtaccgctcacctcgaagtggacaccaggcctatggcaaccccgactgcaggaccaagaataaatttagaaccatagatcgtccatag

SEQ ID NO: 33030 - DNA, 1116 bp, Zea mays
  Peptide Sequence Number=SeqID_74809
atggaaagtcatgatcttcgggcagaaagggaatcacggcttgtgggtggcaatgagaatgatggttttggtattgactatggtaatggtaagtggcactctttccgtttggaaaggatggctcgtcttagacacactgcacggaagtctgtcatccccttcttaccctcccgtctcgcggagcgtccgcttcgtcgtccagtgaccggtcagtccagccacttggagaggctgcaccaccgcctgcataaggagcaggagcagcagggctcttctttctcgctccagcaggtggtagaatctgtgaggagctgctcccctgtgctccccctggaggcgccacctgcaccaccactgagcgccccagcccctggagtagctgctggaggagacctagacgatggaggcagcgacagcagctcgagcttcagcaccgacctttccgccgaccaggagttgggaggatgggttgatcgacccatcactcgcgacgctgctcgcgggtgtcacttccacgatgtgctcgacatcctgctacgtcgggcacttgaccggcgtacttggtccatcgagtatcgttgtgtggtcttccagcacagtcgcggggtctacccggaccgctgggaggcaacctgcttggtgcgccgtccggagaacagtctccggggtgcggagatctgctcagagcgctattccatctctgagcgagacacagctgaggcggccatgcaagatgccgcacggcgtgcgctttcgcactactgttcagtgctctgtggggtagctgatggtctcaacctgaagtattacacacgtcgtccatctggcagcacaagaggcgtgattgtctcacctgttggtgaggacaatcctaggttgagcagcacagtcaacctagccgtcgtgctaaacacggagctggaccatgcgctagacgagctgagtagggctcctgctgagatcgcccagctgcgggctgagcgcgcggagcatcgtcacctagatgatggctccctcgctcctgtcgggactcagcacccgtaccgctcacctcggcgtggacaccagtcctatggcaaccccgactgcaggaccaagataaatttagaaccatag

SEQ ID NO: 33031 - DNA, 450 bp, Zea mays
  Peptide Sequence Number=SeqID_74810
atggcggttcgcctccccgtcatcgttgcagaggtgacttcccttcctttccctcattttcttccctcccctaacctcacctcctttccccgcaccgtcggtgctacatctccagactgccctactccgtgcggacctgctctccagcgcgactgcacggctgttgttcctagcggcggcggtgttccgtggcgcgacagcgaaatcggcgaccgcatcgtcccccgtgaggacgcccctcgcatgccaaccgttgtgtctgcggcgacttggcctcccctccaccgaccagatccacactgccaacgggctcaccgccgacgaccccgactcgccgctcagttcggactaggagttcgtcatcctgctcctctgttaggtggaacaagtggaggtgcagttctaatattggtcgttgtcgtgaaatgcagagccaatatcactatttga

SEQ ID NO: 33032 - DNA, 681 bp, Zea mays
  Peptide Sequence Number=SeqID_74811
atgaggttgtcgccggcgaggatgaacccggggatggagaggaagcccttctcgaggaagacagaaacggtgtacgggcccgtgacgggcttcggggacgccgccgcttgcctgcacaagggcctcgctgcggatcgaggaacctccgccaccgcgcgtcgagatatagtattaggagccctgggcttccattactgcagggagccccggccacctaccgactgggcgaccaaccagcgccggtgctacatctccagactgcccctgctccgtgcggacccactctccagcgcgactgcacggctgttgttcccgcgggtggagatggcggcggtcaacctcctcgctgagtctgccgcggtgcgcttgagggcgccggcgccgccgagcgcgggggaggagcttgcggccaggctcacggagtgcgggttccccgccacggcgcgccgagggggagcggtcgcgggggttggggagagcgcgcgcaagtggagggagatggcggccaggaaggaggaactcctgctgcggagccggggccgagtcgcgtggacgatcgtcgcgctttgctgcggctcgcatgcgtcccacatcctgcactcgctcggtatccatgttggccacgggattaacagacttgtcctgaagggcatcgagcaaactggctcatcagttatgtaa

SEQ ID NO: 33033 - DNA, 774 bp, Zea mays
  Peptide Sequence Number=SeqID_74812
atggatcacacggttcatgtatggaatgtatgggacaaagggaataccactgctcgtgttttgaaacatcacactgctgctgtaaaggatctagttgatgttgttgagggaaaagtaatggaagtattcaaggaggatcaagctgtggaggttatcaagttcaatccaagcaaccccgatctcttcctatctggtgggtccaagggttcccttaaactctgggatattcgatgtggtctggtaacaaaagaatttcagagaagccttggaaccatccttgacattgacttcagtgctgatggaagacaatttatctcttcaactgacacaaccagaagcaatattagtgagaacactataattgtttgggatgtcctgcgacaagttcctttatctaaccaggtttataccgaagcattcacatgcccgtgtgtaaggtaccacccacgtgaagcatcatttgttgcacagtccaatgggaactacattgctattttttcagcaaggccacccttcaagctgaacaagtacacgcggtttgaaggacatggagtgtggggtttccctgtgaagtgcagcttttcccttggcgggagagaactcgcatctggttcatccgatgggtccatttacttctatgattacaggtcggcaaggcttttgaggaaaatagaagccttcaaagaggcgtgcactgatgtcgcgtaccacccagtaatgcctaatgtgatcgctgcttgtagctgggctggtgaaatatctgtctttgagtga

SEQ ID NO: 33034 - DNA, 954 bp, Zea mays
  Peptide Sequence Number=SeqID_74813
atggatcacacggttcatgtatggaatgtatgggacaaagggaataccactgctcgtgttttgaaacatcacactgctgctgtaaaggatgtaaggtggtcacttcataggccctttttactttctggagggcttgattgttccttacagctagttgatgttgttgagggaaaagtaatggaagtattcaaggaggatcaagctgtggaggttatcaagttcaatccaagcaaccccgatctcttcctatctggtgggtccaagggttcccttaaactctgggatattcgatgtggtctggtaacaaaagaatttcagagaagccttggaaccatccttgacattgacttcagtgctgatggaagacaatttatctcttcaactgacacaaccagaagcaatattagtgagaacactataattgtttgggatgtcctgcgacaagttcctttatctaaccaggtttataccgaagcattcacatgcccgtgtgtaaggtaccacccacgtgaagcatcatttgttgcacagtccaatgggaactacattgctattttttcagcaaggccacccttcaagctgaacaagtacacgcggtttgaaggacatggagtgtggggtttccctgtgaagtgcagcttttcccttggcgggagagaactcgcatctggttcatccgatgggtccatttacttctatgattacaggtcggcaaggcttttgaggaaaatagaagccttcaaagaggcgtgcactgatgtcgcgtaccacccagtaatgcctaatgtgatcgctgcttgtagctgggctgctgaactttcaccgccgcctgagccgtatgatcccgaagtcgatccggccatgaaggaagcattagaaacgataaggatcgccaacgaagctgtcaacagactcctaaatgaagctaccgataagatattgaaagaggactga

SEQ ID NO: 33035 - DNA, 255 bp, Zea mays
  Peptide Sequence Number=SeqID_74814
atggggtcttccgtgcaggcgactttcggcttccttcatccatcgacttcgacgatatcgccttcggtgcaggcaagcgactccatgctgacatccatagctccactgttgccgaccttctgcacatctccgcagccaagcaactccgcgccgccgcaacatagcacttcccagatcgaggtcctcctcgtcgccgccaccgacctgctccgcgctgccgcagccaaggtcatccgcgctgctggaccaccgtag

SEQ ID NO: 33036 - DNA, 989 bp, Zea mays
  Peptide Sequence Number=SeqID_74815
gtcaaggctctgtccactcaagggacacgatctcgcctcgcccgagcccagcctcgggcaggagcagcagacccaggtggattcacgcctcgcccgagggcctcctcaagcaacgggcgcaccttcgactcgcccgaggcccagctcgggcaggcttcgcggagaagcaaccttggctagatcgcctcgccaaccgaccggatcgcaggagcattcaatgcaaggatcgcctgacaccttatcctgacgcgtgttcctcaattgacagggccgaacagccaagtccagcctcgggcgccataggaagctccgcctcgcccaaccctagggctcggactcaacctcgacctcggaagacggtctccgcctcgcccgaccccagggctcggactcaacctcgacctcggaagacggtctccgcctcgcccgaccccagggctcgaactcaacctcgacctcggaagacggtctccgcctcgcccgaccccagggctcggactcaacctcgacctcggaaggcggtctccgcctcgcccgaccctagggctcggactcagcctcgacctcggaggagtcaccgcctcgcccaacctcgggctcggaccgaccacaccgcaggggggccctcgtacgagaaggtggccgcgcgggaggacgggctgacggacaggctctctctctctccctcgcgaacgcttgtaaccccctactgcaagcgcatccgccttgggcgcaggacaacacgagccgcggcgactttcggcttccttcatccatcgacttcgacgatatcgccttcggtgcaggcaagcgactccatgctgacatccatagctccactgttgccgaccttctgcacatctccgcagccaagcaactccgcgccgccgcaacatagcacttcccagatcgaggtcctcctcgtcgccgccaccgacctgctccgcgctgccgcagccaaggtcatccgcgctgctggaccaccgtag

SEQ ID NO: 33037 - DNA, 927 bp, Zea mays
  Peptide Sequence Number=SeqID_74816
atggccagccacggcgcgacgcccatcctcacccctgcgtgcggccagccccgacggcgctgcatggaagcgcggcgcggcagccggtcggccggccagcgagcctgcgcgcccccgtcctcgccagcgtccaagctcgcctcgccggagtcgccgttcgtcaccgtgactgcgatccattttcgagcttcgaggaatcgacagtcaagcttcggcgaccaagagatcgaactcttcgagttctacaaggctgaagaccctgagcatctgattggtgaaggcaaaggaactagaggtgtagttgcttcgtcgtcgtgccgtcaatggggtccaggcacagtgcttgctctgtcgaggctgagtgccgaggtaaagaagaaggcgtcgaggcggatctctaggagttctagggcttcgacgagttcgaggattaggctagcgacctcccccatttcgacgcctgaggacgcagcgcgggaaagtcgggtcactgctgtggatgacgctcaaatccattgggccgtctgggctcgagttgatccaatcttgcgtcgatccattctgccagacattcctcctcaggtccacgaagggatggccttgcgaaacaatgggcccaaggcttttcacgagagacacggggtggtagatagtcgtggtagtggctcgaggtgcttgtcgatcgggaaggtaaaggcaatgccgcgagtggggcgtgacagcggcggctggcgagtcggaggccaacaagatgccctagtcgatgtcctctatggcaactcgccccaacagaatgtcctctatggtggtgtggaagaatctgggtgggcgaagatgagaaaagagatgggaagttggagtttaatatacgacgacgacaacaaggagaaggaagtgctcatggtggttactgaaagtcgcctatag

SEQ ID NO: 33038 - DNA, 489 bp, Zea mays
  Peptide Sequence Number=SeqID_74817
atggcttcacctctcttcacaagggctgtcatagggaaaaaagaggctgtcattagccatctcctaagaaaaggggcaaatccccatgttagagatagggatggagccacaccattacattatgctgttcaagctggtgccctgcaaaccgtgaagttactgattaagtacaaggttgatgtcaatgttgccgataatgatggatggacaccactccatttagccatacagagtaggaatagagatatagctaaggtcttgcttgtcaatggtgcggataagacaagaagaaccaaggatgggaggactgcgctggatctaagtctatgctttggaagggatttcaagtcatatgatcttgcaaagcttgtcaagcttattccagcaaacagagggttcagactgagctgcatacacagtgagggaaatgatcctggcatctatgccattaggaacatggctctatacaatggaatattattttggtaa

SEQ ID NO: 33039 - DNA, 543 bp, Zea mays
  Peptide Sequence Number=SeqID_74818
atggaggtgatcctaccgcgacgaggagggagagtgttggaggagaggtacctgaagcagcctctcggggacctaggcttcaagcactcatgggcggtggaccctgtggctccggaggcagacgccacggtttcatgcggcgggcaggcagccgtcgagctcgccgatctcagaatgtggcttaacatgttcctggaaggttcaattgtctacacgagggccaccatcgtcttcatgcgccgccccaacggtgacctcatcgtcggcctgcgccacgacgaggaggaggcagttcccaacaccttgcccaacaggtgttcgatgatttgcttcatccgcggcctcgacgtcggcagccacctgtgggggaataactctactgctgctgaccacgacacggcaggcctgaggctgctctggtggctcaagaaccagacgtccttccagaggtctggcagctgggaccacttcatcacgttggggcacatcttcatcgatcttgagccagagaacaaccaagcatatcctagcaattatcgctag

SEQ ID NO: 33040 - DNA, 1850 bp, Zea mays
  Peptide Sequence Number=SeqID_74819
agaggatggatttaagaatactataacagagaaggctactgaaacgagtgttataatagcaataaactcagccagctggaggttcgtgttcaattcgttcagagtgttggaggagaggtacctgaagcagcctctcggggacctaggcttcaagcactcatgggcggtggaccctgtggctccggaggcagacgccacggtttcatgcggcgggcaggcagccgtcgagctcgccgatctcagaatgtggcttaacatgttcctggaaggttcaattgtctacacgagggccaccatcgtcttcatgcgccgccccaacggtgacctcatcgtcggcctgcgccacgacgaggaggaggcagttcccaacaccttgcccaacaggtgttcgatgatttgcttcatccgcggcctcgacgtcggcagccacctgtgggggaataactctactgctgctgaccacgacacggcaggcctgaggctgctctggtggctcaagaaccagacgtccttccagagcaatgctcaggctctcattttcaccacgagcatgatttgggtgttgtgcaaggcagggaagctaaatgatgctaaggagttgtttaaccagacagagacagctagagttgtgccttgtgcgtacgcatataatacaatactcatggcattcgcaaccggagggtacgctgcaatggagaggataacacaatggaaccttgctttcactggtgttggacttgttggcactggcattgtcactagcctcgatctcattggttcagggattgctgctggtgatggctttgttacctctggtccgggtcctgttagcagtggacaaggcaatatctccgtctttctttgggatcctggcggtcatgcgaaagaccgcttggaacaagctgtatttcaaggagtggggaataactcgacgggaaaaccggggctttggtcgccggacgccggctgcctcgagatgctcgtgtgggcggccaccgcgtcaccacccagcactccatccgccgtgccatttgctcctccccaccgcgccgccgctccccgccctccaccgcctctctgccgctcgctcccggggctgctgtgcgcgggcctgatccctccgccgcgcgccgccgcttctgacggcgacgtcttctgggaggagccagacgacggctccgggagcgactacgaggacgacggcccggagcaaaggagggccttgcgtttcccatcttcctcgccgtcctacaggctcgaggcgtcggcgcagcaagaacaggacctccggagagagatcgagcttctcctaacgcctgaagaaaaggctactttggaccagcatgagacccctgaccccaagtggcacccacttcatagctacgcgttggcactgcagatacccctcatggacaagcttctgaacagcggtgttgacatcaacttagttgatagagatggcttcacctctcttcacaaggctgtcatagggaaaaaagaggctgtcattagccatctcctaagaaaaggggcaaatccccatgttagagatagggatggagccacaccattacattatgctgttcaagctggtgccctgcaaaccgtgaagttactgattaagtacaaggttgatgtcaatgttgccgataatgatggatggacaccactccatttagccatacagagtaggaatagagatatagctaaggtcttgcttgtcaatggtgcggataagacaagaagaaccaaggatgggaggactgcgctggatctaagtctatgctttggaagggatttcaagtcatatgatcttgcaaagcttgtcaagcttattccagcaaacagag

SEQ ID NO: 33041 - DNA, 429 bp, Zea mays
  Peptide Sequence Number=SeqID_74820
atgccccctacaccacctcagggcatcccagctgctagaggagaccttgacagagatggagacgatgacgatgacgacgccggtggcagttcgagccacgacacagagctctcggaggagccggacccggagggatggatcgtgtcacacccgggtttcggggcaccaagacccgggcgtgaacatcatcaccagaagtcatgttacccatctgccaagagacagccaatcccatacacctctaccgaggaggcgaggcagggtaacactacgaggcctttacaaagttccactagcttcaaaaaactcgttacagtttataggaagctccagtgcaggaatccctcgcttgaccgccatcgcagcaaaatcaaccaaggacctccctacactgaccactcccctactgcccttgcccctttcgagtaa

SEQ ID NO: 33042 - DNA, 591 bp, Zea mays
  Peptide Sequence Number=SeqID_74821
atggcggtgaggcgagggattcctgcactggagcttcctataaactgtagcgagttttctaaagctagtggaactttgttaaggcctcgtagtgttaccctgcctcgcctcctcggtagagacggagcttatgtcatgctgatgcaaggacatcatcatgcaaattcaggccagcacattgcggagtgcgcgtggggctcctgttgctcacgtcgtgattcatctcatgctgcgaaacggacatcaatagaagctccagagatccaccataggcgcccgggaactttcctgtgcttgtggcgtttggtggaccgggcctcctcgccgcagcgcgacagctgggaagaaagctccgccgcggtgcagcttgttgtgctgttgctttggcgcatggatgctcgggatgcttcgttgaatgcctgcggaattgcccgtgtgggagttgggcccggggtctcgggcagtggtgctccgacgggcagcttcatcatggtggcaagcgcgctactatctggcttagtcggaggggaggatgaagatgactcttgggccgtcgatcaggaaatgcgtggctcagatcatatggccgag

SEQ ID NO: 33043 - DNA, 597 bp, Zea mays
  Peptide Sequence Number=SeqID_74822
atgcgggataacaaactccaggtggctcgccagcgaccactgcaccatcagcgcgacagcgacctccgcctcgggcggctagacagcagtagtgatggcctcagggcaaacgctactgccgaaagggctcgttcacatcccctcacgggggacgagaaccagccattaaagccaaagagccggaggtccagagcgcaggtggcactgacggtctcgttggcggaagcaaccaccgctccggtgggaagcctcaccagcggtggccaccacttcagcaccggcgacagcagccacctgcgcacggcacgaccgttgtccgggtggaggacagacagctgcaccctgaccaggcagcagcagttcgccttcccccacatggctggaggatgcctcctccgcagggctggaggatgccctttttccccgaatggtggaagaagaagcgggtcaccggcccacgtgggaggcaagacccaactcggcgcgccctcctccccagctcggatgatgaacatccttgaagctgagggtggggcagaggccgcagcccggcttgcttctccccaccacaaggctggtgatcatccctacggatga

SEQ ID NO: 33044 - DNA, 369 bp, Zea mays
  Peptide Sequence Number=SeqID_74823
atggggctagagccgaggagccgagctgctggatgccggccatggagaggaggagcaggggcgccatggaagggagctggaaatcagggcgccatggacagggatagcagagctgctgctgggcgccatgggaggagagctgagcccccagcttgctgcacgccagggacagaagagggaggaagaagctactgctgggagtgtggtgccatggacagggggcgccagcttcaagggagtggaggtcagccatggctgatggcggccgagcgagcagagcgagaaggaaaaaaaaggagcaacgacgtcgtgccatgggagggagctgctgctcgccatgctgcaagggcaccgagttggggaggctga

SEQ ID NO: 33045 - DNA, 306 bp, Zea mays
  Peptide Sequence Number=SeqID_74824
atggacagggatagcagagctgctgctgggcgccatgggagaagagctgagcccccagcttgctgcacgtcagggacagtagagggaggaagaagggcagagggcacgcagggaggtggaggtgccatgggaggtgcttgctgctcgccagaagggggcgccggccatggagaggaaaggagccgtgctccctgttgctggcgtggggaatccagggaggaagatggcgcctactgctgcgcgtgggaggaagcagtcagggagaaatggaagtggcggctgaaaaacttagaggggtgggagtga

SEQ ID NO: 33046 - DNA, 225 bp, Zea mays
  Peptide Sequence Number=SeqID_74825
atggtcgtccgcacgctgggccgcgagggccagcacgacgccgtctgcgcgctgctcgatgaaacgccgctcccgccgggctcccgcctggacgtccacgcctacaccaccgtgctgcacgcgctctcccgcgcgggccgacaggctttaggaccatctacaaaataccaagagtttcatatacacgaggctaaagggccaaatgatggttctgtgaacagctag

SEQ ID NO: 33047 - DNA, 2361 bp, Zea mays
  Peptide Sequence Number=SeqID_74826
atggaggccaccggcagggggctgttcccgaacaagcccaccctcccggcggggccgaggaaacggggcccgctcctcccggccgcgcccccgccaccgtccccctcctcgctcccgctcgactcgctcctgctccacctcaccgcgcccgcccccgcgccggcccccgcgccgcggcggtcgcaccagacgccgacgccgccgcactccttcctctcccccgacgcgcaggtgctggtgctcgccatctcctcgcacccgctccccacgctggcggccttcctggcctcccgccgcgacgagctcctccgcgcggacatcacgtccctgctcaaggcgctggagctctcggggcactgggagtgggcgctcgcgctcctccggtgggcaggcaaggagggtgccgccgacgcgtcggcgctcgagatggtcgtccgcgcgctgggccgcgagggccagcacgacgccgtctgcgcgctgctcgacgaaacgccgctcccgccgggctcccgcctcgacgtccgcgcctacaccaccgtgctgcacgcgctctcccgcgcgggccggtacgagcgcgcgctcgagctcttcgccgagctccggcgccagggggtggcgcccacgctcgtcacctacaacgtcgtgctggacgtgtacgggcggatgggccggtcgtggccgcggatcgtcgccctcctcgatgagatgcgcgccgccggggtcgagcccgacggcttcaccgccagcacggtgatcgccgcgtgctgccgcgacgggctggttgacgaggcggtggcgttcttcgaggacctcaaggcccgcggccacgccccgtgcgtcgtcacgtacaacgcgttgctccaggtgttcggcaaggccgggaactacacggaggcgctgcgcgtgctcggggagatggagcagaacggctgccagccagatgctgtgacgtacaacgagctcgccggaacgtacgcccgggctgggttcttcgaggaggctgccaggtgcctggacacaatggcatccaagggtctgttgccaaacgcattcacgtacaacaccgtgatgacagcctatgggaatgttgggaaggtggatgaggcgctcgctctgtttgaccagatgaagaagaccgggttcgtgccgaacgtgaacacgtacaatcttgtccttggcatgcttggcaagaagtcaaggttcacggtgatgctagagatgcttggagagatgtcgaggagcggatgcacaccgaaccgggtaacatggaacacaatgcttgcagtctgtgggaagcgtggcatggaggactacgtcacccgggttctggaggggatgaggtcttgcggggttgaactgagccgagacacctacaacaccctgatagctgcgtacggccggtgtggctcgaggactaatgccttcaagatgtacaacgagatgaccagcgctggattcaccccctgcatcaccacgtacaacgcgttgctgaacgtgctgtcgcggcagggcgactggtccaccgcccagtcgatcgtaagcaaaatgaggaccaaggggttcaagccgaacgagcagtcgtattcgctgctgctccagtgctacgcgaaggggggcaacgtggcagggatagccgcgatcgagaacgaggtgtacggatcaggtgccgttttcccaagctgggtgatcctgaggacccttgtcatcgccaatttcaagtgccggcgactggatggcatggagacggcgtttcaagaggtgaaggccagaggctacaacccggacctcgtgatattcaactccatgctgtccatctacgcgaagaacgggatgtacagcaaggccaccgaggtcttcgactccatcaagcggagcgggctgagccccgacctcatcacctacaacagcctgatggacatgtacgccaagtgcagcgagtcgtgggaggccgagaagatactgaaccagctcaagtgctcccagacgatgaagcccgacgtggtgtcctacaacacggtcataaacgggttctgcaagcaggggctggtgaaagaggcccagagggtcctctcggagatggtcgccgacggcatggccccctgcgccgtgacctaccacacgctcgtcgggggttactccagcctggagatgttcagcgaggccagggaggtcatcggctacatggtccagcacggcctcaagcctatggagctgacctacaggagagtcgtcgagagctactgcagagcgaagcggttcgaggaggctcgcggcttcctgtccgaggtctcggagaccgacctggattttgacaagaaggcgctcgaagcctatatagaggatgcgcagtttggaaggtag

SEQ ID NO: 33048 - DNA, 211 bp, Zea mays
  Peptide Sequence Number=SeqID_74827
atgggccggatcacacgtgggcctccgagctgcgacgaggccgcacggtgggatgacctcgtcgcaggccttcgtctgatgtcgtgtggggcgaaggggcggctcgaggcggctgtggtcgtggtcgtggccggggacgacagggaggtggcggtggtgcccgaggtcgatggtgcagtgacgggaacggcgaggtgcggcgcagtgacag

SEQ ID NO: 33049 - DNA, 825 bp, Zea mays
  Peptide Sequence Number=SeqID_74828
atggcggttgccccagagcgtgcgcggcggtggacccccagccggtggctgcagctccatgacctcgacgcgtggtggcggaggatctgcctacctcggttatgtcgctcagtggctgtaggatcatgtcgtgtgcccaccgcactatacgtcatcctccctcaccccaccatctttggcagcgtcgcatgggcagcaaccacctcggcatcatcggtgtcccccaccccgcggtgcttgcgtgctctgttcccatcctcctcgcacgcgattgcccccgcgcccgccgcatccagtgcctggcccgtgctccctagcctagacatcgcaccctgccctcgtctcgaggtcgccaccctgtcctcgtcttcagcggcgccgtctgtcgctcacatgtccacctctccccaggctctacgaccgcaccctctccctctacctcgacaaagccaagtgctggggcaaccgcactgccgcttgttggaacttgctctctgtcgcaaggaggccaacaaggactgtaattacaggaatgcctttacaaatgaggcccataacacacggcggccacgcagggcccgttacaatgggccggatcgcacgtgggcctccgaactggacgaggccgcacggtgggaggacctcgtcgcaggccttcgtctgatgtcgtaccgagcgaagggtgtccctgcccgttttgtctccgtcggaccagcgactgcggtgaagacttcgagcggagggtggcggctttgccttcgccccaacatttgccctccgagggaccagttcgacaaagtcacctggtgccgaagacatcgctag

SEQ ID NO: 33050 - DNA, 329 bp, Zea mays
  Peptide Sequence Number=SeqID_74829
gcgcagcccactataattcaccggactgtccggtgcaccaccggacagtgtccggtgctccagagttaagcggctctgaactggccagcttcgggaaaacggaaggccgctccgctaaaattcaccggactgtccggtgtacaccggactgtccggtgcgccagcggagcaacggctaccccgcgccaacggtcgactctgatagcgaacagtgcgcaatagtacacgcggcagaagtcagagcagaaagacagaggggcaccggactgtccgagagggaaagggttgaaaaagacccgtccttaagtggactcctcaacggggactag

SEQ ID NO: 33051 - DNA, 441 bp, Zea mays
  Peptide Sequence Number=SeqID_74830
atggaaggccgctccgctaaaattcaccggactgtccggtgtacaccggactgtctggtgcgccagcggagcaacggctacctcgcgccaacggtcgactctgacagcgaacagtgcgcaatagtacatgcagcagaagtcagagcagaaggacagaggggcaccggactgtcccggtgtgcacgagactgtccggtgccacatgaggacaaagcctccaacggtcgaccagctccaaccccaacggataggatgacgtggctggcgcaccggacactgtccggtgtgcaccggactgtcccggtgcgcccatcgccagcagccttctccaacggctacattttggttggtggctataaataccaccccaaccggccacttcaagagagggaaagggttgaaaaagacccgtccttaagtggactcctcaacggggactag

SEQ ID NO: 33052 - DNA, 291 bp, Zea mays
  Peptide Sequence Number=SeqID_74831
atggctccattcctcagagggctcatcaggcgcttcctggcaagcaagatcagcaatccaagccccctgcctcccaatcagaatgcctcctactcgtaccttcagacgctgaatgctctaaaacaatcaagaacccaaccaggggggagatggtcagagcttgatcttcggtatgtgaagaaaagcagcgatcagcatctggagcttggttacaaggtggagaggcatctcaatgatggggattttgttcttttcaatcggcaaccaagtcttcataaaatgtctatcatg

SEQ ID NO: 33053 - DNA, 5493 bp, Zea mays
  Peptide Sequence Number=SeqID_74832
atggatgcgaggttcccgtactcgccggccgaggtggccaaggtcgagttcgtgcagttcggcatcctcagccccgacgagatcagacaaatgtcggtgattcaaatagaacacgcagagaccatggagaggggcaaaccgaagcctggtgggctcagtgaccctcgattggggactatcgaccggaaaattaagtgcgagacatgcatggcagggatggcagagtgtccaggccactttgggcaccttgagcttgccaagccgatgttccacatcggattcattaagactgtgctctccatcatgcgttgtgtttgctttaactgctccaagatcctcgcggatgaggatgaaaccaaatttaagcaggctttaaaaatccggaatccaaagaatagattgaagaggatatatgatgcttgcaagagcaaaaaagtctgtgcaggtggcgatgaccttgatgttcaggaacaggatactgatgagcctattaagaaaagaggtggctgtggtgctcagcagccaaatattacagtcgatggcatgaagatggttgctgagtttaaagctccaaagaagaaaactgatgatcaggatcaactccctgagccagtggaacgcaagcaaatcctctcagctgagagggtccttaatgttcttaagcgtataagtgatgaggactgtcttctgttgggcctgaatcccaaatatgcccgtcctgattggatgatacttcaagttcttcctgttcctccaccccctgttagaccatctgtcatgatggacacctcttccagaagtgaggatgatctgactcatcagttagctatgataatacgacataatgagaatttgaggaggcaagagagaaatggtgctccagctcacattataacagagtttgctcagctgttgcaatttcatattgcaacatacttcgataatgatcttcctggccaacccagggccacacaacgttctggaaggcctattaaatcaatttgcagcaggctgaaagctaaagaaggcaggattagaggaaacttgatgggcaagcgtgttgatttctcggcccgtacagttatcacaccagatccgaacataaacattgatgaattgggagtaccatggagtattgctttgaacctgacatatcctgaaactgtcactccatataatattgagaggttgaaggaacttgttgaatatgggcctcaccctcctccaggaaagaccggtgcaaaatatattatcagggaagatggtcagaggcttgatcttcggtatgtgaagaaaagcagtgatcagcatctggagcttggttacaaggtggagaggcatctcaatgatggggattttgttcttttcaatcggcaaccaagtcttcataaaatgtctatcatggggcatcgcatcaaaattatgccctactcaactttccggttgaacttgtctgtcacttcaccatacaatgctgacttcgacggtgatgagatgaatatgcatgtcccccagtcatttgagaccagagcagaagttctggagttaatgatggtgccaaaatgcattgtctctccacaatcaaataggcctgtaatgggtattgtccaagacacactgcttgggtgtcgcaaaattactaaaagggacactctaattgaaaaggatgtatttatgaacatcttgatgtggtggcaagatttcgatggaaagattcctgcacctaccattttgaaacctaggcctatttggactgggaaacaagtttttaacttaattatccccaagcaaataaatttaattcggttttcagcatggcattcggaagaagaaaaaggatttattactcccggtgatactatggtcaggatagagaagggagagcttctgtctggcacactttgcaaaaagagtcttggaacaggctccggaagtcttatccatgtcatttgggaagaggttggtccagatgctgcccggaagttcttaggacacacacagtggcttgtaaactactggcttcttcaaaatggtttcagtattggaattggggatactattgcagatgcatccaccatggaaacaattaatgatacaatatctaaagctaagaatgctgtgaaggagcttattaaaaaagctcatgagaagcagttggaagctgagccaggacgcactatgatggaatcatttgaaaacagagtgaaccaggttcttaacaaagcccgtgatgatgctggtagcagtgctcagaatagcttgtctgaaagcaacaatttgaaggctatggtcactgcaggttcaaaaggcagtttcattaacatttcacaaatgactgcttgtgtgggacagcagaatgttgagggcaagcggatcccttttggtttcattgatcggacgttgccacatttcacaaaagatgactatggtcctgaaagtcgtggatttgtggaaaattcttacctccgaggtctgacaccgcaagaatttttctttcacgctatgggtggtagggaaggtcttatagacactgctgtgaaaacctctgagactgggtatatccagaggagacttgtgaaagctatggaggacatcatggttaaatatgatggtactgtaagaaattctcttggagatgtcatccagttcttgtatggagaagatggcatggatgctgtttggattgaatctcaaaaattggactcattgaagatgaagaagcctgagttcgataatgtattccgttatgagctggatgatgagaattggagacctaactacatgctacctgaacatgttgacgatttgaagaccatacgtgaattcagaaatgtgttcgaggcagaggttcaaaagctagaagctgatcggtaccagcttgggtctgagatcaccacaactggtgacaattcgtggcctatgcctgtgaacctcaagcgactcatctggaatgctcagaagacattcaagattgattttagaagaccttctgacatgcacccgatggaaattgtggaagcgatagataaactgcaagaaagacttaaggttgtacctggtgatgatgctatgagcattgaggcccagaagaatgcaaccttgttctttaatatcctacttcgtagcacgtttgctagcaagagggtcttgaaggaatacaggcttacaaaggaagcttttgaatgggttattggtgagattgaatcgaggtttcttcagtctttggtggcccctggcgagatgattggatgtgtggctgcacaatctattggagaaccagcaactcagatgaccctgaataccttccattatgctggtgtcagtgccaagaatgtcacccttggagttcccaggttgagggagatcattaatgttgccaagaagataaagacaccatctttgtctgtttacctgaagcctcaggtgaaccagaagaaagaattggctaagaatgtccagtgtgctttggagtacactacactgcgtagtgttacccacgccacagagatatggtatgatcctgatcctctagggaccatcattgaagaggacacagagtttgttcagtcctattatgaaatgcctgatgaggacattgacccggataaaatttctccttggttgctgcgtattgagcttaaccgtgagatgatggttgataagaagttgagcatggctgatattgccgagaagattaaccgtgagtttgatgatgatttatcatgcattttcaatgatgataatgcggataagcttatcctccgtatccgcatcacaaatgatgaagctccaaaaggagaaatacaagatgagtctgctgaggatgatgtcttcctaaaaaagatagagggcaatatgttgacagagatggcgcttcgaggcattccagatatcaacaaagtgttcatcaaagaagggaaggtcaataccttctatcaagatgacggtttcaaagcagctaatgaatggatgcttgatacagaaggtgtgaatcttttagctgtcatgtgtcacgaggatgttgatgctacaaggacaacaagtaaccatctgattgaagtgattgaggtacttggaattgaggctgtccgtcgatctctcttggatgagcttcgggtggtgatatctttcgatgggtcatatgtgaactaccggcatctggccattctttgtgatacaatgacatacagaggtcacttgatggctattacaaggcatggtatcaaccgcaacgacactggacctcttatgagatgttcctttgaagagactgttgacatcttacttgatgctgctgtatatgctgaatctgaccacctgagaggtgttactgaaaacataatgcttggtcagcttgctcctattggtactggaggctgtgcactatatctgaatgaccagatgttgcagcaagcaattgaacttcaactcccaagctatgtcgaaggcctagactttggcatgactccagcacgatcacccatcactgggacaccttaccatgaaggaatgatgtcgccaagttatctgctgagtccaaacatcagggcttcgcctattaatacagatgcttcgttctcgccgtatgttgggcacatggcattctcaccattcccttcaccaggtggttactccccatcgtcagggggatacagcccatcttctccggttttcaccccagagaaaggatatagccctctctctccatcatatagccctgcatcaccaagctatagtcccacctcaccgtcttacactcctggctctcccacctacagtccaacaagcccgaattactccccaaccagcccgacgtactcgcctaccagcccatcgtactcacccacatctccgagctacagcccaacatcaccaagctacagccctacatcaccaagctacagccctacatctcctagctatagtcctacatcaccaagctacagccccacctcaccagtttatagcccaacctcaccagcatacagccccacatcacccgcttacagccccacatcgccatcctacagtccaacttcaccatcttatagccctacatcaccttcatacagccctacgtccccttcatacagccctacctccccctcatacagccctacctctccctcctacagcccgacatcacctgcttacagcccgacatcaccaggatacagcccaacgtcaccgagctacagccctacatctccgagctacagtcctacatctccgagctacaatccttcatcagccaagtacagcccttcacatgcatactctccaagcagccccaggatgagtccatacagccagacttctccaagctacagtccaacgtcaccgacttactctcctacatcaccatcatattcacaaccaagtccatcgtacagcccaacgagccctagcggaagctactcccccactgcaccgggctactccccgtcgtccacaggccagggtaatgacaaggatgataagagcgctcgttga

SEQ ID NO: 33054 - DNA, 867 bp, Zea mays
  Peptide Sequence Number=SeqID_74833
atggttcacatatcagatattaaactgataagaacagatactacacttgatcttagccaaaaggccgagaaagactccgcgtcccgccttcgcgctgcagagtactcctctcacgcctccgcgcgtgcagctccgccccactcgcgttcctgtgccacgcacacctcctcacctcgggccacctcgccggctccccgctgcggctatccaacctcctcctgctcgcccttgcgtccgtcccgtcgtcttcgcgcgcctcccggagcccgccgctcgcgacctattcctctggagcacgtctgtccgtctccacgcccccgcatcgcgctgctctgcttcgcgtgtggccggacgcctactcgtttcccgctatcctcaagggtcaaggcttgcgggcgtgcgcctggatgcagggccggactcctggttcacgccgaggccgtgaggagggggatgggagtggacatcttcagtcttcacggtgaacgcgctcatcagctctggaccggctcgcggaggaacgtgttcgacgaggcgggcggcgcctcgaggtcgtggaacaccatgggcgctgggtacaccgggtgtgggagatggggctcgcgcaggagctgttcgacgaaatggagctgggagacatgttctcttgggggccttgatggacgggcgaggtcactgtttgaggaaacgatggagcggaatgtgatcttgtggaccattttcattgatgggcatgttaggtgctcgggggccaaggaggctttggagtattttcagactgagcaatttggagcaaggaagatagcttcacttttgtttagaaaggtgtttgttcttaacctcttggattggatggtagtgcgctga

SEQ ID NO: 33055 - DNA, 474 bp, Zea mays
  Peptide Sequence Number=SeqID_74834
atggcgcaccagacactgtctggtgctcaggccgaggcactttacgaactgactgctctcgggttttctcagcgcgcgtccactataagtcaccggactgtccgaagtcagaactgcaaagtcagaacacaccagattgtccggtgccgcaagtggacaacagactctaacgatcaacaactccaaaccccaacggttttgcctattcaccccctagtcgacttttatcaactcaagggcatgaagaaacgtctcaaggaagcagaagaacaatataagcaccagcttgcttcacaccatacccgtccatcaaggcccccaagagaacatgtctcccagctccatttcgtcgaacagctcctgcgcgagccccatctcccacacccggtgtacccagcgcccatggtgttccacgacctcgaggcgccgcccgcctcgtcgaacacgttcctccgcgagccggtccagagctga

SEQ ID NO: 33056 - DNA, 2340 bp, Zea mays
  Peptide Sequence Number=SeqID_74835
atgcacttttacaagaaattgatgagtaggactgaacgcccggacaaccgttggatcgatttgcgatggacgtacgcacagcagcctgcagtactgcagacgatctggttccgcacggccctgcgtaacgaatatcgtccgtacgatcaagagcgaacgatatctgacgaggaagcaaaccaggcgtggtcgcatttaaaaccgccagctcagcgcagcgggcagattagtcgactccatttcgcttccccgtccatctcattcctcttctctcctcccctccctcggcctttctcccatccccgttcgaagaagccgccgataccgcggcagtcgaggatggcggcggcggcaccaccggacgggcaggagaaggtgattgcggcggcgcagcacatcgtcaagttgctcgccagctccaagaacgctgccgacgacatgatccgcatcctctccggcttcgacaaccgcctctcgctcatgtccgacctcttcactcctccccctgccgccgccgccgttggttccatcctggaggcggacgaggggacccagagggagggggacgaggccgactacgacgaagacgacgccgctgcccgggccgaggcggagtgggacgtggcggccgaggtggtcgagcgccgggtgtcccccgctgccggggcggccgaggtggtcgagcgccgggtgtcccccgctgccggggaagcgctggtgttcgactcgcgggagggcgccgaggagtacctcgccgcggtcgcctgcctcgttggcgcgccgggcccgcgcgccgaggccgcgctgcaggccgccatgacgcggctcgaggacgagttccgccacctgctcgtgcgcggggcgccgccgctcgccccagaggacctccagacctcgctcctccggcggctctcgctcacggtgccctccttcaactcctccgccgtagacctagactgccactccttcgcccaccacccggccgccgtggggggagacgagcagcagtgcggcaggagctccgcctccgacgacgagaccttgccctacctcatggccccggacaccgtcagcgccctcagggacatcgccgacgtcatgctgcgcgcgggctacgcgcccgagctgtgccaggtctacggggaggtgcgccgggacacgctcatggaacgcctcgccgtgctcgggatcgacaagatgagcctcgaggaggtgcagcaggtggagtggggcgtgcttgacggcaagacgaagaagtggatccaggcgttcaaggtcgttgtccggggcctccttgctgaggagcgccgcatctgcagccagatccttgcggccgaccctaacgccgaggaggagtgcttcactgaggcggccaagggctgtgtcctccagatgctcaacttcgctgacgccattgcgatcgggaagaggtccacagagaagctgtttcgcatccttggtatgtatgaggcgcttgctgaggtgctgccagagcttgaaggcttgttctccggtgacgcaaaggatttcatcaaggacgaggctgagggaatactgcgcgtggcacgattgaagagtttgctaatgccatacagggagagacttctcggagtcggagaccgctgcctggtggggagatccatccctcttacccgctatgtcatgaactatgtgtgtctgcttgcggattacaatgcctcgctaaataggcttctggaatattgggatactgagctgactggggttgataatccgaacacgactccattggggcactgcgtgttcatgctgatcacacacctacagtgcaagattgatgagaaatcgaggctgtatgaggatgaagcgctgcagaacatattttttatgaacaatctgctgtacattgtgcagaaggtgaaggattcagagctcaagacattgcttggtgataactggattcgcaaacatcgtggtcagataaggcaatactctacagggtatctccggtcatcatggactagggtgttagcttgcctgagagacgatgggcttccacacacaatgggttcatcaggcgcactcaaggctgcactgaaggatagattcaaaaacttcaacttggcctttgaggagctgtacaggactcagacatcatggaaggttgtcgatcctcagttaagagaagagctgaagatttccatctccgagaaggttcttccagcataccgttcatttgttggaagatttcatggccaactagagggagggaggggttctgcaaggtatataaagtacaaccctgatgatttggagaaccaggtctcggagttttttgaagggagaaagccaaatgcttga

SEQ ID NO: 33057 - DNA, 819 bp, Zea mays
  Peptide Sequence Number=SeqID_74836
atgcgcctaggggtcccttttatagccccaaggcagctaggagccgttggaggccaacttggaaggccaaacttgccttctgtcgggtgcgtcccggcgccgctcgtggtctccgacagcggcgagaagatgctagcgtccgaggccctcgccgctacgttccacctgtccaaggctgacctggagtggttcgacggaaagccctcgctcttctcgtcgcggtgtggggcaggggaggcttgcctgaaggtgttggtctacaccgaccggaaggggagtgcctgtggcgtcagctccgggcggctgctcgggaaggctacggtcccactcgacctcaagcgcgccgaggccaagcccgccgtgctgcacatctcctcaaaggccaagttgaagtttttgaatctatccttccgtgcagccttgagtgcgcctgatgaacccattgtgtgtggaagtccatcgtctctcaggcaagctaacaccctagtccatgatgaccggagataccctgtagagtattgccttattgaccatgatgtgctgcaggtgcgcggtagcatgaggcagcccattttcacatgcaagttcgggtgccgcagcaatagtgacctacgcaggccggggatgcggccggagcgcgacgccatggagcacaaggggtggtcggtgacggtgcacgacctgaagggctcccccgtggcgatggcgtccatggtcacgctgttcgtgccgtcactgggcacggaccgcgtgagccggtccaacccgggcgcgtggctcatccttcgccccgcggccgatggcgcctggcagccctag

SEQ ID NO: 33058 - DNA, 449 bp, Zea mays
  Peptide Sequence Number=SeqID_74837
gaaggacttgatcctgctggcgaagacggggcccgggagaacggacgcgttcacgctacccattccacaagagctgctcagcaaccgccaggctgagcaggcttttttcaattacatgctctcgccaatgagacgggtccaggaagacgggcacttcatgctacccattccgcaggagctgctcagcaactgccaggccgagcagtctttcttcgcttgcttgctctcgccaatgatgttgatcgtggaccagtttgaggtgctcagatcaactattggtttgcgttattcagtggcgagtgttatcgatgctattgtggaagagaatggggaagcgaggaagtggtgcggtgttgtcgccagcagttatggcaggatcgccggtcaccaccgtctaagggaaactcacctccttgggagatttgttcccgatgcatgttttcagcaag

SEQ ID NO: 33059 - DNA, 411 bp, Zea mays
  Peptide Sequence Number=SeqID_74838
atgggcaacgagcagtacattggggagatcgaaggagcgattgggattgagaatgggaacacagggggaagcgaggaagtggtgcggtgttgtcgccagcagttatggcaggatcgccggtcaccaccgtctaagggaaactcacctccttgggagatttgttcccgatgcatgttttcagcaagacacattcctatgtcacctgctgatgtgtacatcactacaaacatgtgtagttacaataagaaagtaggcgtaaccgttgctcagggttcaaaagatgttggtgcttctcgaattattggcattgacattgactataaaaagtttgatgttggtgtggcttatatacttgcaattatgttcatctcttttcattgtcctcctttgttggtttttatcagctggtga

SEQ ID NO: 33060 - DNA, 852 bp, Zea mays
  Peptide Sequence Number=SeqID_74839
atgggcaacgagcagtacattggggagatcgaaggagcgattgggattgagaatgggaacacagggggaagcgaggaagtggtgcggtgttgtcgccagcagttatggcaggatcgccggtcaccaccgtctaagggaaactcacctccttgggagatttgttcccgatgcatgttttcagcaaggttgctcagggttcaaaagatgttggtgcttctcgaattattggcattgacattgactataaaaagtttgatgttggaaaccaccattaaagatcgaattcaggagggattgaagaggcaatgcaggttagagctgaacctttctggagaggactccgactcaatgttctataacatccaaatccctactactattaagaacaagagtatagacctgactggcctacctcatattgctctgcttcacagtgggaagaataagaagatccaatctactagtgacatctcggacgacgataagacaaaggggaatgaagatcacattgatcccttcaaccccaagaatatcaatcatctaacatcaattaaagagcttccatatgagctttttcaaaagattcagaccaaactcgatgttgatctaaaagctttccttaaaagttgcactaaggatcatcggaacaaggtcactcaattccttgagcctaacttcaatgattctattgcttctatatctattgcactagaggtaaatgataagctaaaatatgatgatgatcctttccctactcatgatgcaaatgctaagatgttgcaagatcatagaatgtttacgtctaataaccttatgattgttgttaatatggtcatgtcacgttttgattga

SEQ ID NO: 33061 - DNA, 435 bp, Zea mays
  Peptide Sequence Number=SeqID_74840
atgttcaagattctaccacggaagaataagaagatccaatctactagtgacatctcggacgacgataagacaaaggggaatgaagatcacattgatcccttcaaccccaagaatatcaatcatctaacatcaattaaagagcttccatatgagctttttcaaaagattcagaccaaactcgatgttgatctaaaagctttccttaaaagttgcactaaggatcatcggaacaaggtcactcaattccttgagcctaacttcaatgattctattgcttctatatctattgcactagaggtaaatgataagctaaaatatgatgatgatcctttccctactcatgatgcaaatgctaagatgttgcaagatcatagaatgtttacgtctaataaccttatgattgttgttaatatggtcatgtcacgttttgattga

SEQ ID NO: 33062 - DNA, 162 bp, Zea mays
  Peptide Sequence Number=SeqID_74841
atggcgatggcaggtgggcaggagcagcggtcacgttgtcagccaagcttacgtcccatccaggggcagcgagagaaccctctctcacgggaccgggaaagggggatacctcgaaaaggatccttctccgtgaaggaaacatgccccgagcctccctactga

SEQ ID NO: 33063 - DNA, 1302 bp, Zea mays
  Peptide Sequence Number=SeqID_74842
atggctgaaaggtaccaacttccacgaagttgcgttcctccaacgacaaggcggaaggactgcgggtgttccccatccgggggctcggaaggcggaaaggcacgatgcataagggagcgcgaagacatggtcgcctttcaagggggtcaccctccttttaaaggcaactctccctacttccgtccccagccgtcgcgagctgagtcttctccaacacgctccaaggtcctccccctatggcacgggggctgggtcccacgcgtcatgcaagctagcccagggcagaagaagccaaaccgccgcgcgcggtgcatgcaactgcccagcagttacaagcattcctccactttcgcccaggccagcgggcccacgcgtcatgcaaccggcacaccggttgctacgtgcaagcaactgcaccgccactcgcaccactaccacgcctcctcgaccgcggaaccagcgggcaggagcagcggtcacgtcgtcagccaagcttacgtccccatccaggggcagcgagagaaccctctctcacggcgtgaaagacggcgcgcccgtgttccgttcctcgaacggctcgcgcacgcgcaacgtccacctcgcgaaccactcgccccgacgcatttaactccgcggcggggacaggcgggcgcctctggcaggagaagcgaagcgacgctttcgcctttcgccataatgaccgcgtcaaaaaaggccccgagcctccctactgatcagaggttcaaaggctggcccctcggaggggttcaacagccgcctcagagcgcttgggttccgcacccactactggtcagaggttcgaaggccggcccctcggaagggttcaacggccgcctcaggccactcgggctccgcgcccactactgttcaggggttcgtaggctggccctcgaaggcgggaacgatcttgtaacggaatcccatcagagggaggcatcgagccctcagaccccgtcgaaaggggaccgggtccggcagatcacccgcagctcaccggagacaccatgttcggcgccctccgagggcaacatggcgcttccccccctcctccttgcggaaaggcgacgcaggggcgtatgtaaaaaagtcgagtttgtccgtgaccgtcctctcgccctgtgcagaggctcggaggctgctctcgcaaacccggctccggccaaaccgttgacagcgtcaacataccagcccgagaacttgggacccgaccgtgcacccgggctacggccagctcgcatgagggaacgaccagaccagccgaagcattgcgcgaggcattaa

SEQ ID NO: 33064 - DNA, 258 bp, Zea mays
  Peptide Sequence Number=SeqID_74843
atgtcgtcttcttcctcgtctgctgcaaacacgccgtcggccgatgcatcgtccgaggataccttgagcaacgtggcggcggaggagctacatccgggtgatacggtggagttcggcgtttcgcggatttcctcgaaaaggaaaattggacataagattgcacagtttggatcgtgcacgtttacaccgaggaccggaaagacttcgatggaagtcgtggagttagttccctgtgcccgcaataagtggggcaactag

SEQ ID NO: 33065 - DNA, 2145 bp, Zea mays
  Peptide Sequence Number=SeqID_74844
atgccgtcttcttcctcgtctgctgcaaatacgccgtcggccgacgcatcgtccgaggataccttgagcaacgtggcggcggaggagctacatccgggtgatacggtggagttcggcgtttcgcggatttcctcggtccgcattcaggatatgcagcagcttggatattttggcagcggagtggggcgtgtcccgggggcgaaggaggtcctgcagagatttgaggtccaggtccaccagctgacgtcgaatgtcgtggtggccctggcgaagtatgtctgggcggcgacttcgtatggtggtcagccttctgtggaggtcttcgccaaacattactgcgaagtcgaagaccacccagggctcctcgtggtcgtgatgtgctcccattattatgtagcgtacccgcaatttgatgtggcagaggatgatgaagacgaaggagcccttcggtgcgctgcccgcatgagtagcggtcgcgatttagttgaggaatttattgggtatggggtatggcccttggcacatggttgggcgttgggcgaagtatgccctcgcgagatgccctccttgggcgggcagtgggtgcgaagtccagccttcgtgttggatctgcatggccaggatcccgccgcattcgtgcgtgaagcggaagacggtgcggcgaggattgtggggcgctatgtgccgaggacaaagggttgcagagctgggatatccctaggtccaacccctcgggggaaggatgtcttcgcccgagctccgggagtcttcggcgcgaatgctggagaaacaccgggcggtcgtctggatcgtggatcctatgcgcgaggcgaaaaaggcgcggggagtgcgaaggctgctgcctctggcggtagcaaactggtgccggctgcgaaaccggccgcccccgggcatggcaaggcgtcggcgagtgcgaaggctgccgccgctggtgggagcaagccacccccgggtggcctcgagaaaggacaaaggccgcttttgccagcacgacgtatcgccgacttcggcacgaacatcagtgtcgacgattatcttgttgatgaggggcaactagctgttgtcccgcctccggtggtgaccacttcgccaatggcagtggtgggggcgaagggtgccgcgtgggactcgtgggccactttctgtgcgagcggcgagattctgtcggccgctgccgctaaggacgtggcgggctccatgtctcagcgactgagggaggcgttgcagcagctgaagcagacggccgacttcgccgacctcgtcgcgtcaggtgccttgactgcggacgttgctgccgaggtcgagcatctccgggcacatcatgcgaatgctgtgcgggagaagtcggctgcggaaagcaaaaaccgcaggctgtcggagaaggccgaagccaaagtagcgcgggcggagggcagtctcgcccaccaacgcgccgaggagctagaggcgaggttcaacgccctgcgcagccgcgtggacaaggccgagtcctcgacacgcgcggaggttgagcggacgcacgcacaattcgtggacgcgtaccatgagctgggtgcgtggactgctgacttcaaagtgcccggccaagaagcgggccttcgcttccttgaatggttgcaggaggagctgctggtgctcccgaccattgtgacaggtttcatgtccttcgcttccctcgtcacttgcgagggggccatgaatgctttgtcacgcgaggggtgcaggcattatgaggtcttcgaccaagcggacgacaattttgaatgtgaaatcttcaaggtcgaataccccgtggtgaaggagtcggtgggggcactctttgataggatgtggggtccgcacggtcgagaggctgtcagggagcggtccgaccgggcaatagagcagatggcgcatgccgaagatgtcaaggaccttgttggtctggacggcgcgctgcccgaggctgcggaggtcgatctggtgccgccctcgaatgccggtgaaggcccctcgccgacccctgcactcgctgcggccggcgaagaccccgcaccggctcctgtgccgacgagcgaaggcgccctgaaggcggtggccgagccggcagccgaggaccccacagccgcggccgggccttcgcag

SEQ ID NO: 33066 - DNA, 903 bp, Zea mays
  Peptide Sequence Number=SeqID_74845
atggagtatggatactacagaagattcattgaaggcttctccaaaatagtgaaaccccttacttcactgctggagaaagtggtagtggaggaaattccggtggatcttcctcgcattcgagtggtgcacggagtcatcttggaggatagctcggaggaacttctgcctatgcccaccctgttggcggagtcgctggccttcgcagctggattgtcagcttcagcaaggcctgcaccagcagttcaagctcctgcacccggaggcgatgactcggacgactctggggacgatgatgaagatgacgacgacgaagaagatgacaaggagaacgtcaacaaagaggctaacaatgtttgttcagcaggactacttcatggggtttgggcctgtcaccgaacattacacatcaatgttcgagacatggcacttccccaacctgctgcaagacgtgttgcatgcgttgggaacctacgttcgacccttgtacgagacaaggcaccgctatccacctatgctgcttcggtcagcgatgttgctaggtggactttgtggtctctcagccacacctactggcagcagctgcatgacatgaagtttaggcatcttcctctacatctgagtggaggtagccagaccagcatcgttccaggtggaactggtgaagatcacctcaacaccctagctggtgtactggcgggtcttaacacagacctggacagtgccaccctagatctctctagggtgcacttggagctggaggatgcccacgccaggattgcagccctagaagctcaatttcaaggaagggatccctctgaagcccaagtccctgccatggctttgtcccctccctgcaagaggattcgctatggggagcccagatccatcaccaagctactttga

SEQ ID NO: 33067 - DNA, 711 bp, Zea mays
  Peptide Sequence Number=SeqID_74846
atggcgaacgggccaaaaacggattttcggccacgaccgcgaaaacgggcacgtggaagggcacgggaccctcccgtggtccccccgcgtgagacgtggaagttcgggtccacccgtgagggaaaacggaactccccgaagtcctgggagggggtctcctcggccgagccccggaccccctcgcggcctagccgtggccggtcggcaccctaccgcgcccagctccggctggcgctgttggctgcctggccggccgtgcggctacgctggcgcatgagttgtcttggacccgtgactgcttggaggacccccgctgccgtgcggccgactcccggcgcccgtgtcccatcgctcgtgtgggcatcctatgcctgctgcgttgagaagtgcttgcgtgctgctacccgtcccacgggaagccgtgctcgatacacgttgccttcgtcgagctcaccccccggggtgcggctcgtcggctcgagagagcccgcggcgtttgcctcgtgccgccatcggcctatggccggcggcaccgaggacacctcgctggcgcttttggtctcggatgtggctcacgctgaaggccggagacgcgttggcgtcacgcgcccaagaatcgggtccgcccgaatgaacgacggccagcccggcacgacgcctccgcgcggaggctggcgctggcctgtctgcgaggacgtgctacctggttga

SEQ ID NO: 33068 - DNA, 1472 bp, Zea mays
  Peptide Sequence Number=SeqID_74847
atggcccacttggagctcccgattctgtggcacggctcaccgaagcagccgcgccgtcctacctatttaaagcgtgctccaactcgaacccttcacagaagatcagggtcggtcagcggtgcggctcgtgagggcctcccgctcgtcagcttccttgcacatctcaggccgttgcggcgcagcgccccgaggggcgcgccagaggcgcgcggataccgtccctgccgacgacggctgccgggggcgcctagggcccccgggctttggccgccggcgcgggcgacaacggtccacgccccgagccaatcggcggaccagcaggagccgttccgcatacggccggtgcgcgtcgccagcccccatccgcttccctcccggcaatttcaagcactctttgactctcttttcaaagtccttttcatctttccctcgcggtacttgttcgctatcggtctctcgcctgtatttagccttggacggagtttaccgcccgatttgggctgcattcccaaactacccgactcgttgacggcgcctcgtggtgcgacagggtccgggccggatagggctctcaccctcccaggcgtccctttccagagaacttgggcccggtccgtcgctgaggacgcctctccagactacaattcgggcggcgaggccgcccgattctcaagctgggctgctcccggttcgctcgccgttactaggggaatcctcggccgaatggccggccgcgcgccgggacgctgcaccgagaacaacttgatgtcgcccaccacgtgctgcgtccggcgcggttcgccggcagcccctgcttcggcccacctcgccctgcggcgcggggggccagacgccacgtccctcgccccgcgggggggtgttgggagtgtcttttggcgtgacgcccaggcagacgtgctctccgccagaaggcttcgggcgcaacttgcgttcaaaaactcgatggttcgcgggattctgcaattcacaccaggtatcgcattttgctacgttcttcaacgatgcgagagccgagatatccgttgccgagagtcgtgtcgattaaggtgtaaccgctgcccggggagcggaaggcgggccgaccgctccgcggggcaggaggtagtactggtgttccttggcgcccggggcgccgtgggttctttttcgcggccccccttccccgcgggagacaagcatatgactactggcaggatcaaccaggtagcacgtcctcgcagacaggccagcgccggcctccgcgcggaggcgtcgtgccgggctggccgtcgttcattcgggcggaccgattcttgggcgcgtgacgccaacgcgtctccggccttcagcgtgagccacatccgtgaccaaaagcgccagcgaggtgtcctcggtgccgccggccataggccgatggcggcacgaggcaaacaccgcgggcgctctcgagccgacgagccgcaccccggggg

SEQ ID NO: 33069 - DNA, 564 bp, Zea mays
  Peptide Sequence Number=SeqID_74848
atggcccaagggcacatttccctttcaatgtcgtatgagcacaatcatgttaactgttcgggagctttgagagcggtggaggaatctgcatgcgacgccgaggtggtgaggccgctctcaaagctcccaaacagcagcattgggctctacgattcctcgttcgagcgtgacgcgtgcggcgttgggtttgtcgctgagctatctggcgattacaaacacgtgactgttaatgatactattgagatgcttgagagaatggctcaccgtggtgcctgcggctgcgagaagaatacaggagatggtgccggcatcatggtcgctctaccacatgacttcttcaaagaggtcgcaaaggatgctgggattgagctacccccactaggcgagtatgctgttgcaatgttttttatgccaacagatgaaaagcgtcgtaagaaaggcaaagctgagtttaagaaggttgcagaatcactgggacatgtaatactcgggtggcgtctggttccgactgacaactcagacttgggtgaatctgcactcgagactgagccagtcattgagtag

SEQ ID NO: 33070 - DNA, 702 bp, Zea mays
  Peptide Sequence Number=SeqID_74849
atgacagttagagtagtgatgaggtaccttgttaacaagctgggccttgaggacgattcacagcatagattgactaagcacttgggcgagccgcacaaagcacaagccacctcacatttgttggagagtcgagagagctacagacagatggcgaactgtgggttgtgggagttggagaagcaagcaacgaactgttcgggagctttgagagcggggaaggaatctgcatgcgacgcggaggtggtgaggccgctctcaaagctcccaaacagcagcattgggctctacgattcctcgttcgagtgtgacgcgtgcggcgttgggtttgtcgctgagctatctggtgattacaaacacgtgactgttaatgatactattgagatgcttgagagaatggctcaccgtggtgcctgcggctgcgagaagaatacaggagatggtgccggcatcatggtcgctctaccacatgacttcttcaaagaggtcgcaaaggatgctgggattgagctacccccactaggcgagtatgctgttgcaatgttttttatgccaacagatgaaaagcgtcgtaagaaaggcaaagctgagtttaagaaggttgcagaatcactgggacatgtaatactcgggtggcgtctggttccgactgacaactcagacttgggtgaatctgcactcgagactgagccagtcattgagtag

SEQ ID NO: 33071 - DNA, 297 bp, Zea mays
  Peptide Sequence Number=SeqID_74850
atggcgagagtaacgtgtaccaaccaggccaatggctggacggtggagtgttgtgctctcgggtcgcgtgaacctgttctgaatttatttccgctgcaaatgttggtgtgtgatttgtgcttacttaatcctgcgatcttggcgccgtctgaggtctttgagacaaggacaggtgcatgtgggcccgataacttgggaggttctgcgacaaagatgaggataaggctcaagaagaagaagatgaagatcaagaagatgagccacctcaggaggaagacattgatcaaggagagatga

SEQ ID NO: 33072 - DNA, 213 bp, Zea mays
  Peptide Sequence Number=SeqID_74851
atggcgggagtaacatgtgcccacctggcaagtggctggatggtggggtactatgctctcgggtcacaatttccgctgcaaatgttggtgtgtgatttgtgtttacttgttcctgccatcttggcgccgtctgaggtctttgagacaaggacagctacatgtgggcccgataacttgggaggttctgcgacagctggtaagaaggtacactaa

SEQ ID NO: 33073 - DNA, 1011 bp, Zea mays
  Peptide Sequence Number=SeqID_74852
atggcacttcctatcgatgtggtcggtctgcgccctaggttgggcgatgtggaggctcctccgaggtcggggtcaagtctgtcttccgtggccgtggtcgagtccgagcccctgggtcgggcgaggcggagaccgtcggctgaggccagggctgagtccgagccctggggtcgggcgaagcggagttcgtcgtcttctagggctgagcccaagtccgagccctgggtcgggcggagcggagttcgtcgtcttctggggctgggcccaagtccgagccttgggtcgggcggagcggagttcgccgtcttccagggcttagcccaacccgagtccgagccctgggtcgggcggagcggagttcgccgtcttccggggcttagccccagtccgagccctgggtcgggcggagcggagttcgccgtcttccggggcttagcccaagggcttagcccgagtccgagccctgggtcgggcggagcggagcttcctatggtgcctgaggtcgagcctgactgtctgtcagcctcactctgtcaagtggcactgcagtcggccacctttgcattaaatgctcctgcgatttggtcggtcggagcggcgatttggtcagggttgcttcttggcgaagacagggcctcgggcaagccggaactttgtgctgatgggggttaccagctgagaattaggagccttgaggagccgggtttgcgagagcagcccccgagcctctgcacagggcgagaggacgatcagggacagactcgacttttttacatatgcccctgcgtcgcctttccgcaaggaggaggggggaaagcgccatgttgccctcggtgggcgccgaacatggtgtctccggtgagctgctggcgggtaatccgagcggacgtccgtgccccatttgctaggggtcggctagaggcccagaggcgcgcccaaaagtacctgcgggtgatctaccggacctggtcccctgtcgacggggtccgagggctcgatgcctccctctga

SEQ ID NO: 33074 - DNA, 620 bp, Zea mays
  Peptide Sequence Number=SeqID_74853
cgattctagagattcgtcttaaacggggccgcccgatctgggacggacggtggggatcgggtggccggcctgggcttctcctacggctagctggggcggcggcgctcgtccccgcggcggagggctcgccggagacgaggggcacgggcgactggcggggctctggggcaatccgagtggtcggggaggtcggggagggcacggggactccattggtggggtctgggtcggggcagaggcgccggaggggggcggttcacggcggggcggctcggcggcggggttactctactccggcgagcaatcaaacgcaacagagagcaaaacaaagggcgataggggctggagaggtccgttacctcaaggcgggctccggggactcctcggcggcgacggggacgcgacgggaactcgggtcgacggtggcggctgcacggcggacgacgggtgagcgcgggcagagagaaatagggagggggagagggaattggggcgcgttccgggttgcggacgtcggggcggagctcaccggggctaagggcgcggcggagctccaacggcgacgaggaaccgagctcgggacggcggggttatggcggcggcgctctgcgtgcgcgtag

SEQ ID NO: 33075 - DNA, 1626 bp, Zea mays
  Peptide Sequence Number=SeqID_74854
gcggccaggattaggtttggcctgattaaaacggggccgcccgatctgggacggacggtggggatcgggtggccggcctgggcttctcctacggctagctggggcggcggcgctcgtccccgcggcggagggctcgccggagacgaggggcacgggcgactggcagggctctggggcaatccgagtggtcggggaggtcggggagggcacggggactccattggtggggtctgggtcggggcagaggcgccggaggggggcggttcacggcggggcggctcggcgccggggttactctactccggcgagcaatcaaacgcaacagagagcaaaacaaaggcgataggggctggagaggtccgttacctcaaggcgggctccggggactcctcggcggcgacggggacgcgacgggaacccgggtcgacggtggcggctgcacggcggacgacgggtgagtgcgggcagagagaaatagggagggggagagggaattggggcgcgttccgggttgcggacgtcggggcggagctcaccggggctaagggcgcggcggagctccaacggcgacgaggaaccgagctcgggacggcggggttatggcggcggcgctctgcgtgcgcgcagcgagggggagagagggtctactggggcgcaaatgggggagggggtgagggcgagtggggttcggggctcaagtggccaggggcgaggtggggcgagttccacgcgcgacgtgggcgcggggaaggcgggcgcgagcagctcgggcggcggttacgcgaggaagacggggctgacagcccgggcccgcgagcagagagagagagcgagggagcgagcgcgcgcggggaaagcggcagcgccgacaggtggggccgggcgagcagtgagagagggaggcggccgtcacgggctgagtcttctctagcacgctccaaggtcctccccctacggcacgggggctgggcccccacgcgtcatgcaagccggcccagggcggaagaagccaaaccgccgcgcgcggtgcatgcaaccgtccagcggttgcaaatgtccctccactttcgcccagaccagcgggtgaaagggcgggcagccatgcaggcggcatgcaaccgcgccaagtgggcgcacctctccgacttccagcgcgcccagcatggaagcccaggcccaagcgtcatgcaaccggtgcaccggatgctacgtgcgagcaactgcaccgccactcgtgccactgccacgcctcctcgactgcggaaccagtaccgcgactcgaggcaaccctacgcacgacccagcagcgccaacctggcgcgatggagaagcaagcgacgcttcaccttcaccataatgaccgcgtcaaaagaggctccgagcctccctactgatcagaggttcgaaggctggcccctcgaagggttcgacaaccgcctcagagcgcgtgggctccacacccactactggtcagaggctggccctcgaagggttcacaaccgcctcagacacagagcgagggatgaccatgggtacgttcgatacataaccaaggctcgtgctgcgctcccgagatcacccgcaggtacttttgggcgcgcctctgggcctctagccgacccctag

SEQ ID NO: 33076 - DNA, 360 bp, Zea mays
  Peptide Sequence Number=SeqID_74855
atgcatgcggcatgcaaccgcgccaagtgggcgcacttctccgacttccaacacgcccagcatggaggcccaggcccacgtgtcatgcaaccggcgtgccggatgctgcgtgcgagcaactacaccgccacccgcatcactgccacgccacatcgactgcggaaccagtaccgcgactcgaggcaaccctacgcacgacccagcagcgccagcctggcgcgacggcggcgcctctggcaggagaagcaagcgacgcttcgccttcgccataatgaccgcgtcaaaaaaggttcgaaggccggccccccagaagggttcaacgaccgcctcaggctactcgggctccgcgcccactactga

SEQ ID NO: 33077 - DNA, 555 bp, Zea mays
  Peptide Sequence Number=SeqID_74856
atggtggtgacaggcgggcagaagcagcggtcacgtcgtcagccaagctcacgtcccatccaggggcagcgggggagccctctctcacggcgtgaagacggcgcgctcgtgatccgttcctcgaacggctcgcacacgcgcaacgaccgcctcgcgaaccgctcaccccgtcgcattaactccgcggcaggacaggcggcgcctcaggcggagaagcaagcgacgcttcgccttcgccataatgaccgcgtcaaaaaaaggctcgggctacgctcccgaggtaccctaggacatttccgagaccagcgggagcgatcttgtaacggaatcccatcagagggaggcatcgagccctcggaccccgtcaaaggagaccgggtccggcagatcacccgcagaggctcgggggctgctctcgcgaacccggctccggccaaaccgttgacagcgtcaacataccagcccgagaacttgggacccgaccgtgcactcgggctacggccagctcgcatgagggaacaactaggccagccgaagtgttgcgaagcgcactaa

SEQ ID NO: 33078 - DNA, 672 bp, Zea mays
  Peptide Sequence Number=SeqID_74857
atgccgcatgagggaacgatcaaaccggtcgaggcatcacgaaaagcattcagacctcagaggagtcaaaccactcctccgaggcctcgggggctatacccggcgggtgcgctcgcgtgcacccaccagaacaaggcaaaaaccgagaaaggccggtcccctcaccgaaaatgcggcaaaagcctccaagcgagtaccaacactcccttcgaggctcgggggctactgtcgggtaccataattaggggtacccccaatgctcctaatcatggctggaaaacagcgccgctcgccctgctccgactaccgtgtcaaccacccaggccaagactgacaacaagtcacgatcaaccaccgagttcggcctcgggcacaacaggaagctccgcctcgcccgacctcaggctccggcctcgggaggaggtttccgcctcgcccgacctcaggctccggcctcgggaggatgtctccgcctcgcccgacctcaggctccggcctcaggaggaggtctccgcctcgcccgacctcaggctccggcctcgaccccggcctcgggaggaatcgcgtcctcgtccgaccccggcctcggcctcaagagaagtctccgcctcgcccgaccttggactcggaccgaccgcgccaacaggggatacatcattaccctattcctag

SEQ ID NO: 33079 - DNA, 378 bp, Zea mays
  Peptide Sequence Number=SeqID_74858
atgaggtggaaatccccatccccatctccattcttggaaaacagcgccgctcgccctgctccgactaccgtgtcaaccacccaggccaagactgacaacaagtcacgatcaaccaccgagtttgacctcgggcgcaacaggaagctccgcctcgcccgacctcaggctccggcctcgggaggaggtttccgcctcgcccgacctcaggctccggcctcggctccggccttgggaggaggtctccgcctcgcccgacctcaggctccggcctcgaccccggcctcgggaggaatcacgtcctcgcccgaccccggtctcggcctcaagagaagtctctgcctcgcccgaccttgggcgcggaccgactgtgccaactga

SEQ ID NO: 33080 - DNA, 720 bp, Zea mays
  Peptide Sequence Number=SeqID_74859
atgtcaccaggtcattgggttccgaccgttggagcttctgacaggtgggccaccggacagtctagtggtgcaccggacagacgaccgttggcgcagatagctgttgctccactggcacaccggacagtctggtgctacaccagacagtccgcacagcccctccgcgtcgtcgggctcatcggcacgctgctcgttcacacttcacgcgtccgcgacgtcgtcacatgtctcctcgccagcagtgaacgcccagaagaccggggggtccctgggccgacgagtgtcgtcgcgtgccccagcccagatgggtcgagcgcgagggcgagcgcgaagggggagagcgaggcggccggagaccggcgtgagagaggtgggaattccgcggccttcgtgctgagagccgtcgtcgtcacggagtacgtggggcgccatcattgcctatctggcggagctagccagatgggacgtcggtcttgtttcctgcggcccgagtcagctcggggtagggtgatgatggcgcctcctgttgacgtggctggcctgcgccctaggttgggcgatgtggaggctcctccgaagccgaggtcgagtctgtcttccgtggccgaggccgagtccgagcccctgggtcgggcgaggcggaggtcgtcggctgaggccagggcggagtccgagtcctggggtcgggcgaagcggagttcgtcgtcttccgggacttag

SEQ ID NO: 33081 - DNA, 348 bp, Zea mays
  Peptide Sequence Number=SeqID_74860
atggcactcgccactctagacatcgatattatgttcgtcgtcgcgtcgtcaccgtcaacctgctcggatccatgcctcgccatcgactctgacgtcgcgacgttcctgtgccgtgttggttgtgcgccaaccgctcaacaagatgtgttgttggcctcctcgccgagcactgtattgccatggcgcggatgcccgcattcgccccatcttcgcgtcttctggatgtcagcacaacccctccgcgtcgtcgggctcatcggcacgctgcttgtttatatttcacgcgtccgcgacgtcgtcacatgtctcctcgccagcagtgaacgcccaggagagaaaatcccataa

SEQ ID NO: 33082 - DNA, 231 bp, Zea mays
  Peptide Sequence Number=SeqID_74861
atggcgatctggccaaggttgcttcttcgtgaagcctgcccgagctgggcctcgggcgagtcgaagctgagattaggagtcttgggggtacccctaattatggtccccgacacccgtgcagaatgggaatcacagcttgcgggtaaagtgtgcaacctctgcagagtgttagaaactggtatatcagccgtgctcacgattatgagtagccttgggatcctcttcgattag

SEQ ID NO: 33083 - DNA, 576 bp, Zea mays
  Peptide Sequence Number=SeqID_74862
atggcccccagccccttggacaagggcaaaggggctgcaagcagtgcctccgccctaggtagctccgtgggggcttcttcctccgctgctcccaaggccacgcctcctctgccagataccaggcccaccgacgggtctggttctcagcagcagggatctgctgagggtggtgctggcggtccgctcctagctgctgctaggacagcgccactagcctcccatgccctagctggggatccaacgacagtggcgtcagcgtcaggtggcgtcgcagcggcggagaaggtcccagctgggggatctgtgcccactcccaacactggggtgacacagggggcgctgtcacacccggttttggaaggtaaaccgtatgcgaaccataggatcccaaggctgctcataaccgcgagcatggctgatataccagtttctaacactctgcagaggttgcacactttacccacaagctgtgattcccattctgcccgaggttctagcctccccattgataactaccaaggtgacctaacagggtctcactacgtagcctttacaaagatttcccagaggtcatag

SEQ ID NO: 33084 - DNA, 249 bp, Zea mays
  Peptide Sequence Number=SeqID_74863
atgagtcaagcgtttgaacgtactaagcacatgccgagaaatatggtaaatcgtggactttacccctcacgcgacctgagacgtggtctcccattccggttatggtgggtacaagtgcggtcactgcacgacggcagtcggggttctctggaggacatggttgctggagtgacttggccgtccatcttgccaccgggttggactgtcgagtgggaccctgcctcggctgaggaggagcatgaggagtga

SEQ ID NO: 33085 - DNA, 303 bp, Zea mays
  Peptide Sequence Number=SeqID_74864
atggggattggttgtccacgggataaaaattggataaggattaagtgtgtaccgtggggtcaagcgtttgaacgtactaagcacatgccgagaaatatggtaaatcgtagactttacccctcacgcgacctgagacgtggtctcccattccggttgtggtgggtacaagtgcggtcactgcacgacggcagtcggggttctctggaggaaatggttgctggagtgacttggccgtccatcttgccaccgggttggactgtcgagtgggaccctacctcggctgaggaggagcatgaggagtga

SEQ ID NO: 33086 - DNA, 1017 bp, Zea mays
  Peptide Sequence Number=SeqID_74865
atggaacgtccggcggaggtggtggtggtgggaagcggcggtgcccctggacctgtggtcgaacaggtgggggctattatggaggtgctcgcgctgaccgtgtcgacaaccatgatggccgctggatccggcgccctcccacctagctacgaagaatcgagagaccggagcccaagcggccaaacaaacaattgttggaccaaatttgttggaaccgtctactcctctgccggaatcgcgctgcaagaaaagagggagaaacgaatagctgagactccaatccaacacatgaaaggagatgaaggcaaccaagaaccaacaagcaagaggaagggcacgactaccaaactaacgccaggaacccaatcaatcaatcaatcggcagttgaagctcaagccgagatcaatgattgggtgggggaaagagaggagaggggaagcggacgaggcaaggagataaggagggaggaggagatctgtggtaacagaaccaacaaagaagaaccgaatcacgaaccgcccgaaaagatgcaagaacatagccgctggagaacagcaaaggttgctcacgattttcgctccgctcctttccgagccgcggcgatccggcccccgcgacggcttcttgatacgataggaccctgcttggggtgtgatttctgggtagattccctagggtttgagcctggatggagatggctactgggtactactggctactgggtaccaccatgccgcgcttgggagaggtcagcgccagcgagcggtccacggcgacgacgaaagcgcgagggggagctgaatggagattcgcagcggatgacgggatctaggaggagggcattgatggaggcggatgacgggatctgggagtggcaattgcggcttgcgggctggatggcggggtgcgggctggatggcgggcgggaatgcaggtcgcggcgttcgcggcggccgcggcgggcgggggtgcaggtcgcggcgtttgcggcggccgcggcgggcgggcttaggtag

SEQ ID NO: 33087 - DNA, 704 bp, Zea mays
  Peptide Sequence Number=SeqID_74866
atgacggcgtggggctgccagcgccctgaccggccaatcgacgaggcgcgacgacggctgcctggtggcccgagccacgaggcggcggccggcgaaggcggtgggcaggggtcggcaggcgacgacatggaacgtccggcggaggtggtggtggtgggaagcggcggtgcccctggacctgtggtcgaacaggtgggggctattatggaggtgctcgcgctgaccgtgtcgacaaccatgatggccgctggatccggcgccctcccacctagctacgaagaatcgagagaccggagcccaagcggccaaacaaacaattgttggaccaaatttgttggaaccgtctactcctctgccggaatcgcgctgcaagaaaagagggagaaacgaatagctgagactccaatccaacacatgaaaggagatgaaggcaaccaagaaccaacaagcaagaggaagggcacgactaccaaactaacgccaggaacccaatcaatcaatcaatcggcagttgaagctcaagccgagatcaatgattgggtgggggaaagagaggagaggggaagcggacgaggcaaggagataaggagggaggaggaggtaccagcggcggatagggcgatcggacggccgcggaggcgtcgctgggtcgcggaggaacaggaggttgcttcggccgtggcggaattgtggcttgtgggcgg

SEQ ID NO: 33088 - DNA, 231 bp, Zea mays
  Peptide Sequence Number=SeqID_74867
atgaagtattatttgaggttggtattgtatctgaaggtaaatgaagtattatttgaggttggtattgtatctgaagtttttgtcgtgacctatgggtccgaccgtaccgggtacaatttagcatcgtacgttgcccgaggaggggtacgatgcggcttcatacccttagaggtgcttgttgctcatcaaggggagtgggaagtagcagcacatccaccttcactctcataa

SEQ ID NO: 33089 - DNA, 372 bp, Zea mays
  Peptide Sequence Number=SeqID_74868
atggtccgaccgtaccggtacaacttagcatcgtacgttgcccgaggaggggtacgatacggcttcatacccttagagatgatgtggttttataccctcagagaccatggtacccaacaattcaacaactaccaaaacttcatcaccattctgaccgatcacatctatagtggccttatccggatgagttggatcgatgacgtcatgacaaggatcctacgcatcaaggtcaccatgcgcctattcgggaacctcatgctagaccctagcttcgccgaccagctagggaagcaggagcacaagaactggagtgggaggggtggactgggagcggtgcgtaagtctgctcctcaagaacaacaagtcaggtga

SEQ ID NO: 33090 - DNA, 720 bp, Zea mays
  Peptide Sequence Number=SeqID_74869
atgacgacggtggtcccgttcatggagtcggtctacgaccgtgttcaaagtccatggaagaggaggggaggctcgggcggcggagggaggatacagtcagatttgttccagagcacagtggggttggtggccgtcgtcgtcatgggagggctgttgttgtcggaggctatgatcagatttgtcccggagcgcggcggtgtcggtggccgtcgtcgtcttgggcgggctgttgctgtcgtcgcaaactggaagaaggctcgagtcgtcgaaaggtacaactggttcttcacatgtcttttccccaaccatagtggggtggtcatcctatctctgccacaccatccaacccgatccactgttgtcggtcggaagcttggcgatcgccaagccgttctgcacctcgcgctcggcgccatcatgtcggtcaccatcgacatgggtcgccaagccgttctgcacctcgcgctcggcgccatcatgtcggtcaccatcgacatggggttccttgtcgagtcccaacctgaggaggagctgcccgagaggctgttcggcgccatgcgtatcgcgcagatggagatgggcacaaccggtataatacatgagcaagtaccttcgaacttggacctttcagacttgagtcaaaatcacagtgtgaagaagcacaagggatacgaaggatggaacgaagccgaagctgtgcgcaagggagcttcggcgtga

SEQ ID NO: 33091 - DNA, 144 bp, Zea mays
  Peptide Sequence Number=SeqID_74870
atggcaagaaagcgtgccaaatgtgctcgcggtaccctcagacttggacccttcggacttaagtcaaaatcacagtgtgaagaagcacaagggaacgaaggatggaacagagccgaagctgtgcgcaagggagcttcggcatga

SEQ ID NO: 33092 - DNA, 261 bp, Zea mays
  Peptide Sequence Number=SeqID_74871
atgccgaagctcttttgcgcacagcttcggctctgttccatccttcgtttcccttgtgcttcttcacactgtgattttgactcaagtccgaagggtccaagtccgaagctctacaagtttgctatattgaccaaaagcaaaatcctcaagaattctgagatatggggttccaaaattgaccgcattcagctgaattcagacttaggcatatggggtttcatggggtaccttttgcaaataattaaaaacttcatcatttga

SEQ ID NO: 33093 - DNA, 420 bp, Zea mays
  Peptide Sequence Number=SeqID_74872
atgccgaagctcccttgcgcacagcttcggctctgttccatccttcgtttcccttgtgcttattcatactgtgattttgactcaagtccgaagggtccaagtccgaagcaatgtgctggaattaatgtgggcaacaagacattgaatatggtgggtggagggggtataaattgccctcacccaccaggccaccaactagctgttacgagcacttttctgcgcatgggcgcaatggacagtccgatgctttcaaaccctgataagatcgcctttgtccccatctctggttttgagggtgacaacatgattgagaggtccaccaaccttgactggtacaaaggcccaacgctgctcgaggctcttgaccagatcactgagcccaagagaccttcggacaagcccccgcgtctccccctctag

SEQ ID NO: 33094 - DNA, 114 bp, Zea mays
  Peptide Sequence Number=SeqID_74873
atgccgaagctcccttgcgcacagcttcggctctgttccatccttcgtttcccttgtgcgtcttcatactgtgattttgactcaagtccgaaggtgataggagttgtgtgctaa

SEQ ID NO: 33095 - DNA, 171 bp, Zea mays
  Peptide Sequence Number=SeqID_74874
atgtcggtagggaaggttttatgcatagtcacaacaagaagtacaaccgccttggtggtaccttcgaacttggacctttcagacttgagtcaaaatcacagtgtgaagaagcacaagggatacgaaggatggaacaaagccaaagctgtgcgcaagggagcttcggcgtga

SEQ ID NO: 33096 - DNA, 210 bp, Zea mays
  Peptide Sequence Number=SeqID_74875
atggcaagaaagcgtgccaaatgtgctcgcgggtgtagaagcacaagggaaacgaaggatggaacagagccgaagctgtgcgcaagggagcttcggcatgatgacagaaaaaaggaaaccgacttaaagggcttaatacttagcaacaccttaagggcacaaaagaatgctgaagatgagagctgcactattgctctcaacaacctttga

SEQ ID NO: 33097 - DNA, 348 bp, Zea mays
  Peptide Sequence Number=SeqID_74876
atggggctgatggacacattcggttggcgaagcgaatggagacatacgggcaggagatggttaggaagtatggagaagactacgattggtgaggagcgcctaccatcgacgctgaagttgtgcattctattggacgaaaggcgcatggacggtgtcatgggccacaacacgccaccacccatcataccagcaccaggaggagcttatgtaggggagggagctactctaggagagaattcaaacccgttacatgacttcgtcaacgagttttcgcttctggaggtagtggacacaactccaacaaccccgatatgtggagttagctttgtgccgaattgtgcgttgtaa

SEQ ID NO: 33098 - DNA, 1233 bp, Zea mays
  Peptide Sequence Number=SeqID_74877
atggggccccgtgctcaggctcatcccgttcctcgcaccggcatgaatagaggacccgaagatttccgcgtggatgtcgtgtggccgttccaatcacctagccaagatcccccacctagcaatccgttgagctcgaactcagcccatggtataaaaccgtgccctcctagtcccctcgggcattcgtaccatgctaaacgacagtcgacggctatggaaaatgcctcacctgcctccgtgggggtgaagacggcgccagaatcggaatgcgatgggagtgacgactatcgtgacctccacgacgtacgcttcgacctggacacgggtgcggcccgagccagcggggaaggaggattcaccatctctttcttgctctacctatgcgtctctgccaggccgtcctcggtgatcctccaccagatcacagtaggagatgacaccaaattgacatttcctgcttcgggggcgagctcggcaggacgcagtgaggagctcggctacgcgcacttggggttgacgaggccgacaccgttgctgacgatcttgtcgacggcaaggtccggaactcgttgcaggtggcggctgggcgcggctgggaggaagacggccatggagacgagcaagaaaatcaaggagcaggcatgccatggggaggcgcgcggccaacagagcaccggaagagagaacgacgcggggaagagagagattgcgcggcggctggagattagagagaggagaacgctgctgggggagcgaagcgccatggcagagatggccaacggccgagctcggggactggggaaacgacgtcggccggaggtcagacaggcgcgcgtgatgcgcgcatggccatggacaaccgatagagagaagctgcgcgagctagagggaaatggagaggagagaggaggaagtggctgcctgcggcgaggaggctccaggggcgctgtgacaccccagtgtcactcagggggcagaggcaacgggaacacgtgttcgaccgcggctgacacccctggttcacgcccgttcgcgcaccgcgcctcccagtgcacgcccgcgcgcactcgccggtccaggcgcgccccacttcgccccgcactcaccctcaccggccagccactttcccttagctccggcgagctcaattccgcccgccattgccgccagagcttcggccaccgtggccagcccactccagccatcctctgggcaagccagtgcttcgcctag

SEQ ID NO: 33099 - DNA, 360 bp, Zea mays
  Peptide Sequence Number=SeqID_74878
atgggcagaggcaacgggaacacgtgttcgaccgtggctgacacccctggttcacgcccgttcgcgcaccgcgcctcccagccggactcctcgccgccgacgagcatccccgcctacgcgcgtggaccgaccgactccggccatctccgacggcgacccgcacaccgttgtgatccccgagacctcccctacgtcctcgaccacttcaccggagcaatctcgccgccggagcaggcttcagaggcatgccccgagcaaggacctgtccaagaggaggaccaggagcaggcttcagaggctgctattgaggatctccccgcagccccagcaattgaaggcaagccccggttttatgcataa

SEQ ID NO: 33100 - DNA, 609 bp, Zea mays
  Peptide Sequence Number=SeqID_74879
atggcggaagagcgccaacccccacgaggtcgcgcccctccaacagcagcaagaagaagacaagaccggcagcactaccgcgctggaaacagagagcgcgagctccccggcggcagatttccccactcgcgcccgaagcatcacgggcaaggtctcccccgatgcgcaccaggattcccattatatgacatgggggccaggcctcacacgtcgtgcaagctggcccgaagtgcggagaaggcgaatcgtcgcatagggagcgtgcaaccgccctgcggttacacgccccttccaccttcgccgcaatcagcggtcgagaaggcgaatcgtcgcacagggagcatgcaaccatcctgcggttactcgcccttccatcttcaccacaaccagcgatcaaggaggcgaaccgccgcacaaggagcatgcaaccgccccacggttgcgcgctctctcagcttcgctacaaccggtggtccaacctctggcatgggggcccaggcccacatgtcatacacccgacgcgtcggttcctgggtgcatgaaagttgcaccgccgctcgcgccaataccgcgcctcctcgaggccgtcgcagaggactaagaagataa

SEQ ID NO: 33101 - DNA, 600 bp, Zea mays
  Peptide Sequence Number=SeqID_74880
atggcggaagagcgccaacccccacgaggtcgcgcccctccaacagcagcaagaagaagacaagaccggcagcactaccgcgctggaaacagagagcgcgagctccccggcggcagatttccccactcgcgcccgaagcatcacgggcaaggtctcccccgatgcgcaccaggattcccattatatgacatgggggccaggcctcacacgtcgtgcaagctggcccgaagtgcggagaaggcgaatcgtcgcatagggagcgtgcaaccgccctgcggttacacgcccttccaccttcgccgcaatcagcggtcgagaaggcgaatcgtcgcacagggagcatgcaaccatcctgcggttactcgcccttccatcttcaccacaaccagcgatcaaggaggcgaaccgccgcacaaggagcatgcaaccgccccacggttgcgcgctctctcagcttcgctacaaccggtggtccaacctctggcatgggggcccaggcccacatgtcatacacccgacgcgtcggttcctgggtgcatgaaagttgcaccgccgctcgcgccaataccgcgcctcctcgaggccgtcgcagaggactaa

SEQ ID NO: 33102 - DNA, 578 bp, Zea mays
  Peptide Sequence Number=SeqID_74881
aacagtccaatccaagtcaaattgtgggaaatcctccaaatgttgacagtcaaactttgatcaatgaaacagtagaggtggattctgatgacgatgactttatgccagctattaagaagcgtaatgtttctggaagccatacaagagttctaaggaaagttgtgacaaagaggataaaagcggaggatcttccccgacagtggctcaatatcaggtgcaacccacaagatgtcattgcaagcattcacatattgaatgacagacaacgtcatgccataagacgtaaagggttctctaacattcttgatatgacagtagatgcgctgtgtagtagatcccaccttcgatggttgatggataagcttgaccacaaggacatgaccattcatcctggtctaggaaaggaattaaaaatcacaaaggacactatgcatcttatccttggtgtatcaaatcatggcggtggaaaaccattggggattgatgaagcagttgcagcaagtaatttgagggcagagcttggtttggctaaagacgagttcaatgtgacattgctacaggatcgtttaaggaaatga

SEQ ID NO: 33103 - DNA, 1053 bp, Zea mays
  Peptide Sequence Number=SeqID_74882
atgccaatgtttatgatgccatgctcacgttttagttacagtaataccaggggtgttacaaccgcaaaaccccaactctctccgcgtgactccaggattctccaccgactccgccctccccgacgactccgctccatccgtcgctcgctgtcgatccagtcgcaatcggcagtagagcgatgcctccttgttgtccccaatccgcgcaccactatcctcactgctgcaacaggagacgggagtccagactggagaaaacccagtttctccaccgacgcgactgcttccccattcttcgtcgttgttccatatttctccgctgtcaacaggtgtcgctctagcttcagtccgacggtagccctcccccaaccatctatggtggtttcatcatcgacatcccccaacaacgtccttgaggttcttccgaaccctagcgagacgcattacccgggatcgttgtcgaccgtaaacaaagaacagtccaatccaagtcaaattgtgggaaatcctccaaatgttgacagtcaaactttgatcaatgaaacagtagaggtggattctgatgacgatgactttatgccagctattaagaagcgtaatgtttctggaagccatacaagagttctaaggaaagttgtgacaaagaggataaaagcggaggatcttccccgacagtggctcaatatcaggtgcaacccacaagatgtcattgcaagcattcacatattgaatgacagacaacgtcatgccataagacgtaaagggttctctaacattcttgatatgacagtagatgcgctgtgtagtagatcccaccttcgatggttgatggataagcttgaccacaaggacatgaccattcatcctggtctaggaaaggaattaaaaatcacaaaggacactatgcatcttatccttggtgtatcaaatcatggcggtggaaaaccattggggattgatgaagcagttgcagcaagtaatttgagggcagagcttggtttggctaaagacgagttcaatgtgacattgctacaggatcgtttaaggaaatga

SEQ ID NO: 33104 - DNA, 534 bp, Zea mays
  Peptide Sequence Number=SeqID_74883
atgtcgggaaatatggtaaccggtacactacatgatatggttgatggtgtgacctgcccttccaccctgccaccagcacttacatctaaccctctttcacaattgacttcacccaccctcaccaatggaggagacactcgcttcagttttgactacctttcccacaagggctttccatctatcttatgggaggtgctctgctccaccggataccctacaccccctctatatacggtgcagcctaggtggtgttcccttgattccgagactgtcgggttcagggcggacgacaccactgaggccacagtgttaaaagccatgacaaccttctacagatatcatcccctagagatgatgatgcacccacttggactcttcctcgccgagaagagggatgacccaatgtggtgcaacagagctacaaagatcaccctcgacaaccgggaggacttcgtagtcgatttgtcgtcgaaattggtggaaaaagacctacaagtggaacagatgaaccagtgcatcatgactctagaatag

SEQ ID NO: 33105 - DNA, 534 bp, Zea mays
  Peptide Sequence Number=SeqID_74884
atgtcgggaaatatggtaaccggtacactacatgatatggttgatggtgtgacctgcccttccaccctgccaccagcacttacatctaaccctctttcacaattgacttcacccaccctcaccaatggaggagacactcgcttcagttttgactacctttcccacaagggctttccatctatcttatgggaggtgctctgctccaccggataccctacaccccctctatatacggtgcagcctatgtggtgttcccttgattccgagactgtcgggttcagggcggacgacaccactgaggccacagtgttaaaagccatgacaaccttctacagatatcatcccctagagatgatgatgcacccacttggactcttcctcgccgagaagagggatgacccaatgtggtgcaacagagctacaaagatcaccctcgacaaccgggaggacttcgtagtcgatttgtcgtcgaaattggtggaaaaagacctacaagtggaacagatgaaccagtgcatcatgactctagaatag

SEQ ID NO: 33106 - DNA, 300 bp, Zea mays
  Peptide Sequence Number=SeqID_74885
atgggcttaagcctaataatactccagcttcagaaatattgtaagaagtcaagctgtctcaagaaatactgtgaacgctatcagaaaaatgaagtcagcaaggaatacttcttaaaaactgtaaggaatatagttgtgataaattgcttaagcaagctgcttcacaatatcaaatgcaggtctaagaaaatggttcttgtcattgtgcatgatgattatatccttgagaagggaagactacacgaagaagaagcatggtgttctttcagcaggtggcttctattgaacaatgcattgtaa

SEQ ID NO: 33107 - DNA, 405 bp, Zea mays
  Peptide Sequence Number=SeqID_74886
atgacggtcatgcgattgacccatggttgtttcagtctgacagtaaggatgagcaggcgaggattgaggcgctgggactgggatgcaagaatccaacacaagaccagcaggcaatggatagaacccacacacacttggttaaacaaaggaggtctaagaaaatggttcttgtcattgtgcatgatgattacatccttgagaagggaagactacacgaagaagaagcatggtgttctttcagcagggtttattggtgcagttattttggttattgattgttggctggcttttgcctactttctaggatttcttgctaccctgaggggtgcatggggtgtaggccctaattacctgaagttcccatctattctttttgctctttgtttctactttgtaaggctataa

SEQ ID NO: 33108 - DNA, 528 bp, Zea mays
  Peptide Sequence Number=SeqID_74887
atgaccggcaactgccgcgggccctcctccgccttctgcctcctctacaagttattattcaccatgaagctcatcgtcaaacagacgcacgacctgctcaagcaccaggactccccctacatcagagctattgggaaagatttcagccagaaaaatgaagtcagcaaggaatacttcttaaaaactgtaaggaatatagttgtgataaattgcttaagcaagctgcttcacaatatcaaatgcaggtctaagaaaatggttcttatcattgtgcatgatgattatatccttgagaagggaagactacacgaagaagaagcatggtgttctttcagcagtcttctcctgaataactgggtttgtgaagtttgtgtccatgatagctaccctgaggggtgcatgggtgtaggccctaattacctgaagttcccatctcatgtctccactgttgttaagggcaccccattaagtctcatactgtcagacacattgaaaatgacaaaattgccatgctttcttttatggtag

SEQ ID NO: 33109 - DNA, 447 bp, Zea mays
  Peptide Sequence Number=SeqID_74888
atgtcggttattggtatgcagattgccatgatgattatggagatactcaattgcaatctagggagagaattagaaataacactagaagttacaacactgtattttaaagttatatcccttaacttgtctaagaaaatggttcttgtcattgtgcatgatgattatatccttgagaagggaagactacacgaagaagaagcatggtgttctttcagcagatcacaacaagcaccgatgaaattttccctaatacaggttgtcaatttccttgtccgattcaagtccatttgcagcatagccgagcttgatagcttgaaggtttctggtgacgtctggtttggctctggaattacactcaaggttgttcttcacttgccttacagcggcacctatgatcagcttccatataactacagtctaagacgctctcctctccctaatccctaa

SEQ ID NO: 33110 - DNA, 546 bp, Zea mays
  Peptide Sequence Number=SeqID_74889
atgcccggccggccccgccgagccctcggccccggccaccgctcccgcgcccggccgaccccgcccccagccacgcccgccccgacgcgtaaagccaccctgcccgacccgcccgccgccgcggctgcctccgtcgcgcccggcccccgccgcgccaggcccccgacgtgcaaggccgccctcgcccaccccggccccgatcgccgccgcagacgcccctgtcgtggccgcgccccgccccggacccgcctgtcggcgcccgctgcgccgccaccgaccctgccgtggacgtccccgacccaagccaccgacccgcacccgctacgaccgtcagcacacaacaatgatgacgtggaatatgatagaatggaagagatgcttcaagatttaagggttgagataataccaactggatatggagcagcggaagacgtctcgatgaagacgaacgcgtcgagcagtgccgtgcagtcgccggcgtccttcacgtcctcgcacggttcgtccaagtgctccagatgcagcacctccgaggtggcgaattag

SEQ ID NO: 33111 - DNA, 503 bp, Zea mays
  Peptide Sequence Number=SeqID_74890
agaccttcttaccaaaccgaaccggttatgccgccgacgcgccggaccgcttcggaaatggcttgtacgacctccgagccgcactcgtccccggacgtgccctgcacctgacgagcttgcacgggccgccgccgcgtccgcatctcccgcccccagaccgagcttgcccccgaccgcgcccgcccctggcgcgccccgcccccgacgagctcgctcaagccccgacgagcatgcccccgctgcgcccggcgttcgtgagcacggccgcccccgcccgccccgcccccgaccgatgctccagacgtccctgtcgcgccacgccccgccctagccgcccccacccgtcggcgcccgctgcgcagccaccgaccccgccgtggacgtccccgacccaagccaccgacccgcacccgctgcgaccgtcagctcccgtcgctccactcaagatccagcagaagtggagcaactgcgagaagaacttaggcaacatcaggattacttga

SEQ ID NO: 33112 - DNA, 309 bp, Zea mays
  Peptide Sequence Number=SeqID_74891
atggcgtcggccaaagctcctgcgcgttatgtgcccagctcccttttccgcgtatgcgcgcttagctcgctttcctgcgcgccccagcgttctgcttccgctcgtccctgcgcgcccaagctccttgcgcggtccttccttgagctcggtcctgcgcttttcctttctctgtgctcgtgctcgccgtgccgtacgttaattaatcgcgcgatgcagaagacgacccaagtcgaccccaagcacgggctactccacaggatgatgctgatgaacaaacctgaagatgatcgtcaagcggacgtcgtctaa

SEQ ID NO: 33113 - DNA, 327 bp, Zea mays
  Peptide Sequence Number=SeqID_74892
atggcgtcggccaaagctcctgcgcgttatgtgcccagctcccttttccgcgtatgcgcgcttagctcgctttcctgcgcgcccagcgttctgctcccgctcgtccctgcgcgccaagctccttgcgcggaagctcgagccaagatttatccgcattcgtacgagtattgggtcgcgtttgatactggtgagccgatttataatttttgtacgttaattaatcgcgcgatgcggaagacgacccaagtcgaccccaagcacgggctactccacaggatgatgctgatggacaaacctgaagatgatcgtcaagcggacgtcgtctaa

SEQ ID NO: 33114 - DNA, 522 bp, Zea mays
  Peptide Sequence Number=SeqID_74893
atgccctttacatttgctaatgaccctatagtaacccatcgagttctgatccgagtccgaagatacctgttcatgtattatactccagaaacattgttaaatcatgtttttgaggaccttcggaagccaaaggcccccaacacacgttacaaccaagcgctcgggcgctaccgccagcggatcgtgcatagtagggagctcggggtccgggacctagtcctacggttgtgcatacgtgtatgccagcccggtgaggtccgccctctttctagatatcattttttatctaacccacccatacagctctccacccttgctggtatcatgacatccgaattgagtagccaggcttgcagtttaggacccctctacgaaagcagggggtccggcagcctgggggccggttctagagaacgggtacccgttccttggggtggtccggagctgtgtagccgcttagcttggttccgtaccctaagcctacacactccaccactctgcgacatgtatcctagtatttga

SEQ ID NO: 33115 - DNA, 381 bp, Zea mays
  Peptide Sequence Number=SeqID_74894
atgccctttacatttgctaataactctatagtaacccgtcgaggtctaaatagccttttcatctttaagtcggtttccttttctgctatcatgccgaagctcttctgcgcacagcttcggctccgcgccatccttcgtattccttttgtgcttcttcacactgtggttttaactcaagtccgaagatacctgttcatgcattatactccagaaactttgttaaatcatgtttttgaggaccttcggaagccaaaggcccccaacagttaccaagagctatctagcagctttcatcctcagcattcttctatgctctcaaagcgttgctcagaattaagccctacaagaaaagggggagacaaaggatcagtacaagaataa

SEQ ID NO: 33116 - DNA, 641 bp, Zea mays
  Peptide Sequence Number=SeqID_74895
atgtccaaaccggacaaaacattccccttccctatcctcccggtgctccccagccttcttaaccctggggttggaccgcacgagtttggattgagtgactgcccacacagtctcaagtggttgtactataaaggagtacagaagatctacttccggaagttcgggcttcggcccttcttccggggctacgggttccggatctgcgaggctggcgattctaagggtaggctcaattcggtcggagggggttgggagggggctgtccacggggaggtggcggggttccgcggtggggatcgccgccggtgggctctgggtgagagactggggctaggacgtggtgcttcgggcgcccgaggggaggggagcgacggagcccggcggacgccggtgagctacacaccgccgccgatgagactccacggcggggcggtaccggcaaggacgttggtcaaggggggggggacggggcggtgcccaacttccctgtgcggcgagaagacggaggtgatggccggaggtgaccgtgatgagccgtacgcggggaggacgacgaagcggctgacaagcggggccacactgccagtgggagtgatcgcgagcgagggcgaagggtggggcgaggctgacgggtggggacg

SEQ ID NO: 33117 - DNA, 153 bp, Zea mays
  Peptide Sequence Number=SeqID_74896
atggccggaggtgaccgtgatgagccgtacgcggggaggacgacgaagcggctgacaagcggggccacactgccagtgggagtgatcgcgagcgagggcgaagggtggggcgaggctgacgggtggggacggtgctggaaaaatagaatctaa

SEQ ID NO: 33118 - DNA, 264 bp, Zea mays
  Peptide Sequence Number=SeqID_74897
atgccactccctacgcccgcaacgtccgcctccctacgcgcgggtaaccggcagcacctcgtctctctcgatgtgccaatggcgccgcctccatcctacccgatctccgcctccgtcaccgcgtttgtcaaggaggaggacgcccccaacccgtttggtggtctccccgatggcgccgtctctgtcctacccgacctcgagttcattgagatccagaaggagcaggcgcaaacttctccgtgcacaggaggtcaagcggagtaa

SEQ ID NO: 33119 - DNA, 360 bp, Zea mays
  Peptide Sequence Number=SeqID_74898
atggcgctgcctctgtcctactcgacctcgagttcattgagatccagaaggagtaggcgcaaacttctccatgcacaggaggtcaagcagaagtcgagaaccgtgacaaaaatccccattccaagcgagggttttgctgttgctccagccggacccaggacgagaagaagcggcgcaatggtgatgggcgacctggcgttcaaggcgctgacgggtgggctgggcgtcaccacgctctacctcgccaccaccttccccgtcaacgtctaccgcggcctctcgtggcactctgagcagtccgtaagacgaacccccgaccgccctccccccatcactgtcgatttggctcccgcccgctga

SEQ ID NO: 33120 - DNA, 345 bp, Zea mays
  Peptide Sequence Number=SeqID_74899
atggcggtgggcgacctggcgttcaaggcgctgacggctgggctgggcgtcgccacgctctacctcgccgccaccttctccgtcaacgtctaccgcggcctctcgtggcactccgagcagtccgtaagaccgccctccccccatccctgtcgatttggctcccgcccgctgattcgctgcgccggattcgaccacgccggcgcagtcaccgatgggccattgaacactgcctccccgatttgtcttctggacggacgcgaagcgattgtattaccgtttttgcgaagtgttcacacgataattcaggcaaacctgtttgcttgctctctgcaagcgttaacatga

SEQ ID NO: 33121 - DNA, 519 bp, Zea mays
  Peptide Sequence Number=SeqID_74900
atggtgatgggcgacctggcgttcaaggcgctgacgggtgggctgggcgtcaccacgctctacctcgccaccaccttcctcatcaacgtctaccgcggcctctcgtggcactctgagcagtcctacctgcatgactatccaacatttgccgctacggctcgctactggacagaggcctttgctaagagtgcatcaacgggcatggaagagaaggtgcagaagctggttgagatgggcttcccagaggatcaggctgctgcgctcttgggagagcagcccgtctaccacgccgtacagcgtaccattggttgcggggccgccatgcccccagtggcgctgcccggcaaggacactaggtatttgggggagtattggcgaagcatcatggctcccaatgaagcagaggctgcgacctgcgcgctggacgttgctggggggccgcctgatgctggcggcggctgctgcctgggggcagaggcagagctcatgatcgtcgagacctttataccagattggtag

SEQ ID NO: 33122 - DNA, 486 bp, Zea mays
  Peptide Sequence Number=SeqID_74901
atgagtttgcggtatgcccgtatttatacgccaagagcgttgaaaattcaaagaccccgcttgtcagtgaatgttgctattctagcaaagggaaggtatcctcggactaaggtcggcatcgctgtagaccggaataatacgaaggttgatacagagccgaaggtgcgagcaggaaagcttcggtgtgacagcaaagagtggaaccgacttaaagatgaaaaggctattcagacctcgatagactactatagaattattatcaaatttaaaaagaaaaggaataaaaataaagatgccggtgatgaaaggaaattgaaaattgctagatgttcctcagtcctcacgcctttcatcctagagatcaacatgttgggtcacacgatgtcaaagagcgctgacacggcctcatcggtgttctcggggaacccgatgctggcgtcctccaaaccatcgaggccgctccccacctccactagctcttcatag

SEQ ID NO: 33123 - DNA, 372 bp, Zea mays
  Peptide Sequence Number=SeqID_74902
atgggaattagaactgagtttggaatgaacataaagggatgtaggatgagatcgatgaaggggtgcatcgtgcacccaagccaatgtctggtgatggcgggggaaccagagataagggggtatcttcggactaaagtcggcatcgctgtagaccggaataatacgaaggttgatacagagccgaaggtgcgagcaggaaagcttcggtgtgacagcaaagagtggaaccgacttaaagatgaaaaggctattcagacctcgatagactactatagaattattatcaaatgtgaacagtatccccgtactgttcacgctgacttgacattcactttttgcgtcacgcttgtattgtcatcccctcttgactaa

SEQ ID NO: 33124 - DNA, 147 bp, Zea mays
  Peptide Sequence Number=SeqID_74903
atgacgaaggtgatgcttgccgaagatgttgaaaagctcaagaaatggaaaggaatagagacaatatcgaattataaatgtaccttcggcttggaaggagatgacagtacaaacgtgacgcaaaaagtgaatgccaagtcagcgtga

SEQ ID NO: 33125 - DNA, 729 bp, Zea mays
  Peptide Sequence Number=SeqID_74904
atgcccattccactatttaggtccaaaactcatgtttggggtggttttgcgcaatttcgttgccgcacgtcacccattccgaaaacgggtgtcggggtgcatacaaaggttgagttttcgccaccggaaccatttcttcgtttttcgcaacgaacatgccccatccactactttaggtccaaaactcatgtttggggtggtttcgcgcaatttctttgccgcacgtcacccattacgaaaacgggtgtccgggtgcatacaaagcacaagttttttccaccagaaccatttcttcgtttttcgcaacgaacatgcccaatccactattctaggtccaaaactcatgtttggggtggtttcgcgcaattttgttgccgcacgtcacccattccgaaaacgggtgttggggtgcatacaaagcaggagtttttgccaccggaaccatttcttcgtttttcgcaacgaacatgcccaatccactactttagattcaaaactcatgtttggggtggtttcgcgcaacttcgttgccggacatcacgcattccaaaaacgggtgttggggtgcatacaaagcaggagtttttgccaccggaaccatttcttcgtttttctcaacgaacatacccaatccactactttaggtccaaaactcatgtttgggtttgttttgcgcaatttcgttgccgcacgttacccattccgaaaacgattgtcgggggtgcatag

SEQ ID NO: 33126 - DNA, 729 bp, Zea mays
  Peptide Sequence Number=SeqID_74905
atgcccattccactatttaggtccaaaactcatgtttggggtggttttgcgcaatttcgttgccgcacgtcacccattccgaaaacgggtgtcggggtgcatacaaaggttgagttttcgccaccggaaccatttcttcgtttttcgcaacgaacatgccccatccactactttaggtccaaaactcatgtttggggtggtttcgcgcaatttctttgccgcacgtcacccattacgaaaacgggtgtccgggtgcatacaaagcacaagttttttccaccagaaccatttcttcgtttttcgcaacgaacatgcccaatccactattctaggtccaaaactcatgtttggggtggtttcgcgcaattttgttgccgcacgtcacccattccgaaaacgggtgttggggtgcatacaaagcaggagtttttgccaccggaaccatttcttcgtttttcgcaacgaacatgcccaatccagtactttagattcaaaactcatgtttggggtggtttcgcgcaacttcgttgccggacatcacgcattccaaaaacgggtgttggggtgcatacaaagcaggagtttttgccaccggaaccatttcttcgtttttctcaacgaacatacccaatccactactttaggtccaaaactcatgtttgggtttgttttgcgcaatttcgttgccgcacgttacccattccgaaaacgattgtcgggggtgcatag

SEQ ID NO: 33127 - DNA, 858 bp, Zea mays
  Peptide Sequence Number=SeqID_74906
atgactcttgttgttcccactacggcgtcagatgaagagacatgcaaaagggataggacatcatcgtccgcctactcccctacgcaagacaatgagctagcctacaccggcacactgttgccttcgcccgcatgccgactagacatgacgaagccagtcgatgaagtgcctgcttggacgatcggtgggcatggggcggatgtcgtccgcctcccggccgaagttggctctccctattctccgacatctggcggtagggggaagtcgcactatgacttcctttacctgccaatgggtttcaggaaggaggccaacaagggctacatattcgacaacctcatctccctggaggcagcttgccgaccatggtgggcccacaagggcctaccacgtgcaccggtggctttcaagggcagtgctaagacctgcgtggctcgctgcatcggccagagttggccctccttcctccaccatttggagccagtccccgcgcccgcgccgcctgacaggtgggcgccacctgtcagtggcgctccgccctccccgcgcccactgtggaccagcgaacaagcactcgcgcacgtcgccaggatcctcgtccacgtcgctctgcccacgccccagctccttttgagccccgcccgtgcccgcactcactcccccgccttatttcacgcagtcccgcccctcgctcgcgctctgctcacgccgccagacctcgccggagacccgcgcccgcctccccggtcatctagctcgccggagaccgcgccaagccaccccgagctccgccccgaggccttagcgcgcctcaagccccctccccgtggccgaaatccttcactggagttcctctag

SEQ ID NO: 33128 - DNA, 513 bp, Zea mays
  Peptide Sequence Number=SeqID_74907
atgggggagatcagaccagggagggacgaacgactgcgagcggcgctgctcctctccacggcgttgaggttggcggagttgaggcaggcacgagctagggtggctccggggtcgctggagtgggtcagagagggggagaacgacacgacgaactcagtgggggggaaaggccacgaatccgaggtcagagagggtagaacggcggggagaaggcctcgggcaggtcggaggaactccggtgagggatttcggccacggggagggggcttgaggcacgctaaggcctgggaaggcttcaggagaggcaggggtgacacagggacctacaccggggcactggaccgggctaaactggccggccaccgtgcgggcatggcggaccgccacggccgagcaccggtgatgccaaaattggccgagcacatatcgaaattgggaaaactgagcacgggcacaggtgtctcacctcggggcggagctcggggtggcttggcgcggtctccggcaagctag

SEQ ID NO: 33129 - DNA, 1948 bp, Zea mays
  Peptide Sequence Number=SeqID_74908
aaataaaaccaagatagtggatgctggtgcacttgagcccctgcttggttatttgcgatcaagcgatccaaatttgcaggagtacgccactgctgctctccttacacttttagcctcatccaccactaagcctgtcataggtgcctcaggagcaatccctctacttgtggaagtcctcaaaggagggaatccccaaaccaagaatgatgttgtgatggccctgtacaacctctccacaatcgcagacaaccttcaagctatcctttctgcccagccgatcccccctttaatagagctactgaagggtggcaagaggtcctccaaaacagccgacaaatgctgtgctcttctcgagtcgttgctcgcttttgaccagtgtcgggtggccttgacatccgaggaaggcggagtgctcgccgtcgtagaggtgcttgaggagggctcccttcagggcagagaacacgccgtgggagcgctcctgacaatgtgcgagagcgaccgcagcaggtacagggacctcatcctgaacgaaggggcgattcctggtcttctcgagcttacggaagcgccgacgccgttgatggaattcggaaggaccaaagctgctgccgtagccctgatccccgaagcgaccttccgccggtccagtctgtccttctcggcctccgcgacgccgtggtcccgggagaagaacccaaactctgggtgggctgcgtttgatcgcaagcagcgcagtgcagatggcagtgggtatgaaggtgatgctgatccatttccgtctctctcaaattctggagcctctaatattgctagtagctccattacagaaaagaatgggctaaaacgaaagccctttgcttcagtggttcgcccttctgttgattctggagctgttagtactggatgcggaaataagaattctgctaatcacgtggacagcgggaatcacggtgcaatctctgcacctcttaataaagttaagatcttgaaagatgcacacagttgggccgacattcacttaattgaggatgtactagctgctgtgaataatgatgtcggacaagcatctgatttgttgaaagttatggactctcctgccttgcagactggagagggcagaacatctggccaactggctgatgtgatgaataaaacacacggatcaccatcagaaagtgctgcagcaggcaaagcaaatccagatagctcacagttgttgctgcccctgatgaactttccctctatacccttgcagcctgaattcgaagatattgatgatgaatacttcagctaccggaaagatgcattgaaaatgatgagggctgccacaaagcattcccagtctgccagtaatgcatttttgagagatgaccatgctgctgccaaggaactttctctcagagctcaggaagagcgggcagctgctgaaaagctaaataacaaggcagcggaagaaatttttcgccttaggaatagcaataatgacatctggaagatagacatgcatggtcttcatgcatcagaggctgtggcagtattggagaggcatctccacatgatagagttccagcaacctgggaataagtcagcctcatctgaggacttagctaagttggaatctgcatattctgaatcaaccactggttcaaacattgagcttgctgctgagaaggtggtcttacgccggcctaagcagtctatcttacatgtgatcacagggatgggtaaccatagcaaagggcaggcttcactacctgttgccgttaggggtttccttattgagaacgggtatcgatttgatgagctgaggcctggtgtttttgcggttcgtccaaaattccgccgcagcgacaacctcgtctcttctggtcttcgaagcgacagcctgtcgtctcccgctccagcgccgagtcgacatggcttcgtcagctgctccagaagctacaat

SEQ ID NO: 33130 - DNA, 2241 bp, Zea mays
  Peptide Sequence Number=SeqID_74909
atgtctcagatctgggtgtttgagtactgctcgttgatctggaacccaggcatcacccacgacgcctgcatcgtcggcttcgtcgaaactaccaccacgtcttgtaccaagcggtgggtggacagggagtatggaacacaggggcacgccgcagttccccgggaggaccatcacgctcgagcaccagctcagagcgacttgcgtatgccctttcacataaataaaaccaagatagtggatgctggtgcacttgagcccctgcttggttatttgcgatcaagcgatccaaatttgcaggagtacgccactgctgctctccttacacttttagcctcatccaccactaagcctgtcataggtgcctcaggagcaatccctctacttgtggaagtcctcaaaggagggaatccccaaaccaagaatgatgttgtgatggccctgtacaacctctccacaatcgcagacaaccttcaagctatcctttctgcccagccgatcccccctttaatagagctactgaagggtggcaagaggtcctccaaaacagccgacaaatgctgtgctcttctcgagtcgttgctcgcttttgaccagtgtcgggtggccttgacatccgaggaaggcggagtgctcgccgtcgtagaggtgcttgaggagggctcccttcagggcagagaacacgccgtgggagcgctcctgacaatgtgcgagagcgaccgcagcaggtacagggacctcatcctgaacgaaggggcgattcctggtcttctcgagcttacggaagcgccgacgccgttgatggaattcggaaggaccaaagctgctgccgtagccctgatccccgaagcgaccttccgccggtccagtctgtccttctcggcctccgcgacgccgtggtcccgggagaagaacccaaactctgggtgggctgcgtttgatcgcaagcagcgcagtgcagatggcagtgggtatgaaggtgatgctgatccatttccgtctctctcaaattctggagcctctaatattgctagtagctccattacagaaaagaatgggctaaaacgaaagccctttgcttcagtggttcgcccttctgttgattctggagctgttagtactggatgcggaaataagaattctgctaatcacgtggacagcgggaatcacggtgcaatctctgcacctcttaataaagttaagatcttgaaagatgcacacagttgggccgacattcacttaattgaggatgtactagctgctgtgaataatgatgtcggacaagcatctgatttgttgaaagttatggactctcctgccttgcagactggagagggcagaacatctggccaactggctgatgtgatgaataaaacacacggatcaccatcagaaagtgctgcagcaggcaaagcaaatccagatagctcacagttgttgctgcccctgatgaactttccctctatacccttgcagcctgaattcgaagatattgatgatgaatacttcagctaccggaaagatgcattgaaaatgatgagggctgccacaaagcattcccagtctgccagtaatgcatttttgagagatgaccatgctgctgccaaggaactttctctcagagctcaggaagagcgggcagctgctgaaaagctaaataacaaggcagcggaagaaatttttcgccttaggaatagcaataatgacatctggaagatagacatgcatggtcttcatgcatcagaggctgtggcagtattggagaggcatctccacatgatagagttccagcaacctgggaataagtcagcctcatctgaggacttagctaagttggaatctgcatattctgaatcaaccactggttcaaacattgagcttgctgctgagaaggtggtcttacgccggcctaagcagtctatcttacatgtgatcacagggatgggtaaccatagcaaagggcaggcttcactacctgttgccgttaggggtttccttattgagaacgggtatcgatttgatgagctgaggcctggtgtttttgcggttcgtccaaaattccgccgcagatccttcggtacctccacggcatcaccgacttcgtccttctccttcatcgatttgcgaccgttgttctcgttttctacaccgataccgattagggtgcgccgagtcgacatggcttcgtcagctgctccagaagctacaatgttcgttgactcgaagcacttttgtctactgtga

SEQ ID NO: 33131 - DNA, 1413 bp, Zea mays
  Peptide Sequence Number=SeqID_74910
atgcatcgcggccttccaccttgcgagcccccggatggggagcacccgcgttgccttcgtcttgctgctgttggaggagcacgacctcgcgggggttggcgcccttcagccatcgctcgacttcaaggattttcatcaggcagcccgactgcagtcccccgccgacggtcacccaggatgatgaccgtaggcctcatggtggggagaagcaagccaggctgcggcctctgccccgccctcagcttcaaggatgttcatcatcctcgctgtggcggagggcgagctgagccagggttctacctcccgcatgggccggcaagccacctcttccttcagcattcaggggagagggcgctcaccggccttgcggagggggcaaacttcgacaacgcgggaccggtcggtcgcaagcgccatcagctgcagcgtgcctggctcgctggctcagccggctctggcgcggcctccgacgctgcctcctgccgcttggtccgggcgtggccgcccgtccaccgcactggcgactgttacgtcgtgtgcaccgggggatcgtccaagacgtcgtacgccgcgcgggcggcgttcgtgtccttggattgtcttgtcctcactccggcacgtcgcctccgcgtggaggtggccactgtcgtcggtgctgaggtggtggcagtcagagaaggtttctctgccgacgagaccgtcggcgccacatgcggtcggacctccgtctcttcggctttgatggcttgtcctcgccccttgcgtggggacatgggcgagggcttttccacaccagcgtttgccctgaggtcatcgctgctgttgtttagccgcccgaggtggaggtcgttgtcactgttaatggggcggtcgtcggcgagccacctggagtttgttgtcccgcagaccctctggtgtggaggttgttcatacccgcgggagtggaaccagagttccatttgtaatggcaccctgagtatgggtaaccttcgaccgctctgcgatgagctggagccggaggcagcggtgttggcgtggacagaggtggagtcggctcgaaaagaggcttcgtcggcccaggaacaggtggcttcccaggccgaggaggaccctggcggaggccctggctgcgatggcccaagcgtggtgctggcatcctccttcgaggtggagatccttccgctcgtgtcgccgtccgaggctgggccaggttccgccgagggtggaaacgacgccgagggtgctgctgctccctctgccgatgacttgttcgtcggtagcagaatcgcttatccgagcgagagttacttttcacggaaggtgatgagtgaggattctattatcgatatagtcaagaaggcacgaaagtcattctggcagaaaagttttcgagcgttaggacttgttcggtag

SEQ ID NO: 33132 - DNA, 1011 bp, Zea mays
  Peptide Sequence Number=SeqID_74911
gtgctccccatccgggggctcgcaaggtggaaggccgcgatgcatgaggggagtgccaaggcatggctactgcctggggattgatccttttttaaaggcggctctccccactcgcatcctcaagcgtcatgggcaaagtcttcaccgacgtgctccagtgtcctccccctacgacacgggggttgggtcccacacgtcatgcaagctgacccgaaacggaagaagccaaaccgccgcacacggagcatgtaaccgccccacggttataagcactcctccatcctcgccgaaaccagcggtcgaaaggcggaccgccacgcagggagcatacaaccgcaccacggttgtgcaccctttcggcttcgtcgcatccggcatggaggcccaggcccacacgtcatgtaaccggcgcgtcggttactgcgtgcaagaaaccgcaccgccacttgcgccaataccgcgccttctcgactgtagaaccagtgctgtgactcgaggcagccctgcgcgtgacccaacagtgccaattgggtgcaacgatcacgggctggcccctcggaagggttcgacagccaccccagagcactcgggctccaagcccgttactgatcaggggttcgaaggctggcccctcggaagggttcgacatctgcccaagagcactcgggctccgcgcccactactgatcaggggttcgaaggctggcccctcggaagggttcaacagtcgccccaaagcacacagagtgagggatgactctgggtacgtccgttacatggccgaggctcgggctacgctcccgagtcacttcgccctttcactgaccgacctgacaggaaaacagcgccgctcgccccgctccgactattgtgccacccaccagggtgagactgacaacagccgagttcagcctcgggcgcaacaggaaagcttcgcctcgcccgaccttaggcctcagcctcggaaggaggtctccgcctcgcccgaccccagggctcggcctgaggagaa

SEQ ID NO: 33133 - DNA, 1467 bp, Zea mays
  Peptide Sequence Number=SeqID_74912
atggcccgggtggtccagacgggtcgagatcctctgacgtcaagggtggggtcactgacgcgtgggcctagggccacgtgcagtgacccaacgtcagtgcagtcgatgttagaggatacgcgcccgacccaggcccccctactcttagtcacctctcgaaaagatctatcagagaatagaaatattgacgatggaagcaatggcgacgtagctgctgaccattatcatcgatacaagctaccagctcgacaacacgcacgtgatccttccttagtgccggtgtttaacttaaattatatgcttgtacctttcaaatatccatggccagagggtcgcttcggaggtgttaatcaggcaggcgttaaattctacaatagcctcatcaacggactgctagaaaaagggatacaaccatttgtgacgatcaaccactatgacatacctgaagaactccaagaaagatacaattcttggttgaacccagagattcaggaggacttcacctacttcgttgagctttgcttcaagatgtttggtgaccgagtaaagcactgggtcacattcaatgagccaaatcttattgtaaagcttgcatactccattggggcatttccacccaaccgttgttccgagccatatgggaaatgtgattcagggaattcatcaactgagccctacattgcagcgcataacatgatattagctcatgcaaagacggtcaacatctacagaaagaattacaagtccaagcaaggtggctttgtaggaatttcattacatctaagatggtatgaaccactaaggaatatcacagaggaccacttggcaatgcgccaaatcttaggtccaaacttgccaaaatttacagaaggagagaagaaactactgaagaaccaaattgacttcatcggggtaaatcactaccaaacattctatgtcaaggattgcatatattctctatgtgatatggacgcctacccttctgaagctttagtttctatatcaacagaacgaaatgggatacccattggaaaaccgacacctgttgcaaacacctatgtcgttccaagctccatggagaagttggtcatgtatttaaagcagagatataaaagcatacctttgtacatcacagagaacggttatgcccaaatagccaatattagcactacagcagaagaaataattaatgatattgaaagatcaacttacattcgtgactacctcacttacttgagctttgcaataaggaaaggagcagatgtgagaggttattttgtgtggtctttgatggataacttcgaatggatctctggttacaccgtaaagtatggtctttgtcatgtgaatttcaagtcactaaagcgaacaccaaaattgtctgctaaatggtatagcaagtttatcaagggctatgaacagatagagatggcctctgaagaattgcctaagcatatggtttcctag

SEQ ID NO: 33134 - DNA, 258 bp, Zea mays
  Peptide Sequence Number=SeqID_74913
atgccctcaaattatctttttcatgtaactgctctcctagcagaaacgagcagatgtgagagatattttgtgtggtctttgatggataacttcgaatggatctctggttacaccgtaaagtatggtctttgtcatgtgaatttcaagtcactaaagcgaacaccaaaattgtctgctaaatggtatagcaagtttatcaagggctatgaacagatagagatggcctctgaagaattgcctaagcatatggtttcctag

SEQ ID NO: 33135 - DNA, 378 bp, Zea mays
  Peptide Sequence Number=SeqID_74914
atgggtcggcgcgaggccaagcgcgaaggggggaaaaggcggccagagacgggcgtgagagaggtggaaatcccgcggccttcgtgttcgtcccgcgctcaggtcgggcgtaaggagaggatccagcctaagtcggcttggggtagggtaatgatggcgcctcttgttgacgtggccggtccgcgccctaggttgggcgatgtggaggctccttcgaggtcgaggtcgagtctgtcttctgaggccgaggtcgagtccgagcccctgggtcgggcgaggcggagaccgtcggctgaggccagggctgagtccgagccctggggtcgggcgaagcggagttcgtcgtcttcaggggctgagcccgagtccgagccctag

SEQ ID NO: 33136 - DNA, 534 bp, Zea mays
  Peptide Sequence Number=SeqID_74915
atggcccacgcccgcgcctataaagcacccagggacttcgaccgtacccctccgcacgcactcgaccacaccggagcccaaaaccaccggcgtttgcccgtgcacggcgtgctcgcggccgcccgattcccccgccatcgtagaccggccaacagaacccttctcaaccccgtccgacccttagagaagactgtgcacacctcggtgaagctccccgagcgaggaatcggagtttgcttcgccggagaagccagtccacggtcgccggacttcgcccgaccgccggtgagcgtagaccgggtgtcggcgtttcaagaccggggggtccctgggccgacgagtgaaatgtcgtcgcgtgccccagcccagatgggtcggcgcgaggccgagcgcgaaggggggaaaaggcggccagagacgggcgtgagagaggtggaaatcccgcggccttcgtgttcgtcctgcgcccaggtcgggcgtaaggagagaatccaggtgtacaatggggggtgtagcggagtgctacgtgtctag

SEQ ID NO: 33137 - DNA, 420 bp, Zea mays
  Peptide Sequence Number=SeqID_74916
atggacacatcaagccctgcaacacttgtcaatgcacagatgctgaacatgtttgttgggcgaagagtgcgcacggttgttcaagtccaacacaatgaaggtggagtgcttgtcgggcagtccaccgatgggcaccagttgtgtgtcaaaagtgccatggacgtccccgtatcacattttatggaggtttatggaattgctgaaaacagcgagaccatccgtgctgaagtttgcacagattttggtcccaactttggtgagatttcaaatgcctttggtgtttgcctcgaccctttgattgcaataagtgcctgggtttttcctaatcggatgagcaaatatatgcatttatttgaggttatctgtgtccgtattcctatgccatgtgcctactttatgttacaactaaatgagggttaa

SEQ ID NO: 33138 - DNA, 195 bp, Zea mays
  Peptide Sequence Number=SeqID_74917
atggacacatcaagccctgcagcacttgtcaatgcacagatgctgaacatgtttgttgggcgaagagtgcgcacggtttatggaattgctgaaaacagccagaccatccgtgctgaagtttgcacagattttggtcccaactttggtgagatttcaaatgcctttggtgtttgcctcggccctttgattgcaata

SEQ ID NO: 33139 - DNA, 363 bp, Zea mays
  Peptide Sequence Number=SeqID_74918
atggacacatcaagacctgcaacacttgtcaatgcacagatgctgaacatgtttatgaaaattgctgaaaacagcgagaccatccgtgctgaagtttgcacagattttggtcccaactttggtgagattgcaaatgcctttggtgtttgcctcggccctttgattgcaatagtgtccattgtcgaatcaaatcatattcttaatgaagtgagtaccgacatccttccttcccacaattatgtcaccccaataattacaatagctggtggaagtgttgccaacacaatccgtgggctctcagctggttttggaatatcaactggggactattgtttgtcaacaatacgagctttagtggtgtag

SEQ ID NO: 33140 - DNA, 339 bp, Zea mays
  Peptide Sequence Number=SeqID_74919
atggacacatcaagacctgcaacacttgtcaatgcacagatgctgaacatcgagaccatccgtgctgaagtttgcacagattttggtcccaactttggtgagattgcaaatgcctttggtgtttgcctcggccctttgattgcaatagtgtccattgtcgaatcaaatcatattcttaatgaagtgagtaccgacatccttccttcccacaattatgtcaccccaataattacaatagctggtggaagtgttgccaacacaatccgtgggctctcagctggttttggaatatcaactggggactattgtttgtcaacaatacgagctttagtggtgtag

SEQ ID NO: 33141 - DNA, 189 bp, Zea mays
  Peptide Sequence Number=SeqID_74920
atgggctcttgctctgtttgttggtacttcacagatagctgggagcaattccgtatcagtggcagcatagatgtgattgatgcttctactacagaccctgccaagctccagggtgttctggacaaagaaagcttgtaccttaaaacaggaggatacaagaagctagagtggttgtctgaaggcttttga

SEQ ID NO: 33142 - DNA, 315 bp, Zea mays
  Peptide Sequence Number=SeqID_74921
atgggctcttgctctgtttgttggtacttcacagatagctgggagcaattccgtatcagtggcagcatagatgtgattgatgcttctactacagaccctgccaagctccagaatagccctattgcttatcttgctgctattcaaatctatggtaaacaatggttgtcacttctttcacagcacaaggagaaagcatggttttcaagttcagtgaagtcgagattgcagtacttaggaccacagccaggcattccggttctagatgatgagcatgtgatgatgagcatgttaagggtgttcatctcgatcctttag

SEQ ID NO: 33143 - DNA, 318 bp, Zea mays
  Peptide Sequence Number=SeqID_74922
atggactacgccgcatgtcaccttcgtcacgccgtcctggcaaccggcgtccccatctccatgggctgcgccgcatgccaccttcgtcacgccatcctgacaaccggcgtccccatctccatgggcagcatcacctgccaattttgtcaccacatcttggacgctgacgtgcccatctccagggacagcgccaaatttcgtcacatcatcttcgttgacagcgtctccatccccatgggcgacggcactaggggcagccacagctcaacaatcacaacctccatcgatgggggacttgtggaccaacataagggttga

SEQ ID NO: 33144 - DNA, 507 bp, Zea mays
  Peptide Sequence Number=SeqID_74923
atggagctggtgattgctgagccgtggttgcacctagtggtgtcgcccatggggacggagacgccatcaacgaagatgatggacgccggttgccaggatggcgtgacgaaggtggcatgcggcgcagcccatggagatggggacgtcggttgccaggacgacgtgatgaaggtgacatgcagcagagtccatggagatgtggacgtcggttgtcagaatgacgccacgaaattggcggcagaagccatgagatcagatcgaaacccaagctatccgataccagatgttatggtcgctagatcggtgaaggattggagaggggtatcgatgggcaggaacgtcggccgagggcctctgcccacgaccaagcaagagaagggtttctcccttctaattcttgggggtccccacctgcatgtattgcatagaggccaggagcggccaatgtcatcccccagtggggttacaaagaagattacaacaggttctaatctccaacaagagtga

SEQ ID NO: 33145 - DNA, 549 bp, Zea mays
  Peptide Sequence Number=SeqID_74924
atgccgtccccgacccgcgcctccgtggcctctctcccgaccgccggcgcagtgctgtcgtgtcgcgcccatcgagcgagccggtggctgacgcacactcgctcgacgcttcaccctaaaaaacctgccggcgggacgctggagtacgccatcatgcactgtggtgtccaggtcagccgcctccatgcctgccgcctttccatcctccgcgcgtacgctcgcctccgcgccgcgagcggattgcatcttccacgcgtcagccgctctagcattgttgtgtatcctcgcatagccagatgtctccatgccatccgcgacaccggccatctccgcgccatctgggacctcgggtggcggcggtggcagctgcaacccgaggaaattcttcattggatggctcccgggacaccacagatgttttgtagagatgaatttatcaaggtggacattagcggtgtgaacaagcgcgtgataaggctgtccaacgtgcagaacaggtgggcacagtggcttatcgatgggcaccaggcgactgtgacaaatatctag

SEQ ID NO: 33146 - DNA, 342 bp, Zea mays
  Peptide Sequence Number=SeqID_74925
atgccgtccccgacccgcgcctccgtggcctctctcccgaccgccggcgcagtgctgtcgtgtcgcgcccatcgagcgagccggtggctgacgcacactcgctcgacgcttcaccctaaaaaacctgccggcgggacgctggagtacgccatcatgcactgtggtgtccaggaaattcttcattggatggctcccgggacaccacagatgttttgtagagatgaatttatcaaggtggacattagcggtgtgaacaagcgcgtgataaggctgtccaacgtgcagaacaggtgggcacagtggcttatcgatgggcaccaggcgactgtgacaaatatctag

SEQ ID NO: 33147 - DNA, 252 bp, Zea mays
  Peptide Sequence Number=SeqID_74926
atggggaagcctgtcccatcactcctcatgctcctcctcagccgagtgaccgcacttgtacccaccataacaggaatgggagaccacgtctcaggttgcgtgaggggatatgtccactgccaggttcactcagggcttgccttccaaagctggggtaggcagatcctctggggcaggctctggtactggatccagggctacctccttagcaactccttgctccggcacgaggatgtactctccgtcagctag

SEQ ID NO: 33148 - DNA, 321 bp, Zea mays
  Peptide Sequence Number=SeqID_74927
atggggaagcctgtcccatcactcctcatgctcctcctcagccgagtgaccgcacttgtacccaccataaccggaatgggagaccacgtctcaggtcgcgtgaggggatatgtctgcgggcaggttcactcaggtactaggcttaccgatttaccatatttctcgtggcaggcaggtcctctagtgcaggctctggtgctggatctggggctacctcctgagcagctccttgctccagcacgaggacgtactctccgtcagcaagattacagtctattgaatgcaatgaacattggacaatttacaagggttttaggatga

SEQ ID NO: 33149 - DNA, 261 bp, Zea mays
  Peptide Sequence Number=SeqID_74928
atggggaagcctgtcccatcactcctcatgctcctcctcggccgagtgaccgcacttgtacccaccataaccggaatgggagaccacgtctcaggtcgcgtgaggagggcaatctgctgccaggttcactcagattttcaggtggtggacttccggatcgtacttagggatttgcccgaacttccagtaaaggcaagtaaatacagtggtggttgctaccgtttggtttgcatcctattccctgtcattgagtatgcataa

SEQ ID NO: 33150 - DNA, 342 bp, Zea mays
  Peptide Sequence Number=SeqID_74929
atggggaagcctgtcccatcactcctcatgctcctcctcagtcgaggcaggtacaatggatcaagcagtctcattagctgcgagaagcagacgattcaaatcgagtttttatccttgcaagtgaccgcacttgtacccaccataaccggaatgggagaccacgtctcaggtcgcgtgaggggatatgtccactgccaggttccctcaggtatccgcacgttaatccttattccaatttcacctcgtagaccacgcatccccatggatccctgtccaccaaccaactatcaatatgatatgaaaagtgggtacaaccaattcctgatctcgcgcgagtgctag

SEQ ID NO: 33151 - DNA, 267 bp, Zea mays
  Peptide Sequence Number=SeqID_74930
atggggaagcctgtcccatcactcctcatgctcctcctcagccgagtgaccgcacttgtacccaccataaccggaatgggagaccacgtctcaggtcgcgtgaggggatatgtccactgccaggttcactcaggtatccgcacgttaatccttattccaatttcacctcgtagaccacgcatccccatggatccgtgtccaccaaccaactatcaatatgatatgaaaagtgggtacaaccaattcttgatctcgcacgagtgctag

SEQ ID NO: 33152 - DNA, 249 bp, Zea mays
  Peptide Sequence Number=SeqID_74931
atggggaagcctgtcccatcactcctcatgctcctcctcagccgagtgaccgcacttgtacccaccataaccggaatgggagaccacgtctcaggtcgcgtgaggggatatgtccactgccaggttcactcaggtatccgcacgttaatccttattccaatttcatctcgtagaccatgcatccccatggatccgtgtccactaaccaactatcaatatgatatgaaagtgggtacaaccaattcctga

SEQ ID NO: 33153 - DNA, 267 bp, Zea mays
  Peptide Sequence Number=SeqID_74932
atgaagctgtggaaggagacttccaggagttccaagattacgacgagttctaggtgtgggttagcggcaacccccagtcggctgcctgtgaaggccgtgttatctacgtttcttttccgcactttgatttattgtatccgcacgttaatccttattccaatttcacctcgtagaccacgcatccccatggatccgtgtccaccaaccaactatcaatatgatatgaaaagtgggtacaaccaattcctgatctcgcgcgagtgctag

SEQ ID NO: 33154 - DNA, 435 bp, Zea mays
  Peptide Sequence Number=SeqID_74933
atgggaagggagacgggtactctacaacttcttgcgcctctactgctgacgggagggaagggagcggatctggtgatccgtggtgacgtagttctcaacacgttatcagcacgctctacctcgacgttgctgcggaatcagatctgtatcaactctacgtcaatccggcaggtctccggcctagccgaactgtcctacgcgacaggcttcgattctccctctacgcaattgaacgtattatctttctgctctattcttcgtggtaaatatatagcagaaatattagaatgcatgcgaaggcacggttcgtctgccatgatcagcgagccacaattgcacctgttgtgcacgttgcgtggacttatcgtgtaccccgactatcgagccacaattgcgcctgttgcgcttgttacggaggcttattcgttgtcgtag

SEQ ID NO: 33155 - DNA, 333 bp, Zea mays
  Peptide Sequence Number=SeqID_74934
atgacgctaagtggtgttgggagcaacagtctgatcgaagctaagggtgtcaagtccattgaattgacaatcaggacaaagaccctcactgttgcattctttgccactgaagtagagggtctccggcctagccgaactgtcctacgcgacaggcttcgattctccctctacgcaattgaacggtggcctgctgccatcggcgctgctgtggagccggatggcgtggccatgaactgctgctccgagcagcacgggtacgacctcgtccaccacgggggatcgagccatcgagtaccctggatgctagccgcgttgaacgtgtccaaaccgtaa

SEQ ID NO: 33156 - DNA, 354 bp, Zea mays
  Peptide Sequence Number=SeqID_74935
atgaatacacagttgatggcccagacggttgacattgcactggataacttggaggcagacacttcctcataccactgcagcgttgtccgagccttagctctggaacaaatagatccctccctggctattggtttttactgtcgtgacaaagacgactttgatgatttctgttctcgggcctctgagttggcggagaaggccaatggcgcgccactctttactgttgtgcagtcaatcgagccatcgaaacaaatgtataaacaggatgatggactgggttgttctggcagtagcatggccaatgacgacgaccttgatggctctggtgaagcagaagagtggcagatcctttag

SEQ ID NO: 33157 - DNA, 708 bp, Zea mays
  Peptide Sequence Number=SeqID_74936
atgctgtgtttctggaagatttctcttccaggatatggatcacttactggaaagggatgcatggttagaagcagtcaaatgctggttgctcaggcgctgatttttcaccaccttggaagatcttggagaaagcccccagagaagccatacaacccagattatataggggtcttacgcctattcggtgattccgaagcttgtgctttctctattcacaatttacttcaagctagaaggaattatggtctggctgctggatcatggttgggtccatatgctatgtgccgggcatggcagacccttattcgcacaaatagagagcaagctgatgctgtagatgggaaggaaaatttccctatggcgctgtatgtggtttcgggtgatgaagatggcgaaagaggtggagctccagttgtttacattgatgttgctgctcagctttgctctgatttcaacaaaggaccatctacatggtcacctattcttttgttagttcctctggttcttggccttgacaaaattaacccaaggtacatcccattactaaaggagacatttatgttcccacaaagcttgggcattttaggtggaaaacctggtacatcaacatacattgctggggtacaggatgatagggctctctacctagatccccatgaagttcagatgcagtggcatgtctattctgcagcaattcctgttccatag

SEQ ID NO: 33158 - DNA, 921 bp, Zea mays
  Peptide Sequence Number=SeqID_74937
atggacgacaccggtgggttgggggcgcacaacggtcgggggctgagggaggtgtggcggagagccgagggatgctctcatcctgtccaacttccacattttatactactcaaacctaatgtggacgcctggtgctaccacgacttcaccttccgcatcgacactctgggcccgtcccacacgccccgcctcgacgtcgtgccttgtgggcccacgcccagcgcccgcgcagcggtctctctgctaatgccctgtggacccccagcgcccgcgccactcgaactcatgtccttgcttcagaaatttgagactaaccatcagaccactactggaatccgagtctttgccgagtgttggattctttgccgagtgccttttgtcgggcactcggcaaagaaggctttgccgagagccgcactcggtaaagtcaggctctcggcaaagagcccctttaccgagtgctggacactcggcagaggacagcactcggcaaagacacgtttgccgagtgtcaaacactcggcaaagaaggctctcggcaaagggccgtcattggccgtcccaaagctgacggccgtcaatctttgccgagtgccaaccgtcggctctcggcaaagatgcttctttgccgagtgccgcgcagctggcactcggcaaaggaagctttaccgagtgtcttatccagacactcggcaaagcttcgccgagtgcttcaggcactcggcgaagcgattgattccggtagtggaccacagctacgccttcctcaattttttgaagccattcgtctgcagttacgtccagcagcaactgaagtatggggccagacttaggccggatccgcacatcagtgaccccggctgctgctatgttcacagacctgccgaggcgtcagagtacccaaatgttggtgcaccgtag

SEQ ID NO: 33159 - DNA, 872 bp, Zea mays
  Peptide Sequence Number=SeqID_74938
tgccttttgtcgggcactcggcaaagaaggctttgccgagagccgcactcggtaaagtcaggctctcgacaaagagcccctttaccgagtgctggacactcggcagaggacaacactcggcaaagaaggctctcggcaaagggccgtcattggccgtcccaaagctgacggccatcagtctttgccgagtgccaaccgtcggctctcggcaaagatgcttctttgccgagtgccgcgcagctgtcactcggcaaaggaagctttaccgagtgtcttatgcagacactcggcaaaactcactagtcactactcagcatatatctgcacactcctctacgccgctctgctcagttctcagtgctgcatgcaccgagcaagtgagctatagctaccgaccagcagcccagctaattcagtctctactagcagagctagtagccagctgcctgccactgactgatcatcgcgtcgaccagagcatggctcctaaggcgccggcgaataatggcgctgtcgtcgttgccggcggccatcacgggggcagcaccgacgtcggcggcgttgccgggggcgcgacgacgacgactgtgccgacgtctgtggcggcgaacggcaacggcaagcagcacggcacgaggaagcagaggaggcctgcagcggtagtcgtcagcccgatggacaagtactggacgcccgtcgacgacaaggaggcggcggaggccgtcgacgacggcggcgaggacgggcggcgcccgctcctgttccggacgtacaaggtcaagggaatcctcctgcacccctatagcaactcgtcgcacgggtcgccggggagcgctgggctgccgttccgtcttcttggcgcgtcccgctag

SEQ ID NO: 33160 - DNA, 240 bp, Zea mays
  Peptide Sequence Number=SeqID_74939
atggctacttcgcacgcaacggtcgactgcaacgcatttaatgcgctcctgcgcgcagaggacagagcacgtgcaaaaggcgcaccggatagtctacaggacctgtctggtgcaccaccggacagcccagaggccccaccagtcagagctccaacgatgtcagaaaataggcgcagaggaggaaagcgtgctcaacaggagcggccagctcagcaggatgaggcaccccagcagcagtag

SEQ ID NO: 33161 - DNA, 441 bp, Zea mays
  Peptide Sequence Number=SeqID_74940
atgaatggtggggtggttggggtatttatagccccaaccaccaaaagtggccgttgggaggctgtctgtcgcatggcgcaccggacagtccggtgcgccagccacgtcagccggccgttgggttctgaccgttggagctctgacaggtggggcctctgggctgtccggtgcgccttctgcgcgtgctctgtcctctgcacgctggcgcgcattaaatgcgttgcagtcgaccgttgcgtgcgaagtagccgttgctccgctggcacaccggacagtccggacagtccggtgaattatagcggagcgacctcccattttcccgaaggtgaggagttcagcgtcgagttccctggtgcaccggacactgtccggtggcacaccggacagtccggtgcgccagaccagggtgcctttgggatgtctttagctctctttatttga

SEQ ID NO: 33162 - DNA, 471 bp, Zea mays
  Peptide Sequence Number=SeqID_74941
atgacacctgcggcagaggggtataacctcgccggagaagacaactatccccatggaccgaaggtccatgacacctggtatcagaggcaggttatcctcaccaccaccagccgcccatccctcaccaccaccagccgccgcgccatcagccgtcgcaacgccctcccacccgccctctccaactctagatgcattcactcggctcaaagagagttttggccacttcgcagagcagtgggattagttcgttgtgatgttccaccgctacaaggagaagacagagaaggaactccaagcagcggtgcggcttcagacggcagcgcgagggttcctggcacgccgccagtgtcacacccggctttaaggaacaaagctaggtgcatctcatacatgcgccaagaagacaacatatataataacagagtgtatagagataaatgtcacaataacatcagagtatttattacatag

SEQ ID NO: 33163 - DNA, 789 bp, Zea mays
  Peptide Sequence Number=SeqID_74942
atgttccaccgctacaaggagaagacagagaaggaactccaagcagcggtgcggcttcagacggcagcgcgagggttcctggcacgccgccaggtacagtcccttcgtggggagaagcaccttgctgtggcttccagggccaccccatggccgtcatcacatgagcaggccgtggtgcgcctgcaagccgcagtgtgcggcttccttgttaggcgggcagtgcggaagctgcacttgctgatcagctcatcgctgcaccaactcgcaacctgcgtgctcaaccaccaggtctcgtctatactttttgaaccccctgcagaagtcgagatctgggtatgcagcccccctgcacggccaaagaggatcgtctccttcattcgggcacttgctttggtgctggacagacccaacataagaacgggctggttcctccacctttcatccaacgtgaaggccgcagttcagctctttccttgggatccaggagggcaggaggacatagctgcagttcaaatttatattttaatttcacaattattttgtattttcgtcttaaataataaagctcgaggacgagctggtcctcaagggagggggagatgtcatggacatcatagggagcggtcactcatgtggagccgcacctatgcgcgccaaaagcgagaggccgcagggggcgctggcagcaacgcgcgcaaggaaggcacgggcgctagaagcagcgcgcgcaaagaaggcatggcaaaggaaaacgcgcgcaaggaaggcatggcaaaggaaagtgactga

SEQ ID NO: 33164 - DNA, 1313 bp, Zea mays
  Peptide Sequence Number=SeqID_74943
atgccaacgcccaccccgccgtctccgtccccgtctccctcttctggaacttgccctctgctccggatcggcgcgggccgtcgttttgccatggcatttccatcttgggcgactctgttcttcgccgggatgatggtggtgttggcagcggtggaagcggaagcggaagctggaggagggagcgtctgcttcgaccggatgttcggtttcggggactcgctcacggatactggcaacttcctgctctccgtgcctgacgacttcccggaccccgcgcggaacctcccctacggccagaccttcttcggccgcccctccggccgctattccgacggccgcaacctgctcgacttcttcgcagaggcatttgggttgccatatgtgccaccttacctaggcagtggggacttccagaatggcgcaaactttgcagtcggcggcgcaactgctctcaatggctcgttcttccgtgagcgcggtgtggagcctacatggacgcctcactcccttgatgagcagatgcaatggttcaagaagcttctcccattcattgcaccatctgagacagagctaaatgaaataatgtccaagtcacttttgtttgtgggagagattggcggaaatgattacaaccatttaatcgttagggagaaatctgttgatgagctacatgaaattgttcctaatgttgttggcgccataagctcgggcatcacggaccttataaatcttggagcaaagaagttagttgttccagggaacttcccaatagggtgtgtcccattatatcttgcaatctttcagagccaaaaggagggttactatgaggaacaaacaggatgcattaagtggctcaatgaatttgctgagtaccataataggatgcttcaggaggagttggagaaactcaggaatcttcaccctgatgtaaccatcatttatgctgattattacggtgctgcattgaacatattccgtgccccactcaagtttggcttcacagtcccactgaatgcgtgctgcggaagtgacgctccgtacaactgttccccttcaatactgtgcgggcgtcctggatctacagtgtgccctgacccatcaaaatacatctcatgggatggtctacacttcaccgaggcgagttacaaagttgtcatccaaggagtactaggggggagccgccaacgacctccgtcgcctgcgctcgtggccagggcagctccgaccacctctgacgccgacccgcacaccgacgtgaccgtcgtgacctccccgacgtcactgaccaccccgccggagctctactgccgccg

SEQ ID NO: 33165 - DNA, 1227 bp, Zea mays
  Peptide Sequence Number=SeqID_74944
atggcatttccatcttgggcgactctgttcttcgccgggatgatggtggtgttggcagcggtggaagcggaagcggaagctggaggagggagcgtctgcttcgaccggatgttcggtttcggggactcgctcacggatactggcaacttcctgctctccgtgcctgacgacttcccggaccccgcgcggaacctcccctacggccagaccttcttcggccgcccctccggccgctattccgacggccgcaacctgctcgacttcttcgcagaggcatttgggttgccatatgtgccaccttacctaggcagtggggacttccagaatggcgcaaactttgcagtcggcggcgcaactgctctcaatggctcgttcttccgtgagcgcggtgtggagcctacatggacgcctcactcccttgatgagcagatgcaatggttcaagaagcttctcccattcattgcaccatctgagacagagctaaatgaaataatgtccaagtcacttttgtttgtgggagagattggcggaaatgattacaaccatttaatcgttagggagaaatctgttgatgagctacatgaaattgttcctaatgttgttggcgccataagctcgggcatcacggaccttataaatcttggagcaaagaagttagttgttccagggaacttcccaatagggtgtgtcccattatatcttgcaatctttcagagccaaaaggagggttactatgaggaacaaacaggatgcattaagtggctcaatgaatttgctgagtaccataataggatgcttcaggaggagttggagaaactcaggaatcttcaccctgatgtaaccatcatttatgctgattattacggtgctgcattgaacatattccgtgccccactcaagtttggcttcacagtcccactgaatgcgtgctgcggaagtgacgctccgtacaactgttccccttcaatactgtgcgggcgtcctggatctacagtgtgccctgacccatcaaaatacatctcatgggatggtctacacttcaccgaggcgagttacaaagttgtcatccaaggagtactaggggggagccgccaacgacctccgtcgcctgcgctcgtggccagggcagctccgaccacctctgacgccgacccgcacaccgacgtgaccgtcgtgacctccccgacgtcactgaccaccccgccggagctctactgccgccggtaa

SEQ ID NO: 33166 - DNA, 321 bp, Zea mays
  Peptide Sequence Number=SeqID_74945
atgggatttgagggactcataaatgactctatgccacccaaggatcctgaagagggaggtgaaaattgtgaaggcaatgcagatccagaaagcctttctgacattgacgatgcagaggctgatgggtaccttcacaatgaggaagaaacacaatataaaaagattatctgggaggaaatgaacaaagagtaccttgaggaacaagcagccaaggaagctttggcagctgaattggcagctacagggattgatccagaagcgggaaagaaagtaaggaacaattttgggcaacaaaacttcctgtttaactttggcaactga

SEQ ID NO: 33167 - DNA, 1791 bp, Zea mays
  Peptide Sequence Number=SeqID_74946
atggccaatcccaaagatcacaacaatatcgtcctagacattaacacaaggctgactaactcgccggccaatgaggaagagaaattagaagaccacatgaaaaggctggacgaggaattccaacgacaacaggctcagataagcaaggtggcgaaaaagtggtacctctcgcacttcaaggtagatcatcaccagaaggtcgtcaagaagagggaagtgaagtacgattcactgtcagccttgctgcatcagctccccattccggtggccggagctccggcggccctctccctcaccggattcggcgccctcttcagaggattcggcgccctcttcagagccctcgctaacctgctcgaccgctccccaccgcccgcgacaaagaaagtacagaccctggtgtacagaggctgcgtcgaactcagcacctttggctttagtgagaaggttcttgaccaggaggtatacactgatgagcctacttttgttaaggataacaaagggcagagtcgcttagctggaagtattcttgaaagcattgagtctggatattcaatgtctcgtcaaagaaccttagacaaagggagggatgagattaggcagattgtcaataacttacatatcagcggtggagaaactatcgttagcaaggcatttcgcttctacgagctagctctcgaccgtaattttaccagggggcgtagaacaacacatgttgcagctgcttgcctttacattgcctgcagctacgtcctaggtgctgtttttcttcagctctgccaagttttgcaacttgcagaacatccagttgttcagaaacttgtagatcccagtcttttcatccatcgttttacaaaacaatttctggcaacagctgatgaatctaatgaagagcctgtttcaaaacattcgcccaagtctggagaaattctctgcaaacacaaggataaaggttttgagcattttgctcatggactttgtgaaaaatgctacaataagttcactaaactgtcgggtggactagaaggtggttctgaccctccagcattccaacgagctgaaaagaaaagacttgaagctgctaaaagggctgaagaagctgcagcagctaaggaggcagcgctggaagaatctctttgcgacacacagaattctgaggttgagagtgccatgactcctagaaagggtttaagtggagataaatcttcgaaaatgggatctgagggactcataaatgactctatgccacccaaggatcctgaagagggaggtgaaaattgtgaaggcaatgcagatccagaaagcctttctgacattgacgatgcagaggttgatgggtaccttcacaatgaggaagaaacacaatataaaaagattatctgggaggaaatgaacaaagagtaccttgaggaacaagcagccaaggaagctttggcagctgaattggcagctagagggattgatccagaagcgggaaagaaaaaacgaaaacgtaatgaaggcacgaagagctcgacacctgctgaaacaccagcagaagccacgtgcaacatgctgaaacggaagggacttggttcaaagatcaatgtgggagctgttgacgaattgtacaagactaaagatgaagttggcagcgcaaacaatgaagaagagatggagttcgacgcactgtttgggccggacaatgctgccggtgagacggtcgatgacggttacaattacaactatgggggatacgacgacgatggcgcagaaggctacaatggccttgatgacgatttcgatttctag

SEQ ID NO: 33168 - DNA, 369 bp, Zea mays
  Peptide Sequence Number=SeqID_74947
atggcgtacagcgaccgcgtcaccaccttcgaggactccgagaaggagagcgagtacggctatgttcgcaagatttggttacctgcgggttctaggcttgggatttgggtgatgtcggcggttactgtcagtggcttcccctcccgcctcacaccatcacctccagtcatccgcacaccagccggtgaccctgcgtggctgcctgtgttcctctatctcctcccgcctctgatggatcgtaaacggagcccggccacggcggatgcgcctgtgcggcctgagggcagcgggagccagcagccgctgctccaccaaggcggttgcaccgctttgggagcgcttatgccccaaagtgagcgttacccgtga

SEQ ID NO: 33169 - DNA, 1998 bp, Zea mays
  Peptide Sequence Number=SeqID_74948
atggcgtacggcgaccgcgtcaccaccttcgaggactccgagaaggagagcgagtacggctatgtccgcaagatttggttacctgcgggttctcggcttgggatttgggtggtgttggcggttactgtcgtggatctcttgggcgtggctggccttgtccaggtggtgctggcctgctgggatctagccagcattggtggtcaggtctctggacctgtggttgtggctgatggaatgggtggtgctgccatgtatgaacttgttcgtgtcggacatgataacctcattggggaaattatccgtcttgagggcgattcagctacaatccaagtttatgaggaaacagctggactgatggttaatgaccctgtattgagaacaagaaagcctctttcagttgaattgggacctggaattcttggaaacatttttgacggtatccagcgacctctaaaaaccatcgctattaagtcaggagatgtgtatattcctcgtggtgtttcagttcctgcccttgacaaagatgtattgtgggaatttcagccaacgaagctaggtgttggagatgtcatcacaggtggagatctatacgctactgtttttgagaacacattgatgcagcaccatgttgctcttccaccgggttctatggggaaaataagttacattgcaccagctggccagtacaacctgcaggacacagtgctagaattggaatttcagggcataaaaaagaaatttaccatgcttcagacatggcctgtgcgttcaccaaggcctgttgcatcgaagcttgctgcggatacacctcttctgacagggcagcgtgtactggatgcactattcccctcggttctgggaggcacttgtgctattccaggagcatttggctgtggtaaaactgtcattagtcaggcactttccaagtactccaattccgaagctgtggtttatgtgggctgtggtgaacgaggaaacgagatggctgaggttctcatggactttccccagttgacgatgacattgcctgatggccgtgaggagtctgtcatgaagagaacaacactggtggctaacacatcaaacatgcctgtcgctgctcgtgaagcttccatttacactggaattacaattgctgagtatttccgtgatatgggctacaacgtcagtatgatggctgactccacctcccggtgggctgaggcattgcgtgagatctcagggcgtttggctgaaatgcctgctgatagtggttacccagcttacttggctgcacgtttggcatccttttatgaacgtgctggtaaggtaaaatgtctgggaagtccagacaggaatggcagtgtcacaattgttggagctgtctctcctcctggtggtgatttttcagaccctgttacctccgcaaccctcagtattgttcaggtcttctggggtttagataaaaagctcgctcaaaggaagcatttcccatctgtgaattggctcatttcctattcgaaatactccaaggcccttgagtctttttacgagaaatttgatccagatttcattgatattaggacaaaagcacgtgaggtgttgcagagggaggacgatctgaatgaaattgtgcagcttgttggtaaagatgcgctggcagaatctgacaagattacgctggagacagcaaagcttttgagagaagattatttggcacaaaatgcattcaccccatatgataagttctgcccattctacaaatccgtttggatgatgcgcaacattattcacttcaacacattggcaaatcaggctgtggagcgggcagctggtactgacggccataagataacatacagtgtcataaagcatcggttgggggatctattttatcgcctagtatcccaaaagttcgaggatcctgcagaaggcgaagaagctttggtcggcaagtttaagaaactgtacgacgaccttaccactgggttccgcaacctagaagatgaggcacggtga

SEQ ID NO: 33170 - DNA, 675 bp, Zea mays
  Peptide Sequence Number=SeqID_74949
atgggggcccacgcccacgcgtcatgcaaccggcgcaccggtcgctacgtgcaagcaaccgcaccgccactcgcaccactgtcacgcctcctcgactgcggaaccagtaccgcgactcgaggcaaccctgcgtacgacccagcagggctagccaggcgcgacgacggcgcgcccgtgttccgttcctcgaacggctcgcgcacgcgcaacggccaccccacgaaccactcgccccgtcacattaactccgcggcaggcggcgcctctggcaggggaagcgagcgacgcttcacctttgccataatgaccgcgtcaaaaaaggctccgagcctccctactgatcagaggttcgaaggctggcccctcggaggggttaaacagtcgcctcagagcgcgtgggctccacacccactactggtcagaggttcgaaggccggccccttggaagggttcaacggctgtgaaagagaattggagtcttcggcgaagacaaaggcttccactccgcaactcatccttcgccgtcgctccgcgtatctctccatcttttgggggagagttcaaagcaaaaggacttcatctttggctgcctcaggccactcgggctccgcgcccactactgatcaggggttcgaaggctggccctcgaagggttcacagtcgcctcagacatag

SEQ ID NO: 33171 - DNA, 957 bp, Zea mays
  Peptide Sequence Number=SeqID_74950
atgtcggcgcgtgaccgcgagacggccgaggcgctggtgcgcgaagacaaaggcttccactccgtaactcatccttcgccgtcgcttcgcgcatctctccatctttttggggagagttcaaagcaaaaggacttcgtctttgctgctaaccccatcagcacaaagctgcaaaggcctgatgggcacgattccggtcaaggctccgtccacttaagggacacgatctcgtctcgcccgagcccagcctcgggaaggaacagtagaccaaggcagattcacgcctcgtccgagggtctcctcaagcaacaggcgcaccttcgactcgcccgaggcccagctcgggcaggcttcgcggagaagcaaccttggccagatcgccacgccaaccgaccatatcgcaggagcaatcaatgcaaggatcgcctgacaccttatcctgacgcacgctcctcagtcgacaaggccgcagaaaacaacgccgcctgccctgctccgactgctgtgccactcgccagagtgaggccgacagcagctaagtccagccttgggcgccataggaagctccgcctcgcccgaccccagggctcggcccccgtctcggcctcggaagacggtctccgcctcgcccgaccccagggctcggactcaacctcgacctcggaagacggtctccgcctcgcccgaccccagggctcggactcagcctcgacctcggaagacggtctccgcctcgctcgaccccaggtctcggactccacctcgacctcggaagacggtctccgcctcgcccgaccccagggctcggactcagcctcgacaccggaagacggtctccgcctcgcccgaccccagggctcggactcagcctcgacctcggaggagtcaccgtcctcgcccgacctcgggctcggaccgaccacgtcacagggggggccccatcattaccctaccccctag

SEQ ID NO: 33172 - DNA, 345 bp, Zea mays
  Peptide Sequence Number=SeqID_74951
atgaagggtggacgagaaatcatcgatgaagccatcaaaagaaatgagaaggaatctcatgatgctttagacgaagcaaaaagggctgaagaagctgctgagcgggctagacttataggtatgcattttctaatttattttcataggtttttcagcttcgacactgacaggtacttgtggctcaatgcaactgagctttctccacctcccgaaccatacaatcctgaagctgacccgtccatcaaagaggcgttggacattattaaaattgctaatgactctattgacgaagctgtcgacaggcttctgaacgaagctgccgataaagtccttagggaagactaa

SEQ ID NO: 33173 - DNA, 282 bp, Zea mays
  Peptide Sequence Number=SeqID_74952
atggaggatcactggtgccacaagaacctgctggtggcgtcttcaaggcgggtgtccagcggatgggaggataacggcggctggatgtggagcttcgacactgacaggtacttgtggctcaatgcaactgagctttctccacctcccgaaccatacaatcctgaagctgacccgtccatcaaagaggcgttggacattattaaaattgctaatgactctattgacgaagctgtcgacaggcttctgaacgaagctgccgataaagtccttagggaagactaa

SEQ ID NO: 33174 - DNA, 1392 bp, Zea mays
  Peptide Sequence Number=SeqID_74953
atggtcccaaggaaccccggcctctatcttgcagtcgcgttgggaatcctccacgatgtcattccagcgtggaatcttgtgccggacaagttcacctactctaccgtcgtgtctgcactggccgatgcggggtgcgtggaagaggcggtggcgctggttcatgagatggtggtcgatggagtggtgtctgctgaggcttttaaccctgtgctgaaggcgatgctgcgtgcaggggatgtcaatggggcagtcaagctatttcggtttatgcagctgaagggctgcacactgaccgcagtgacatacaatgttctgctgcatggtctactgttgtgtggggaggcgagggcagcgatgaacatcatgagaagaatggagaatgaagggattgtgccagggttgatgacctacggagcagtggtggatgggctggtgaagtgtgggagagtggaggatgcatggaaggtggctcaggaaatgggggggcagggactagcacccagtgagtttgtgttctccgctgtgatcaccgggttttgcaagtcaggagaggttgacagggcattgatggtgtgggagacaatggtggcagctagggtaaagccgaatgttgttttgtattcagcaatgattgatggttttgcacggtctgggaggatgacagaagctgaaaagttatttgaagaaatggttgatgcgaaatgtatcccaaatatcgtgacatacagctcaatggttcggggatatttccacattgctaattcatcgcgggcactctctacgtgggaggagatgataaaggttggctgtgtgccaactgccattagttacagcatattgatcagtgggttgtgtgatgtagggagattaaaagatgctatgatggtctggaaaaacatgattggtcgtggctgtgcacctgataccattgcttatacttcaatgatgaaaggtttatgcatgtctgggatggtagatggtggtctccgtctatttaatgacatgctggcaaagggtgatgccaaaccagatgtcattagttataatgttctattggatgcgttgatccgcacaaatgacttacctcgggcaatggacttgcttaaccagatgcttgatcaaatgtgtgatccagacacaataacatgcaatatttttttgcgggagtttggagttttagaggggaaagggagggaattcttagagggactggtcatgagactatgctatagagatagatatagggcagcaggagatgttgttatggtcatgctggctaaatatattgtgccggaggctggcatttggtataccatagtgagaggagtttgtcagactaagagagttcaaaaggtggttgacaattgttgggatgagatttggaggccttag

SEQ ID NO: 33175 - DNA, 1859 bp, Zea mays
  Peptide Sequence Number=SeqID_74954
atgcccccagtggcgctgcccggcaaggaggctgggtacttgggggagtatcgacgaagcatcatggctcccgacgaagcagaggctgcgactagcgcgctggacgttgctgggggctacctgatgctggcggatttccagacgagaaacgccggaaacaagaaatgcggcaaggccgtgcctccgcctgaagacagccgccgtcctccccaccgccatgcttcgccttcccctatgccccatcccgccacccgcctccccctctccttccgccgtctcacctacttaccctcccttgccgcctctaacgcgcgcggctgccgctcgtcctcttcatccgacgacgaattacccctcgccgccgagctctttccggccgcagggcctacgctcctatccatcgcgcgatccctcgccgtcgcctccccgcccccgtccgccgcgtctgtcctcggcttcctctgccgccttccccacgacgcctccccgcacatcttcccccacctcgtcgccgccctcgcccgctcgccccgcccggtccttgcgctccgcctcttcctctccccgcccacgtccgcggccaccacccaccactccttcaactccgcgctactccggtttcccctcccccttcacctccttccggccttcttcactcactccatcctacgcttccctggcctcactcccaccctgctctccttcaacctcctcctcaagtgcatctgctcctccatggtcccaaggaaccccggcctctatcttgcagtcgcgttgggaatcctccacgatgtcattccagcgtggaatcttgtgccggacaagttcacctactctaccgtcgtgtctgcactggccgatgcggggtgcgtggaagaggcggtggcgctggttcatgagatggtggtcgatggagtggtgtctgctgaggcttttaaccctgtgctgaaggcgatgctgcgtgcaggggatgtcaatggggcagtcaagctatttcggtttatgcagctgaagggctgcacactgaccgcagtgacatacaatgttctgctgcatggtctactgttgtgtggggaggcgagggcagcgatgaacatcatgagaagaatggagaatgaagggattgtgccagggttgatgacctacggagcagtggtggatgggctggtgaagtgtgggagagtggaggatgcatggaaggtggctcaggaaatgggggggcagggactagcacccagtgagtttgtgttctccgctgtgatcaccgggttttgcaagtcaggagaggttgacagggcattgatggtgtgggagacaatggtggcagctagggtaaagccgaatgttgttttgtattcagcaatgattgatggttttgcacggtctgggaggatgacagaagctgaaaagttatttgaagaaatggttgatgcgaaatgtatcccaaatatcgtgacatacagctcaatggttcggggatatttccacattgctaattcatcgcgggcactctctacgtgggaggagatgataaaggttggctgtgtgccaactgccattagttacagcatattgatcagtgggttgtgtgatgtagggagattaaaagatgctatgatggtctggaaaaacatgattggtcgtggctgtgcacctgataccattgcttatacttcaatgatgaaaggtttatgcatgtctgggatggtagatggtggtctccgtctatttaatgacatgctggcaaagggtgatgccaaaccagatgtcattagttataatgttctattggatgcgttgatccgcacaaatgacttacctcgggcaatggacttgcttaaccagatgcttgatcaaat

SEQ ID NO: 33176 - DNA, 228 bp, Zea mays
  Peptide Sequence Number=SeqID_74955
atggggcagcaggctgctgcgctcttgggagagcagcccgtctaccacgccgtgcaacgtaccattggctgcggggccgccatgcccccagtggcgctgcccggcaaggaggctgggtacttgggggagtatcgacgaagcatcatggctcccgacgaagcagaggctgcgactagcgcgctggacgttgctgggggctacctgatgctggcggtggctgctgcctag

SEQ ID NO: 33177 - DNA, 374 bp, Zea mays
  Peptide Sequence Number=SeqID_74956
cggagcggctgccgcgcgaacccgaggctgacgagttccggagaccgcgcttccttggagcaccggacatgtccggtcgtgcggccggttcgggcgggggattcgtcgtgggcaggaggggaatcgcggcgggggcagtcgtgcgcgggattcgcgacgctgctgcgctcttgggagagcagcccgtctaccacgccgtgcaacgtaccattggctgcggggccgccatgcccccagtggcgctgcccggcaaggaggctgggtacttgggggagtatcgacgaagcatcatggctcccgacgaagcagaggctgcgactagcgcgctggacgttgctgggggctacctgatgctggcggtggctgctgcctag

SEQ ID NO: 33178 - DNA, 280 bp, Zea mays
  Peptide Sequence Number=SeqID_74957
atggcctacgactactacgcgtccggcgccgaggatgagtggacgctgcaggagaacatggaggccttctccaggatctttgttgcaattgcccctgtacttgacagatttgcattagatgctcaagctatagaggatgttgatcctagggcaatagaccttgccatgagaatcgccgaaaggatgttcctcaaaatgaagaaagatgaggtgaagatcaagattgaagaagaagacaatgatcgatggagaccatacgacgaatccacctcttcacaag

SEQ ID NO: 33179 - DNA, 1257 bp, Zea mays
  Peptide Sequence Number=SeqID_74958
atgggggagatcaccaatgtcatggagtaccaggccatcgccaagcagaagcttccgaagatggcctacgactactacgcgtccggcgccgaggacgagtggacgctgcaggagaacagggaggccttctccaggatcttgttccgtccgcgcatactgatcgacgtgtccaagatcgacatgaccaccaccgtgctggggttcaagatctccatgcccatcatggtcgcccccactgctatgcagaagatggctcacccagatggggagaacgccactgcgcgcgcggcggctgcggcaggcaccataatgacactgtcgtcctgggcaacttcaagcgtcgaggaggttgcctcgaccgggccagggatccgcttcttccagctatacgtctacaaggacaggaaggtggtggagcagctggtgaggcgagctgaaagggctgggttcaaggccatcgcgctcaccgtcgacacgccgcgccttggccgcagggaagctgacatcaagaacagatttgtcctgccaccacacctgacgctcaagaacttcgaaggtctggacctcggcaaaatggaccagcttaatgtgtgcgcgccgatcgagcatgggcaggctgctgattcagggctggcttcctatgtcgccggccaagtcgaccgcaccctgagctggaaagacgtcaagtggttgcagaccatcaccacgctgccgatcctcgtcaagggagtgctcaccgctgaagacacgaggcttgcggtggcgaacggcgcggcggggatcatcgtgtcgaaccacggcgcgcggcagctggactacgtgccggcgaccatcagcgcgctggaggaggtcgtgaaggccgcccggggccagctccccgtgttcgtcgacggcggcgtccgccgcggcaccgacgtcttcaaggcgctcgcgctcggcgccgccggcgtattcgtaagctacctacctaccctgctacccagcgctgatacaaccaccgcacagacgtctaataacgtcttcattattcgtcttcctggcctgccgtcgtcggactggctgacgtacgtcgggaggccggtggtgttctccctggcggcggcgggcgaggccggcgtgtccaacgtcctgcgcatgctgcgggacgagttcgagctcaccatggcgctcagcggctgcacctccctcgccgaaatcacccgcaagcacatcatcaccgagtccgacaagctcagcgccatcccgtcgcgcttgtag

SEQ ID NO: 33180 - DNA, 435 bp, Zea mays
  Peptide Sequence Number=SeqID_74959
atggctccatctttagtgcgattatatgagcaaatgcctgaaccgaaatacgtcattgctatgggagcctgtactattacagggggcatgttcagtacagattcctatagtactgttcgaggagttgataagttaattcctgtggacgtctacctgccgggttgcccgcctaaaccagaggctgttatagatgccctaacaaaatttcatgaagagggaattgtgagagaggacgttccttttagaagagcagaatccaaatatagtgttgaacaagtaggcgtaacggtggagttctatggtggcgaacttaatggaacttggatgctcaagtggaatttggaacattccaaaaagttggagatccaactacaaggagacaggcagcctgataccacattgctatggtatctttcacctccattttttgtttga

SEQ ID NO: 33181 - DNA, 489 bp, Zea mays
  Peptide Sequence Number=SeqID_74960
atgcaaaaatccaagtctacactacggaccgtccggaggaaaagcaaggaccgtctgagacaaagcgcggaccgtccgctcactaaaggatgggctattcatctcggtcctcatggggatggcatagctgttggatggttaggacatcctgtctttagagataaagaaggacatgagctttttgtacgtcgtatgtctactttttttgaaacatttccggtcgttttggtagatgaagagggaattgtgagagcagacgttccttttagaagagcagaatccaaatatagtgttgaacaagtaggcgtaacggtggagttctatggtggcaaacttaatgaagcagacctcttgagctacccacaacaagtccggtggcattgtagcccacactcgcccatccctatgcttaaacaacccccaaaagacccctatgaaagcagaaatcaacagcttgagtcttcttggcaggtgccaattaacgcataa

SEQ ID NO: 33182 - DNA, 960 bp, Zea mays
  Peptide Sequence Number=SeqID_74961
atggggctcaagtcactatctcaaagaatcgaatgcgtgagaatggagtcatggtgcttaggaatgatcaaggaatgcttggccaaccgttggatcttcgggctggttggcgcaccggacactgtccggtgccccctgctgaccgttggagcgggccacgcgtcgctcgcggatttggcggccgaccgttgcgctggcggccgttggctcaccgaacagtccggtgcaccaccggacagtctagtgaattatagccgtacaccgccaaaaactcccaagagcagccagttcgccggagaccagtctggcgcaccggacactgtctgtgcccactcgccctcctcttccctcactcgcgcactcacagccctcggcactcgcctcgcaccgcgcgcgcacctagggagttccactgtcgttcgccgtggtccgccgcccattctgtggccgtcgttgagtctctgccgcgcccgctgcctcggtgagctacacctcttcgccagcagcggggacatcttccggtttgcccctaacccctctggttcgcccggtccgcgctcaccggcgttctccccgtgcagccgaagtcccaccgccgtcgacctgaggcctccctgcgcccccgtcgttgctcaagcgttcctgagtctccactcaaggtcagcaaccctcacatgcccttatttccctagttactgctctgttgtccgcgtaattacttgccggagcgagtccgcgccgccgttgagtcgctctatcgcggtctgcgccctcgggtgcctctgcgccggtgtcgtgcccacggctgggtccgccgagtcgccccgatcctgcctaagccctttcctagtgccccagaccctcgtcgtggtcgtgccctcgcctccggcgaaacttcggaacaaagtcgggcgccgccaccgtgaaccggtcagcaacccagcccgagctcgccattag

SEQ ID NO: 33183 - DNA, 426 bp, Zea mays
  Peptide Sequence Number=SeqID_74962
atgaagcacaacgagttcactactagaacagagctcaagtcactaacaaagtcaatcaagtgcgcggagacggagtgtggaagacttagaatgctcaaagtatgcttatgtgactcctccatgcgcctagaggtcccttttatagccctaaggcagctaggagctgttggaggaattcttggtaggcaaatcttgccttctgtcgggtggcgcaccgggacagtccggtgcaccaccgggacaccagctgttcatgtctggtgcgcgatttccttccattcctggcgtagccaaccgtgcaacttcgggctggttggcgcaccggacactgtccggtgcccccagccgaccgttggagcgggccacgcgtcgcccgcggatttggcggccgaccgttgcgctggcagccgttggctcaccggatag

SEQ ID NO: 33184 - DNA, 1110 bp, Zea mays
  Peptide Sequence Number=SeqID_74963
atggtgctggctgggttgttcgagatgatggtccttcccgccctccctgctatcctcgccccaaatcgacgagaatcatgcagcccaaatctgaggtggaggcgtctgcactgtcgatggaggtgtcaagtctgcagtggtgtctgtagatgggaaggcatggtgtgcagcggcagcggccaggtggtgtcgctgagcctgcccttttacgggctcactggcacgctctccacggccttcgggaacctcacattcctgcgtatgctgaacctgagctccaattcattccgcggggaggtcctagcgaccatcgttcgccttgcgcatctgcatgcgctagacctgagctacaacgccttctccgatgctcatgacatttcccaatgcaacaaaatatctgaaaaagtgcttgatggttgcgtggaagaggtggggggctaccgcgtcggctacgacatcaagctctccggcaccgagtcccctaggtcggtcacggggctcgagggcgtctgcgtccgtgtgctatttgcctgggtgctcatcaccggcgtcgaggcggccgatggagaggtcactgtccacatcgggccaatcaggaagtcgttccccgccgttgggttcaaatccagcccctggtgcatcatcggatgggcgacgaaagcctggcctttcctcagagtgctcgacggttgcgtggaagaggtgggaggctaccacgtcggctacgacatcaagctctccagcaccgagtcccctaggtcggtcacggggctcgagggcgtccgcgtccgtgtgctgtttgcctgggtgcccatcaccggcgtcgaggcggtcgacggagaggtcactgtccacatcgggccaatcaggaagtcgttccccgccgttgggttcaaatccagcccccggtgcatcatcagattggaggcgtggtcacttgtcatggggtggagactaaggatccaagccaatatcacggaccacaacatcaagtgtatgaggcagggcaaagaggccaacaggtgcaggttttcctcatttttattagatcctttcttagcgatcttggatctccactctccaggactccagggtttgccgtttgcttga

SEQ ID NO: 33185 - DNA, 1980 bp, Zea mays
  Peptide Sequence Number=SeqID_74964
atggtgctggctgggttgttcgagatgatggtccttcccgccctccctgctatcctcgccccaaatcgacgagaatcatgcagcccaaatctgaggtggaggcgtctgcactgtcgatggaggtgtcaagtctgcagtggtgtctgtagatgggaaggcatggtgtgcagcggcagcggccaggtggtgtcgctgagcctgcccttttacgggctcactggcacgctctccacggccttcgggaacctcacattcctgcgtatgctgaacctgagctccaattcattccgcggggaggtcctagcgaccatcgttcgccttgcgcatctgcatgcgctagacctgagctacaacgccttctccgatgctcatgacatttcccaatgcaacaaaatatctgaaaaagtgcttgatggttgcgtggaagaggtggggggctaccgcgtcggctacgacatcaagctctccggcaccgagtcccctaggtcggtcacggggctcgagggcgtctgcgtccgtgtgctatttgcctgggtgctcatcaccggcgtcgaggcggccgatggagaggtcactgtccacatcgggccaatcaggaagtcgttccccgccgttgggttcaaatccagcccctggtgcatcatcggattggcgacgaaagcctggcctttcctcagagtgctcgacggttgcgtggaagaggtgggaggctaccacgtcggctacgacatcaagctctccagcaccgagtcccctaggtcggtcacggggctcgagggcgtccgcgtccgtgtgctgtttgcctgggtgcccatcaccggcgtcgaggcggtcgacggagaggtcactgtccacatcgggccaatcaggaagtcgttccccgccgttgggttcaaatccagcccccggtgcatcatcagattggaggcgtggtcacttgtcatggggtggagactaaggatccaagccaatatcacggaccacaacatcaagtgtatgaggcagggcaaagaggccaacaggtgcaggttttcctcatttttattagatcctttcttagcgatcttggatctccactctccaggactccaggttgatgctatgctccaagaattagaaaaggagattgatgatgtggatgcacaaattggaaatcgttggcaactgcttgataaggaccatgatggcaaagtgacccctgaagaggtggcggcggcgacagcttatctcaaggacaccatagggaaagaaggcgtgcaagagctcatcagcaacctttctaaagacacaggttcattcacctacatgctgccccagtgttgcctctgtccaattttcttgtatttttctgaacgttctctttatgcactccctcagaaggaaaaaatccttgttgaagatattgtgaagctagcatcccaaatagagaacaatgaagaggaagaggaagcacggaatcacagcagccgccacaataacagcaaccacaagtgcaggtgtagcaggcgcaaccacaaaaacaagcagcacctgttatgcgcagagaatcatctattgctgctcggcaagcagcaatggcacatcaatctcaggagactaaacctgttcaatcttcgcccaagatcaagcgtcaaacaccagcgagatctggttcagtggcatccacagcctccggtagctgcatccgcaccaaaacctggtggtagtccaaagaaaggtgaggtcaaacctgctgtcgacccagttcaaactccaaccacaggtgccgattcaacgaaacccgagcctagcgccccatcactccctggagccgaaggggtggacaagatggccatcgatgaggccagtggtgacgccccagaggtagcagaagagcttgaccctgcgctcgaagaggagatgtcgatggaggagatgatccgtgtgacgcgcgccaagctaaggaggcgcacgaccaccgaagttcctgctgggaattag

SEQ ID NO: 33186 - DNA, 249 bp, Zea mays
  Peptide Sequence Number=SeqID_74965
atggacatcacaagtaagatggacgttgcaaaagtgatactcgggtgcatagctcggagacaactgatcaagccaaggacagaggcaagaagagcttcgaggtaccaagtgcatgggagaaggtcaagaaggctgaggaacccaaagccaagggatgttggagctaagaaatgtcaatctagatcaagtcaagccgacttgatgatttatgagtccaacatcaaagctcaagcatgtgaaatgctatag

SEQ ID NO: 33187 - DNA, 249 bp, Zea mays
  Peptide Sequence Number=SeqID_74966
atggacatcacaagtaagatggatgttgcaaaagtgatactcgggtgcatagctcggagacaactgatcaagccaaggacagaggcaagaagagctttgaggtaccaagtgcatgggagaaggtcaagaaggccgaggaacccaaagccaagggatgttggagccaagaaatgtcaatctagatcaagtcaagccgacttgatgatttatgagtccaacatcaaagctcaagcatgtgaaatgctatag

SEQ ID NO: 33188 - DNA, 278 bp, Zea mays
  Peptide Sequence Number=SeqID_74967
ggcggttgaacctccccccagggcggttgagcctcccctggcaggcctggcagcctgtctgccagtctgactggcagactgacgcgcagactgaccgcatactggtcagaggggtcagagaccagctgaactgcccctcaggaccagttcaaccggtcttgaccagagagtttaggagagaaaaccccagctcaactgcccagaggcaagttcagctggtgtatggtcaaagaggttcacagctgaagttgagttcagctgaagttcagcccagctga

SEQ ID NO: 33189 - DNA, 330 bp, Zea mays
  Peptide Sequence Number=SeqID_74968
atgaagcacaaaaccgcagctctcaagctcactcaaagattcctctccaaagatttgaaatgggagaggcaagagatgtgtgtgagggagagggaggcctggcagcctgtctgccagtctgactggcagactgacgcgcagactgaccgcatactggtcagaggggtcagagaccagctgaactgcccctcaggaccagttcaaccggtcttgaccagagagtttaggagagaaaaccccagctcaactgcccagaggcaagttcagctggtgtatggtcaaagaggttcacagctgaagttgagttcagctgaagttcagcccagctga

SEQ ID NO: 33190 - DNA, 318 bp, Zea mays
  Peptide Sequence Number=SeqID_74969
atggggtccccatgtttgacgatggacagcgcggtgcagccgctctggaccacgtccaagcggcggctgcgccggagcttgccgtacacagcggcgcatgggccatggagggggaatgagaaagacaggcagctgggaatgggaatgagctttgcagtgaggacggaatgggaatggcagaacacggaatggggcagcctaccccttaccgtcttaataggtagtagagaaatgggccaggcccattacactgagggtatgagggcactaggggctggtgcaagtgacatggtgatctggttgatccaggggttgtag

SEQ ID NO: 33191 - DNA, 1335 bp, Zea mays
  Peptide Sequence Number=SeqID_74970
agattcgtcagccgacagctgataagaagaaggcagaagaagctgagaataagagaaaggcaaaaggccgaagtagctgagatcaagagaaaggctgcagctgaagaagctgagaagaagaaggaagaagaagctgaggataagagaaaggctgaggccgaagaagctgagattaagagaaaggctgaggccgaagaagctgagattaagagaaaggctgaggctgaagaagctgagattaagagaatggctgcagctgaagaagttgtgaagaagaaggctgatgccgagaagaaggttgaagcggaggagaaaaggatacaggttgcaatccagaaacagctaaaggacaacatcaaagctttgaaaaagccggtgcccgctgccaagttaaagaagatgttccagttacaaatgtcaaaagaatatgctgagcagcgccaacagtacgaggataggttgaacatgcttcgtcaggaggccaaagctgagattgatagtttggagaagagcattgatgcccaggcaggacccagctcatcatttgatgatatccagttcccggcagagtctgatgatgatatcaacaatttgacccaaccaatccgactttctcaagacgaagtctcagtaggccaggctgatttcagtgagtttcaaaggatgatattcaagcgcctaggtgatagagtgctgaagaagcctagggagtacatatccccgttcaagatccctcgtaatcgacctgagatacccctggccaaggctgttgcacttaggcggaagatcacatctgatcctgagctgaaaaggagaattttgttggagtttggccttcttgttggactaactggcaaggaaattttaacatctttttctaatgacacccttggtgagtcaggaatcatagactttttcgtgcactgcatgcgacatgatgatattgtgcacaaggttgattcttgtggatacagagtgtttctgaccactggtttttatgtttttgtccctatcaaagatggtgctcactattttgtatattgcttcaattttatccataagcgtattgatgtgctggactcgaacgactacttcctgaattgttctaatcaggaagaacggcacaaggctgtctttgccaaaatcccaattattgatgcagccttccagaaagtttccaacctcaagttacccagattcaagggcccgatatacagatgtgagctgttgcattacgagatcttccaccctttgaaccaagctgaaattcctggttcgcttgataagtttagaattggtggtcgtccgttgccaattgaatgggatagtagttag

SEQ ID NO: 33192 - DNA, 2634 bp, Zea mays
  Peptide Sequence Number=SeqID_74971
atgtcgcgggcctcattccctctggtgcataatggtggccacaccacaaacatagttggtctggtctcgcaagactctcgccctactcggtacaatgttacaatgactcatgcaagagtcgagggttttgaggtgttttttataatggatcaagatcagaatgtcacaggccagcaaggcgctcatactgtccgtcgctctcctcgtgtagaaaacaagagaaagcaattagataaaaatgaattgaaggaaaggaggaagagattaaggttgaaagtccctcctatacaagatgccgaaagtgatgatgaacaagacccagagtttattcctggtggcgatgggtctggcgatgacaatgttggtattgttggtggagatgaaaataagggtataactaagacacgagctatacgatgctcacctgggaagtttataaagcttgtgagttctctatctgatgaattgaaaagtgaagtagttgccaaggggtttggcggcctgctgagatttaagccgcacttaatgtccagaaagttgctcagctggctgatgcggaaccttaaaccagaaacgatgaaattagagattggtggtggaaaagagattcaaatcaccgagcatagtgtttggtgtgttttgcagttaccaaacgttggcagtgatccaccccccatgtctgatgcagatgctcgtgccttgcgggacgagctgggggagcaaatttgtggcaaatcttatagacgcatatctggtatcaatatatatgttatcactgatagactgcagaagaggactctcaatggggagctgggcctgagagcctttttcatggcagcatttcagtgtctgctattctccaacactgacactcgcatcaggattgatgatgtaaagtacactcaggacatccagaacatgggcaacaagaactggtgcaaagctgtagtagacaggctcagcatagctgctcgtctttatagaaaggattttgcggagaaaggcattaacgcacccatcagtggatgcgggatcttcgtagctatgctttatgtcgacaacctgcaacatggattagacacaagtcctttttcaatccctcgatgtgctttcttggactccaagatgattgatgctatagcaaataaggatctcaggggagatgttcctcctgggaccactgagtttggacacctcaggttgagaagtatcactgacacgtgctacggcatccccattggtgctctagcaatattacatgctccagtaccagcacctgtcccagtagcagtccctaatccaacagcagcacctaacccagtagcagcagcatctgtcctagtagcaacagcagcacctactgggacatctgctgatgtgcttggcacatcccatgatcccgcctgtcatgcttccttcaatatccaacccccagtcttttaccagtaccctagctttagatcttcttttggtcagagcattactgatttagttggaaggagtaggaagtcagatgcgctgaacatcttgaaggcgtttgatgaaagcactagtgaagcccagtcgtacgcacagaaggctgcgaagtattcaacaatatctcgcgaccttatggcaaaagctcaccacgagtgttacactggcattcagaagcttatcgctgacgctatcgttgagaagcgagctgccaaagagcgcaggaggaaggtgaagaacgaccccagagcaggagcaggagcaggaactagttcaattgcaccggaggaccaatctagaggaggtgatggtgaagaaattatgtggagtcccgttgcaattgacactagagcaggagcaggatcaggaactacttcaaatgtaccggaagaccaatctggaggaggtgatagtgaagaaatacagttggattgcagtggtggagatcttgatgacagcttagattttatgagaaccccatcgtgtggtgatgacattgatctggaagagggaaatttgaatagaacacctcctgatttacgtggggcaatccgaagtcttgatgatatattgcaaatgatgtattccccacagcactttgcaagcattgatggcgaatcccctcccaatagccagccgactcgtgcaccacgaattactgttcgcaagaggaaggcttcctcaaacccccctggcaatgatcaacggcatgtgggagcacctgagatagaagaggagcctctgagcagggacactgggatgcagcatcctactgcccaggatcatataacttactcaaagaggagcgataggtccattcaagttgccaacacacagaaggcagaggctgagaagaagaaggttgagattgagatgaagaatgctgaagctgaggaggctgagaagagaaaggctgaagccgaacaagctgataagaagaaggcagaagaagctgagaataagagaaaggctgaggccgaagtagctgagatcaagagaaaggctgcagctgaagaagctgagaagaagaaggaagaagaagctgaggataagagaaaggctgaggtcgaagaagctgagattaagagaaaggctgaggccgaagaagctgagattaagagaaaggctgcagctagaagttgtgaagaagaaggctga

SEQ ID NO: 33193 - DNA, 336 bp, Zea mays
  Peptide Sequence Number=SeqID_74972
atggaggaggacctggacacggacgacgagggctcgtgggaccttgttgggagggacatccggctaaaggccgccttcctgtgcattgacctcggccgtgtgatcgccttgtgcgggggcgaagagcgcaagaaggcgctcactgctcttgccaacaagctcttctactccatggatgagctgggcgacgcagtggagagcaggagcctccctctgacgcaggcgcgctacagcgacaccgctgacgcgctccgcgaggtcgtcgccgtcctcgcgctgtccctggacctggagttcggcccggatgatccctgctccccagacatcctgatttga

SEQ ID NO: 33194 - DNA, 1032 bp, Zea mays
  Peptide Sequence Number=SeqID_74973
atggaggaggacctggacacggacgacgagggctcgtgggaccttgttgggagggacatccggctaaaggccgccttcctgtgcattgacctcggccgtgtgatcgccttgtgcgggggcgaagagcgcaagaaggcgctcactgctcttgccaacaagctcttctactccatggatgagctgggcgacgcagtggagagcaggagcctccctctgacgcaggcgcgctacagcgacaccgctgacgcgctccgcgaggtcgtcgccgtcctcgcgctgtccctggacctggagttcggcccggatgatcccgacggcaagaggattgctgaatatattaatagaaggagaaaaactaaatacagggactactggccagcaagggaccaactacagcctattcaagaaaaaattagatatatgatctcctcaaacatcggggaggtcgcgtccatattcctgacatcggctttgggtattccagaaggtctcatcccagtgcaactcctatgggtcaatctagttacagatggccctccagcgactgctttggggttcaacccgccagataaagatatcatgaagaaacctcctcgaagaagtgatgactcgttgatcactccttggatcttgtttcgctatatggttattggcctttatgttggggttgcaacagtgggaatcttcatcatctggtacacgcatgacagcttcatgggaattgacctggctagtgatggtcatacacttgtgtcgtactcccagctctcaaactgggaccagtgctcctcatgggagggcttcaaggtgtcgccattcaccgcaggagcgaggacattcagcttcgatgcaaatccatgcgattacttccagggtggcaagattaaagcaacgaccctctctctgtcagtcttggtggccattgagatgttcaagttccaaattatcaaagtgcactttcttcaaagcaacaatcttcaagatcacgggctctgtaaacattactatatgtaccctgaccaatatgaataa

SEQ ID NO: 33195 - DNA, 789 bp, Zea mays
  Peptide Sequence Number=SeqID_74974
atgtgccgctccatggatgcgagcgccccgtctgggctgactgagctcgtgacggacgtcaagaggattgctgaatatattaatagaaggcgaaaaaccaaatacagggactactggccagcaagggaccaactacagcctattcaagaaaaaattagatatatgatctcctcaaacatcggggaggtcgcgtccatattcctgacatcggctttgggtattccagaaggtctcatcccagtgcaactcctatgggtcaatctagttacagatggccctccagcgactgctttggggttcaacccgccagataaagatatcatgaagaaacctcctcgaagaagtgatgactcgttgatcactccttggatcttgtttcgctatatggttattggcctttatgttggggttgcaacagtgggaatcttcatcatctggtacacgcatgacagcttcatgggaattgacctggctagtgatggtcatacacttgtgtcgtactcccagctctcaaactgggaccagtgctcctcgtgggagggcttcaaggtgtcgccattcaccgcaggagcgaggacattcagcttcgatgcaaatccatgcgattacttccagggtggcaagattaaagcaacgaccctctctctgtcagtcttggtggccattgagatgttcaagttccaaattatcaaaaaattcagcaaaatcgagccgtctttgccactcttagcagaaaggaatccttttgtatctcgaacttcaagtgcttccagtactgaattactctag

SEQ ID NO: 33196 - DNA, 789 bp, Zea mays
  Peptide Sequence Number=SeqID_74975
atgtgccgctccatggatgcgagcgccccgtctgggctgactgagctcgtgacggacgtcaagaggattgctgaatatattaatagaaggcgaaaaaccaaatacagggactactggccagcaagggaccaactacagcctattcaagaaaaaattagatatatgatctcctcaaacatcggggaggtcgcgtccatattcctgacatcggctttgggtattccagaaggtctcatcccagtgcaactcctatgggtcaatctagttacagatggccctccagcgactgctttggggttcaacccgccagataaagatatcatgaagaaacctcctcgaagaagtgatgactcgttgatcactccttggatcttgtttcgctatatggttattggcctttatgttggggttgcaacagtgggaatcttcatcatctggtacacgcatgacagcttcatgggaattgacctggctagtgatggtcatacacttgtgtcgtactcccagctctcaaactgggaccagtgctcctcgtgggagggcttcaaggtgtcgccattcaccgcaggagcgaggacattcagcttcgatgcaaatccatgcgattacttccagggtggcaagattaaagcaacgaccctctctctgtcagtcttggtggccattgagatgttcaagttccaaattatcaaaaaattcagcaaaatcgagccgtctttgccgctcttagcagaaaggaatccttttgtatctcaaacttcaagtgcttccagtactgaattactctag

SEQ ID NO: 33197 - DNA, 399 bp, Zea mays
  Peptide Sequence Number=SeqID_74976
atggtggtggaggctgcggtcgcagctgtgttagtggaggagatgtggtggcggcagctagacagcatcgtgagcgcggtgtcgtttgggctcatgtccatgttccttgccattgccatcctcgagcacttcctccgccccctggcccacacgctcgagcacgcgccgccccgggggatccgccaccgcctcctcctcttcctcagccgtggcggtgcagccatgcccttccatggtgtgccacaccagctctcggaggtgcacaagaagcgcacgctctaccatcccgagttgccctctgcctccaggcatttcgtttgttactcatccatcggacatgcatttggtcccaaaaaaagggtcaagctcctatcactgttcatcatttggaatctttga

SEQ ID NO: 33198 - DNA, 3141 bp, Zea mays
  Peptide Sequence Number=SeqID_74977
atgcctgcttctgctcacaaaaatctcgattctggttgtcctaggagatctacaaggtttaaggatattcatgtagtttatgaagattctgacagggatccttcttcttttaagaggatcaaaactgaagtaattgattctgaactaagtgttggttctgtcagtgacaaggatagtgaacacaattgtcatgatgtattactcaaggatctcaggactcagtgtaaagctaagaatcggaagatttcaaaaatcacattggaaggatgtggcattaagaatcaggttaaaacagaagatgacattgatcttgataagcctattgttgcattgaaacagaagaggctgaaaacatctcctgctaaggctaatataaagatggatgcgctaagatcttctccatgtgctgctaaagagaaagatacaacatcagccagagacaagattcttagttctgcacagactttcctgctgaaagcaacaatgcaagaccgaggattagagaagcctggaaggagaattgcagaactggagcagtctaaagttgttattgattctgctgaagaaatagttggggagcaaatttattgtgctgaagtgaacaatacagctggagttctagcgggttgtgtaaaacctgatgtactatatgaaataaaaactgaagatacaaattattctgaatttggaacttctatgtgttccataaagaatcctgatcattcatcctttgagctgcaacagaagctggtggatgatgatgactgtgtgcctccattttgtttcatgacccgaccagctcaattagctgatgtttctgatcattcctgcgaacaaacctgcagttccaaagaaaacaattctgatgacattacagctgcaaaggcaactgatgttgtttcttcattggatctcactgatgaaataaagatgagcaatggaatttatttgcccatggggaatgaacctgcaaagattttggaagagttgtctcctattgatgagtctagcacagatactcaatctgatttgtgtagaagcacagaaatgaatttcacttcacttgagggggttgtacggatggaggctgagggccaattggattcaatagtctgctgtggtgtaagaccaaagcatatgttactagatatggaaattggacatacagccactggtacattcacctttgacaagactatcgacttagctcatcctgccaattttgttgcacaagatggaaggctagaaagtatagtatatgatgttttgaataatcatgcacaaaggacaacctctaaaagtaaatcttctgttggacttccagatactgctgtgcttcagagctcacttattgagttcactgacaattgtctggaagataaaagggcttcagatgataaattttcacatcccaataatgtggacttgccattgaaggatacgttaaattctacaatagactatgacatttgtagatctattaataatgaaggatcagaagaagaaatagtgcctcaacatcagttataccagtcatgtagtgataagttcaaccttagcagtgtcatgccagagatctctaatgctgaaaaatcacaaaaattatctgctggaactcaaaattcttctgctacttctttggaaactgacggacgaattaaaaggccaaatttttttgtggatgaggaatcaattgaagaacatgctccaaaagtattactgtccaagagaaagattatgtcaccaacgtctcaggagaagctttacagtgctgtgactgatagcaaaatcattattgaagattgtgacaaaactacaatatcattgcctcagccagcacacatgcaaggcaaatcaatgttccacacagacaggagacttaaggacaggacatctgtctcccctacaagcaaaggacttctgaagtcaacaggatccccgcccaatcaacagacttgttcttgcatgagaagttcgccagtggtcttagacactgagaaagctgttgagttttcacaaagacagatgcatgatatagaaaatattgctgcaaagcttatcaggagcttgaaacacatgaaaagtatagtggatgaaagtttgtcaacagaagcatactctttacttcctaattttaacattgcccaggtattatccttgtatgttgagttcaagagtccatgtaaagcggcaatttttacaatgttcgctgaggccacaagcgtccacacccccacggtggtgcacgttctgccgcccgcgcatcccgcccgcggccgcaccttgccccgcatcacgcagtccaggcgcaattcctgctcgcgaaggtttcgggaaaggttgaacaccgcatttcgcctccggtgtctgtctgcctgcctggctcgtgctcctcggcgtcgccctcacccccatctcgaggccgccaccccgccgccatcctggctcaccccacgacgcaaatctgtgtgccgcccctcccctcccatatcgccatctctcctcccctccccggtcaccacccatacctcagccacctcggcggttgtgctaggggcgatggtggtggaggctgcggtcgcagctgtgttagtggaggagatgtggtggcggcagctagacagcatcgtgagcgcggtgtcgtttgggctcatgtccatgttccttgccattgccatcctcgagcacttcctccgccccctggcccacacgctcgagcacgcgccgccccgggggatccgccaccgcctcctcctcttcctcagccgtggcggtgagcgcagcgccgcccccagtttagatcttgaggcggcgacgaagcttcaagcccacgcgcccctcgagatggggccgatgcggacgcggatccgaaactggaccatggggccgacggggtggccgcgtggtgggtgtgggtcgcgctcaccgtctgcgttgatgtcgtcggcgtcggtctcgcgctcgtcgggttcctctactgaacaaggtgcagccatgcccttccatggtgtgccacaccagctctcggaggtgcacaagaagcgcacgctctaccatcccgagttgccctctgcctccaggtacgcacctcctcgttacggcggtcgaaatgttcatgaacgcgagctctcagaggtgtag

SEQ ID NO: 33199 - DNA, 416 bp, Zea mays
  Peptide Sequence Number=SeqID_74978
tcctacgtggcccatgcgtcgctgtgtacggcaagctccggcgcagccgccgcttggacgcggtccagagcggctgcaccgcgctgtccatcgtcaaacagggggacctcatggtcgtcgccaatgccgacaactctcgggttgttctgggcaccgcaaccgacgacggcgccatcacgccgtccataaacactatccacctgaagcccaacctgtcacgtaagtcgctacagaccgaccataaattcttgtgcgctgggatgacggccattgttgttgttgtccaagagtcatcgatactcaccatgtcgcgcgcgttcgacgactactatatcaaggattgtagcgtcatctcggcgccggaggtgacgcagaggaggaccgacaacaatgatcactcgccatcgtcggggtag

SEQ ID NO: 33200 - DNA, 1209 bp, Zea mays
  misc_feature (26)..(26): n is a, c, g, or t
  Peptide Sequence Number=SeqID_74979
  unsure (1)..(1209): unsure at all n locations
atgataccagttcttggtttcccatntggcaatggaagcacaactcattccaattctcaagttactgttgatgatggaagcacaaatcaccccaattctcaggttactgttggcagtggaaacacacatcatcctaattcacaggtgaccattgacagtaggagcatgtgttgcctcagttttgaggctggcattggtagttggagtaaagatgatccaagttcttggtttcccattggcactgggagtacagatcactccaattttcaagttactgttggcactgggagcacacaataccccagctcccaggttcccactggcattgggagtgcatatcaatctgattttcatgtcacattgggtgacagaagcgcaagtatccccgattctcaggctactgttcactatgggattaaacatcaacccaattcctgtgtcagtgttggcaacgggagcacaggtagcgtcaattctcaggatattgttggacacggaagcacatataaccctgaatctctgcctgccattggcgacgggagcatgcataacaccaattttgaggtcgtggtaggagttgggagcacagacaagggcaattcacaggacacccttgttgatgggaacctgaatcgccccagttctatggtttctgttgacaacggaagctcctgttaccccaattgtaaggatgctgttggcgatacgtgtgctccatcctctgaaggctctaatccagaatatgcatcctgcactgtagtagtggaacagagtagattgagcagagacagattcctacgtggcccatgcgtcgctgtgtacggcaagctccggcgcagccgccgcttggacgcggtccagagcggctgcaccgcgctgtccatcgtcaaacagggggacctcatggtcgtcgccaatgccgacaactctcgggttgttctgggcaccgcaaccgacgacggcgccatcacgccgtccataaacactatccacctgaagcccaacctgtcacgtaagtcgctacagaccgaccataaattcttgtgcgctgggatgacggccattgttgttgttgtccaagagtcatcgatactcaccatgtcgcgcgcgttcgacgactactatatcaaggattgtagcgtcatctcggcgccggaggtgacgcagaggaggaccgacaacaatgatcactcgccatcgtcggggtag

SEQ ID NO: 33201 - DNA, 204 bp, Zea mays
  Peptide Sequence Number=SeqID_74980
atgccaactctgcttctgcccttactgatcctgttgccttttggtcctttagaaatcattcgtgtgtttggatccattttgaacatcctgatagtcctggatttgggtgcttatctgcgactcttgctttgtggtgattgttctcttgtcggtggcattgcagttggacctctcatagctacaacaccggtgcagggagaataa

SEQ ID NO: 33202 - DNA, 2103 bp, Zea mays
  Peptide Sequence Number=SeqID_74981
atgaagaaggaagtagaagaggtggagggccacggttatggcgccgccactcccatgacgccgccgccgtcgtcgctcggtcttccttccccctcggtctcgacattgacctccgccgctgccgctagggttttggcgcggccaatgcccgcctcggtcccaagcttgcgggcgccttcccccttcgtgcgggccatgcgcacccgcgttgatccgccgccgccacagccgctcacggcccctcctcttcttcgtcctcgtccggtgctaccgccgccgccgataccagagaagcagcggcgggggcgcccgcgcaactgcgaccgactcctcccgccgccgccgggcttccaccttgctccgtccgcacgggcaccgctgcctgcccgcggccaaccttcatctagggggcatccctttcgcggtcaattcggtgggctccagttgcacgtgctcaaaatacatgtgggagaggatatcgtatcaaagattgtgcaggtctcgaaaataactgggaaggctgtctgtgttctctcagtgtttggggccgttcaggattgctatctgctccactctgctgtcatcttaaatcacaagggtcctttagaaatcattcatgtgtttggatccattttgacatctgatagtcctggatttgggtgcttatctgcgactcttgcttgtggtgattgttctcttgtcggtggcattgcagttggacctctcatagctgcaacaccggtgcaggcaattgttgggagcttccacaatgatgctttccaggcaaacaagaaacctaagctcgttgcatgttaccccagttctcatgttaccgctggcactgggggcatgtgttgcgtcaattctaagattaccattggcagtttgagaaaacatgataccagttcttggtttcccattggcaatggaagcacaactcattccaattctcaagttactgttgatgatggaagcacaaatcaccccaattctcaggttactgttggcagtggaaacacacatcatcctaattcacaggtgaccattgacagtaggagcatgtgttgcctcagttttgaggctggcattggtagttggagtaaagatgatccaagttcttggtttcccattggcactgggagtacagatcactccaattttcaagttactgttggcactgggagcacacaataccccagctcccaggttcccactggcattgggagtgcatatcaatctgattttcatgtcacattgggtgacagaagcgcaagtatccccgattctcaggctactgttcactatgggattaaacatcaacccaattcctgtgtcagtgttggcaacgggagcacaggtagcgtcaattctcaggatattgttggacacggaagcacatataaccctgaatctctgcctgccattggcgacgggagcatgcataacaccaattttgaggtcgtggtaggagttgggagcacagacaagggcaattcacaggacacccttgttgatgggaacctgaatcgccccagttctatggtttctgttgacaacggaagctcctgttaccccaattgtaaggatgctgttggcgatacgtgtgctccatcctctgaaggctctaatccagaatatgcatcctgcactgtagtagtggaacagagtagattgagcagagacagattcctacgtggcccatgcgtcgctgtgtacggcaagctccggcgcagccgccgcttggacgcggtccagagcggctgcaccgcgctgtccatcgtcaaacagggggacctcatggtcgtcgccaatgccgacaactctcgggttgttctgggcaccgcaaccgacgacggcgccatcacgccgtccataaacactatccacctgaagcccaacctgtcacgtaagtcgctacagaccgaccataaattcttgtgcgctgggatgacggccattgttgttgttgtccaagagtcatcgatactcaccatgtcgcgcgcgttcgacgactactatatcaaggattgtagcgtcatctcggcgccggaggtgacgcagaggaggaccgacaacaatgatcactcgccatcgtcggggtag

SEQ ID NO: 33203 - DNA, 324 bp, Zea mays
  Peptide Sequence Number=SeqID_74982
atgggcatagattcacatttaagcacttgtgttggcactcaatcaccaaaatacttagaaatggcccaagggcacatttccctttcaccagtgcaatctccttatgtcctgatatccgcggtctgcgtagcattggcgtgcagcggaagcttccctgacaacgtacgagtgatgatgagcacagtgcactccgcaacatgggcatacttcctgccaacggaatggactggcacgccgcctgcgggatggcctggtcgccgcctgccagcggagtggacagggcacattaaatgccgaggcggcacatccctgccagcggaatag

SEQ ID NO: 33204 - DNA, 915 bp, Zea mays
  Peptide Sequence Number=SeqID_74983
tacgcccgtgctgacgagtgcactgagctcatcatcactcgtacgttgccagggaagcttccgctgcacgccaatgctacgcagaccgcagatatcagggcacaaggagattgcgctgggcgggtgcattccgccacctggccagagatttcctcttcgacatttggcgcgccaggtaggggcttaggctttgaatttttgcttgttcttccgctcgacatcatggtccacatcgtcgagcaccaatatttcatgcccaaggacttcatgctggaggaggaggctgcctcttccacacctcggaccaccaacctccctgcgcctggtgcagcggctgctgtgcactcagcgcggcagcacactcccgcgcaaacatccagggcatctagggaagcgctaggggcgctgtctgcatccagggaactgctgcgtcaccctcctagctctacagcctcatcgggggccatgaagcagtggcacgacgacatcgaccgcttactcggcatggcgcactctggctcaaccagggccaggcctcggtcataccggcctcaacatgaggcgtcggcatcggtgcgctccccctcggtgagggccgtgccgactaaggacctgcgggcggagctcaaccgccggcgagcaggcgaggatgctctagtttctctggagaggtctaatgacctgcggacagaactcaaccacagacgtgcgggtgaggatgcccgcatctctctagagagggcgtgtgagcgccgacaaaacgtcgagggtcgcaacctcgactacggctttgctacggtagcaccacagactacaacgggcgcccggatccaagcgggtgtcccattggcctgcgtgggctgcgccacgctggcggaccatctccgtgcggctacttggccatccaagttctag

SEQ ID NO: 33205 - DNA, 327 bp, Zea mays
  Peptide Sequence Number=SeqID_74984
atggcccagctctacaatgggggtgtagctatgtgctacgtggccagcgggggagtgcctggtcgctatgcacgtgttaacgtgtccgttggagaagtgcatgagccctgtagaagcacagctgttggtgctgcatggatcctactgacgtctccttgcttccgtagggggcttgagaaccaccgatgtcatggatacacgaggggaaccatcattgcctgttatcaggcccgaggtcgtgcgaggcggcggttcctccgaggccgaggcccaggatcgggcgaggacgtgactcttcccgaggccgaggctaaggccgagccctga

SEQ ID NO: 33206 - DNA, 921 bp, Zea mays
  Peptide Sequence Number=SeqID_74985
atgagcaactgccccagagcacttgggcccccaagccctcctactgatcaggggttcgaaggttgcgccctgcggggtccagcaaccgccccagagcactcgggcccccgagccctcctactgatcaggggttcgaaggttgcgccctatggggtccagcaacccgccctagagcactcgggcccccgagccctcctactgatcaggggttcgaaggttgcaccttgcagggtccagcaaccgccccagacactcgggcccccgagccctcctactaatcaggggttcgaaggttgcgccctgcggggtccagcagctgccccggagcgctcggggccccgagccctcctactgatcaggggttcgaaggttgcgccctgcggggtccagcaaccgccccagagcactcgggcttcgtgcccattactgatcaagggttcgaaggctggcccctccgaagggttcgacagccgccctagagcatgcagagtgagggatgaccctgggtacatccgttacatggccgaggctcgggctacgctcccgaggtaccctaggacatttccgagaccagcgggaacgatttgtaatggaatcccaccggagggaggcaccgagccctcggaccctatcgaaatgggtccaggtccagcaaatcccctgcagtcggggtcacttcgacctttcactaaccgatctgataggaaaaacagcgccgcctggcccgctccggctgctgtgccaaaccgcctgggtgaaaccgacaacggccaagttcagcctcgggcgcaacaggaagctctgcctcgcccgaccttaggcctcggcctcggccttgggaggagatctccgcctcgcccgaccccaaggctcggccttagcctcggcctcgggaagagtcatgtcctcgcccgaccctag

SEQ ID NO: 33207 - DNA, 210 bp, Zea mays
  Peptide Sequence Number=SeqID_74986
atggctcgggcagaccgggcagacccgacgaccacggccagaccctccgcaagggtcccagcccgagaggttgcctggggtcaagaaaggggaagccccctgaatgaacaacctctacaccagaaggccggcgggataacaaactctaggtggctcgccggcgaccactacaccagcagcgcgacaacgacctccgcctcgggcggctag

SEQ ID NO: 33208 - DNA, 621 bp, Zea mays
  misc_feature (4)..(4): n is a, c, g, or t
  misc_feature (389)..(389): n is a, c, g, or t
  Peptide Sequence Number=SeqID_74987
  unsure (1)..(621): unsure at all n locations
aaantggatgaaaaagtagatcttgttgaagtgttaactcgtcaagttgaaaatctgcagcgagatactttgtttgtagagcgtgatgagctcagaaaagatattgagcaattatgtatgcaacaagctgggcctggttatgtttctgttgcaactcgaatgcttactcagaggacagcagctttggaacaggatattgagaacctccagaaaaagttaggtggttgcttaagagagaatcaaaatttgcaagaggagcttgctgaagcttatcgaattaagagccagcttgctgagttacatggtgctgcactatcaaagcatgctcgaccacaacgccgggcaggcttggaatccaggacaacaacattggcagtggtggtgtttgngggcgacgatgcattgaagatcggagctcgggtcatggaggtgggtgggggctggggcattgttactcagggcagcagagttcaagttgatggtgtgtgttggagtggagcaccagtcaggaggctgggagcaaggtggcagtgtcctccaaacagccactgcccatggcaaaggccaaagggcatctctctgtgtggtagtattgcagtgctgaccttggcggggacttga

SEQ ID NO: 33209 - DNA, 1269 bp, Zea mays
  Peptide Sequence Number=SeqID_74988
atgggcaagattgtctcgttaaggctcgagcagctcagtctcgaagcacgtgaccttatcggggttggtgctggtgaggttcatggccctttacactccctctcaacatgctcgaccacaacgccgggcaggcttggaatccaggacaacaacattggcaggggtggtgtttggggcgacgatgcattgaagatcggagctcggggcagtgttactcagggcagcagagttcaagttgatgtctcttccgggtgggagggggctagtggcaccgtgggccaggcatctttagaagaggagaaagagtcacttaaagctaaaatatcgaagctgcaaagcaacctaagaatgggccttgaaattgaacaacatttgcaaagaaatgcacgaatattagagaaaagacagagtgattatcctgctgatcttaactccgtgtcgtttgatgaatctaaagcacttgcacaagccttacaggagaagatggaagcacttatgctcttctcacaggaacaagaaagatacctattagagaaacagagagacctgattgttatcgaggaactccagaagaacttatctcaactgttggaaagaaaaactttgttcccaaacacccccttatgtgtacaagttaaagatgaaaaggtgaaggtcctgatggaattaacaaaactaaaagaacaatatttgctattgaagggcagctctgctgtcaaggaaggtcatgatactggtgattcatctaaactcattcctgggcatgaccaacaagggatgatgaagactatgctgaagaggacatctttaagacactggatgaggaaagaaagtagtactattggacatgggagctctgatggaaatgatcatatagtttgcaaagaacattcagtggatgttgcaaggttaagagttgaaaatgctatgcttcttgaaggtgttggtactgttgagcatctcacttcttcggtgcatagactgcatattgtgcttttgaagcgaccgacgacggagcatgagcaggctgtgaagaggatcatccgctatgttgcggggactctcgaccatggtctctactacccgaggtgccctggggaggcacaccttgtcgggtacagcgatagcgaccatgccggcgacatcgacaccagcaagagcacaagcgggatgttgcagatgcatttgtggggcagacttatactaggagacagcagagggagagccggatccagacccagggcggtgaagccagcagttctgctctag

SEQ ID NO: 33210 - DNA, 720 bp, Zea mays
  Peptide Sequence Number=SeqID_74989
atgaagttgatacttcataccattactattttgtgcattttgctcctagctgttggaaaggttaaagatgaaaaggtgaaggtcctgatggaattaacaaaactaaaagaacaatatttgctattgaagggcagctctgctgtcaaggaaggtcatgatactggtgattcatctaaactcattcctgggcatgaccaacaagggatgctgaagactatgctgaagaggacatctttaagacactggatgaggaaagaaagtaatactattggacatgggagctctgatggaaatgatcatacagtttgcaaagaacattcagtggatgttgcaagattaagagttgaaaatgctatgcttcttgaaggtgttggtactgttgagcatctcacttcttcagtgcatagactgcatattgtgcttttgaaggcttatgatgatatcaagtcagctgatcctttggagagtacctttgaagcgctcaacagtcttataactgaagcaaaccttatgaagacagctcttaatgtggttcttcctgtaagctggtccggggattcatcagatgcaattaaatatgaagctatgtgcgatccatctgattcacctaaatcgaagtctgggaaagtagacccgctctcttctgcaggcatggagatggtggagctactaatattggctgctgagattctcaaggagagctttctggtgaagaaataa

SEQ ID NO: 33211 - DNA, 285 bp, Zea mays
  Peptide Sequence Number=SeqID_74990
atggcaggtcaaccttgtgtcagacatatcgttgcccatactcgatgtgctaatgcggttgctgtggcccctaatgacaaatacctctgcacaggaggaagcgatcagaaagttgtgagttgcttatttgtccttttagtttcttatgtggcttatgttatgtcgtactggaaaaggttttatatcataacagaagtgggcgtacacatcttaattggcgtctttcacatcctctgcaaggaaatgattgatatgctgccagaaatcatagaattgttccgctaa

SEQ ID NO: 33212 - DNA, 729 bp, Zea mays
  Peptide Sequence Number=SeqID_74991
atgcacatcgaactccttgcagcagtagctcatgctgctgcaacaaatagccgcttcacaattttctttaatcctagggcaagtccaacagaatttgttatacccctttcgaaatacatcaaggctatttttcacacgcggatatcagttgggatgcgatttaggatgttgtttgagactgaggaatcaagtgtccgcaggtacatggggacaataacagaagtgagtgatgctgacccagtgcgttggcctagttcctattggagatcagtgaagggtgatcagggggtaaatgccacacagtggctgcataacgaacctatacttgttactgtaagtggtgatggcagtgttggaatgtgggacgttactttaggtcaaccttgtgtcagacatatcgttgcccatactcgacgtgctaatgcggttgctatggcccctaatgacaaatacctctgtacaggaggaagcaatcagaaagttgtgagttgcttatttgtccttttagtttcttatgtggcttatgttatgtcgtactggaaaagtttatggttccaatacaagaaatttgctgcaaaggttatttttacagaagataaacaatattcacctgtgcctatacctcaacagacagataaccaatttgaagaggaagatggatccttttctccacagctaatgcatggcaacgaagatgaagatgcaattgatcctgaaaaagacagctga

SEQ ID NO: 33213 - DNA, 429 bp, Zea mays
  Peptide Sequence Number=SeqID_74992
atggagatgatgaaaatggtggcagttcaagccacaatatggagctttcggaggagtaggagccagaaggatggatcgccagacccatcactcatgacgctgctcacggttgtcatttccatgacgctcttgacaccttgctacgtcaggccttcgaccgacacacttggtccatcgaaccaatgggaggcaccatcacgggttatacctggaccaatgggagttagtgagggcaatcccagattgagcagcatggtcaacctggtcgccgtgctcaacatcgagctagaccacgcccttgacgagttgagcaaggctcaggcagagattgcggaacaagccttcgagattccggacggctggtgtgccgatgacatgatagaacacgtcggagggcagggctttgcctttggctgctgctttgggtaa

SEQ ID NO: 33214 - DNA, 666 bp, Zea mays
  Peptide Sequence Number=SeqID_74993
atgagtgaggacaaagtgcacacaaaagactcatgttggtccgtggggacgatatatgatcctagagagctgtcaggagtaagtaccgctggtccagggattggacggggtgttacaagtggtatcagagccgacactcgaggtttcacgggcgtgtttgggctagggggttcggacaacgagcagcccgtggttcctgagtgtgttgccgaagacttttctgagcagcaacctggtgaaggcaagtgtcctctgacccagggactcaggttgtttcatgagtacctctttgttgtccccattgcaatcagtgctcaggaggagatgcagatggtccgtcttagatgcactgcacgtaagtctgtgatccctttcttgccctctcgccttgcggagcatccactgcgtcacacggtgataggagtaggagcaccaacgccaggagcaggagcagcgggactcttccccttgcctcaggacgaggtggagtctgggaggcatccctcccctacgcctcagccagagatgccccctgcaccaccacagagcattgcagctgttggaggagaccttgatggagacggagacaacgacgatggtggcagttcaagccacatcacggagctttcggaggagcaagagccagaaggatggagacgaagatga

SEQ ID NO: 33215 - DNA, 168 bp, Zea mays
  Peptide Sequence Number=SeqID_74994
atggcgatgcaggacgacgatccaaaggacctggaacgcgcgtttctgtctgtctcgagtctctcgacaccgggcggtgtcacctcaacatggttcagcttcaggacgatcaaaggcacatgggtgaaggctccagcaaccatcacaaagggtataaaagaaaactga

SEQ ID NO: 33216 - DNA, 1854 bp, Zea mays
  Peptide Sequence Number=SeqID_74995
atggccggccccggcgcatccgtagcggcgctggcggtcctgctcgctgctgccgcggccttcacacgctgcgccgtcgcggagccgccgccgagggagcggtcggcgctgctggcgttcctgaccgcgaccccgcacgagcgccgcctcgggtggaacgcctccaccccggcgtgcggctgggtcggggtcacgtgcgacaacgccaacgccaccgtcgtcgaggtgcggctcccgggcgtcggcctcgtcggcgccatcccgccgggcacgctcggccggctcaccaacctccgcgcgctctcgctccgctccaaccgcgtcctcgggaccatccccgacgacgtgctccagctgccggtcctcaaggcgctgttcctgcagcacaacctgctgtcaggccccatcccgccgggaatccagaggctcggcggcctcgagcgcctggtcctctcccgcaacaacctgtcgggccccatccccttcgcgctcaacagcctcaccgcgctgcgcgtgctcaggctcgacggcaaccgcctctccgggagcattcccagcatcagcatcgcgggcctcggctccttcgacgtctccgacaacaacctcaacggctccattcccaaatcgctctcgcgcttcccgcgggaatccttcgccgggaacctccagctctgcggggacccgctgccgccctgcagcagcccgttctttcccccagcgccgtcgcccggcgggcccagcccgccctccggcggcggcggcggcggcggccccgcgccgggctcatccaagaagcgaaagctctccggggccgcaatcgcgggcatcgtcgtgggcgccgtggtggtggggctcctcatcctcatcgccaccgtgctctgcgtggtgtccagacgtcgtggcgccggcgcccgcgacgggcccaaggccgcgacatccgcggcggccagggggcagcccccgccggcgtccggcggcttgacgtcctcgtccaaggaggacctcggaggcggcgcgtccgggtcggccgcggccgtcgcggcggcggccgccgccgccgcgggggagcagagccggctggtgttcgtggggaagggcgccgggtacagcttcgaccttgaggacctgctgcgcgcgtcggcggaggtgctgggcaaaggcagcgtggggacgtcgtacaaggcggtgctggaggaaggcacgacggtggtggtgaagcggctcaaggacgtggcggtgcagcggcgcgagttcgacgcgcacatggaggcgctcggcagggtggagcaccggaacgtgctccccgtccgcgcctactacttctccaaggacgagaagctcctcgtctacgactacctccccaacggcagcctctctgccatgctccacgggagccggggctcggggcggacgccactggactgggagacgcggatgcggttcgcgctgtcggccgcgcgcgggctggcgcacctgcacacggcgcacaaccttgtgcacggcaacgtgaaggcctcgaacgtcctgctccgcgcggacgccgacgccgcggcgctctccgacttgagcctccaccggctgttcgcgccgtcgacgacgcgggccggagggtaccgcgccccggaggtggtggacgcgcgccggctgacgttcaagtcggacgtgtactcgctgggcgtgctcctgctggagctcctgacggggaggtccccctcgcacgcgtcgctggagggcgacggcacgctggacctgcccccgttttcttttataccctttgtgatggttgctggagccttcacccatgtgcctttgatcgtcctgaagctgaaccatgttgaggtgacctgggagtaa

SEQ ID NO: 33217 - DNA, 288 bp, Zea mays
  Peptide Sequence Number=SeqID_74996
atgaagccgaccggacggtcccacagcgccgtgactgccactccacaagcgagcgaggtgaccccgtccaggggaggttgcaactgcccaacagcggcgcgcggcgaaccagagtccgaaatccccgcgcgtgatatgcagcagttggggtattttgggaacagtgttgggtgcgtcccgggggcagaagagattcccgagcctgagggcgagttagtcatgtttgaggcattcttcatcacagaccttcgcctacctgcacatcgtttcgtggcggaggtcctatag

SEQ ID NO: 33218 - DNA, 408 bp, Zea mays
  Peptide Sequence Number=SeqID_74997
atgcggatgggattatggcggcggcgcgagttctctgctgtggcggtaatccagcgaaggccaccccagcatgcgcgcagactggaggagggaacagggaggcctcggaattggggaaggaagcttgaggaattctctctgttccggtcgctggacgaccaaaagggctgcgaccgcgcgatttttatagaggggtcgacagagtccgaggtgagaaacagccggcgagatccacgcgagctttggtttggttctgttacggcgacttcgaccgagaacacaggaagcgatgaagccgaccggacggtcccacagctccgtgactgccactccacaagcgagcgaggtgaccccgtccaggggaggttgcaactgcccaacagcggcgcgcggcgaaccagagtctga

SEQ ID NO: 33219 - DNA, 426 bp, Zea mays
  Peptide Sequence Number=SeqID_74998
atgcggatgggattatggcggcggcgcgagttctctgctgtggcggtaatccagcgaaggccaccccggcatgcgcgcagactggaggagggaacagggaggcctcggaattggggaaggaagcttgaggaattctctctgttccggccgctggacgaccaaaagggctgcgaccgcgcgatttttatagaggggtcgacagagttcgaggtgagaaacagccggcgagatccacgcgagctttggtttggttctgttacggcgacttcgaccgagaacacaggaagcgatgaagccgaccggacggtcccacagctccgtgactgccactccacaagcgagcgagatgtaattgtggacattactccacaactcatcacactcaatcaaagatccaaatcagacatgtatcacaagaacaaataa

SEQ ID NO: 33220 - DNA, 852 bp, Zea mays
  Peptide Sequence Number=SeqID_74999
atgtcaggcttgtctcccacgcgagctccacaacagaacgccggattcgtcgctcgcctgtgcgcggattccgccgctgcctgttcttccctcccccgtatcacgcgcgccgctgttgggcagttgcaatctcccctggacggggtcacctcgctcgcttgtggagtggcagtcacggcgctgtgggaccgtccggtcggcttcatcgcttcctgtgttctcggtcgaagtcgccgtaacagaaccaaaccaaagctcgcgtggatctcgccggatgtttctcacctcggactctgtcgacccctctataaaaatcgcgcggtcgcagcccttttggtcgtccagcggccggaacagagagaattcctcaagcttccttccccaattccgaggcctccctgttccctcctccagtctgcgcgcatgccggggtggccttcgctggattaccgccacagcagagaactcgtgccgccatcacacacgtgccaggagccccgttgcgtggaatcgagggagaagaccgccacctccgttgaaactcgacgccttggcgcgggcgtaccgtacgcacgaagaaccggccatacggtcgtcctaccctcggaacgggcgttgagggcactgctggagggtgctgaagatttccgtggccgaacggtgcgacgatttggcgtggagtacaccgggagccctcaccggactctgtggatttgccgcgggccatacctcgccgtgaggataacgctgtggggagtactcggcggctcgacggctaaggcatcgccgcacggtggggcgcggcccgcctgtgtgtcggccagggtggagaagacgaccgggtaccgttaa

SEQ ID NO: 33221 - DNA, 867 bp, Zea mays
  Peptide Sequence Number=SeqID_75000
atgtcaggcttgtctcccacgcgagctccacaacagaacgccggattcgtcgctcgcctgtgcgcggattccgccgctgcccgttcttccctcccccgtatcacgcgcgccgctgttgggcagttgcaatctcccctggacggggtcacctcgctcgcttgtggagtggcagtcacggcgctgtgggaccgtccggtcggcttcatcgcttcctgtgttctcggtcgaagtcgccgtaacagaaccaaaccaaagctcgcgtggatctcgccggctgtttctcacctcggactctgtcgacccctctataaaaatcgcgcggtcgcagcccttttggtcgtccagcggccggaacagagagaattcctcaagcttccttccccaattccgaggcctccctgttccctcctccagtctgcgcgcatgccggggtggccttcgctggattaccgccacagcagagaactcgtgccgccatcacacacgtgccaggagccccgttgcgtggaatcgagggagaagaccgccacctccgttgaaactcgacgccttggcgcgggcgtaccgtacgcacgaagaaccggccatacggtcgtcctaccctcggaacgggcgttgagggcactgctggagggtgctgaagatttccgtggccgaacggtgcgacgatttggcgtggagtacaccgggagccctcaccggactctgtggattcgccgcgggccatacctcgccgtggtctgcgatacctgcgtgacaatccctggtaagagctctactaaccgaatcgtagtagatatctcgttatttctgcccatgcgtgtagaggataacgctgtggggagtactcggcggctcgacggctag

SEQ ID NO: 33222 - DNA, 444 bp, Zea mays
  Peptide Sequence Number=SeqID_75001
atgccggggtggccttcgctggattaccgccacagcagagaactcgtgccgccatcacacacgtgccaggagccccgttgcgtggaatcgagggagaagactgccacctccattgaaactcgacgccttggcgcgggcgtaccgtacgcacgaagaaccggccatacggtcgtcctaccctcggaacgggcgttgagggcactgctggagggtgctgaagatttccgtggccgaacggtgcgacgatttggcgtggagtacaccgggagccctcaccggactctgtggattcgccgcgggccatacctcgccgtggtctgcgatacctgcgcgacaatccctggtaagagctctactaaccgaatcgtagtagatatctcgttatttctgcccatgcgtgtagaggataacgctgtggggagtactcggcggctcgacggctag

SEQ ID NO: 33223 - DNA, 444 bp, Zea mays
  Peptide Sequence Number=SeqID_75002
atgccggggtggccttcgctggattaccgccacagcagagaactcgtgccgccatcacacacgtgccaggagccccgttgcgtggaatcgagggagaagaccgccacctccgttgaaactcgacgccttggcgcgggcgtaccgtacgcacgaagaaccggccatacggtcgtcctaccctcggaacgggcgttgagggcactgctggagggtgctgaagatttccgtggccgaacggtgcgacgatttggcgtggagtacaccgggagccctcaccggactctgtggattcgccgcgggccatacctcgccgtggtctgcgatacctgcgcgacaatccctggtaagagctctactaaccgaatcgtagtagatatctcgttatttctgcccatgcgtgtagaggataacgctgtggggagtactcggcggctcgacggctag

SEQ ID NO: 33224 - DNA, 2652 bp, Zea mays
  Peptide Sequence Number=SeqID_75003
atggattgcaccagagcttccatgtattcagttgacaagtttatggatacatggaatgggtgtgatccatggtttttaaggcgtctcctaggcgacgccctaggcgtccaggcgctcacaaactctggatgtccaccatcaccatgcagaatgagacacggaggaagggaggagggagaggaagatgagggaaagcgttccaatgttgatttcgcggggagagtgggtgtcgatctggatggggaagtggtggtggcactctgcaacaagttcaggccaggagccctcaacttcctggtcctgctcaggctagtcttttttggtaccctgggtatcaagacagagattaatcccattctgacccccagagctgcaggcccagaagggtcatttataggtgctcaaggatctaatcaagctgggaacaatttgactctgaaaggatggccactcacgggacttgagcaacttaggtcaggaattcttcagcagaagtcgtttatacataatcaacagcaattgcagcagcaaatccagatgctgactccacagcagcagcagcagcttatgctgcatgctcagcaaaatatgtcttcaccaacatctagtgatgtcgacaacagaagattgaggatgatgctaaatagaaatgctgttcttggccgggatgggcagacaaacagtggtagtgatattattccaaatattggctctcctagtcaaagtggtggcgatatagatatgcttataaagaagaaacttgctcagcagcagcaactattacaacagcaaagcaatagccaacagctcccacagcaacatcagcttcagcaacctgctgtctctagccagcaatctcaaagttcaaatcaacatcttcaacaagaaaagccaggaattggaagtatgcctgctgatgggggcataccaaattcatttgggggagctgaacagacagcaaagaagagaaagaagccaggctcatcctctggtagagctaatagttcaggcacagccaatactgctggtccctctccaagttctgcaccatcgacaccttccactcatacaccaggagacgtgatgtctgtgccacagctgcagcagaatggcggttcagctaaacccatggtaatgtttggctctgacggaactgggagcttgacatctccagcaaacccattggatgatgttgaccgcttgctagaagatggctcattggatgataatgttgaatcttttctatcacaggatgacatggatcctagggacaacttggggcgatgcatggatgctagtaaagggtttggtttttctgaggttgccaaagcacgcgcaagcacagccaaagttgtctgttgccacttctcagctgatggtaaactgcttgctactggtggtcatgataaaaaggtcactttgtggtgtacagattctctgaaccctaaatcttatctggaagagcactcgtttcttatcactgatgttagatttagcccaagcatgtcacgccttgctacatcctcctttgacaaaactgtgcgggtttgggatgcagataatactgactattcactacgaactttcacgggccattcagcaactgttatgtcacttgattttcatccaaataaagaggatatgatatgctcctgtgatagtgatggggaagtgcgcagctggagcataaataatggtagctgtttgacatgtgttaaggtgtttaagggaggtgctactcagatgagatttcaacctcgtaagggaaagtatctagcagcggcctcagataaagctatctacatacttgatggggagacacaacatgcttgtagaagtcccttgcaggggcacaataagaatattcaatcgctttgttgggattctgctggcgaatatctcgcttctgtcagtgaagactcggtcagaatatggtcattcagttctggacgtgaaggtgaatttgtgcatgaattgaatcgcagcggaaatcaattccactcgtgtgttttccacccaacttatcagtcattgctagtgattggttgttacgagtctttggaactttgggacataagggagaagaacaccatgaccttcaacaatgcgcatgacggtttggttgcagccctggcatcatccagtgctacagggaaggttgcctcaaacaaccctagagtcgccggcattggcgacgaccatgaggtccccctatttgaagatggacagcgccgtgcagccgctctggaccgtgtccaagcggcggctgcgccggagcttaccgaacacagcgacacatgcagtcacgtagtactgcttccagaggtcgaactggcagtcgccaagcttcttttcgtcgtcgatgagcgacgccaacgcgagcgcctcctgccagtggtgtttgttcggggtttccaagcactttatgaagttaagccaaaaggagcaaaagagactttgattaagaaaggagaagatggactggtctgcggtctggtgcggcggtgccacccaccggacagtcctatgtgcatcggacagtccaatgcacggtccgaccaaggggcagctctcgggaaatttcagccagtgttggctataaatcaccggacagtccgcgcggagcgccggacagtccggtgtgccagctag

SEQ ID NO: 33225 - DNA, 237 bp, Zea mays
  Peptide Sequence Number=SeqID_75004
atggacagcggtgcagccgctctggaccacgtccaagcggcggctgcgctggagcttgccaaacacggtgcagccgctctggacagcggcgtatgcgaccacgtaggactgcttccaaaggtcgaactggcagtcgccaagcttcttctcgtcatcgatgagcgacgccaacgcgagcgcctcctgctagtggtgtttgttcggggtttccaagttattgttattcagtacacatga

SEQ ID NO: 33226 - DNA, 1902 bp, Zea mays
  Peptide Sequence Number=SeqID_75005
atggcggacaggaaagggtccgttacttgtacccaggagtccgaccgaggaggtcatggtccagtggcggaaatttcggcggccaacaaggagtggttgaatggcccagccgattcgtgctcgagcttgaagagcgacccggtgcatgggccccacacgcagaggcacaagcacccagcggtacaacggccccagacgtcagcgatagaccccgcccgagcaagcagcggctgtcagccagggcccgcgtgccagggacgagttccgaaagagttcaatgagaagaacccgaagaacaagtatgttactacgattcagacggtgaagcacccagtcccagttcaggttcaaacacaggacgctccgcacgagctggagatggaggtggaggtggccaaatattcacgggggcagggtgctgacctgaaggcgctgggggacaagaagttgaaagggcagctcagtgtaaaagagaagctatatggccaatctgcaaaagctgctgcaaatgccgaaaagtggcttatgcctaatgatggaggtattttagagcctggtcatttggagaaaacatatagattttcacaagaggatatattgacagaggtggatcttttgagttcaagaaaaccatttgatatgatcttacctgtactcggtccttataatataggatacacctcaaacggccgctacatgctagtaggcggacgaaaaggccaccttgcaatgatggatatgttgcatatggatcttatcaaggagtttgaggtgagggaaactgttcgtgacgtgacattcttacacaatgagcagttgtatgcggtcgctcaaaaaaagtatccctacatctataatcgacatggtacagaaatacactgtctgaaggaacatggaaaagcactgaagctccaatttctgtctaaacaattcctcttagcatcgataaacagcttcgggcagctccactaccaagatgtgagcactggcgaaatggttgcaaattataggacaggtctgggccgcaccgatgttatgcggggcaatccttacaatgctgtgattggccttgggcatgctggtggcaaagttaccatgtggaagccaaccagtgtgaaaccccttgttaccatgctgtgtcatcatggcccggtgactgctgttgcatttgacaggggtggcaatctcatggcaacagcaggtgttgacaggaagataaagatctgggacctgaggaagtatgaggttgtgcgttcttacccaatgcgcgctcagtctttggattttagccagaaggggctgttagcctgcagcaatggatctcaggtagagatatacagggatttcggtgggcatgactataggctttacatgaagcacaagatagtgaagggctatcaggtcgggaaggttgtgttccgcccctacgaagacattctggggatcgggcactcgatgggcttctcttccatccttgtcccaggatctggtgagccgaacttcgacacctttgttgacaacccgatggaaactaccaagcagaaacgtgagaaggaggtgcatgctctcctggataaactccctccggagaccattatgctgaacccgaacacgatagccactgtacgagctccgaagaagaaagagaagaagaccaaggaggagattgaggaagagatggcagatgccgtggaggcggccaagaacactgagcgcaagaagaagaccaagggcaggagcaaaccgagcaagcgagccaagaagaaagaggaagacgttttcaaggccaagaggcccttcctggagcaatctgataaggtggatgggcgacctgacaagaagcagcggataggtgaactcccaaaggccttgcagaggtttgccaagaaaccacaatcataa

SEQ ID NO: 33227 - DNA, 639 bp, Zea mays
  Peptide Sequence Number=SeqID_75006
atggcgcacggtgatttcgtgacgccagagaagaccccgatcgctgctcttcaccagaccagagttcatgcgatgctgcgcgattccttcactcccaattccccgagcgccatcaatggcgggtgccccagttggatctcaaatccgccacgacggagcgggcgttcacagcgagggtttgaggatggccgaatagggaggaggggcgcactggatcgaggacggccaggtgagcagagggagtcctaccgacgaccagggagggacgtgccagggatgttgacggtgagctccatggcgacgattattgggtcggacgaagagggaaaaggcaagctcgagatggcggacaggaaagggtccgttacttgtacccaggagtccgaccgaggaggtcatggtccagtggcggaaatttcggcggccaacaaggagtggttgaatggcccagccgattcgtgctcgagcttgaagagcgacccggcgcatgggccccacacgcagaggcacaagcacccagcggtacaacggccccagacgtcagcgatagaccccgcccgagcaagcagcggctgtcagccagggcccgcgtgccaggtacagtggaggcgtcatggcaaatttgggctatgcggttag

SEQ ID NO: 33228 - DNA, 306 bp, Zea mays
  Peptide Sequence Number=SeqID_75007
atggcccctcagggtggttgcgtctgtcccagtgactcacataaggatggtggtggcgccgccgaacgattgggaagctgcccccaaagtggacgcaatgccttgtcccgcttgtcaactcgtccaagactttttttccttctatctagcaagtttctgaaaattctgcaacccttctgtaatggtggatatattcaaggcatacctaggagtgctgctggtgaaaggatcaaaggagtgctgctggcgaaagaatcaaaggagaatatggaccaaactgaaggcttatttcagtattttgtttaa

SEQ ID NO: 33229 - DNA, 132 bp, Zea mays
  Peptide Sequence Number=SeqID_75008
atggcccctcagggtggttgtgtctgtcccggtgactcacataaggatggtggtggcgccgccgaacgattgggaagctgcccccaaagtgaacgcaatgccttgtcccgcttgtcaactcgtccaagctga

SEQ ID NO: 33230 - DNA, 417 bp, Zea mays
  Peptide Sequence Number=SeqID_75009
atgacggtggcagacgcgcgggagcagcgggcacgtcgacagccaagctcacgtcccatccgggggcagcgagagagctccctctcacggggtgaagacaacgcgcccgtgatccgttcctcgaacggctcgcacacgcgcgacggctgccccgccaaccactcgccccgtcgcattaactccgtggctggacaggtggcgcttctggcaggagcaacgggcgacgcttcgccctcgccgaaacaaccgcaccaaaaaagaggctcgggggctgctctcgcaaacccggctccggccgaaccgttgacagcgtcaacataccagcccgagaacttgggcctcgaccgtacacccaggctacggccagctcgcatgagggaacaaccagaccagccgaagcattacgcaaggcattaa

SEQ ID NO: 33231 - DNA, 957 bp, Zea mays
  Peptide Sequence Number=SeqID_75010
atggcgaacaccctcaacactgagggcgggaccgggatcgcagcccggtggcgcttctggcaggagcaacgggcgacgcttcgccttcgccgaaacaacccgcaccaaaaaagggaccgggaaagggggataccccgaaagggatccttccctgtgaaagaaaccaggctccgagcttccttactgatcaggggttcgaaggctggccccccgaagggttcaacagccgcctcagatcgcgtgggccctacacccactactggtcagaggttcgaaggccggccccccgaagggttccacggccgcctcaggctactcgggctccgtgcccattatcgatcaggggttcgaaggctggcccccgaagggttcacagtcgcctcagacgccgagcgagggatgaccaggggtaccctaggacatttccgagaccagcgggagcgatcttgtaacggaatcccatcggagggaggcatcgagccctcggaccccgtcgccaggggaccaggtccggcagatcacccgcagaggctcgggggctgctctcgcaaacccggctccggccgaaccgttgacagcgtcaacataccagcccgagaacttgggccccgaccgtacacccgggctacggccagctcgcatgagggaacaaccagaccagccgaagcattacgcaaggcattaagacctcgaaggagtgaaaccactcctccgaggcctcgggggctacacccggcgggtgcgctcgcgcgcacccaccggaaccaaatgcaaccgagaaaggctggtccccttgcaaaaaagtgcgacgaaagcctccaagcgagtgctaacactcccttcgaggctcgggggctactgtcggggaccataattaggggtaccctcaagacgcctaattctcagctggtaacccccatcagcataaagctgcagaggcctgatgggtgcgattaa

SEQ ID NO: 33232 - DNA, 366 bp, Zea mays
  Peptide Sequence Number=SeqID_75011
atggtggacgcgggttgggttaaaggacaggaggggcaagacgtgacccacttttatacgcaggaggatcaacacaaaggtttgctcaaagttgaggttcaaaaccttttgctcaaagttaaggaggttcaaaatcatgttaatagacgatataatggaagtgacagatcaggcaagggcattttctggcaggaggacatcatccccttcttccagaacgtgaccatccccaaggattggggcaccgtccagcagtgctacatctacctctctggacaagtgaaagagaagctgggcaagattgacccctactttgtcaagctcggtgatgccatggtcacatggattgagcctgggatgagctga

SEQ ID NO: 33233 - DNA, 321 bp, Zea mays
  Peptide Sequence Number=SeqID_75012
atggccgggagcagccgcctcctcccaactgtcgacgcgctcgcggacgtgcaccggggccgatggatggtcttctcctccctcacgcgtgcgagctcgacctcgagctccaatggcagcaccgacggcaagggcattttctggcaggaggacatcatccccttcttccagaacgtgaccatccccaaggattggggcaccgtccagcagtgctacatctacctctatggacaagtgaaagagaagctgagcaagattgacccctactttgtcaagctcggtgacgccatggtcacatggattgagcctgggatgagctga

SEQ ID NO: 33234 - DNA, 876 bp, Zea mays
  Peptide Sequence Number=SeqID_75013
atgaagttcagtaatttggcaccgctgatatttctaggatcaaagttctggattgcattgaacaacacaacagaagttgcgtcattgacaacaccttcaccaaacacgtggttgtacaagaatggtgtctcatcttggcttaacacctgcaaggtcagcattgtcggttacaagaaggggcagctcaagatgctttcgcatgcatatgaccgttctcttggtgggagggacttcgatgaggccctcttcaagcacttcgcgacgaagttcaaagaagaatataagattgatgtttaccagaatgcccgtgcatgccttaggttgcgtgtggcgtgtgagaagcttaagaagacgctgagcgccaacccagaggccccactgaacattgagtgcttgatggatgagaaagatgtgagagggtttattaagagagaggagtttgaacacatcagtgcacctgtgctggtacgtgtcaaaagacccttggagaaggccttggctgaagctggcttgacaactgaaaatgtgcactttgttgaggttgtcggatctggttctcgtgttccagccataatcaagataatcactgatttttttgggaaggagccgagacgaaccatgaatgcaagcgagtgtgttgcgcggggctgtgctctccagtgtgctattctcagccccactttcaaagtgcgggaattccaggaggacatcatccccttcttccagaacgtgaccatccccaaggattggggcaccgtccagcagtgctacatctacctctctggacaagtgaaagagaagctgggcaagattgacccctactttgtcaagctcggtgatgccatggtcacatggattgagcctgggatgagctga

SEQ ID NO: 33235 - DNA, 1413 bp, Zea mays
  Peptide Sequence Number=SeqID_75014
atgcaacgtttagctggtcatgctccgggaggcgctctaggactaatatcaaggcttaatatcggcgcacttgaactgggagactatcttgcacttggggcaatattctcggccacagactcaatttgcaccttgcaggtgttaagccaagataagacaccattcttgtacaaccacgtgtttggtgaaggtgttgtcaatgacgcaacttctgttgtgttgttcaatgcaatccagaactttgatcctagaaatatcagcggtgccaaattactgaacttcattggcagtttcctttatctgttcggctccagcaccattcttggagtagcttctggacttcttagtgcttataccattaagaagttgtactttggcagacattttgcattttttaaaagcaaacatagctgtaaattgttattaacgggttgcctttttattgcatgcctttgcaacattgtcgtttatctccgagatttttctgtttctttatgttgttgttatgttccttacatgatattggtcattcaggttattgtttggtgggcgggtctcatgagaggtgctgtgtctattgtgttggcttacaataaggttctgtggcagtgcgaggcattttgggaggtggtgagcgcctcgcttggcaccttcattttcgtgatgatgctgtccttcaggctgcagtgccacacaggttcgtttggcgtaggtgctgcttggtttttggcggtgcatgtcgggtgttcgacaatgtttccaaggttttgtggcagtgcgaggcattttgggagggacatcatcatgcccaacttgaagtcgtccgtgaccacaacggcgagcgcggtggagtacagggatgaagtattgaaggcgttgccgccagatttaaaagggggtagtggggaaacaccattttccgttggtcaagcaattaactcgcctgagttagtattccctgttggggttacacattccttcactgacttagcagaagattgggataggctactttcttttgagaatatgtttatcggtgttaatggttgctctctgaaaactaacgaaaatcttgaggttctacgaggcattcctgtcgagaggttgatgatagaaatagattctccatattgtgatataataaatactcatgctagaagtccgtatgtaaaatctgtctggccatccaagaagaaagaaaagtatgagccagattcaacagtaaaaggtcgcaatgagccttgtttagtcaggcaagttcttgaggtagtggtcggaagcaaaggaatttctggcgtagaaggcctgagtagaactctgtaccacaacacatgcaggctcttctttcctcaggatcttgacgcgtctgctaatgcacaacttgagagtggtactgccgtccaggattgctga

SEQ ID NO: 33236 - DNA, 456 bp, Zea mays
  Peptide Sequence Number=SeqID_75015
atggcgcccgaggctggacttagctgctgtcagtctcaccctgtcgagtggcacaacagtcggagcagggcaggcggcgctgttttcctgtcagttcggcactgcggctgcggggatgcggcggccggcggcagcggcactacggagccctcagccagcaccaggttgcggcaacggcaacaaccagcaagtggccagcgattcacgggttcaggcgttcagcgccacgccgtcgtcgccccaagccagatgtcaaatagtggaggcaagggatgtcgttcccgtgctagatcaatgccacccgagaagcaactaggtatttcaagtttcttgcctgaacctccaccgccgcctccttctacgaaaggtagtaccaacggtcagccctgcatggatgatgaggaacaagatgctgaaagtgatcccgacgtcatgaatgattatggtgagctttga

SEQ ID NO: 33237 - DNA, 423 bp, Zea mays
  Peptide Sequence Number=SeqID_75016
atggagctcagctcgacagagcagacagcggctcgagctcccatgtcaacggctacgaaagttcggcactgcggctgcggggatgcggcggccggcggcagcggcactacggagccctcagccagcaccaggttgcggcaacggcaacaaccagcaagtggccagcgattcacgggttcaggcgttcagcgccacgccgtcgtcgccccaagccagatgtcaaatagtggaggcaagggatgtcgttcccgtgctagatcaatgccacccgagaagcaactaggtatttcaagtttcttgcctgaacctccaccgccgcctccttctacgaaaggtagtaccaacggtcagccctgcatggatgatgaggaacaagatgctgaaagtgatcccgacgtcatgaatgattatggtgagctttga

SEQ ID NO: 33238 - DNA, 516 bp, Zea mays
  Peptide Sequence Number=SeqID_75017
atgggttccaaagcgtccttctgcgtcacgttcctcttgctgctcctcatcgccgccgccgcctggggacctgctgcacaggccgacgacgctgtagttgttggaccatacccaattcattgccctctcactttttctccatcttgcacgagcaaagctgtcagttatatcagtgagaagcagatgcaagataaggtcattggattccttcatgacgcttgctctcagtcattctcgtttgaacagaagcaggcacttgcaatgtcaatggagggtggtgcttcaggatctgtagctgtgactgactctgctatggcagaagccggtgcagttgaccctgacttagtgttggctcttcaaatgtctgtccaggatgcaaacatgtccagtgacactgatatgagtaaggtgtttgaagacagaacgtttgtgtcatctatccttaattcagaagagaagaaggaagacaagtcagacaaaacagaagacgagaagaactgcttcaagctagagtga

SEQ ID NO: 33239 - DNA, 396 bp, Zea mays
  Peptide Sequence Number=SeqID_75018
atgcaggtgctctcccctaccaacctcgtcgctgacttctcccgcgcgctaccgcccggggcacccatccccatgctccgccctgtagacaaagcccaacctaacccacgactctgctttttgcttcgtgctgcgttacatcttgcactggctgctgctggtgacaagcaagaacaaccaaaggatgcaaacatgtccagtgacactgatatgagtaaggtgtttgaagacagaacgtttgtgtcatctatccttaattcgcttcctggtgttgatcccaatgatccatctattaaagatttgctggcatcattgcacagccagggagaggaagagaagaaggaagacaagttagacaaaacagaagacgagaagaactgcttcaagctggagtga

SEQ ID NO: 33240 - DNA, 288 bp, Zea mays
  Peptide Sequence Number=SeqID_75019
atggacggctctgatttaaaaagaccagatctatctacgcccgttggatctagatcaacggcgctggctaatccacccaaccgggatgacggggatgcggcgaccgcgctgttgctcccgcacgcgaagtccgcggaggggaaggacccgacagcgtggtcccgcgtgtcagcgatggagcgaaggaggcggccgctcgagcgagtagcgggcgaggctgaccgatgggccccacatgtcggcgccggtttttgtggtttgggccgcgcgagtttcacctttgggtaa

SEQ ID NO: 33241 - DNA, 435 bp, Zea mays
  Peptide Sequence Number=SeqID_75020
atggacggctctgatttaaaaagaccagatctatctacgcccgttggatctagatcaacggcgctggctaatccacccaaccggtatccctttgatctaatcgcaaccgtcgaactatggatcaacggtcacaaccctttctctcccccaggtcaccgcagagcgacggcgatgagctccgcagcggcggtctcaccgacgaactgcgaaccgggcggggatgacggggatgcggcgaccgtgctgttgctcccgcacgcgaagtccgcggaggggaaggacccggcagcgcggtcccgcgtgtcatcgatggagcggaggaggccgccgcgtgagcgagtagcgggcgaggctgaccgatgggacccacttgtcggcgccggttttgtgatttgggccgcgcgtgagtggaggagtggaattgggccgaattga

SEQ ID NO: 33242 - DNA, 324 bp, Zea mays
  Peptide Sequence Number=SeqID_75021
atgatgcagaatgccaaagctatcatcagcttcggtccagctcaagcaaaaaaggaaataaaggaccagataaacctcgataactcaggaaccttcggactcgggatgaagctatacacgatatggagagcagggtcagaacgaaagctgaaccagcgccgaagctatgcacaagagagcttcggtctagtagcagaaaaaggaaccgacttaaggaggaaaaggctatctagtccccgacagattgttcttaagtcaatagtaaacatgaagggcataaatgtaatttcacataggctgcgtcctgtgcctataaatagatga

SEQ ID NO: 33243 - DNA, 324 bp, Zea mays
  Peptide Sequence Number=SeqID_75022
atgatgcagaatgccaaagctatcatcagcttcggtccagctcaagcaaaaaaggaaataaaggaccagataaaccttgataactcaggaaccttcggactcgggatgaagctatacacgatatggagagcagggtcagaacgaaagctgaaccagcgccgaagctatgcacaagagagcttcggtccagtagcagaaaaaggaaccgacttaaggaggaaaaggctatctagtccccgacagattgttcttaagtcaatagtaaacatgaagggcataaatgtaatttcacacaggctgcgtcctgtgcctataaatagatga

SEQ ID NO: 33244 - DNA, 408 bp, Zea mays
  Peptide Sequence Number=SeqID_75023
atggtggcgctccagagggagctcgcccgcctcgccgccaggtccgtcgcgcgcctgcctgctggggctgggctcggcgggagcggaaccgccgaggaggccgagatggccgccgcgctcatggacgtcgcggccgccagcgccgccgcctccgccgccgtgttctcgaccgtcacgtccgtgtctgccgccgcgtcgtcgtgctcgaacaagaaggccccgacggccttcatggttgttgccttcgccaagaagccggagacgccgacgacggccgatgtcgcgcaggagaagcacgaggagcttgagcgatgcatcgacgagtgcgagagcggcagcaaggtggtgttcaggagcattgttcggaatagggtttcgttgctcaacatccatagtccggcgatctag

SEQ ID NO: 33245 - DNA, 408 bp, Zea mays
  Peptide Sequence Number=SeqID_75024
atggtggcgctccacagggagctcgcccgcctcgccgccaggtccgtcgcgcgcctgcctgctggggctgggctcggcgggagcggaaccgccgaggaggccgagatggccgccgcgctcatggacgtcgcggccgccagcgccgccgcctccgccgccgtgttctcgaccgtcacgtccgtgtctgccgccgcgtcgtcgtgctcgaacaagaaggccccgacggccttcatggctgctgccttcgccaagaagccggagacgccgacgacggccgatgtcgcgcaggagaagcacgaggagcttgagcgatgcatcgacgagtgcgagagcggcagcaaggtggtgttcaggagcattgttcggaatagggtttcgttgctcaacatccatagtccggcgatctag

SEQ ID NO: 33246 - DNA, 636 bp, Zea mays
  Peptide Sequence Number=SeqID_75025
atggagcatttgctgagtacgttgatgtgtactcacccttgctttcacataaaacaccaggttgcccacactgtaaccattgctcaagagaagaagaagatggtgttgaggactaaggtccttcaattgagaagaaagagagggctcaagtttgatctttggaatcactcgagagggttgaaagagacctcgtcctttgggacagctcaactgggacccaatgtatctatcaaggccgcctctattacaatatcatgggatggaaaactagaaatagtagatttttcaaatgcgtgtatcccaatcgcggggaacaagaccctgaggatgtctctgtgggaccacggaccgctcgtggggaacgagaccttgtgtatttctctgtgggagcatggagcgttcgcgatggcttaccagaccgtccatgactctgtaacaccccctccaatccctggaccggcggtacttactcctggcaactctcttggatcatatatcatccccacagaccaaacacgagtcttttgtgcgcactttgtcctcactcatgcgcacccgagaaaacttcccgatcggtcacccatcctaaattgctccaagccaagcacgcttaacttggaggttcttttgagatag

SEQ ID NO: 33247 - DNA, 939 bp, Zea mays
  Peptide Sequence Number=SeqID_75026
atgaacgcgctctcccgcgaagggtgccggcacttcgaggtcttcgaccaagccgatgaagatttcaagcgagatatctttaaggttgaggaccccgtagtgaaggagtccgccggagccctctacgaccggatgtggggtctgcatggacgcgaggtggtcagggagcgggccgagacggcgatggcgcaggcgttgcgtggcgagaaggtggacgactttggggcgttgaacagcatgctgtctgacccggagccgaccctggggaccgcggaagacgcgccgggtgcccccgcatccgctgcggccggcgaaggcctgcccccggaggtcgccgaaggcacgcctgatgccctcgcagccgctgcgccgagtgctgaagatcccgcagcggtggcggcggaagcagcagcggaaacaacggcgaagccaacggcggaggctcccgcaacgtcagagccgtcgcaggttcaagattttgggcctgcgcacacaaccgctactactaaatttttggcggcttcgaccgcggaagatggtaatgaatgtggtggatctgcatctgtgtgttttgattgtgctgactctgggagctcggttgagtggactgaggagtcggaggaggaggacttggactattttgcggccttggatgtggctgcggcggaggcttcgccgcgcgttgcggacgcaggagatgcgccaggtcctagcaccgggcgacgacgacgaaaggcgattgcgaaacgtagagttagtggggcggagggggctcggcttcgtgtgagtggggctgaccggcaggaactgttgtctttgccggccgccgtgaatacaggtgaaggggaactgcgaagtctttttgcgggtgaggagcttaggataatgttatttaattatagggagatgggaattattcctaaggttgagccgatgtag

SEQ ID NO: 33248 - DNA, 999 bp, Zea mays
  Peptide Sequence Number=SeqID_75027
atgtcgtcttcctcttcttccgctgccgctacgtcgccggccggttcctcgccgccggccgccgcctcgtcggaggagacgctgagcggtttgatgccggaggagttgcgcgccggcgatactgttgatttcggcgtgtcgcgaatgtcgtcggcccgcgtggaggatatgcagcggttgggctacttcggcggcggagttgcccgtgccccggggacggagaaggtccccgagccggatggcgagttggttgttttcgaggcatttttcgccgccggtctccgcttacctgcgcatcgggtggcggaggctgcgaaggcggcccgagcgctgtcgtcagcaagcaagcgcgtcgccgacttcgccaccgacatttgtgtggaggactatcttggtgggtcggacgagggccagcttgctgtggttgcgcccacggctggcacagtgccgaaggcggggggcgatgctcttggctctgggggcgaggtgtcggccctcgtggttgtcagggacgaggcgggcgcggcgacccaccggctgaaaggggtgacggaggcgctgagtcaggtgacggaggcgctgggccaggtggctgacttcgccagccgtgctgcgtcgggggccctcacggcagcggtgtctgccgaagtcgagagacttcggacgcaacatgctgacgctgtccgtgagaaatcagcctccgacagcaagtgccgaaaactgacggacaaagtggccgtgctggagaaggagaaggctgaccttcggcgccagctggcggcggagaagagggaggccaacgaggctatcgccaagcagcaggctgctcaggcggaggccaaactggcgcgggcggagggcaatcttgccaaggagctcgccgaacatctgcaggagcggctcaacgccctggagagccgcgcgaagggggccgaggccgcgggggcgatgaacgcgctctcccgcgaagggtgccggcacttcgaggtcttcgactag

SEQ ID NO: 33249 - DNA, 897 bp, Zea mays
  Peptide Sequence Number=SeqID_75028
atgccccccctcggtcgcaccccctctccccccctcgccgccatcaccgagcaacatcggtccaaggagctagcgtcttcctcagtgaggtcgatctcgatgatcttgaccttggtagcgaggccacggaggaaggcagatgcggccgagggggaggtcgagatccggcgcctggaggaggccatccacggtgccatggtgttcgacctcggcaagtacaacgagacgtgccacaacattgtccccaagtacatctctgagtgggaggccatggtcacacgtacgaggaggaggattgacttcaagaacgactacaagaccatggacctcaacttcatggagagcgtctgccgctggccattgcgcgtggaggtggtggactggacgaggaggaggttggaaggattcggggagcggtggatggtggggcgatgtaatcaagaattggaatgggctggaaacgacgacgaaggaagaagtcttctcttctttgttaatctatactacttcttaagactccatgtagacgttcacagaagtaatatattggcatctaaagagaatgttagtgtgctacggttacaagaaaatgaagaacagaccagtgtgaggcggcgacagtacgaggcacgccacccagcccacagagagcgtgaggcggcgacagtacgaggcacgccacccagcccgcggagagggtcatctgcacaccaacagggtctgcgacaatgtgtggaccttcattctaacagatgcaaccttcaagagcgttggattcaagaaacactgagcaagagtaccatgactgccaacattttatccgtattgaatatggaatatggttttgctcgtattgaatatggaatatggctgccaacattctatccgtatttttag

SEQ ID NO: 33250 - DNA, 1062 bp, Zea mays
  Peptide Sequence Number=SeqID_75029
atggaaggtcgcgccgctcccacagtctgcgccatcaacgcctcgcccgcagtccgcagtccctccccgccgtcaatggaaggtcgcgtcgcgcccgcagtcccgcggttctgccgctggcgcaccccgccccgcatcgctcccgcggccgcatccccgccccgcaccccgcccgcagcccgcatcccgcccgcgagcaccctggacgccagcgacaaagcggctgagggcatgggcgtcagaggcgaaggagaggtgggcggcgcggacgtccggtggcgtgaatgtcgccccttccccgcagctgtcaccagcgcggtccaagcccggatccatggcgtcgccctcgcccccccccccccccgccaatcttgcagtcgcggccccttcaacaccggagacgtcgcccttcccaccttccccaccggatccgcggtgctcgcttcttccggtgattcggggaggccatgcccccccccctcggtcgcaccccctctctccccctcgccgcgtcctgcctctgggccgccgtgccacccctccctccccctcgccgccatcaccgagcaacatcgatccaaggagctagcgtcttcctcggtgaggtcgatctcgatgatcttgaccttggtagcgaggccacggaggaaggcagatgcggccgagggggaggtcgagatccggcgcctggaggaggccatccacggtgccatggtgcgtggcatgcaaatgtacgtcgccggcgggggatggatggctggtgtcattatttgtcgctcctttcttctgtctaatttcctcaatactgctcgatatcgcatcaccaaccggcagcaggtgttcgacctcggcaagtacaacgagacgtgccacaacattgtccccaagtacatctctgagtgggaggccatggtcacatgtacgaggaggtggattgacttcaagaacgactacaagaccatggacctcaacttcatggagagcgtctggtactctggtgggtgtttgcaaagctctgggagaaggacctcatctataagggcatcaaggttgcatctctaa

SEQ ID NO: 33251 - DNA, 2706 bp, Zea mays
  Peptide Sequence Number=SeqID_75030
atgccctcagccgctttgtcgctggcgtccagggtgctcgcgggcgggatgcgggctgcgggcggggtgcggggcggggatgcggccgcgggagcgatgcggggcggggcgcaaccgcaggccgcagccccaccgctcccccgtccatcttctccaactagtggcagcgcggtcgcaaccgctcacccaccgctccctcccccaaatttctccgcaatcttagcactacccgttagggagcaacgccgacacagcaaaggcacaagaggaggccaggcaacagctgcagaaacgcaggcgccgcaatgcagggctccaataccaagtaagcgttcatcacacccttctgtgctggttcttgatcactgcgcctccgcgcgcgaggtggatccccgcgggcagtgggcagtggcggtggatccttcaccgtctgacggtggttccatttcttggttggagagcagatctagctccgccgaggcgaagagcaacagcaaaccggacaaggagaagaaggggggcggaggcggcacgccgccaacccccaaggacagcaagccgcgcaagccggccgtgcccaaggcaagcgccgccggccatggcacgccgcgggcggctgacaagtcccccggctcggggtcggccgaccgcaaggcgcccacgcccaaggccgccgcctctcgcctcgccacgcctcccgagaaggggaagcccgcaaagcggccgcaggagcagcaggcgcagcttgccgagatccgtgaagagctcgtgaaggccaaagagcagttgctggagaacgagaaggagaagtgcagagttcttgctgagctggagcgtgccaagaaggtggctgatgaggccaatgccaagctgcaagatgctcttgatgtgcaaaggagggctattgaggcgcaggaggcagacaaactccctgccggagagtcgaagcaggcaagcatccacgaccagcaggaggatgatgacgctgtgctgcggtcgacagtggagcagcttgagaaggctaggtacgagctggccgatgcagtcgatgccaagaatgaagccctcagccaggtagatgatgccgttagggcttctgaggtgaaggcccaggaagttgagcatctcattgcagaggttacacgcctcaaagggctggttgattccaaggtggatggcaacaggaagaagactgcagagaggattcagaatcttgaagaagagaactttgcattaaagcttgagcttcagaaaaaaaaggctgctgaagaaaaggcggttcgattggagcgcatgattgatgaacttgagagtgatgttgatgatgctaggaattttggttccaagtcaaagcagttagctgatgaatggcagaagaaggcacagcttctcgaggtcagattggaagaggctgatcagtctaatattttgaagggtgaatctttgaattcagcaatggaagaattggattcaacaagtagtttgcttcgtgacagagaatctgaagttgctgctcttcgtgacaaagtaaggttctttgaggatgagcagacaaagctcaagaatgatattgttgtgtccggccaacgggcagatgcagcagagaaagaggcggcggatctatggacagaggttgaagggcttaggctgaagctccatacagtggaagaagagaaaatggaggccctgaacagtgataagagtactaccttagaaactgagaccttgaatgaacagaagaaccagctgactgacaagcttgaggcaaacaaagatgagcttgagaaaactaagaaggcaatggagggtctggcctcagccttacaggaaatgtcagctgaatccagagaggcgcaagagaagtaccttctcaaacaagatgagattgagcgtgctcaggcacaggtagaggagcttagcttgagtctgaagaatactaaggagaactatgagctattgcttgatgaggcaaactatgagaaggtttgccttacgaaaacagttgaaagactgaaagcagaagcaaagagtgcacatgaggaatggcattccaaagagctaagttttgtcaattctattaagaattcagaggaagagatagttgctatcagagttcagatgatcaggaccttggaggttgttaaagagaaagaacgtgaaaacactgagttgcaggagaagctgcagcagcttgagtctcagctaatggaagcaaacagaatcagggaggaagccagcgctgaaactatccgatggaaggagaacatattagaccaagagaatgaattacagaacataaaacaggagaacgacgacctgcaggcaaaggaattagcagcttctgagaaggttaaggaactctctttccagcttgctaatgtaaaagatagcctgataaatggtaacaccaaggaaggagataatgagaaggggggtactgaagaggatgatgaacctgttgtggtagttgccaaaatgtgggagaacggcaagtttgctgactgtgattcatctaaggagaaggataatgatggtgactcgcaggttgatttggaatcaaacaagggggatgcaggtcttgacagcaatgggttgcactcaactaatgagagcagtggcagagcatcaactaaacagccgcaacagcataagaagcctttgctgaagagattcggtggtttgctgaagaagaaaagcgaaaagtag

SEQ ID NO: 33252 - DNA, 588 bp, Zea mays
  Peptide Sequence Number=SeqID_75031
atgcggaagacacagtccgcccatcagctgttcaccgttcaaaccggatcgggtggcctggattcagctcgccaaggacccatccgggccgacctccggagatccagcggcccaggcccagttccccctcacgccgtctatctgcacgttaggccccacttgtcagttcggccgcgcgcccgcactgtcccaccagtcccgcctgtcagtccgcccgcgctgtccgcccggtcccgcatgccagtcgcccgcgcccgcgctgtccgcccggtcccgcctgtcagccgctcgcgccgccgcgcgcccgcgcgcccgccgcgggatctaatcctggccgtagatctgagatccaacggctacaacgagcagtctgtgtttcccgaggcagttgcagaggacgtccctgatcagcagtttggtgaaggcaaggggctcaggctgtttcctgagtacctctccgtaaggactgccgtcgtgccgtcaatggggtccaggcacagtgcttgctctgccgaggctgagtgccgaggagaaggcgaagccgtggaaggagacttccaggagttccaagactacgacgaattctag

SEQ ID NO: 33253 - DNA, 230 bp, Zea mays
  Peptide Sequence Number=SeqID_75032
acaacgagcagtctgtgtttcccgaggcagttgcagaggaagtccctgatcagcagtttggtgaaggcaaggggctcaggctgtttcctgagtacctctccgtaaggactgccgtcgtgccgtcaatggggtccaggcacagtgcttgctctgccgaggctgagtgccgaggagaaggcgaagccgtggaaggagacttccaggagttccaagactacgatgagttctag

SEQ ID NO: 33254 - DNA, 801 bp, Zea mays
  Peptide Sequence Number=SeqID_75033
atggcgaaccgctgcacacgaggcatgcaaccgccccgcggggatcgggaaagagggatattccggaaaaggatccttcttagcgaaggaaacgggccccgagccctcctactgatcaggggttcgaaggttgcgccctacggggttcggcaaccgccccagagcactcgggctccgagccctttactgatcaggggttcgaaggctggcccctcggaagggttcgacagccgccccagagcacgcagagtcagggatgaccctgggtacgtccgttacatggccaaggctcgggttgcgctcccaagccaccagggaaagactaacaacagtcatggcctttcccgagttcggcctcgggcgcaacagggagctctgcctcgcccgaccctaggcctcggcctcagctttggcctcgggagaaggtctccgcctcgaccgaccctgacctcggcctcagccttggcctcgggagaaggactccgcctcgcccgacctcggcctcgggagaaggacttcgcctcgcccgacctcggcctcaggagaaggactccgcctcgcccgacctcggcctcggaccgactacgctacaggggatacatcattaccctacctctagctagccgcctcaggctacgaaggaacaagaccggagtcacatctagattactccggccacaggggatgtccagggccttccgtagggaggagaggaggagagaggagaaagggaagaacacgggcagcaagagcaacgaagacggactcatccacacgtcgagctccactccgcgatgctag

SEQ ID NO: 33255 - DNA, 492 bp, Zea mays
  Peptide Sequence Number=SeqID_75034
atggatccgtacccgtacccatcgggtatccgtcgggaaaacaacactattcaccccgttccgactactgtgccaaccaccagggtaagactaacaacagtaagtcacggcctctcccgagttcggcctcgggcgcaacagggagctccgcctcacctgaccccaggcctcggcctcagcctcggcctcgggagaaggtctccgcctcgcccgacctcggcctcggaccgactacgctacaggggatacatcattaccctacctctagctagccgcctcaggctacgaaggaacaagaccagagtcacatctagattactccggcaacagatggacaaccttcagcagcctcttcagcccgggacgatgctctgctttgggagtctcgagttcatgtcccccgacggcggctacgacatggtatcttcggacttgaatcagaaagggagaagctcaaaagatacgaaggttgacacagtgccgaagctgtga

SEQ ID NO: 33256 - DNA, 576 bp, Zea mays
  Peptide Sequence Number=SeqID_75035
atggagaagagcacagtggtggtcagtgtccctgttgttgtcatggccgagactgctgagaccgactacagctcgagcttctcacttcttgtcgtggattcacatttgctacctggggatgcagagtcccagaaagatgttgggaagggtgataaatcaagggataagggaactgctgagaagtttgcaatatatcagaagcatcgttcttcgttggcagacactgttcaattcaggaggccagctgctccaacttccagtgtgaatgctgatattgtgggaacatccactctgcagtctgcatctctaccgaaacaagaaccctcaacagctacatccaagagctatactttcagagaaggtgatagggtgcgttatatgggtccagctcagttatcctcattgtcacaaaggaagagagtggctcttcactcccatcggattgacaaaaacacactcggacaaccagtgctggtattaatcgagatgtcgcatcaacaaacgctcatgcagagccagattctactcctacagtcctacgtctacacgagacgacacaagtgcatctataattga

SEQ ID NO: 33257 - DNA, 1086 bp, Zea mays
  Peptide Sequence Number=SeqID_75036
atggccgaggagatccaccagaaccaggaggaggaggaggaggaggaggttgtggctgcgtccaccgcccaagcgcagacgcaaggcggcgtcttccgggaagaagcccaagccgacgcccaagaagggctaaaccgggccgtcgacggcggccccagggatgtgcccccgcgccattgcccccgggccctcgcgttgtccgcgtcgctcacgaagtcgcccccagcccctgcgtcagaaattataatttgggtcagagaaatacagttcattcttataagtcccacaatctacatgttcattctgttaagcccctcgactctcgatggcgatggtgagcaggctgctgccacgctgaggagccaatgctccccgcagcacccgcggtcctggaaggtgcaacaaataactgttcaggcacctttgaaggatgcagagtcccagaaagatgttgggaagggtgataaatcaggggataaaggaactgctgagaagtttgcaatatatcagaagcatcgttcttcgttggcagacattgttcagttcaggaggccagctgctccaacttccagtgtgaatgctgatattgtgggaacatccactctgcagtctgcatctctaccgaaacaagaatcctcaacagctacatccaagagctatactttcagagaaggctgttatatttccatagctgaatcacttcgcccagacttttctgctggtgaagaagttgagaggctagctatgaccgagctaatagaggtcatttcagaagagaacaaatctggacctctgattgtgttacttaaggatgtagagaaatcattcattggagttaccgagtcactttcatctttgcggagcaaatttgaatcgcttccatctggtgttcttattataggatcccacactcagatggacagccgcaaagaaaaggatgaggctctacttacagattggaagcagcagttggatcgtgatgttgaaacccttaaagccaaatcaaacattggtagcattcgcacgattttgcatatcatagcgacgtttgccatttcgtatctatacgtttatgctaatttttaa

SEQ ID NO: 33258 - DNA, 723 bp, Zea mays
  Peptide Sequence Number=SeqID_75037
atgcaggcggcgtgcaaccacaccaagggggcacaccctttcgacttcgccgcgtccagcttggaggcccaggcccacacgtcatgtaaccggcgtgccggttactacgtgcaagaaactgcaccgccactcgcgccagtcccacgcctcctcgactgcagaaccggtgccgcaactcgaggcaaccctgcatgcggcccagcagtgccaaccaggcacgccggtcacgggtcagtcagccgcgggagaaggggcgacggtcgatatgggaccgggaaagaggatactccgaaagggatccttctccacgaaggaaatgggccccgagcccccctactgatcagatgtttgaaggctagcccctcggaagggttcgacagccgccttagagcactcgggctccgcgcccactactggttagaggttcgaaggctggcccctcggaagggttcaacagccgcctcaggccactcgggctccacgcccactactgatcagagaaaggcgacgcaggggcgtatgaaaaaagccgagtctgtccttgaccgtcctctcgctctgtgcggaggctcgggggctgctctcacaaacctggctccggccaaaccgttgacagcgtcaacataccagcccgagaacttgggactcaactatgcacccgggctacggccagttcgcatgagggaacaaccagaccggccgaaccatcgcgaaaggcattaa

SEQ ID NO: 33259 - DNA, 1422 bp, Zea mays
  Peptide Sequence Number=SeqID_75038
atggcggcggcgcaggtggtcgcgaaggggagcgtggtgtcgccgtgcggcaatcgagcggtgccgggcctcttgggcaggcggagggatgccgtggcggcgcagatgacgccgtcggcggtgcggatcgggggctcctggaggaagaacgcgtttcctggcgtgaggctagccttggggacgaggagatccaggcccgcgtcccggagtttctccgcctcgccggtgcagcccaacatgcgtgagatcgagtccgcccaagaccttgtagattccttaaccaacgccggcgagaggctcgtcgtcgtcgacttcttctcccctggctgcggcggctgccgtgctcttcacccgaagatttgccaatttgcggagcggaaccctgatgtgctgttcttgcaagtgaactacgaggagcacaagtctatgtgctacagccttcgtgtccatattaagaagttcaaggatgcacttgcgaagcacaagccagatagatgtacctttggcccaaccagggggctagacgaatcggagttattagccttggcagcaaacaaggaactccagttcacctacaccagggagccagaactgactcccatgggagatacccccggggaggtcattgctcccgagcccgcaaagcttcctgccgctacgaagcctttggtcaagctggggtcggaggaaagggcggatgcacttgcagtaggggttacaagcgttcgcgagggagagagagagagagagagagagagagagagagagcgtgcgagcctgttcgtcggcccgtcctcccgcgcgaccaccctctcgtatgagggccctggaccttccttttatagatgcaaggagagggtccagggtaatgatgtaccccctgtggcgtggtcggtccgagcccaaggtcgggtgaggcggagactcctcctgaggccgaggccggggtggggtgaggacgtgattccttccgaggtcgaggttgaggccgagccctggggtcaggcgaggcggagaccatcttctgaggccgaggttgaggctgagccctggggtcaggcgaggcagagaccaccttccgaggccgaggttgaggctgagccctggggtcgggcgaggcagagaccaccttccgaggccgaggcccaaggtcgggcgaggcggagcttcctgttgcgcctgaggctggacttagctgttgtcagcctcaccctggataaggtgtcaagcgatccttgcattgaatgctcctgcgattcggtcggttggcgaggcgatctggccaaggttgcttcactgcgaagcctgcccgagctgggcctcgggcgagttgagggctggtctgttgacgctgtcaacggtttggccgtagccaggtttgcgaaagcagcccccgagcctctgcacagagcgagaggatga

SEQ ID NO: 33260 - DNA, 2172 bp, Zea mays
  Peptide Sequence Number=SeqID_75039
atgtccagccttgttcctgaagaaggacgagagcttaagattgtgcatagattaccgccaaatcaacacggtgacgatcaaaaacaagacgtgatgaaatgcaagttggtggtgcagataggttcgcaatctgttgtggtcgctagagggcaggcttaccctccaaaggatgttgtaaccgtccatgggattgagcggcgagatgaccacacaaaagtgcaggttgattttgtgtttgacaacttcttggaatttccactccctatacctatcgctggtggtgatatgttcactcttggcgaagccaaaaattcatttgtgttatggcctaagtcaggcatacaactagcagaggaaggttaccattgggccttgttagttattttcccaaaatggaatacagtgtacaatattgactccaaaggttaccaatcccctagctgggcttttggtgcttatgtcgacaaaaaaggtcgccataacaagaattttggtcgcacagttatatggaaacattttcagggtagtgctggttttgcaacttgtccattattgcctgatgagatagcaaatgtccgagaacggttgctcgacttcttcatgaatgagtctgatctatataccttggttgatggctttgttacacgtaattcagccagaacaaatccatcaaacccctcaattgaacttggtcctgagttcaagaaggttgggagcttccttggtcgcttcaagtccatacctagcattgttgagcttgacagcttgaaggtttccggtgatgtttggttcggttctagaattgtactgaagtctttggttaatggggcaaacaaggcatctagacgaactgaacatggcaggaccccaagtgttctcgttctgctaccaacaagagagctggccaatcaggtgcacgctgactttgagttttatggtgcaacatttgggctctctgcatgttgtgtgtatgggggatcaccttatcatcctcaagaaatggcattgagaagaggtgtggatattgttgttggaactcctggtcgtgtcaagtttcttatgtatgctacatcacttgtgaaggatttcattgttaaaggaactctcaatttgaaatgcttgaaattctgtgtccttgatgaagctgatgagatgctaaacatgggttttgttgatgatgtcgagctcattcttggcaaggtagaagatgctaccaaagtacagacgcttctgttcaatgccactctgccagattgggtgaataagctctctatgaggtttctgaaagttgacaggaaaacagttgatcttgtcggtaatgagaaactgaaggccagtgcatctgttaagcaccttgctcttccttgtaacaaggcagcaagggcacaagttattctagacattatccgatgttatagccaggatgtactaccccatagatgtggaggtcgaaccatcatcttcactgagacgaaggattctgcatcacagctttctggtttgatttctggatcccgtgccttgcatggagatgtagcgcaagcgcagcgtgaatgtcagcagactagaaagggagtctgggttaaatttgagcatatctctgtgccacaacccactgatgtagcacaatctgctggcagtgaagctgcagatgccattgcgagtgtgtcagacagtgttattcctatcttcaggcagcaagcagagcagttgctaagctcttccagtctgtctgcagctgacttgcttgccaaagcacttgcaaaggcagttttggaactaacagaaatatgtgtcttagggttacacggccataaagaaaagatcattgttatcttccttggaggattacagtacactacatcttcaaactggcagaccgatgtggtcacctgggtttgctataacattccggtgatcgtatttcttcgtcgtcggggtcatatttgttcccattggtgttatcttcagtttgacgtcggcaacgtggtcatggtgaccggcgggaggaacaccgagcgtgtaggagtgatcaagaactgggagaagcacaagggcatcttcgaggaaaacatagaatggaattcaaatttggtggtcgcaaaagtgtggagacttgattcatatacagttaagcttaacattagtgcaaatagttgtattttagtttag

SEQ ID NO: 33261 - DNA, 318 bp, Zea mays
  Peptide Sequence Number=SeqID_75040
atggtgaccggcaggaggaacatcgggcgtgtaggagtgatcaagaactgggagaagcacaagggcagcttcaaggaaaaatcaaatttaaaaagagatgactttgttcagccaaagtcagctcggtctgggtgcaccggactgtccggtggtgcaccggacagtgtccggtggttcaccagacagtgtccggtgcgccaggttggctctggcaaacttgctgctctcggggctttgacggcggtgtacggctataaatcaccggactgtccggtgagccattcacaggcgaactcatcgctctcgggagatgattaa

SEQ ID NO: 33262 - DNA, 636 bp, Zea mays
  Peptide Sequence Number=SeqID_75041
atggactgcgccgcatgtcaccttcgtcacgccgtcctggcaaccgacgtccccatctccatgggctacgccgcatgccaccttcgtcacgccatcctggcaaccgacgtccccatctccatgggcagcatcgtctgccaattttgtcaccacaacctggacgccagcgtgcccatctccagggactacgctaaatttcgttacatcatcttcgttgacgctccagacgtcggcggcatacaagctgttgctcgtggcttccttgcactacggagagtgcgggagatgcgccggcagatgctcgaggcaaccttggtgacggttgacctcggcatacaggggcgcaacctcgccctgtcagacggccatcagcagcggcaccgggccgctatctccaagtgcgagcatggtacgtctcctgcgggcgacgagcttcaactctacgacagtggcggtagggaaggcactcccctcgtcatcggcaagggcgcactatttagcgccaccacattccgctaccggtcgccacgaggctgcctccgctggttattgttgcgacctattccagggcctaaggtggcccatagaggggctgcggcagcagcagccatgagccctccaagggggattagataa

SEQ ID NO: 33263 - DNA, 1191 bp, Zea mays
  Peptide Sequence Number=SeqID_75042
atggagttggtgattgctgagccgtggctgcccctagtggcatcgcccatggggacggagacgccgtcaacgaagatgatcgtccaggatgtggtgacaaaattggcaggcgatgctgcccatggagatagggacgtcagttgccaggatggcgtgacgaaggtggcatgcggcgcagcccatggagatggggacgtcggttgccaggacggcgtgacgaaggtgacatgcggcgcagtccatggagatggggacgctggttgccaggatgacgccgtgaaattggcagcagaagccatgggatcaaatcgaaacccaagctatctgataccagatgttatgatcgctagatcgtttaattcacagagttcctctatatcttcccaagtgaatcttggagttcaaggaacagatgctgggcatataaaaagtgaagaagaagaacaacttttggctgaagatggtgtggaatcttctgcaacaacaggagcaaataaacaaacaagtgaagatgacacaaagattccatattcgaatccttcagcacctgcagcagaaagcaatcagctgcctagggatactgatccatcacctgggcagcctttgcaacctggaatgtcatcatctggtgttggtgttatcggccgaagaagtgtatctgatcttggtgcaatcggagataaccttactggaacttctgctagttctggtcatgatcagctttataacctgcaaatgctagaagctgcattccacaagcttccacaaccaaaggactctgagcgtgctaaaacttacatcccgcggcaccctgcagttacccctgctagctatccccaagttcagccatcaattgtatctcatccctccttctgggaaagaattggtagcgacacattagctaccgacatgctattctttgcgttctattaccagcagaacacatatcaacaatacatggctgctagagaattgaagaagcaatcgtggagatttcaccggaggtacaatacctggttccagcggcatgtggagccacaggttacgactgatgagtatgagcggggatcatatgtatactttgatttccatgtcaccgaggatggctcaggatggtgccaaagaatcaagaatgacttcacattcgagtacaacttcttggaggatgagctatcagtacaaacaaactaa

SEQ ID NO: 33264 - DNA, 582 bp, Zea mays
  Peptide Sequence Number=SeqID_75043
atgcccctcataaaagtttacaacaccgactcagacacttatggactaaaaggtcattctacttttaagtcgtcagcttcagccgaagctgtttcttcatgtaggaccttcggcgacgaagcatggtcccaacaacgggcaatcaaggtcactgaaatgacagaagaggcgaagaaaaagagatttgggcactcggctcggaaacgatcgctcgaaacggggaatttggtgaaatttaagcctggaatctcggattggcgtgaaatttggcaaggagctagaaacctgcagggatgctcaatgggcacattggaacacattccaccatttggatttactggatttgacaggaattcgaaatttgcgcaagaggtgagaaaaacgggcttcactgcctctcagacagagaacaagagagaaaagggagaggagagcagagagcagctcaccgagcgagggagaggagacaagcgcaggcacagggcgccggaggatcgccgccgaggaggaagatcgccggcgaagggagggaagtcgcctgagaccgagagcaggcgcgggcaggggagaaaactgagctag

SEQ ID NO: 33265 - DNA, 258 bp, Zea mays
  Peptide Sequence Number=SeqID_75044
atgtccgatagattagcaaaggatgagatgactacctggaaagctcacacgagaggtgacgatccaggcaagacgggagacagcacacgggcaatcaaggtcactgaaatgacagaagaggcgaagaaaaagagatttgggcactcggctcggaaacgatcgctcgaaacggggaatttggtgaaagttaagcctggaatctcggattggcgtgaaatttggcaagagtgttactggaagtgttgtgaaggtgcctga

SEQ ID NO: 33266 - DNA, 258 bp, Zea mays
  Peptide Sequence Number=SeqID_75045
atgtccgatagattagcaaaggatgagatgactacctggaaagctcacacgagaggtgacgatccaggcaggacgggagacggcacacgggcaatcaaggtcactgaaatgacagaagaggcgaagaaaaagagatttgggcactcggctcggaaacgatcgctcaaaacggggaatgtggtgaaatttaagcctggaatctcggattggcgtgaaattttgcaagattttgaaaaatggacaaagggtggaaattga

SEQ ID NO: 33267 - DNA, 276 bp, Zea mays
  Peptide Sequence Number=SeqID_75046
atgtccgatagattagcaaaggatgagatgactacctggaaagctcacacgagaggtgacgatccaggcaggacgggagacagcacacgggcaatcaaggtcactgaaatgacagaagaggcgaagaaaaagagatttgggcactcggctcggaaacgatcgctcgaaacggggaatttggtgaaattttgcctggaatctcggattggcgtgaaatttggcaagagtgttactcaaagtgttgtgaaggtattggcaccctcatatactttttaa

SEQ ID NO: 33268 - DNA, 180 bp, Zea mays
  Peptide Sequence Number=SeqID_75047
atgtccgatagattagcaaaagatgagatgactacctggaaagctcacacgagaggtgacgatccaggcaggacgggagacggcacacgggcaatcaaggtcactgaaatgacagaagaggcgaagaaaaagagatttgggcactcggctcggaaacgatcgctcgaaacgggaaattga

SEQ ID NO: 33269 - DNA, 483 bp, Zea mays
  Peptide Sequence Number=SeqID_75048
atgtccgatagattagcaaaggatgagatgactacctggaaagctcacacgagaggtgacgatccaggcaggacaggagacgacacacgggcaatcaaggtcactgaaatgacagaagaggcgaagaaaaagagatttgggcactcggctcggaaacgatcgctcgaaacggggaatttggtgaaatttaagcctggaatctcggattggcgtgaaatttggcaagaattcacaagatttggatttgatacacaagggggtggcactgtctgtctagagaaacagagagagagaagcagaggggaggaaagaggctgctcaccgaggagggatgaagagaagcacaaggtcgtcgtgggatcgccggtggtcgccggagaggggaggtcgccggtgggggagagggaatcgccagagagacagagagagagcgctggtgaaatgagcctctggctcggtctcgggctggaggcctttttttaa

SEQ ID NO: 33270 - DNA, 180 bp, Zea mays
  Peptide Sequence Number=SeqID_75049
atggctacctggaaagctcacacgagaggtgaaaatccaggcaggacaggagacggcacacgggcagtcaaggtcactgaaatgacagaagagagaattatggcacagaaaacgagagatatggcaatcgagaggtcaaacgacgcgaaaacggcgtttgaacgagaaatagtgccatag

SEQ ID NO: 33271 - DNA, 465 bp, Zea mays
  Peptide Sequence Number=SeqID_75050
atgacggttaacaaagcacagggtcagactattcccaatgttggcgtatacttgcccgaactagtgttctctcatggccaactatatgttgctctatctagagcgacagctcgatcgaacataaagattcttgccatcccagtcgtcgatgggaagaagaggtcgaggaagggtgtaagaaagaaccccatagtagattgtgggacatataccaagaacatcatctacaaggaggatcacatgaaaattattgaagacgacggtccaggtgcagccttctatgccagtgctaaggccttgactaatggaaatcacactttctatcattacttcttcagcatcatgggagaaaatcttactgtcagggttcagaggatgttgtacgtaacttttaatgaagagctttgctggtgttgcgacaaagatacatgcccaagagcagtatggtcggaggtgaagcagtga

SEQ ID NO: 33272 - DNA, 456 bp, Zea mays
  Peptide Sequence Number=SeqID_75051
atgacggttaacaaagcacagggtcagactattcccaatgttggcgtatacttgcccgaactagtgttctctcatggccaactatatgttgctctatctagagcgacagctcgatcgaacataaagattcttgccatcccagtcgtcgatgggaagaagaggtcgaggaagggtgtaagaaagaaccccatagtagattgtgggacatataccaagaacatcatctacaaggaggatcacatgaaaattattgaagacgacggtccaggtgcagccttctatgccagtgctaaggccttgactaatggaaatcacactttctatcattacttcttcagcatcatgggagaaaatcttactgtcagggttcagaggatgttgtacgtaacttttaatgaagagctttgctggtgttgcgacaaagatacatgccaagagcagtatggtcggaggtga

SEQ ID NO: 33273 - DNA, 264 bp, Zea mays
  Peptide Sequence Number=SeqID_75052
atggggctaaaatatatgtatgggttggccagttctggaatgacttacctcatcaagcacggtagcaagtcttccacccccgaaccctcacgccatcgacgtagctgtcttcggtctcccgtgcttcccttcgagagatcaaggaatcagagtgcattatgtggagaaagatgccaagatcggaagcctctgattgaggaagatggaagagttgaactacctcaagctttgactgaggaagatggaagatgtgaaccaccttag

SEQ ID NO: 33274 - DNA, 1431 bp, Zea mays
  Peptide Sequence Number=SeqID_75053
atgccgcatctagcgctggttcgcataggagccttggtgcggcacagccgcagggattttttcccccaatctcgaatgcgcggctttgtgtttgtgtcccaggagcacatgaaaattattgaagacaacggtccaggtgcagccttctatgccagtgctaaggccatgaccaatggaaatcacactttctatgtgagcaaactgatacagagttctggaatgacttacctcacaagcacggtagcaagtcttccacccccgaaccctcacgccatcgacgcagctgtcttcggtctcccgtgcttccctttgagagatcaaggattggctggtctatcaacagcggagtatctggcagatgctggccataaacccatattgcttgaggcaagagatgttttgggtggaaaggtagctgcttggaaggatgaagatggagattggtacgagactgggcttcatatattttttggagcttatcccaacatacagaatctgtttggcgagcttaggattgaggatcgtttacagtggaaagaacactctatgatattcgccatgccaaacaagccaggagaattcagccggtttgatttcccagaaactttgccagcacctataaatgggatatgggccatattgagaaacaatgaaatgcttacttggccggagaaggtgaagcgtacctcgaataccaccagatgcctcaacctgggctcctacaactaccttggctttgctgcagcagatgaatactgcacaccacgtgttattgagtctctcaagaaatactcagcaagtacgaccaagtttcacaatgagctagaggagttgcctgcgcgttttgttggaaagcttgctgctatcctatttggcatgggttatgttacaaactctgccatcattccatgcctaattggaaagggtggactgataattagtgactctctgaatcataactcaattgtcaatggcgcaagaggatccggtgcaactgttagggttttccagcataactcccctgctcatttggaagaggtcctgagagagcagatagctagtggtcaaccacggacacacagaccatggaagaggatcattgtcattgttgaggagctcaagaagatgggttttgaggttcttggtgacaatgactctcctgtcatgcccataatgctctacaatccggctaagattcctgcattctctagggagtgccttagacaaaaggttgttgttgttactgttgcgtttcctgcgacacctcttcttcttgctagggcacgcatatgcatttctgcttcacatactagggaggacctgattaaagcccttgatgttatcagcagagttggcgaccttgtgggcatcaaatacttccctgcagaaccaccaaagattgctggagctgatcatgataagctggagtag

SEQ ID NO: 33275 - DNA, 180 bp, Zea mays
  Peptide Sequence Number=SeqID_75054
atggctacctggaaagctcacacgagaggtgacgatccaggcaggacaggagatggcacacaggcaatcaaggtcactgaaatgatagaagagagagatatggcacaggaaacaagagatgagacgatcgagaggtcaaacgacgtgaaaacgacgtttgaacgatacacagtgccatag

SEQ ID NO: 33276 - DNA, 1533 bp, Zea mays
  Peptide Sequence Number=SeqID_75055
atgcttcgtcgccgaaggtcctacaggaagaaacaacttcggctgaagctgactgcacgtgatgccgaagcatttgagaacgagtccccaacacccgtgtgccgtctcctgtcctgcctggatcgtcacctctcgtgtgagctttccagacatcagttcaggatgccgcgcacgaagaatgtgtcggcgccagggggaggcgatgatgaggatcctcgtcgccccttcaggcaggtcaagggcaagacagtttacttggagcagcaggaaggccgcaagaagcggcgtacggacagagcagcccgtgcagcggcagtagctgcagcagccgctgcgcaggccgagcttggagatcagccgcagactccgtcagatcagatcgcatatcgtgttcgtcgtctcacctcccggcctcgctcctccactcacacctctgcttccactctgccacccactctgcctgctcccgtcactcctattgctccatccaccaccacagccatactcgctacctccactacgccagcttccactgctcctccttttcccgctcccgcttcagctcctcctgtccctccacctcgattccgggagcgcgatgagactgaggttcgaccacttgctgcggatcccagactctttgaccttcagcgtgctacagcggcacgggtacgtaggttcagatacgtacctgtggagtcttggttaccagctcagagggaccctgcagtagttgacctattcagcactcccggtgctgactctaaggcgcacctcacatatcagcctggccttctgacccttttgactaccagcggcagacgaactcttctgccgaggatgggatacagggaggctaccacacatatccagctctggctccttggtgccctggtctctcactctgagtttgacgtcgtggacttccttatttgtgagatcgaggacaccgttttggatgggattcgtgctcgtcgacagttgccatatgctcactacttgtgccacatctttgcgcagctgattcagcctcctcggtttcagggcacacttgaggcctcacgcctcgtctttggatcctaccgtcctgcgcctgagactcctgtgccagcttctgctcctgtttttgactctcaggccgaggacgctgctcttcgtcagttcgacagtcaggatacagcagctgatgatgatgatgatgatgattttggggttcctcctccgcctcctatgcctccacgctcacatgatcatgaggctgggagttctagtgctgcccctgctgcccctccggctatggaccctgctcttgcttcgattctccagtctatcactcagcagcaggctcacctggcagccgagcaggcccggttatccgagaggatgctctcgatgtttcagaacatgcaggacaggcaggatgcgcttcagcagcagctacttcaggatcgggctgagagcagggcattcatggctcttatgctacagcagtctgatgtcttagttcctccggttcagtctgagagcacctag

SEQ ID NO: 33277 - DNA, 591 bp, Zea mays
  Peptide Sequence Number=SeqID_75056
atggctagggatccactacgaggcctttacaaagttccactagcttccgaaaacccgctacagtttatgggaagagcacttgcaagaatcccccgtctgaccgctatcgcagcaaatcagcccgagaacctccttgcatgcaactcccctactgcccttgcccctttcagggataacaagctgctaccatttctcaatacgcacgccataccggcctctaccgtagataccgcacagtggcaaccaaggcatgggagaggaggacctcaccgtttgaaggcggagccggccgacgacgaaacgcggtgcgcagcgaggcacaggtccaagcgattcaacatctcttcgagcacgcccaggtccgcgacccagccggacgacggtgcccaggtccacgacccagccggacgatggcgcccgcgcatgcagtcatcaatgccaggaagtgcccatggtgactttgtcctcccggcaacacctgacaatcgtaattcttcagtggtgactaccccttctctctgttcacagggatcggatcctggtatggcactcatggttctctctcctgctgttggcaatggcgagccctag

SEQ ID NO: 33278 - DNA, 444 bp, Zea mays
  Peptide Sequence Number=SeqID_75057
atggcagcacaccggactgtctggtggcgcatcggactgtccgctttggaagtcgagctggaggagctacgttgccgctttggtcatgctctggattttgtcggtgctcgtggatcctctctggtagagcacttggacaatgtcccatgccgcgaccggggcgttattggtttcggtgtctggcaggacatatctgtagtgctgcttgttgcggagctcccaatcgtctgcagcctacaggaggtcgtgggccctcccttggccctaccagacgagggtctaaaggagatgctagagtgttatgacaaggtggcaagtcgcatcaggttgtaccctatacccacaagtcgtgtatcccatgtcgccaaggtttgcaaggcccttagacactaccgaggtgaatggctagggatccactatgaggcctttacaaagttccactag

SEQ ID NO: 33279 - DNA, 881 bp, Zea mays
  Peptide Sequence Number=SeqID_75058
gggttcaaattgatcgaaagcgtagatctggctcctctcaaggagctgatcgatcccctgacagtgaatcaactgagcatatattgcagatgcttcgccagttgccaaccaaaaatatatctgataagataagccatgatgagattacagatgattctatctccaatgtcaataattcctttgctgatagaaaggcactgcatcttgctattcattcatctgagaaggtaaggaaggcagtggttagtggtgtaaaagggcttttgtctagttgcagttctacattaaaaagaaccaagatgctacttttggaatgtttatgtgttctggcatgtgatgatgctgcagctgtgtctgaggctacacaagatgctcttgatcatcttttcaaccaaggccacaatctcgtaacagaaaatgagatttctgatacctttactaggctggttgaaaggctaccacaagtggtcattgctgctcgtttctttgattgtttgggtttatgcataggtcatagctcacagttttctggttccatggacaagctaattgtatcaaagccactatctattgggtatctttattcagttgctgagttgaacagtggcgcctattctaaagatacaactaacatatctctgcatgccacgtcaacatctgcagcctccaaaatatctgttatccatgataatgctttgccaattgcattacttggtacagttgaatatgagttgccccatatgcctccatggttttttcatgctggtagccagaagctttatggggttcttgctggaataattagacttgttggcctatcaacaatgtcagttgatgggttcgattccttaaagctaacagtagtggtcactagcccttga

SEQ ID NO: 33280 - DNA, 1170 bp, Zea mays
  Peptide Sequence Number=SeqID_75059
atgccctcaccaccatgtgcgagctacaccaagctaggtcaatattgcgctagacagcttcagttacgtgtagctgacacattgttcaatagctcgaacacaaggagtgcatttacagttgggaagctggccaatttgctcttgtgttcggtttctacggtttctgggaaattagattttgcaccaaatccaatgcaaatgatatttcactatttcttcctgcaagagttcaagttgatcgaaagcgtagagctggctcctctcaggaagctgatcgatcccctgacaggggttcaaattgatcgaaagcgtagatctggctcctctcaaggagctgatcgatcccctgacagtgaatcaactgagcatatattgcagatgcttcgccagttgccaaccaaaaatatatctgataagataagccatgatgagattacagatgattctatctccaatgtcaataattcctttgctgatagaaaggcactgcatcttgctattcattcatctgagaaggtaaggaaggcagtggttagtggtgtaaaagggcttttgtctagttgcagttctacattaaaaagaaccaagatgctacttttggaatgtttatgtgttctggcatgtgatgatgctgcagctgtgtctgaggctacacaagatgctcttgatcatcttttcaaccaaggccacaatctcgtaacagaaaatgagatttctgatacctttactaggctggttgaaaggctaccacaagtggtcattgctgctcgtttctttgattgtttgggtttatgcataggtcatagctcacagttttctggttccatggacaagctaattgtatcaaagccactatctattgggtatctttattcagttgctgagttgaacagtggcgcctattctaaagatacaactaacatatctctgcatgccacgtcaacatctgcagcctccaaaatatctgttatccatgataatgctttgccaattgcattacttggtacagttgaatatgagttgccccatatgcctccatggttttttcatgctggtagccagaagctttatggggttcttgctggaataattagacttgttggcctatcaacaatgtcagttgatgggttcgattccttaaagctaacagtagtggtcactagcccttga

SEQ ID NO: 33281 - DNA, 261 bp, Zea mays
  Peptide Sequence Number=SeqID_75060
atgacgagttttcagttagagtttttttctaggaaattagattttgcaccaaatccaatgcaaatgatatttcactatttcttcctgcaagaattcaagttgatcgaaagcgtagagctggctcctctcagggagctgatcgatccccggacaggtgggtttggccccgtttataaggaccagtttcctgaggcagctgggataggagttaaaagacttgcttcacattcaggacaaggttttgtggagttcaaaattgag

SEQ ID NO: 33282 - DNA, 351 bp, Zea mays
  Peptide Sequence Number=SeqID_75061
atgtccggtgcgccagccgcgtcaccaggccgttgggattcgaccattggagcttctatcttctgggcccgcctggctgtccggtgcacaccggacagacagcttcaattacgtgtagctgacacattgttcaatagctcgaacacaagaagtgcatttacaattgggaagctggccaatttgatcttgttagtcatttatactgcggtttttgtggcgtttggtttctacggtttctgggaaattagattttgcaccaaatccaatgcaaatgatatttcactatttcttcctgtaagagttcaagttgaacgaaagcgcagagttggctcctctcagggagctgattga

SEQ ID NO: 33283 - DNA, 252 bp, Zea mays
  Peptide Sequence Number=SeqID_75062
atgccttctgggtccgacggcgttgtctccgagaacgccaccttaactgcttacgagatactcctagggctgttctccgcgcgactaagggtagccgcacaggcatcgtgccttcataccgtagcaaggggtacccctaatccagggtaccgacagtggcccccgggcccgcttcaggggaggatgcgagcctacagttactaccagcccgcctatggtcacgccgactgccacgcctgccgctgcagctga

SEQ ID NO: 33284 - DNA, 515 bp, Zea mays
  Peptide Sequence Number=SeqID_75063
gtggcgtggtcgtccaccgaattgcattggtgcctacgcgaggaagggacatcaccactggatatcgtcaagacagtacctcatccatcaagcggggtcacattgctaatctaaaggcaagacctgcgtcgattcataacctctataatagcggatgtcgctacgcccagagtctgtacgtcatgctctgcccgcaggcgtacatcatggacaataactcatgtggcagtactagaccctcgaccaagtggggagcggaggcgctccagatagagcctagacacgcgtcaataccggacccatgcgtaggtcacgacacttcctctcccaggaccttgttatgggtggttcggagctcacttggtggggtccgaaccctatccaatggctccgggctgctttacttcgagggtccgggttgtgcgtacaggggtcccatgccttctaggtccgacgacgttgtctccgagaacgccaccttaacttctcacgagatactcctggggctgtcctaa

SEQ ID NO: 33285 - DNA, 268 bp, Zea mays
  Peptide Sequence Number=SeqID_75064
atgaatgcgaaggcgcgcgtagcccagaagcgtcatgtcaggttccgcccgttggcttataccgcgcgcagggtccgacactctcctatggggtccagactcactgttgatgccttggagtatatcactttctctggacacgtggcggccccggacccgcccatgtggtgggagacaactgatcaagccaaggatggaggcaagaagagcttcgatgtaccgagtgcacgggagaaggtcaaggagaccaaggaacccaaagccaggg

SEQ ID NO: 33286 - DNA, 917 bp, Zea mays
  Peptide Sequence Number=SeqID_75065
gccatgactcgccccagcatctggcaactactctaggccagcaacagcgcctgaccccaccacataggcgggtctggggccgccacgtgtccagagaaagtgatatactccaaggcatcaacagtgagtccggaccccatgggagagtgccggatccctgtatatacggtccaggcctccaaatttggcccaggacctccacgtgtgcaaactggacccctagaatgggatctggaccccccctgtatggggtccgggccgcccacagtggggtcccagggttccaggacagaacatacccgggccttaatcaggacccaggcggggatccagggccaacacgtgtccagacctggtctggtgggatccagacctatccgcatacactcctgctccccgctcaggcggagaccctatggtgccacgtggcatactgcacgcggcataagccaacgggcggaacctggcatgatgcctctggactacacgcgccttcgcattcattacggataagatgttttccgcatgttctcttgctcgttacgatggttcagatcatcgagcaccgcgacttgtctcccgaggacttcctgatggaggaaggggcagcatcttccatgccacgaggctccaaccgccctgcgcctggtgctgctgctatgcacgctgcgcggcagcacacgcccgtgcagacatccaggactccttcaagggctgctcctggtggggcgttgtctgcggccagagagttgctgcgtaaccctccgaattccacggcctcgctgggggccatgaggcaatggcgcgaagatgtcgaccgactcctcgcatggcccatcctagctcggccaggtccaggcctcggtcattccggcgtcaacgcgatgcgtcagcatctgtgcgctcaccctcagtga

SEQ ID NO: 33287 - DNA, 1608 bp, Zea mays
  Peptide Sequence Number=SeqID_75066
atggaggttcgctgccaaaccagtttttgccagaatgaagatggtttccccaagttgctgagagcatacacagttcgcctcggaatcaggagccaaccagagtatgatggtcgtgaattcgtcgagcatggcacagagaaatgtgtcatgactgtatacattggatccagtctgcaccatgtggaatggagtgtcactgctgctgggcacatatttagacacacctgccaagtcgtcgctcgcaaggcattgagggccctatgtcagatctatgaagaagaagtgactgacaccccgctcagattctttccgccctttcaaagagaccgtgccgcttggatggccaggatgcgtgcattggaagagcaacagctgcttgaggacgaccccacagtcgtgtacctcactgcatacctgctcacccttgatacacagtatgatttcttggctcggcaccaccctcaagcccgtgtagctgccttggaaagtcgtgaagccattgctgttgaagccctgaagcaagccaaggatgagcacgtccagaagttgatggaggcctacttggtaacccataaccaacgtagagccgtgcggatccaagagcccgctccatccaacccagttcaacccatgagagttgaagatccccagattcttgaaggtcacccggtctctgtcagaggagagaagaaggcttgggaactcccggaaggagccatagtcttggaaggaattccagtctcccctaaggctatggataagcaagagcaccctgaatcctcccaagatcccccgccggagttgtttgagcccctcaccatgaagaagattccagcaccgtcccttgaggtcaaggaagaagctgcaagcaccccgcaagcaccgccgccctcagaggatctacaagagccagtcccgcttgaagaagagttcgaccctgtcctgccatctcaaatcactgccagaagaagtcatcaacatcagctccctattgacccatccaggagatgtctcagatggaagttgtgtgcaagccttgccagaagagaagctgccagatctgagttagttatacccagtcctctgcgtgcattgggtagtgaagtttttcttcactttggccagagccctgcatgtatgagagatcacaaattagatctaatcctcaccttatgcttccattctcatcttaacccatctcaagagaaaagtgctttacccaagaagataccgagaagcttacccttgaagcctggaacaagctacagaagaaaccagtccagccgctcagtcaaaaggaccgaccgtgagaatcaaagcactgcccctgagtcaaagcaaacaggaaaagaggacagaaggagttattaccatacagagaggcaaagattcttagaaccagagaccacaaacatcagggtcatcgaccccaccactcacccgtgcccctcgcacgcgtgcccgcctccatgcgcactaccaccgccccacgcccccccttttgcagcgcactaccgccgcccacgccacctttgcagcgcacccaccgccaccatcatcgccggcaacaccaggccccctccccttatcgcacccgctgccgcgtag

SEQ ID NO: 33288 - DNA, 210 bp, Zea mays
  Peptide Sequence Number=SeqID_75067
atggcggtgggtgcgctgcaaaagggggtgtgggtggcggtgggggtgcacatggaggcgggcacacgtgcgggggcacgggtgagtggtggggtcaatgaccctgatgtttgtggtctctggttccaagaatctttgcctctctgtatgggctctggccaaagtgaagaaaaacttcactacccaatgcacgcagaggactgggtataa

SEQ ID NO: 33289 - DNA, 783 bp, Zea mays
  Peptide Sequence Number=SeqID_75068
atggcacaggcgagcgcgaagcgtgccgcccccggtgccagcatgcctccgcctggcgcgcccggcgccatcatgccgctgcttgccgcgcccacacatgagcgaaggcctcccttgccatcgcgcgctgctgaggcggcggtgggtggcgccgcagtctccatggatattttcgtgcacgactaccttgtgggcggggtcacgatgttcgacgcccacacagggcgaggtcctgctggtgagtttttttgtgcgaagagcgtagtccgaccaactgactgttgtcccgacgccggtggcagttggtccggcgactgtggcaactatggcgaagggttcttcacaggacccatggctcagccaccatggctcctgctggggaggattgagcgcctccgaacgcagcatacagaggctgtgcgagacaagtcggcatcggaaaacaagagccacaaattgctggaaaagctgtcggcggcggaggctaagaaagaggaccttggctgttggcttgcggcgaaaaaggaagacgcgaaaaaagcccgcacagcgatccaagctgcccgtgctgaggccagcctcgccctcaagcccgccaccgacgcggagtcagggcagaggagtctgcgcggctatgtggacaaagcggaggtctccacccgcactggggtcgaccgagcacacgtgttgctcatggacgcgtaccgtcagcttggtgcgcgtaccgcccccttcgacacattcagcgaagaggtgggcctttgcttccttgggtggctatag

SEQ ID NO: 33290 - DNA, 1383 bp, Zea mays
  Peptide Sequence Number=SeqID_75069
atggcacaggcgagcgcgaagcgtgccgcccccggtgccagcatgcctccgcctggcgcgcccggcgccatcatgccgctgcttgccgcgcccacacatgagcgaaggcctcccttgccatcgcgcgctgctgaggcggcggtgggtggcgccgcagtctccatggatattttcgtgcacgactaccttgtgggcggggtcacgatgttcgacgcccacacagggcgaggtcctgctggtgagtttttttgtgcgaagagcgtagtccgaccaactgactgttgtcccgacgccggtggcagttggtccggcgactgtggcaactatggcgaagggttcttcacaggacccatggctcagccaccatggctcctgctggggaggattgagcgcctccgaacgcagcatacagaggctgtgcgagacaagtcggcatcggaaaacaagagccacaaattgctggaaaagctgtcggcggcggaggctaagaaagaggaccttggctgttggcttgcggcgaaaaaggaagacgcgaaaaaagcccgcacagcgatccaagctgcccgtgctgaggccagcctcgccctcaagcccgccaccgacgcggagtcagggcagaggagtctgcgcggctatgtggacaaagcggaggtctccacccgcactggggtcgaccgagcacacgtgttgctcatggacgcgtaccgtcagcttggtgcgcgtaccgcccccttcgacacattcagcgaagagggggagctggagctgctcccgtccatcgtgatgggtctcatgtcctttgcctcgctcattacctgcgagggggctgcgaatgctttgtccagtgagggatgcaggcatttcgaagtctttgaccgggcaaacgaggacttcgaccgtggaatcttccaggttgaagatgaggtgttaaagcggtctgctggggcactttatgacaggatgtggggccctcacgactgcaatactgtccaggagaggtccaaccgggccctggagcagatgatgaatgatgaagaagtagacgacttcggtggcctggaaagctcggtgacccgggtagaagatgcgaggacgggggttgaagagcaaccagcaccagaagctgaccctggcggagacattgcagcaacagctgcgccggctagtgaagaccgtccagcgtcggccgctccttcgcagtcttggtcatcagacggggttgagtttgggagcctgttttcatggactgaggagtcttcagatgaggatttagattattttgcttcgttggatgtggctgcggcggagtccttgctgcagcctaaagtgcgcgaagtgtccgctcccccggctggggcgatgaccgaagagtgccaccggtga

SEQ ID NO: 33291 - DNA, 390 bp, Zea mays
  Peptide Sequence Number=SeqID_75070
atggagtccgcggaatcggtagaaaatcgagcagaacccggaaatgacctaggggaaatcggctggggattagggctattttcgcggggctgttgggatttgaccccctggtggctatatagcctgggcctctccccgttgagcaaccagaagaacacttgcgccgggatccatggcggcaaacagagaaaagagacagagagagttggcgtcgtgcgtcttcaagcgatccagcgcgctccgtgtctgctctcgctctttggtgcgcgcttggtggtctcatccgtgcccaattgctcgctggtgggctacgggcgtccccaatcgcgtggcgtcggggagtcccttcgcgagctccggatccaggtatggcctataccctatgcttga

SEQ ID NO: 33292 - DNA, 828 bp, Zea mays
  Peptide Sequence Number=SeqID_75071
atgacgatggtggctctcagcccccttacggaagcaagaggacgtcagcaaggactcgacagccccgacagctgtccttccgccaggctccagcgctcctccgacggccacgacaccacacgaaccgggtgccaaaacctctccggctgccacgacggcatggttgatgggattcggcttcgcgtgtggctatatgacccgggcctctccccgttgagcaaccagaagaacacttgcgccgggatccatggcggcaaacagagaaaagagacagagagagttggcgtcgtgcgtcttcaagcgatccagcgcgctccggttcgccaaccccgccagcccgagcgccgcaacctcctcgtcctccgaacccatggtgtcatgcccaacccggatcccgccgcgggcgaagttgggataaacaccaccgcccaggaaactcacttgcgctgctgttcagtgcgcctaatcgggccgtggtgcgtcgcgggtgaatggtggagttgttcctgggctcggcgatcaccattgaccaccggggttgtggctaattgctcatctaaacaaagggtcctcggcggtgtcgccatgcgtcgtggccgaagctgtgggcgttgcgattcacggtatgtcgtccaccctcttgttcgcacggttacccgcttcgttttgcgcattcctatgctcgtgtttaccaccggaatccggcttgagggtgctcatcggtggtccaccgttgctcggaggccgccgcggatgcgtgtgcgccaccgtcctggccaccgtgaggaagaagctgggctagccgtcggatctgtgatggtcggctga

SEQ ID NO: 33293 - DNA, 354 bp, Zea mays
  Peptide Sequence Number=SeqID_75072
atggggatggagtggaagcagaaggtgagcctcttcgacttggtcaacgagacctctgtctccaccaagcttggtcatgccacctccaacggcgtccccgccactgcgactaggggcaattcccaagggctaggagatagtgttataatcctttgcatagttaggagcaagcagggagtaaaatcgtcatgtcaaagggtcaatataactagacgcagtactaattccaagagccagggtcctagcagtaatcacacatactacttaaatgttcataacatggacaccggggatcatgtggctgtcaaggtcctcgacaaggcaaaggttcacaagaaaaaactagctggtaag

SEQ ID NO: 33294 - DNA, 165 bp, Zea mays
  Peptide Sequence Number=SeqID_75073
atggacaacgggggtcatgtggctgtcaagatcctcgacaaggcaaaggttcacaagaacaaactagctgagcagaattccgtttgctgtatcggaatgcatgtcctacaggtcaaccattttatttggattgttttcccccttataactggtgatgggaagtaa

SEQ ID NO: 33295 - DNA, 513 bp, Zea mays
  Peptide Sequence Number=SeqID_75074
atggggatggagtggaagcagaaggtgagcctcttcgacttggtcaacgagacctctgtctccaccaagcttggtcatgccacctccaacggcgtccccgccactgcgactaggggcaattcccaagggctaggagatagtgttataatcctttgcatagttaggagcaagcagggagtaaaatcgtcatgtcaaagggtcaatataactagacgcagtactaattccaagagccagggtcctagcagtaatcacacatactacttaaatgttcataacatggacaccggggatcatgtggctgtcaaggtcctcgacaaggcaaaggttcacaagaaaaaactagctggtaaggtgatgggaagtaaaacaaggatttacatggtgctcgattttgtgatgggtggagagctccatgatatcattgtagttctgaacctggaacactatgaagatgcaagggcttgctgcatatggatatttgttttgcttattggtttatttaggatctag

SEQ ID NO: 33296 - DNA, 276 bp, Zea mays
  Peptide Sequence Number=SeqID_75075
atggacaccagggatcatgtggctgtcaaggtcctcgacaaggcaaagattcacaagaacaaactagctgaaatatattggcaagggaaatctgtggttgagccatacgctgttgatctcaaagaaatctgctgtcaacaatatttaacagtggctagacagaaggaagctgtaaaattagcagctgaagcacgaaaaacagcatttgaggctgctaaaaaggacgcaacagaaaaggaagcagcaaaaaaggaggttgttcgttctgtgtactga

SEQ ID NO: 33297 - DNA, 765 bp, Zea mays
  Peptide Sequence Number=SeqID_75076
atgagcatgatacttagcttgtatctcgatgaagtggttaccgtacacgtctgtcattggcaatctgagtccagcgagctcgactcaagagtctccaacacgttagatagaccttacatcagctacgaagattatcggctctccgaccactgcatggttatgggagtatcatcccgtcggtcaccacatggaggatgcgatcatcatgctctcgaccatgaggattgggaaaaaagagcccttagcggtcgagataggtccctcggcgagccaagccccttcctagaggccgtaggcttcttcagtcacccatgcccatcctcttccgtggccgaggattcattcccccaaccaccaaaagtggccgttgggaggctgtctgttcgatggcgcaccggacagtccggtgcacaccggacagtccggtgcccccagccacgtcatcactgccgttggattctgaccgttggagcttctgacttgtgggcccgcctgggtgtccggtgcacaccggacaggtactgtttgctgtccggtgtgccagcatgggcgtttctgactcctgtgcgcgcagagcgcgcattaaatgcgcggcagagagccgttggcgcggagaagaccgttgctccggaggcgcaccggacagtccggtgcacaccggacagtccggtgaattttagcggactagccgttggcgtttcccgaagctggcgagttcctgaggccgacctcccttggcgcaccggacagtccggtgaattatag

SEQ ID NO: 33298 - DNA, 351 bp, Zea mays
  Peptide Sequence Number=SeqID_75077
atgccgcactcccccctcgctgatcccctcatacatgctcctctaagggttctccttgtggggacaaaaattggaaagccccaaccaccaaatgtggccgttgggaggctgtctgttcgatgccgcaccagacagtccggtgcacaccggacagtccggtgccccctgccacgtcatcactgccgttggattctgaccgttggagctcctgacttgtgggcccgcctgggtgtccggtgcacaccggacaggtactgtttgctgtccggtgtgccagtatgggcgcgcctgacttctgcgcactctgcgcgcgcaattaatgcgccgcaggtagccgttggcgccgactag

SEQ ID NO: 33299 - DNA, 582 bp, Zea mays
  Peptide Sequence Number=SeqID_75078
atggagaagctgcatcaggaactcatcgacaaggccagtgatattgctcgcgttgagggaaacctcaaggcgagggaagcttccttagtgaaacgaacaactgacctcacctggcaggaggaggacctcgccttcagggaggagatgtgggcaaggcggaacaagctgttggatgagcttgagcttgaggcagaggagaaagtgaagcgtctggaagggaaagtgcggacgctggaggagcaggtccgccagttccaggcggcgcaagcgacacagcgggccctgggctcccaggcagcggaggttcttggcgcccacttggaggccaagggcggtagactctgccgatcggccatcgagtatgtcttgacgtgcttccggagccacgacccgactgtctccttggggccggttattgtgggtccagtggccgacactgaagatgctgccgggagggcgttcgggatgctgtggacgcggtggtcgggcgcttccaacgggatcctattgacgatgagtagccagatcggcatggagaaaaacgagggttccgctggggagcgggttgcaatatgtctttga

SEQ ID NO: 33300 - DNA, 783 bp, Zea mays
  Peptide Sequence Number=SeqID_75079
atgggcggcagcagcagcagcaacagcaacgtgtgccccgctttcaaggccactggaaggttcacggtcccaagatccgcctgtcaccgtcgaggcaacacctttgggttcccaagttccatctgggggtccagaagtggtggcgtcgccaacagctattgtagacccaacagcggcgataccgtcagatgcatcgctggtggtaggcgtgggggcgcgtccggctctgtccctctgccaactctggagggtccgaaggttattcttgggcgtccactccggtctggtgtcgagcctggagcgacgttgactcctcttcctcaggtgctgactcgcgctcaccaggccctccaggaaaccgaggtggctatccggcgagagtggaaggcgcttgagaccgagcaccagcgccttggcgactggtgctcccaactagagaggcgcactaaggcggcattctgccaattcgccttagagcgggccgagcttgagcaggagcgtgaggacttcaaggaggacatccggaaggtgtctgaccgagaggaggaggtgacccggaaggagagaagcttggacaagaagaaaaaacacctagaccaaaaggaggaggtcgtcacagcactccatgataagctgaaagcttataatgcagtgctggagaaacagcgggacaagcaagctgcggctgaggcgaagctgcagcaggaactcaccgacaaggccagtgatattgctcgcattgagggaaacctcaaggcgagggaagcttccctggcgaaatga

SEQ ID NO: 33301 - DNA, 150 bp, Zea mays
  Peptide Sequence Number=SeqID_75080
atgggagaccacatctcaggtcgcgtgaggggtaaagtccactgccaggttcaatcaggtatccgcacgttaatccttattccaatttcatctcgtagactacgcatccccatggatccgtgtccacagaccaacatcggtatgatatga

SEQ ID NO: 33302 - DNA, 225 bp, Zea mays
  Peptide Sequence Number=SeqID_75081
atggagaagcctatcccatcactcctcatgctcctcctcagccgagtgaccgcacttgtacccaccataaccagaatgggagaccacgtctcaggtcgcgtgaggggtaaagtctactgccaggttcaatcaggtatccgcacgttaatccttattccaattccatctcgtagcccacgcatccccatggatccgtgtccacagaccaacatcaatatgatgtga

SEQ ID NO: 33303 - DNA, 840 bp, Zea mays
  Peptide Sequence Number=SeqID_75082
atgaatctcgcctggcgggagaaggacctcgccttcagggaggaaatgtttgaaaggcgggagaagctgctggccgatcatgagctcgaggcggaggagaaggagcgggcgttggaggagcgggtccgccagttccaggcggcgcaggcggaacaggcagcaccaggcccccaagcggtggaggcgatgaagaagacacttgaagatctccaggccgagcagcgcgccggggtccagcgcatcgccacatgggccggtgaggcaagcacgacattggtgccactaggggtgagtcccatcccggtgtcggagctacctacgtccatctctgatgcactcccgatgctggactccgccgccgacagcctccgatgcctggaccagatccttggtgcccgcttggaggccgagggcggcaggctctgccgggcggtgatcgagtacatcctgacgtgcttccggagccacgacccggccatctccttagagccggtgatcgctggtccggtggccgacactgaagacgccgcccgggagggtgtacaaggtgccgtagacctggtggtcgaacgcttccagcgggatcctgctgatgatgagtacatacctaagaaagagttggtgacccagcccccaggaggtagtctcgactgggacctggacctgacctgcaggattgagtctgggaagccaggcctcatgtccagacctacaagattacagctccaaatactagggcacccgttgcagagtggtggaggtgcaggcttagggtacgggaccaagctaagcggctacacagctctggaccaccctaggaaacaagcgcccattctctag

SEQ ID NO: 33304 - DNA, 1710 bp, Zea mays
  Peptide Sequence Number=SeqID_75083
atggctaaaggagcagacgttgagatgcaacaccagacaacccagaatgtcaccactaatgaggatgacgatgaggctgtttttgacgatgatgatgaagaagaaggatacttattctctaggccagccccattagaggcaccatcccagcttaggaggctgtgggagtgtgcagatgttgatgcaaggcactttcgtgataacattcgctttttcaacggccatttctcgttcacttctatgggaaacccatattctaagcaccttaggagtatggggcacattgataacgttgaagactaccatatcacattgaaccttgaccaaatgctagaccagaagttatataatgcacccatcactttggaggtcgctgcagtttggattgaggggagtgaacgtcgaggtgaacatggatggcatgcgaatattcctaagtccaatgtttccatggacgaagtagacacgtaccatgagcaacataggacaagggatgcatatgatgatgaaacaggtatattcaatccaatacttcatgggaaacgacttttccagcagttcgcggtcgacacctacatcaagattgagagctctcgcttggatttcatatgtgagaacagagtagacgaaattggaaagcgaactgtgctacctacatcatttatcggtggtcctcgtgacatgagacgtcggtatatggatgctatggcccttgtgcaaaagtttgggaaaccagacatattcctcactatgacgtgcaaccccacttgggatgaaataacaagggagcttctccctatgcagtcaccccaagatcgtccagaccttgttgttcgcatattccgtgcgaaactagaggaactgaagaagagattgactaagcaacatattcttggaaagatatgggcttacgtctatgtcgtggagtttcagaagcgaggtttgcctcatgcccattttgtactcatcatgcaaagaaagtacaagctaacctgccctgagcagtatgatctcctaatctctgctgagatccctgacaagaaaaagtacccacaactgtacaagatggttataaagcatatgatgaatggaccgtgtgggttgctaaatcctaaatgcccatgcactaaggttcgtgcttcatgcaaaaaccattatcctagagcttttagcaatgcaacgttgcaaggaaaggattcataccctatttataggcgtcgtgacgatggctgtaaggaaaaggtccgagggtgcgagttggacaatagatgggttgtcccttataatcctcacctccttcgtctcttcaactgtgacatcaatgttgaggcatgcggtagcatcaaggatgtcaaatacctattcaaatacatatacagaggccatgatcgtgcgtctgtggctgtccgagaagcaaacaaggatgatggtgatgttgatgagatcaaacagtatagagatgctaggtgggtgacccctccagaagccctaagtcaaatctctccactagtgatgcaactggaactccatcttaaaaacatgcacatggtgtcatttcatgagcgtgctaaagtaaatcatgttgtccagcgtccaggtgctgataggtcaatgcttacggcgtattttgaggcaaatagacaacacgaggaggctcggggtatcgtttatcgtgacttcccagagtggtacactttgcagcagggcaag

SEQ ID NO: 33305 - DNA, 810 bp, Zea mays
  Peptide Sequence Number=SeqID_75084
atggctgaaggagcagacgttgagatgcaataccagacaacccagaatgtaaccactaatgaagatgatggaggtgtgctctttgcagaggatgacgatgaggctgtttttgacaatgatgacgaagaaggatacctattcgctgggcaagatggtgaatctggagaggatatcgagattgttgaaacccaagatgcctttactgttactcctgacataccggacccttacgacaaggtgtacaataacatgcctgaagaaacacatttgttgaacacagttgccgactgcaactactgtaaagcgaagaagtttcagtatgaacctcctgggttgtgttgtcttagtgggcaggttgatctagccccattagagacaccatcccagcttcagaggctgtgggagtgtgcagatgttgatgcgaggcactttcgtgataacattcactttttcaacgaccatttctcattcacttctctgtattgttgccttgacagtacgactacaaacatggattgtggtgtctacacatttcgtgcacatggcactatgtaccacaacataaggtcattcggtaggcaagctaggtcagaacataaacactttgaactttacttctatgatgatgatcctagcctcgagcatagatatcgtaaatatcgtcaagatcaacttgagaaagacaagtcagttattaaacagttggttgacatacttaggggaaacccatattctgagcaccttaggagtatggggcacattgataacgttgaagactacctgttggggacttgttctcaaatgctatga

SEQ ID NO: 33306 - DNA, 288 bp, Zea mays
  Peptide Sequence Number=SeqID_75085
atggccgaagctctggcggcaatggcgggcggaattgagctcgccggagctaagggaaagtggctggcaggtgaggggacagggagttgtagcgtcaccaaggtgccagtgtcagaacgtctggtcccgaggtcaaactgcgccaaaaccatgtcaaatgaatttggtttgagttcaaacttttccaggatgtgttcaagggaatttggcacaactttgatatttggatctcctggctttgagtctcgaaaaatagagaacgcagatgatctttgggaagaggtctga

SEQ ID NO: 33307 - DNA, 546 bp, Zea mays
  Peptide Sequence Number=SeqID_75086
atggccggagtcggtcggtccacgcgcgcaggcggggatgctcgtcggcggcgaggagtccggcctggtcacggcgaggtagaccaattggatgggtcagagaggttcacgggatgccagagaagatatgggtgcaaggaactggtcggagactcactggatagctcggtccacgcgcggcggcggaagaccgaagtccggctagggacagggagttgtagcgtcaccaaggtgccagtgttagaacgtctggtcccgaggtcaaactacgccaaaaccgtgtcaaatgaatttggtttgagttcaaacttttccaggatgtgttcaagggaatttggcacaactttgatatttggatctcctggctttgagtctcgaaaaacagagaacgcagatgatctttgggaagaggtttggcatttgagagaaaccctaggtgacactggggtgtcacagccttccccccttaaaggaatctcgtcccgagattcaggccagagtcctcccagggtgaagcgaagggtgagacttatgggaaatgggtga

SEQ ID NO: 33308 - DNA, 279 bp, Zea mays
  Peptide Sequence Number=SeqID_75087
atggcgagaagttccgaggcgccgaagctctacggcaacacttccgccagcattggacccccccgcgcgagcagtcatcatgggacgctccaccgcgccccgcgatatttcctggtttcgcccgatgccttgaccatggaggatcgacggcgcggagcggctccgcgcgctgggaaggcggcggcagatgcaattgtggacattactccacaacccatcacactcaatcaaagattcaaatcagacaggtatcataagaacaaacattcaaatatataa

SEQ ID NO: 33309 - DNA, 180 bp, Zea mays
  Peptide Sequence Number=SeqID_75088
atgggccagaatgggtacagtcggcccaggttagtgtatatcatcgggtcagggagtatggttaagatagatgtgggtgtagatgtagatgcaattgtggacattactccacaacccatcacactcaatcaaagatccaaatcagacatgtatcacaagaacaaacattcaagcacatag

SEQ ID NO: 33310 - DNA, 579 bp, Zea mays
  Peptide Sequence Number=SeqID_75089
atggcccgccatcctcccgttgcccagagcaatggcgcccgagcaaacgcggcggaagtacgacggcttgcccgaatccccagccctgaagctcgaatcccacattcgctaggaaatatacaaggtaggtaccatgggcaaaccgagaggcacacaattacgacggattacgacgtcaagagccctacccatgtagagcagcggctcgacagcgtgctatggccggagtccaatcggtggtgcccggccgatgtaattgtggacattactccacaacccatcacactcaatcaaagatctaaatcagacatgtatcacaagaacatacattcaagcatacaaatatttacaaaaatagttttgattttgttcctaagagtaggtctcctattcctaaaggtcactacaggatttcaaagtgtgaaatccacttttgtcttagaagtgaaaaggtttcgttctatagtcaacattcctctgataccacttctgtcacactcgagtttcagggcaccaagacccgggcgcgaaataatcaccaggtgtgctgggaccaagtctcacacatatgatgaatag

SEQ ID NO: 33311 - DNA, 186 bp, Zea mays
  Peptide Sequence Number=SeqID_75090
atggagaaccacccaggaaaacagtgctaccacgagggtgaacttctattatatagtaaagatgtgacattcgtttatgtaccactattcatcatatgtgtgagacttggtcccagcacacctggtgattatttcgcgcccaggattatagaatctaatattagtgatactggtagaagagattag

SEQ ID NO: 33312 - DNA, 288 bp, Zea mays
  Peptide Sequence Number=SeqID_75091
atggccgaagctctggcggcaatggcgggcggaaataagctcgccggagctaagggaaaggggctggccggtgaggggacagggagttgtagcgtcaccaaggtgccagtgtcagaatgcctggtcccgaggttaagctgcgccaaaaccgtgtcaaatgaatttgggtttgagttcaaactttcccagaatgtgttcaagagaacacagatgatctttgagaagaggtctgaaattcagaaattcagaaatctgaatttctctaagggttcattgatcaagggctga

SEQ ID NO: 33313 - DNA, 649 bp, Zea mays
  Peptide Sequence Number=SeqID_75092
taaccgcggtggaagaaagggcggaggggcttaccggcggcgagatggctccggtgaagtggtcgaggacgtaggggaggtctcggggatcacaacggtgtgcgggtcgccgtcggagatggccggagtcggccggtccacgcgcgcaggcggggatgctcgtcggcggcgaggagtccggcctggtcacggcgagatagagcaattggatgggtcagagaggttcacggggtgccagagaagacatgagcgcaaggaattgggcggagactcactggatagctcggtccacgcgcggcggcggaagaccgaagtccgtgggttggccacggtggccgaagctctagcggcaatggcgggcggaaatgagctcgccggagctaagggaaagtggctcgccggtgaggggagttgtagcgtcaccaaggtgccagtgtcagaatgcctggtcccgaggtcaaactacgccaaaaccatgtcaaatgaatttggtttgagttcaaacttttccaggatgtgttcaagtgaatttggcacaactttgatatttggatctcctggctttgagtttcgaagaacacagatgatctttgggaagaggtctgaaattcagaaattcagaaatctgaatttctctaagggttcatag

SEQ ID NO: 33314 - DNA, 792 bp, Zea mays
  Peptide Sequence Number=SeqID_75093
atgggcccgggcccccgtgtcagagactgggtcaccttgacgcgcgtcgggcgaggtcttctgcggcgcttcggggcgtccgtgggggaatccttctttaaaaaggggattcccccgagcgtggtagccatcttcatcactcgcagcaccctttcgctcttgagttctctgcgctcttctaccgccatggccttgctagaccctcccgagcgtctccagcttgaggtggtactcaacttggtgtgcaacctgctcggatggggtgcgccggcgttcgtcgaaaggatctgtgtgagcgcctctactcacggcgacctcaccgccggagagttcatgctctttgtctccaacctccccagcggcggccatcgtcgcccacctcggcaggatgtccgtgggggcgacactccttcccgcttcttcctccagcattcggggggaaggatgttcaccagcctcgtgaaggtggatagcgggctgagcagcggctccatccctcgcgccccaactctttggggtgggaagcgagtcgtgctacggctccatctctttggctttgatggcttcggtgccgcctccaacgggggtcgtacaagacgtcgccaacaggccgggtttatgagggcggacctcaccgggctggcgcatacagatgctccaggggttaggaagaggcactccagctgtagcaaggtggttacccccgggtcggcacatttccatcaccttgaagggtccttcccagctgggggagagtttatgggacccttcttggttcagtactctccatag

SEQ ID NO: 33315 - DNA, 369 bp, Zea mays
  Peptide Sequence Number=SeqID_75094
atggcgttgctagatcctcccgaacgtctccagcccgaggtggcactcaacttggtgcgcaacctgctcggatggggtgcgccggcgttcgtcagaaggatatgtgtcggcgcctctgctcacggtgacctcaccgccagggagttcatgctctttgtctccgacctccccagcgatctggcgctgccgattttgcctttcttcgtgctgctgctggaggagcttggcctccaacctcaacacattacgccctgcttcatccttcaggtggccatcatcgcctacctctgcaggatgtccgtgggggcgacactccttcctgcttcttcctccagcattcggggggaaggatgttcaccagcctcgtga

SEQ ID NO: 33316 - DNA, 432 bp, Zea mays
  Peptide Sequence Number=SeqID_75095
atggcgccttcacacggaggccggtgccccactcgtccgggaggatttgagtggggatctgccggagggctgatggcccctgccgtcggtgccgaggcggaggcggctcgagaagtccccgttgccgacgggatcaccgccaccatccgcgcttcgggcctccgagcgggcggcggcgagccgctcgtcagtcttctgttgctccgcaggcccacccctatcgagtggggttactcgcatgttgattatctgaaccgcttcaccaagcatgagtcgccccgtgtcaaggtgacgagtgagagtggggatccctggaccgcgtcgccgttcgaggctaggtcggacctcgctgaaggtgtcgtcgatgccgagggtgctactgcccccttccagcgtcaagacccgagcctgcaggatcagagtgtcttgtag

SEQ ID NO: 33317 - DNA, 1050 bp, Zea mays
  Peptide Sequence Number=SeqID_75096
atgtcttctcgctcccttatgcatcacgtctttccaccttccaagcccccggatgggggatacccgccgtcttctcgcctcatcgttggaggaacgcaactccgtgggagttggtacctttcagccatcgttcggcttcaaggattttcatcagccagcccggctgtacccccccccccccgccggcggtcacccaagatggtgaccacaagttcctgggtggggagaagcaagacgggctgcgatcttggtcccacccttagcttcaaggatgttcatcatcctcgctggggtgggggccaggctgagccggcgctctacctcccgcgcgggttcgtgggtcaccctctcccgcggcgttcgagggagagggcgctcactggccctgcggacggcccggacttcgacaacgtggggctggtcgacggcaggcgtcgtcacctccagcgtgtcggagtcgtcggcttggctcccggcggcccctcctgccggagggcggctgccgcgccaggccggtgccccactcgtccgggaggatttgagtggggatctaccggggggctgatggcccctgccatcagtgccgaggcgaaggcggctcgagaagtccccgtcaccgacgggatcaccgccaccatccgcgcttcgggcctccggttcttcgtacttgtcctcgcccctcgagcagcgggcggcggcgagccgctcgtcagtcttctgttgctccgcaggcccacccctatcgagtggggttgttcgtacctgcggagcatgaacagaggcggagttggctcgaaaatgaaacctggttggccggagcctagccgggttgtccgtcagcgggaccgacgccggagtttatcagccgaggcctcgggtcgggctggcgcccttggaagatggttggccgaggccccagagagaagtccctggaccgcgtcgccgtccgaggctgggtcggaccttgctgaagatgtcgtcgatgccgagggtgctatagccccctttcagcgtgaagacccgagcctgcaggatcagagtgtcttgtag

SEQ ID NO: 33318 - DNA, 516 bp, Zea mays
  Peptide Sequence Number=SeqID_75097
atgcccccgcctcggctaaccctacgcgcagatccgcagccgcctgacccgccaggaccccgcctctccttccccttcgcgctcaaacaaccaagccgagctgacttaggaacgaccaagcaggagcctactcctcatttgcccctgttcagagatggcgacaacaaagtaaatgtggatctagatgatgatagcgactggctgcatcggaacgagacattccagacaaacgactatgtcgcaacgacagaccttctgtcaccaggcagtgtgcatgaatctgttggtgtcattggggaaccgagtatcggcgttagggagtataggcttgaacgccttaggttgtataatcagacaccaaagcgaaaagaggcaaagatagagtacatgagaaaacgtagagtgctacaggctgacactctgaatgttgcgtccatcgccatggaggacccaacatatacccctgaggttgtgcaccctgcaacggaaccttcaacagttaccacctgcgactag

SEQ ID NO: 33319 - DNA, 4920 bp, Zea mays
  Peptide Sequence Number=SeqID_75098
atggaggacccaacatatacccctgaggttgtgcaccctgcaacggaaccttcaacagttaccacctgcgactgggttatccctgaattcattaggacacctttcctaccagctcaaacacagaccgaggatgtcggttcattcgatatgtctactgaagcaataagacataaacatcatgtgccgcgtggggaaagacaagctatcttagcccgtcgaaacaaacaatttcaagcatccattgcaaggaacgtgactactttgaatggggatactatcggtgacgccaacaacaatgatgatgatgatgatgatgaggctgtcatattcgaagaagatgatgacgacgacgagggatacatattcgctggccaatatgaggagactgacgaggacatcgaaatcgatggtactcaggatgaatctactggcactgatgtgcctgacccgtacgacaaggtatacagtaacctccctgaagaaacacatatgctgaagcctgttcctgactgcggttattgcactgcgaagaagtttgagtacgagccacctgggttttgctgtcgtggtgggaaggttgagctagcaccactcgatacccctccccagctcaggaggttgtgggatagtgcagactctgatgctaagcactttcgtgataacattaggttttttaatggcaatttctctttcacttccctatactgttgcctcgatagtatgacaactaatgtgcgagattctggtatatacacgttccgggcacaaggcatgatgtaccacaatatcaagtcattcggtaaggaaggtgggtcggagcataaacatctagagctttacttttacgatgatgatcccagtctcgagcatcggtaccgtaagtgtcgtgaagaacagcttcagaaagacaaagatgttattaaacagatagttggcatactccatggaaacccgtactccgagcaccttaggagcatgggccatgttgagaaccttgatgactatcatatcgcattgaaccttgaccagactttgaaccagaagacatataacacgcctctcacttcggaggtggccgctgtatggatcgaggggagcgaacggcgaggccagttcagcaagagtgttatgttacatgggaaggataggtcaagccacgacatccgctcataccatggatgctacgatgcactatcgtatccactgttcttccctaaaggtgaacttggatggcatgcaaatatcccaaaggttggtgtatccatggatgaagtggatgcataccgtgcgacacatagggcaaataattcaaacgatgaagatgcagaatctcctacccatttatgtgtgtccgtacgtgactactactgctacaaattccagattcgtcccggggtatttaatccaatacttcatggaaagcggcttttccagcagttcgctgtcgacacgtacatcaagattgagagctctcgtttagatttcatacgtaagaatcaggatcgtttaagggcagacctataccagggcttggtggatagcatgttagatggagatatcagagcagaaaaggttgggaagcgaactgtgctgtctacgtcatttattggtggtcctcgtgacatgaaacgtcggtatatggatgctatggctctggtgcggaagtttggtaaaccggacatctttcttaccatgacatgtaaccccaactgggatgagataaggagagagcttctccctgggcaaacaccacaagatcgtcccgatcttgtagtgcgtgtctttcatgcgaagctacaggagttaaagcataggctgactaaacaggatattctcggtaaggtccgggcctacgtctatgtcgtggagtttcaaaaacggggtttgccacatgcccattttatactcatcatgcagaggaagtacaagctaacgtgccctgagcagaatgaccttttgatctcagccgagatcccacacaacaagtaccctgaactacgaaagatggttatcaagcatatgatgcatggcccgtgtgggtcgttaaaccctaactgcccatgcactaagggccatgtatcgtgcaagaatcattacccccggcctttcagtgacacaaccttgcaagggaaggactcatacccgatttacagacgtcgtgatgatgggcgtaaggaaaaggttcgagggtgcgaattggacaatagatgggttgtcccttacaacccttacctccttcgtctcttcaactgccacatcaatgttgaggcgtgcgggagcatcaaggctgttaaataccttttcaagtacatatacaaaggccatgatcgtgcgtctgttgttatgagagatgcgagcaaggcagatgatgatgtagatgagatcaagcagtacagagatgcaaggtgggtgactcctccagaagcgttatggaggatatacggctttgagcttagtcagaactctccacctgtgatgcaattgcaactccatcttccaaacatgcacatggtggcgtttcacgaacgacaaatggtcgagcgagtcgtcaaccgtccaggtgcttataggtcaatgctcacggcatattttgaagcgaataggctacatgagggggctcgtggcatcctatatcgtgacttccctgagtggtacacttggcaaagtggtaagggcaaagtatggcaacggaggaagcgtgatacgggtggacaagtcggtagaatagtctctgctcatcccgctgagggggagcgctactatctccgtgttctcctaaaccatgtgacttgcgccacctcctatgtggatctaaggacagtagatggtgtcccgctaccaacttttcgtgaggcagcaaagagaaggggactgcttgagtcggacaacacactggatgactgtctcactgaacgtgctcttttccagatgccatcggcgctgcgacgactttttgccacaatactggtgtactgtgagccaagcgacgtggcggtactctggcagaatcacctagatgttatgtcagaggactatcaacacaggagtcagggtaaaactcatgttgagcagatggtattgattgacattaggaacatgctgcagtcaatgggaaaggacataaagacattccctcttcctcctatcctcgacgcatatgacgatgctattggtactgctagggaggtctacgaggaggaaagtatcgaaccagcagtgggagatgtggctctcaaagactctcttaacgaggaacagagggccgcctatgataagattctatctgtcgtggacactgatcagggcggattgttctttgtggatggacctggtggcaccgggaagacttatctatacagagtgctgctcgcgacgctacgcagccagggcaagattgcagtggcaacagctacatctggcgttgcggcttccataatgcctggaggaagaaccgcccattcacgcttcaaaatacccctcactattgacgatggcgctgtatgtagcttcacgaagcagagtggaaccgcagagttgctacggaaagcatctctcattatctgggacgaggcttctatgaccaagagacaagccgttgaggcactggacaatagcatgcgcgatataatgggtcggcccgaactaccattcggtggtaaaaccattgtcttcggtggggatttcagacaagtcttgcctgttgttcgtaaagggtcaagggctcaagtggttgcttcttcgctacggatgtcttacctatgggagtccatgtcccacttaaagcttgttagcaatatgagggcaaaaaacgacccttggtttgcggagtatttgctgcgcgtaggcggtggaaccgaggacacaaatagtgacaacgacatctgtcttcctgacgaggtatgtgtgccttatagtgggagtgacagcgatcttgacaagctaatagaattcgttttcccaaatctcaacgaaaatatgtctgattcgacctatatcacttcaagggcgatactgtcaacgcggaacgactgggtggatatgataaatgcaaagatgatcgatcgttttcaaggggagcatatggtgtaccatagtttcgatagcgccatggatgatccccataactactaccctccagagttcctaaacacactgatgcctaatgggctgccaccacatgttttgaagctcaggattggatgccccgttatattgcttcggaatatagaccatgcgaatggactttgcaatggcaccaggctggtcgttcgtggtttccaaagaaatagcattgacgcagaaattgtactgggtcagcacgctggaaaacggattttcctgccgcgtatacctctgtgtccctccgatgaagagatgttccctttccagttcaaaagaaagcagtttcctgtacggcttagctttgcaatgacggttaacaaagcacagggtcagactattcccaatgttggcgtgtacttgcccgaaccagtgttctctcatggccaactatatgttgctctatctagagcgacagcccgatcgaacataaagatccttgccatcccaaccttcaatgggaagaagaggtcgaggaagggtgtaagaaagaaccctacagtagattgtgggacatgcaccaagaacatcgtatacaaggaggttatgtgtttgtgctgggagataacagcaacaatatcttcaagtaccaataatctgaaaagatggttccctactggttctgcatataggaagtttttcatattgagctgcacaagtacagcacaagatatggccgcatatttacattacaaaggtgcaactttgctaacaataattggtgcctttcttgataagttgatatacaaccgtggatccttggacttcgatttagttagtgactccgtaggtatcagataa

SEQ ID NO: 33320 - DNA, 990 bp, Zea mays
  Peptide Sequence Number=SeqID_75099
atgggcccaccctctgatttcgatcctgctaaaactcatgatgttccagttagggttaagaattcatacaaccctaaagctccaggcacccttattaccagacaaagggacatggataaggttgtactaactagcatagtgctcaagtcaaatgtcactatgttggacattttgagcactcagatgcttggtcagtatggttttcctggcaagggactgatggaattcttggagcaaaggattttggatgagatgatggataatggttttccactcacaactgagccaaacatcttgaaagagatgatcaccccacctaatattgtgaacaaaatgttgaatgttgttactggcaagagttctacccttggcagcaaacttccaaatgcagctgcttcttttgtaccttggcgaagaacaacagtcaaggatgcaagcaatgaagtctatgttaacatagtcgaggaacttgatgcatgtgtgaacaggccttgggattcaaatcagatcctatcatttgttcctcccgacgggcagttcaagctcatgagttacagcacgctcacgtttgatcaaacgagcagggttcagaaactgaagaagacaccgatctatgtgaaaccacaattaacatcagattccgggaactgtcgcgttagtgtgatggtcgggattctcgaagctgagcactctacatgtaccttcaccttgctatgcttctctgacgctagccttcttatgcagacctgtttgtggacaattgggcagataccaaaagacaaagcaccggcactctctggaaatttacgactggaggaagggctcgcacaactgcatgcattgtcgacatttcaggtgagattcacgattatgggagttgccctatctggccttcaaatcgataagctggacgtgaagaacaccctgaacgctccgtacaaaagttttagagcccagactcaagctgggaagtatgaggtcagatcgtag

SEQ ID NO: 33321 - DNA, 294 bp, Zea mays
  Peptide Sequence Number=SeqID_75100
atgggcccaccctctgatttcgatcctgctaaaactcatgatgttccagttagggttaagaattcatacaaccctaaagctccaggcacccttattaccagacaaagggacatggataaggttgtactaactagcatagtgctcaagtcaaatgtcactatgttggacattttgagcactcagatgcttggtcagtatggttttcctggcaaggatctatgtatatctgtggattgtgttgctaccagtgaagttagtgtttctgtgtcacttgatccatttttgtatttatag

SEQ ID NO: 33322 - DNA, 3705 bp, Zea mays
  Peptide Sequence Number=SeqID_75101
atgattcgtcccggggtatttaatccaatacttcatggaaagcggcttttccagcagttcgctgtcgacacgtacatcaagattgagagctctcgtttagatttcatacgtaagaatcaggatcgtttaagggcagacctataccagggcttggtggatagcatgttagatggagatatcagagcagaaaaggttgggaagcgaactgtgctgtctacttcatttattggcggtcctcgtgacatgaaacgtcggtatatggatgctatggctctggtgcggaagtttggtaaaccagacatctttcttaccatgacatgtaaccccaactgggatgagataaggagggagcttctccctgggcaaacactgcaagatcgtcccgatcttgtagtgcgtgtctttcatgcgaagctacaggagttaaagcataggctgactaaacaggatattctcggtaaggtccgggcctacgtctacgtcctggagtttcaaaagcggggtttgccacatgcccattttctactcatcatgcagaggaagtacaagctaacgtgccccgagcagtatgaccttttgatctcagccgagatcccacacaacaagtaccctgaactacgaaagatggttatcaagcatatgatgcatggcccgtgtgggtcgttaaaccctaactgtccatgcactaagggccatgcatcgtgcaagaatcattaccctcggcctttcagtgacacaaccttgcaagggaaggactcatacccgatttacagacgtcatgatgatgggcgtaaggaaaaggttcgagggtgcgaattggacaatagatgggttgtcccttacaacccttacctccttcgtctcttcaactgtcacatcaatgttgaggcgtgcggaagcatcaaggccgttaaataccttttcaagtacatatacaaaggccatgatcgtgcgtctgttgttatgagagatgcgagcaaggcagatgatgatgtagatgagatcaagcagtacagagatgcaaggtgggtgactcctccagaagcattatggaggatatacggatttgagcttagtcagaactctccacctgtgatgcaattgcaactccatcttccaaacatgcacatggtggcgtttcacgaacgacaaatggtcgagcgagtcgtcaaccgtccaggtgctgataggtcaatgctcacggcatattttgaagcgaataggctacatgagggggctcgtggcatcctatatggtgacttccctaaatggtacacttggcaaagtggtaagggcaaagtatggcaacggaggaagcgtgatacgggtggacaagtcggtagaatagtctctgctcatcccgctgagggggagcgctactatctccgtgttcttctaaaccatgtgacttgcgccacctcctatgtggatctaaggacagtagatggtgtcacgctaccaacttttcgtgaggcagcagagagaaggggactgcttgagtcggacaacacactggatgactgtctcactgaacgtgctcttttccagatgccatcggcgctgcgacgactttttgccacaatattggtgtactgtgagccaagtgacgtggcggtactctggcagaatcacctagatgttatgtcagaggactatcaacacaggagtcagggtaaaactcatgttgagcagatggtattgattgacattaggaacatgctgcagtcaatgggaaaggacataaagacattccctcttcctcctatcatcgacgcgtatgacaatgctattggtactgctagggaggtttacaaggaggaaagtatcaaaccggtagtgggagatgtggctctcaaagactctcttaacgaggaacagagggccgcctatgataagattctatctgtcgttgacactgatcagggcggattgttctttgtggatggacctggtggcaccgggaagacttatctatacagagtgttgctcgcgacgctacgcagccagggcaagattgcagtggcaacagctacatctggcgttgcagcttccataatgcctggaggaagaaccgcccattcacgcttcaagatacctctcactattgatgatggcgctgtatgtagcttcacgaagcagagtggaaccgcagagttgctacggaaagcatctctcattatctgggacgaggcttctatgaccaagagacaagccgttgaggcactggacaatagcatgcgcgatataatgggtcggcccgaactaccattcggtggtaaaaccattgtcttcggtggggatttcagacaagtcttgcctgttgttcgtaaagggtcaagggctcaagtggtcgcttcttcgctacggatgtcttacatatgggagtccatgtcccacttaaagcttgttagcaatatgagggcaaaaaacgacccttggtttgcggagtatttgctacgcgtaggcggtggaactgaggacacaaatagtgatggcgacatctgtcttcctgacgaggtatgtgtgccttatagtgggagtgacagcgatcttgacaacctaatagacttcgttttcccaaatctcaacgaaaatatgtctgattcgacctacatcacttcaagggcgatactgtcaacgcggaatgactgggtggatatgataaatgctaagatgatcgatcgttttcaaggggagcatatggtgtaccatagtttcgatagcgtcatggatgatccccataactactaccctcctgagttcctaaacacactgacgcctaatgggctgccaccacatgttttgaagctcaagattggatgccctattatattgcttcggaatatagaccctgcgaatggactttgcaatggcaccaggctggtcgttcgtggtttccaaagaaatagcattgacgcagaaattgtactaggtcagcacgctggaaaacggattttcctgccgcgtatacctttgtgtccatccgatgaagagatgttccctttccagttcaaaagaaagcagtttcctgtacggcttagctttgcaatgacagttaacaaagcacagggtcagactattcccaatgttggtgtgtacttgcccgaaccggttttctctcatggccaactatatgttgctctatctagagcgacagctcgattgaacataaagatccttgccatcccagccgtcgatgtgaagaagaggtcgaggaagggcataaaaaagaaccccacaatagattgtgggacatgcaccaagaacatcgtctacaaggagaaaacgcttggaaaatttgatgatttgaaagctggagtactaggacccaaaactagacatggcttgggtgtcgggatacttttgtattttaacattcatgaccgtaaagaaaacctcgtgtatcttacagcagatgctgagacagtgcttgatgatctagacatgtcgaaaatatacatcatcggtggcctggtggatcgaaacagatggaagggcataacactgaagaagtcagctgagcagggaattcaatctgcaaagcttcctattggaaactacctaaaaatgtcaagttctcaggttcttacagttaaccaagtgtttgagataatgttgaagtttgtggaaacaagggactggaagacggcattcttccatgtgattccacaaaggaagcgaggagaagctgagaccggagattaa

SEQ ID NO: 33323 - DNA, 489 bp, Zea mays
  Peptide Sequence Number=SeqID_75102
atggactacattgcaccaacgggagtcgcgctggaagctggctccggacagccccaccaatggtggcgaccacctctgcatcgacggatcgccgacagcaacgaccacctctgcaccagcagcgataacgacctccgcctcgggcggctagacagcagcagcgatcgcctcagggcaagcgctactcggcagatggctctgatgccctcaccagcggaagcaaccacctctgcaagaggtagcctcaccagcggcggcgaccacctctgcaccaccgcctcagcacgcacgaaggggttctcgctcccgtttcgaccaacaggagtgaggacaagaccatccaagaacgccaccgccaccgccgcggcgtacgatgtcttgtgcggtcccccagtgcgcccggcgggcaagggaagccatggatgtggcaaacccgtgcacagcgcgactgtcgcccgtgtggtggatgggcaaccacgccccgactag

SEQ ID NO: 33324 - DNA, 780 bp, Zea mays
  Peptide Sequence Number=SeqID_75103
ggtctcccagtttttggcattggtgttggacatagcacatatgacaaagcttcggctacaactacagccaaaatcatgaaactggatgcctttagccttttactgtatgctatggacacttttatatttgagagaggcattttatctcaggttcactactatgtgcaatctcatatccagattaatgagtaccgtgatcgtataattttgcctaggctgacacaacagtttgagcggcctgttgtcaggtgcataaaagttctggatatgactggtttgaagctatcagcactgagccaaataaagatgttaacttccatatcaacagttgatgatttaaattaccctgaaaagacagagacctattatgttgtcaacgttccatacatattttctgcttgttggaaggttgtgaagcccttattgcaggagaggacaaaaaagaaggttaaagttttgagtggctgtgggagagatgaactgctgaagattatggactactcatcacttccccatttctgccgccgggagggctctggatcatcaaagcattcgtctgctgatgttgacgattgctactcccttgaccatccattccacaaagaactatacgaccatatcaaagagcaagcgtcgcgtagggagctcatcaagatgggatcgttgcacgtgagcattcctgagccagacccagaggacgccaagatcgttgaggtcatccaggctgagttccagaagatcggcgagcaggatgagtccaccaccggccacaaggattag

SEQ ID NO: 33325 - DNA, 285 bp, Zea mays
  Peptide Sequence Number=SeqID_75104
atggacgagggttgcactcaacccctttcaagtgatccaatgatcaacttgaataccacggtgttcttctttcttatactttctcccgtttgcgaggaatctccacaacttggagtctctcgcccttacaacaaagatcaaagtgaaagcactagaggtctcccagtttttggcattggtgttggatatagcacatatgacaaagcttcgataattactctgatgcttgttgtttgtttaataagctacaactacagccaaaatcatgaaactggctacctttag

SEQ ID NO: 33326 - DNA, 705 bp, Zea mays
  Peptide Sequence Number=SeqID_75105
atgagttcgatccaccacagggaggcgcgcccgccaggctccatcttcggatctgatcgcccaccaagtgggttgagttcgtttgcatatgcttctggtgtgccacgattgctacttctgcagaaaaatgaagtcagcaaggaatacttcttaaaaactgtaaggaatattgttggtgataaaagctgcttcacgatatcaaatgcagttggaggtccaactgcaccatttagaccacaaatggcagattccaatccaagagcacacttgattcagggagctgcgaccacagtatctgggagtgtgccaacacgatccatagtgtctggaaatgcgccagtcaatcaagccttgggatcttcaaaagtcagtgctggcatggaaagccagtcacaacaattgagtgcgcctaagcctttagctgcaacaagcttaagtcagactcaatctcttggcattcaagaagagcctaaaattcaggggaagaaacaactattattcgagagtttgcctgcaaccgatctaaagtattggtctctagagaggaagctctgccaaccattactaataactgagaagttaattgaagctgatcgagaggtatttgagagacaagaggggtttcagctggcaattggaaatgagaaaaatgcagagggaggagaaggggatgatggattgcttctttggaactatgctatataa

SEQ ID NO: 33327 - DNA, 1002 bp, Zea mays
  Peptide Sequence Number=SeqID_75106
atggagatccagtcgtcaggccgctccatcgaggggctgatggataaggtgctgtccgtgaacatcctctcctcggactacttcaaggagctcttcaagtacaagacctaccacgaggtcatcgatgagatctacaaccaggtggaccacgtcgagccctggatgaccggcaactgccgcgggccctcctccgccttctgcctcctctacaagttattattcaccatgaagctcaccgtcaaacagatgcacggcctgctcaagcaccaggactccccctacatcagagctgatgccaagtgcttcagaaatattgtaagaagtcaagctgtctcaagaaatattgtgaacgctatcagggaggtgttggatgctccagcaactgcagatgcgagagtagcaaaaatgcttttggcagaagagatgaaaaatgaagtcagcaaggaatacttcttaaaaactgtaaggaatattgttggtgataaattgcttaagcaagctgcttcacaatatcaaatgcaggcacaacgaagccctcagataaacccaagcaactattctttatctggtcaagtttctggtcagcagactgctcccaatggttctgtgacaggagatgaacagaagggatatccaggggcgcacaccatccctatgagacaagctattgccagcactcgaccacctcaatttcggccttcctcgtctggccaaatggggagtaatacgggttatccacctttacaaaccaatttgcataaggctaatgaaatgggaaacatgtcagatgggaaaggggtccatatgttacaaactcgtccacccaataactccataccagtacaaacaatgcagcatcacgtgcagcgaccacaaacatcttcaccagtgtttggggcaaatagtattcatgcacgtccatttccgcgaccagttggaggtccagctgcaccatttagaccacaaatggcagattccaatccaagagcacacttgatttag

SEQ ID NO: 33328 - DNA, 150 bp, Zea mays
  Peptide Sequence Number=SeqID_75107
atgtccaaaccggacaaaactttccccctccttatcctcccggtgctccccagccttcttaaccctgggaagatctacttccggaagttcgggctccggtccttcttccagggctatgggttccggatcaacggtccccgcttcttctag

SEQ ID NO: 33329 - DNA, 150 bp, Zea mays
  Peptide Sequence Number=SeqID_75108
atgcccaaaccggacaaaactttccccctccttatcctcccggtgctccccagccttcttaaccctgggaagacctacttccggaagttcgggctctggtccctcttccggggctacgggttccggatcaacgatccccgcttcttctag

SEQ ID NO: 33330 - DNA, 222 bp, Zea mays
  Peptide Sequence Number=SeqID_75109
atgcccaaaccggacaaaactttccccctccttatcctcccggtgctccccagccttcttaaccctggggttggaccgcatgagttcggattgagtgactgcccacacagtctcgagtggttgtacgtcaaaggagtacagaagacctacttccggaagttcgggctctggtccctcttccggggctacgggttccggatttgcggttccctcttcttctag

SEQ ID NO: 33331 - DNA, 222 bp, Zea mays
  Peptide Sequence Number=SeqID_75110
atgcccaaaccggacaaaactttccccctccttatcctcccggtgctccccagccttcttaaccctggggttggaccgcacgagttcggattgagtgactgcccacacagtctcgagtggttgtacgacaaaggagtacagaagacctacttccggaagttcgggctctggtccctcttccggggctacgggttccggatttgcggttccctcttcttctag

SEQ ID NO: 33332 - DNA, 150 bp, Zea mays
  Peptide Sequence Number=SeqID_75111
atgcccaaaccggacaaaactttccccctccttatcctcccggtgctccccagccttcttaaccctgggaagacctacttccggaagttcgggctctggtccctcttccggggctacggaatccggatcaacgatccccgcttcttctag

SEQ ID NO: 33333 - DNA, 270 bp, Zea mays
  Peptide Sequence Number=SeqID_75112
atgtctacgcagttgtatgctaccgtgcagcatgcacagcagcagtgcccggcattgggcggttgggaacctgtggtgtggaagaaacaacttcttcctccaccaggaaatccgttgaagtctcggcgtggggtagcttctcgtataagggatgatggacgcagcgcgctgtgcagcacgggcgcactgtttgataatggactagacaggcgcgccgtctgcaggatggccctggcgccacctgccagcggagtggacaagacgcattaa

SEQ ID NO: 33334 - DNA, 618 bp, Zea mays
  Peptide Sequence Number=SeqID_75113
atggaggcgaggatgagggcggagcgggaggcagagcgagcggcttacttggcggatcagcagaggatggtggagatgccttatcctgtgcgcctgcgctccccgctcaggcggagacccgatgctgtcgcgtggcttgttgcccgtgacataagccagcaggcggagcctgacgtaaggcctctaggccgcgcggtctctgcatttattgcggagaggacgtgccgcctgtccaccctgctgacaggcgatgtgccccctcagcatttaatgcgtcctgtccactccgctggcaggtggcgccagggccatcctgcagacggcgcgcttgtccagtccattgtcaaacagaaaagaccaattagaaaagccttggctcgagcagccaagactttgctcagtctggagcaccggactgtccggtggtgcaccggacagtgtccggtgcgccaggctggttcgagcgaagtggccgctctcgagaattcaccggcgacgtacggctataattcaccggactgtctggtgtacaccggactgtccggtgagccaacggtcggccgggccaacggtcggccgcgcgatctgcgcgggacacgtggccgagccaacggctag

SEQ ID NO: 33335 - DNA, 432 bp, Zea mays
  Peptide Sequence Number=SeqID_75114
atggggaagcatgtcccatcactcctcatgctcctcctcagtcgaggtagggtcccactcgacagtccaacccggtggcaagatggacggccaagtcactccagcaaccatgtcctccagagaacctgtaaaaattattccacaagcaaggctgagtatactaatactcagctagacttacccggttacaatggatcaagcagtctcattagctgcgagaagcagacgattcgaatcgagttttatccttgcaagatcagggctcaccgccttggcgtacaatgcctcactgaccccgactgccgtcgtgcagtgaccgcacttgtacccaccataaccggaatgggagaccacgtctcaggtcgcgtgaggggtaaagtctgcgggcaggttcactcaagtactaggcttaccgatttaccatatttctag

SEQ ID NO: 33336 - DNA, 240 bp, Zea mays
  Peptide Sequence Number=SeqID_75115
atgggagaccacgtctcaggtcgcgtgaggggtaaagtcggtgggcaggttcactcaggggcactccgtccccacacacatcaaccgtccccatcgattccccgtcagcagatcagggctcaccgtcttggcgtacaatgccccactgaccccgatggccgtcgtgcagtgaccgcccttgttcccaccataaccggatgggaacctcttctcaggaccctgagggaaaggccacggcag

SEQ ID NO: 33337 - DNA, 237 bp, Zea mays
  Peptide Sequence Number=SeqID_75116
atggcggagatgcacccggctttgttccttaaatccgggtgtgacagaagtgatattataaatggacatcttagcatgtaccaccataagatggtcaataccaggaagggtggtggaattgatctacctcccaatcgacacactcggaggatatttagacaaccacaacaacaacaacttgagatggatcctccacaacctccaccagccggagttgatcccgcagttgcagcatag

SEQ ID NO: 33338 - DNA, 204 bp, Zea mays
  Peptide Sequence Number=SeqID_75117
atggcgcaccacgacggtgccctgcgtggctaccggagtttggccagggtaggggagctagatattataaatggacatcttagcatgtaccaccataagatggtcaataccaggaagggtggtggaattgatctacctcccaatcaacacactcggaggatatttagacaaccacaacaacaacctgagatggatcctccatag

SEQ ID NO: 33339 - DNA, 621 bp, Zea mays
  Peptide Sequence Number=SeqID_75118
atggacgttgtagtgatcacactgtcacgagagctgagcaaactacaacctgcaagagctacacatggcgtccacaccccccatggtgcacgttatgtcgtgcccctgcatccgcctgcggtcgcacgccgccccgcatcccgccggcagcaaccatctttgctgactgatggctacaaatatttcttcacggtagctctctgctcagcaaccatctcccagcagagccgccacgccatctccctgaccatcaccagttgtgccctctcggcatttgcaaggtggtggtacaaattccccactatttacagacatcctgaacatggaaccttgccctgcatagtgttgatacctggccttttcttcattgtagaatctccaagaaggctggcaaagatgaatataatggatgattgcgagacttctctacaagttctgagaggattcgatgctgacatcacttcagaattgaatgatataaaggtaggtggagatggtcgagaaattgagacacatggttttgctgtcctggataacttccgcggcaaaaaaaacataacagagtggataaggaaaaaacataacactgggagcaacatatgtgggaaagaatgtctttaa

SEQ ID NO: 33340 - DNA, 504 bp, Zea mays
  Peptide Sequence Number=SeqID_75119
atgaatatgatggatgattgcgagacttctctacaagttctgagaggattcgatgctgacatcactgcagaattgaatgatataaagataggaattggtctacttgtgctgcaacagctaagtggaataaatggtatactattttatgcaagtagcatcttcaaagctgccgcatttaagcatcacgtctttgtgtttgtctacaacagtgctggtgtagttggtttagattttaatttaacaataaaaggtcttcagatttcttctgctgggatgactctaagtcttcttgtagttgctattgtattttacatcaaggataatatttcacatgactctgacttgtatgacatcttaagtatggtgtccttggttggtgtcgtggcttatgtcattgccttctccttcgcttatctcgtgtatagagtaggagaaccatcagcccttacacacaggttacccttgtttccaaactgtacagatcgagaacgttggttgacataa

SEQ ID NO: 33341 - DNA, 615 bp, Zea mays
  Peptide Sequence Number=SeqID_75120
atggggaaaaaacacggctccgtgccgaatttacatacatgttcaggcctcgacagccacaatgaacaaaaacactggcattcgaagggccattacaaacggaactccggttccacctccgcaggtacgaacaaccccacgcgactggggggacctgcggagcaacagaagaccgacgaacggctcgtcgtcgcctgccccagcagcgacgacgacgacgacttctgcttcggggggccgaacagcggcaacgatgaccttagggcggatgctgctgccaggaggcccccacccgtgcccaaactcgtgaggcaaggacgggcagaaggccgtagagttggaggtcctcccctacggcgtgggggctgggtcccacacgtcatgcaagccggcccagagcagaagaagccaaaccaccgcgcatggtgcgtgcaaccgcccagcggttacaagcggctctccacttttgcccagaccagcaggcgaaagggcgggcaaccatgcaggcggcatgcaaccgcgccaagtgggtgcacttctccgactcccgacacgcccagcatggaggcccagacccacgcgtcatgcaaccggcgcgccggttgctacgtgtga

SEQ ID NO: 33342 - DNA, 615 bp, Zea mays
  Peptide Sequence Number=SeqID_75121
atggggaaaaaacacggctccgtgccgaatttacatacatgttcaggcctcgacagccacaatgaacaaaaacactggcattcgaagggccattacaaacggaactccggttccacctccgcaggtacgaacaaccccacgcgactggggggacctgcggagcaacagaagaccgacgaacggctcgtcgtcgcctgccccagcagcgacgacgacgacgacttctgcttcggggggccgaacagcggcaacgatgaccttagggcggatgctgctgccaggaggcccccacccgtgcccaaactcgtgaggcaaggacgggcagaaggccgtagagttggaggtcctcccctacggcgtgggggctgggtcccacacgtcatgcaagccggcccagagcagaagaagccaaaccaccgcgcatggtgcgtgcacccgcccagcggttacaagcggctctccacttttgcccagaccagcaggcgaaagggcgggcaaccatgcaggcggcatgcaaccgcgccaagtgggtgcacttctccgactcccgacacgcccagcatggaggcccagacccacgcgtcatgcaaccggcgcgccggttgctacgtgtga

SEQ ID NO: 33343 - DNA, 393 bp, Zea mays
  Peptide Sequence Number=SeqID_75122
atgaaggatgcaccatattggagtttgccaaaacccctttcccctcgtgaccccgaacaggagcgaccgctactgttgaagccaggaactgagagtgggagtggcggcgcgaccgtcgattcacgcggttaccgtcggctagaacctcgtgctgcgtcggggaagttcatcggcgatcactggggcgattcaaagcgttatcgttcaaagtgtgaccccacgcttcaagaattttccctcgtcgggatcacgaacgtcgttgcgtcgcggcggtgcgtgatcaggaccgacgccgtccagattcgagatcattatgttaatgggaacatggagaaccacccaggaaaaacagtgctaccacaagggtttaatgggacgcccttggctgattaa

SEQ ID NO: 33344 - DNA, 792 bp, Zea mays
  Peptide Sequence Number=SeqID_75123
atggcgaataacagaacacatttcgtcctcctctgtttccattccttccaccactggccactggacgcaacacgacgttcgctgacaagtggtatcggagacaccgttcctgatctggcggcgtcatcctactacacctactgcgtgaagatggccgacgcttttgacctgagcgttgtggcatcactggaggcacaatccaaatctatggatgtgaagtcgcgcatgctcaccactcgaaattcggtgatggggatattgaagacttctgcggtggtcttactcgttccttgggggaacgagtggacactcagctcgcgcgcgtcgtggaagagatccgcgcaacggacggtggtggttcgggtctcccgttaccggcttgactcgcatggttatttcgagccggaccccctccttttcccatcgcagccaaaacccctttcccctcgtgaccccgaacaggagcgaccgctactgttgaagccaggaactgagagtgggagtggcggcgcgaccgtcgattcacgcggttaccgtcggctagaacctcgtgctgcgtcggggaagttcatcggcgatcactggggcgattcaaagcgttatcgttcaaagtgtgaccccacgcttcaagaattttccctcgtcgggatcacgaacgtcgttgcgtcgcggcggtgcgtgatcaggaccgacgccgtccagattcgagacgagcaagctacaggggatcctgaggttcagctggtagagactgctgagcaggagctcgtcgaaggcaagttgtgcccttga

SEQ ID NO: 33345 - DNA, 882 bp, Zea mays
  Peptide Sequence Number=SeqID_75124
atgtctccgtctgagtcgattaaggaccgtgtcgatgtaggcctgcagatcgaggaccctttaactggtcacatgcctcgtcatggatcctcagctgagtataatcgattcggatcaccgtacctccgcggttatggagacttggccactgacctatacctaggacttgttaagaaattggctagtgcaggatccacttttagtaagcatttatgcaaaacagagtctttgatcattgagaaaccttaccttgactcccttataaccagcatacccttgagagccttttctttagtcggaaaaatgccgccgcgcacaaggaaaactacgcgcaagtcaactggcccaattggtgtaccccgtcatcaactcgctcccagacatgaggatagcagtagtgggagtaatgatccgatcggggatcttgaagcccaagtgaatcagcttcaagcggaacttcaacgcagaactaacatatgggtcgcggatggcgatagaataaatgaattgagaagccatatccgccgcctgcaagatcagcttgctgatcgagatttagcgctcgattggacggttcagtctcgttcgcttgcctgggctaaggaggcaaaggctcaagcccgagtcgaagaacttagctcagctattgacaacctgcaggcttattgcaataccctacatgaagaagttcatgtactgtattcgcaattgcaccccagtgtacctgcaaatcctgtcgaaacaaaagccggaccttctcacgaagcgggagaagcttttggtggcgaattggaccttttcaggccccctctctccatgaagttggtcgacgaatggtctcctacgcccgacagtgaagctactaagagtgataggaagtag

SEQ ID NO: 33346 - DNA, 738 bp, Zea mays
  Peptide Sequence Number=SeqID_75125
atggccgtgatgggttcaacatcggaaaagatgtacctctgccaggatccacttttagtaagcatttatgcaaaacagagttctttgatcattgagaaaccttaccttgactcccttataaccagcatacccttgagagccttttctttagtcggaaaaatgccgccgcgcacaaggaaaactacgcgcaagtcaactggcccaattggtgtaccccgtcatcaactcgctcccagacatgaggatagcagtagtgggagtaatgatccgatcggggatcttgaagcccaagtgaatcagcttcaagcggaacttcaacgcagaactaacatatgggtcgcggatggcgatagaataaatgaattgagaagccatatccgccgcctgcaagatcagcttgctgatcgagatttagcgctcgattggacggttcagtctcgttcgcttgcctgggctaaggaggcaaaggctcaagcccgagtcgaagaacttagctcagctattgacaacctgcaggcttattgcaataccctacatgaagaagttcatgtactgtattcgcaattgcaccccagtgtacctgcaaatcctgtcgaaacaaaagccggaccttctcacgaagcgggagaagcttttggtggcgaattggaccttttcaggccccctctctccatgaagttggtcgacgaatggtctcctacgcccgacagtgaagctactaagagtgataggaagtag

SEQ ID NO: 33347 - DNA, 372 bp, Zea mays
  Peptide Sequence Number=SeqID_75126
atggtggactgcgggtttatttctacgaagctcagggactcatatgttaacttgccacaacgaaggggtatcgctgcgccgggaccattggatccacaaccaatggcacagattagatcccactttaaacacaacccgtacactccatcgtggccatccgatcaagatcccacggcgcggattcaatttggtcgaagggggctttacatgttaacaaccatttgttaccagaagtgggaagaaatacaagcgacgtctatgaggttgttccctgcagttgcattaagcgacccagttgtgtatcaacaccaggcccgattaatggaaagcattcccattgggcaggattctgttgaatcggcatctgcttga

SEQ ID NO: 33348 - DNA, 948 bp, Zea mays
  Peptide Sequence Number=SeqID_75127
atggtcctatggcgactacttcaagaagttggatataccgaagcacccaagtaccagtggtcgcgcactattcttagagtacaaccatggtatgaggtcgtagtgcgtattccagaacgtgctagaaagccatcttggccacaatggatgttccatgccgaaggaatgactccttgggaaggtgttgaggtagctgccttagaggtgttgacaaccatttgttaccagaaatgggaagaaatacaagcaacgtctatgaggttgttccctgcagttgccttaagtgacccagttgtgtatcatcaccaggcccgattaatggaaagcattcccattgggcaggattctgttgaatcggcatctgctcgggttttgatggctgtgctagagttgcagcttactcgagggcacaatcatcaaatgtggcagcagttatacactgggagttatgcagcatttaagatgatggaaatggccaagaatagggcttgtactcaggcacaagaacagcttgaagaaacaaggattcaagctgagcgaattgttggactagagcatcaggtagcagaactgcaggcacaacacaaagcggatcaggatcacatcaaggaacttgagcatcagctgactaatgctcattcaaaatcaaaagttttgagtcagcaacaagaagaaactcactcgtatgctgttactgttagggaagaactgaaggaaaccatgggcttcctaggtcagcaggatcatgtgctcgaggagttgcatcgtacctatccgatggaatttcaaacagtgcagcgactgatcaaccatctgcaacaaacggtgcatatgctccttagtgacagggaacgcggaacgacgccgcgtaccgcgttccgggaacttcgtcccgaaacgaggaacgggaacgcgcggaacatatcaagaaacggccgcggaacgtag

SEQ ID NO: 33349 - DNA, 1098 bp, Zea mays
  Peptide Sequence Number=SeqID_75128
atgtccgatggtgcaccggacactgtccggtggcacaccggacagtccggtgtaagcctaattccctttcactcctccaacaccaccatcagacccgccgccaccaccaccaccaccatctggctcgccgccgccccaggggcagcagcaccaacaacagcaacagcagcaggggcagcggacgtcccgcttctagggtcgctggaaggttcagggccccaacagcaggcgtctgctggccttgatgccggtgacctgcctcctcctgtcactgctgaggcagcgccatcgggcccccaggttccgcctgccactaccgaggcggggctgtcgggcccccagcttccgactgccactgtcgaggcagcgccgtcgggcccccaggctctagtcgggggttcagaagcagcagtgccgctgacggctactgcagacccaacggcgatggcgatgtcgtcaaatacaccgtcggcaacggcggaagacgcagggggtgcgcctagctccatcccgccatccattcctgaggagctggaggttattcttgggcggcagctccagaccggcgctgggccagaagcggcgccgactcccctccctcgggtgctgtcccacgctcatcaggctctcttggagactaaggcggcgatcctgcgggagtgggaggcgctcaagactgagcaccagcgtctcgagcggtgcgagcttgagcaggagcgcgaggacttcaaggaggacctggagaaggtgtttgaccgggagcgggagaggcagcgggatgagcagaccgcgactgaggcggatctacaaaagctgcggcgggagctcgacgacagagctagcaacctctctctcgccgaggagaacctcaaggaaaaggatgcttccctagaggagcgggcgatggctcttgtctggcaggagaaggacctcgcctggagggaggagatgcgggaaaggcgggaaaagttgctggccgaacacgagctcgaggcggaggagaaggagaagaaactggaggagaaggagcgaacactggaggagcgggtccgccggttccaggcgacgcaggcagcgcaggcggctctgggctcctag

SEQ ID NO: 33350 - DNA, 498 bp, Zea mays
  Peptide Sequence Number=SeqID_75129
atgcgggaaaggcgggaaaagttgctgaccaaacatgagctcgaggcggaggagaaggagaagaaactggaggagaaggagcggacactggaggagcaagtccgccggttccaggcgacgcaggcagcgcaggtagcccagacggcgcaggtggctccgggctcccaggcggtggaggtgatgaagaagacgcttgaagatctctgggcagagcatcgcactagggtccagtgtatcgccgcatgggccgacgaggtgagctcagctctggtgccgctggggatccttggtgcccgcctggagcatgagggcagcagactctaccgggcggtaatagagtacatcctgacgtgcttccagagccacgacccggccatctccttggggtcggtgatcaccgggattgggcagaggctctccttcagttgtggcgaggcgaacacacccgggtcggcatacttctgtcaccttgaagggtccttcccagctgggggatag

SEQ ID NO: 33351 - DNA, 1599 bp, Zea mays
  Peptide Sequence Number=SeqID_75130
atggcccgcgttcgtcccctgccccggcaacccagcttaaccctagctcgctccctccgtagccgcctcttcctgcttcgctcctctcgcgtagcaaccgctccctccactcccgagatcgtggcccgacgccatgccgctcccgagaccgcgccacaaagccgcggaacgtcctcaccgatgcaccgacgcgcccccgagcctgcttcccgacgccaccctcacacaacctgccccctgtcaccctctggacgggacgacacaggtctggagaagggtccagaaaccggcgcgagtccaccgcgaatccacacgatcgatgtcgtcctcccgctcgtttcgccgtcgacctttctccagtggttgagtgcgacagggttggtggctaggtcgtgcgatggcgaaatcgagtccagagtagcagagcaaggctggtcccagcgggctgccggtgttgtgacctgcgtgcgtggtcgtacgcctggccgttgtgccgctagctgcggcgggcgggtggctggcggcgtcgcatggcggacccaacgcccatacaacctccagggattgcttcctccccatggcgtggatctagatggtcttcacggcagaggaggaagaggtgtcacagcagcttccgaagacatcgtcgacgtcccttaccacctcgattggcgatggcatcgacagcccccagccactgcccgcgctaacggtggcgtggacctcactgtcttcaagcagttcgagcggatgaatcctgagcctgccaatggcgacgacgatggagctttgtcactgccagagacaggattggggcttagcttgaatactgacggggtgctcaaggcgtggtgtgcagaggctctgcgtttgctgatggcaatgggcctgacttgccattgtcccctgctcatgtggtacaactcacaccattacaagatctacacgacatggcatctgcatcgccaaggcctcgctcaactcagcgcggtgttgactgccgatacctggagatgtgacaccgccagatgtgtcgctcaggccagtcacactgctctgctgtttttcaaagaacaacctcttgctgcgtcatcaaggggtagaccagtctctgatgattcgtgtaagaatccttgggagaaagcaagtggtcctggaaatgttaccaggacatctctggccccacaagggctgcaagcacaaatcaacgagtttgtgaagcttggtggggaacaacttgttccctactatgcagatatattgggcgctgtcttaccatgcatatctgacgaggaggagaaaatccgagtggtactttcccatcatgattcatacacttactgcaatgtgaactgcgtggttgcacgcgaaacaaatgaggaactccgtgctataaaagctgatccagctgagggatttgatatcggagcaattctttcaatcgcaaaaagagaattgaacagtgaacatgaggccactcgaatcgaagcattgcattggttcttcactttgctggatcgatattgtgctgagttcttggcttacctgaacgatatttttgatccactcctaaatgcactttctgatccttcggacgcg

SEQ ID NO: 33352 - DNA, 1827 bp, Zea mays
  Peptide Sequence Number=SeqID_75131
atggcccgcgttcgtcccctgccccggcaacccagcttaaccctagctcgctccctccgtagccgcctcttcctgcttcgctcctctcgcgtagcaaccgctccctccactcccgagatcgtggcccgacgccatgccgctcccgagaccgcgccacaaagccgcggaacgtcctcaccgatgcaccgacgcgcccccgagcctgcttcccgacgccaccctcacacaacctgccccctgtcaccctctggacgggacgacacaggtctggagaagggtccagaaaccggcgcgagtccaccgcgaatccacacgatcgatgtcgtcctcccgctcgtttcgccgtcgacctttctccagtggttgagtgcgacagggttggtggctaggtcgtgcgatggcgaaatcgagtccagagtagcagagcaaggctggtcccagcgggctgccggtgttgtgacctgcgtgcgtggtcgtacgcctggccgttgtgccgctagctgcggcgggcgggtggctggcggcgtcgcatggcggacccaacgcccatacaacctccagggattgcttcctccccatggcgtggatctagatggtcttcacggcagaggaggaagaggtgtcacagcagcttccgaagacatcgtcgacgtcccttaccacctcgattggcgatggcatcgacagcccccagccactgcccgcgctaacggtggcgtggacctcactgtcttcaagcagttcgagcggatgaatcctgagcctgccaatggcgacgacgatggagctttgtcactgccagagacaggattggggcttagcttgaatactgacggggtgctcaaggcgtggtgtgcagaggctctgcgtttgctgatggcaatgggcctgacttgccattgtcccctgctcatgtggtacaactcacaccattacaagatctacacgacatggcatctgcatcgccaaggcctcgctcaactcagcgcggtgttgactgccgatacctggagatgtgacaccgccagatgtgtcgctcaggccagtcacactgctctgctgtttttcaaagaacaacctcttgctgcgtcatcaaggggtagaccagtctctgatgattcgtgtaagaatccttgggagaaagcaagtggtcctggaaatgttaccaggacatctctggccccacaagggctgcaagcacaaatcaacgagtttgtgaagcttggtggggaacaacttgttccctactatgcagatatattgggcgctgtcttaccatgcatatctgacgaggaggagaaaatccgagtggtactttcccatcatgattcatacacttactgcaatgtgaactgcgtggttgcacgcgaaacaaatgaggaactccgtgctataaaagctgatccagctgagggatttgatatcggagcaattctttcaatcgcaaaaagagaattgaacagtgaacatgaggccactcgaatcgaagcattgcattggttcttcactttgctggatcgatattgtgctgagttcttggcttacctgaacgatatttttgatccactcctaaatgcactttctgatccttcggacgcgcctgctcacgagaaaatcggtgtcgttgattcccaatggattgtacaccaagtgattccttctctcgggaaccaggggcagtcggagaatgggagggcgccatgggaagggttaagagagcgttgccggaaagagtgggggcttttccagacaagaatggcagaagctgagaaagcatattacgagatgatggggattacacctccgaatgtaatatttgtctcctag

SEQ ID NO: 33353 - DNA, 882 bp, Zea mays
  Peptide Sequence Number=SeqID_75132
atggcatctgcatcgccaaggcctcgctcaactcagcgcggaaaggtgttgactgccgatacctggagatgtgacaccgccagatgtgtcgctcaggccagtcacactgctctgctgtttttcaaagaacaacctcttgctgcgtcatcaaggggtagaccagtctctgatgattcgtgtaagaatccttgggagaaagcaagtggtcctggaaatgttaccaggacatctctggccccacaagggctgcaagcacaaatcaacgagtttgtgaagcttggtggggaacaacttgttccctactatgcagatatattgggcgctgtcttaccatgcatatctgacgaggaggagaaaatccgagtggtactttcccatcatgattcatacacttactgcaatgtgaactgcgtggttgcacgcgaaacaaatgaggaactccgtgctataaaagctgatccagctgagggatttgatatcggagcaattctttcaatcgcaaaaagagaattgaacagtgaacatgaggccactcgaatcgaagcattgcattggttcttcactttgctggatcgatattgtgctgagttcttggcttacctgaacgatatttttgatccactcctaaatgcactttctgatccttcggacgcgcctgctcacgagaaaatcggtgtcgttgattcccaatggattgtacaccaagtgattccttctctcgggaaccaggggcagtcggagaatgggagggcgccatgggaagggttaagagagcgttgccggaaagagtgggggcttttccagacaagaatggcagaagctgagaaagcatattacgagatgatggggattacacctccgaatgtaatatttgtctcctag

SEQ ID NO: 33354 - DNA, 591 bp, Zea mays
  Peptide Sequence Number=SeqID_75133
atgtcgatctgcggcagcgtgcccgccgacaagaaattgcggaggcaacaatgccaatcgctacgcgatgaagccacgacaggcatgcccacgcgcaggcaatcctccataacccaaccgagcgcaccgcgggatggtggtggcgcggcatcgctgcagcagcaatcctctcaccagaaccagtcacggaggccgagcacgagattcagacggggatcgccctgggcggtggccacgggcggacggagaccgacacgaagggcgccgcgagcgcgttcaagaattagaccccgtggaagctgtcttcaccacagcggaccaccgattcggcaacgggaggcaaggacgctggctacggcattggatttcctagtgatggcttcaggaaggcgcggcgtgggaggttgggttctaaggaaaggagaagaggagcaccaggcacgcagatttgtagtccgatcaggtcggacgtttctggccgcctggcattgcgcgggccacgaagtcttccccgtcgttcggccgggaattcgcttggttgttacggggaagaagatgattacggctggtgggggacccacgcgaccgtga

SEQ ID NO: 33355 - DNA, 519 bp, Zea mays
  Peptide Sequence Number=SeqID_75134
atggctagggatccactacgaggcctttacaaagttccactagcttccgaaaacccgctacagtttatgggaagctccaatgcagggttcttgtctgaccgtcatcgcagcaaaatcaaccaaggacctccctacactgaccactcccctactgcccttgcccctttcgggggtaatcaaggtaaaatggataaacaatctagggtgacctattgggtcccatcaaaattaaacctatgcatgaaactccaggggctagagcgcaaaaagatccaaggctcagtggtgcacctgagtggaccgcggattaggtataactcaaacgaaacggcaatcctccataacccaaccgagcgcaccgcgggatggtggtggcgcggcatcgctgcagcagcaatcctctcaccagaaccagtcacggaggccgagcacgagattcagacggggatcgccctgggcggtggccacgggcggacggagaccgacacgaagggcgccgcgagcgcgttcaagaattag

SEQ ID NO: 33356 - DNA, 441 bp, Zea mays
  Peptide Sequence Number=SeqID_75135
atgggagttgagggagctggtggggggttttataggcgagcgggggtgctcgagggggtgtggagtggaagtgatggagcaggtgacacgaggcagcaggtgcgacaaggggaaggggggcctgttgccggcgacgatggcggtgggtgcgctgcaaaagggggcatgggtggcggtagtgcgctgcaaagggggcgtgggtggcgcttattccaggcttcaagggtaagcttcccggtttcttcttggagaaaacctttcttaaaagaaagaaaacacacaagctcagcaatgataagcacaatcaaatcaaatgttttgaataagggaagaatagagtttttccaaagcacggactactcagattcgggggctaagcataactactattgctcagctcctgaattgagaactatgctaaacgcgacttatgagcattaa

SEQ ID NO: 33357 - DNA, 348 bp, Zea mays
  Peptide Sequence Number=SeqID_75136
atggcgggtggaaaagagctcgccggagccaaggaggggtggttggccggtgatggatttgagttagggatcaaggtgaacacgcttgatctttggctcaaggattatatcaaagagtattaccatcacacagaggaggaaaccgaagactatgaaccatgtacaacagtcttcaacccaagaatcaccaaacattgtgatcttaggggcgatggagtggaaaatggatttgcttgcgatttggcagaggggattttatcgggagtgtttttcttgggatggaagttgagggagctggtgggggggttaataggcgagcgggggtgctcggggggtgtggagtggtag

SEQ ID NO: 33358 - DNA, 465 bp, Zea mays
  Peptide Sequence Number=SeqID_75137
atggcgaagctacccaggggcttaccaaagaccaaggcgaaggttggagagccggccacgacgaacagcggcacgcggcggagcactatctccggtgagcgaatcgagcgctccgcacgtggtgggcagggacggaggagacgcggaggagaaggtttcttccagaagagcgagcccgcaaacacctacagcaggctgaaccgaagctcccagggtcaaataagggcggcggtcgcagggcgttgcctctatgcgggatcgatggcaatggcggcggaccgagcacgcacacaggcatccggcttgctgcgtcgaggggatgagatgtggctatgcgtcatagaggagaagcgacacatatatagggctcgggctagagaccggaacggccagctagagacccccgattcccacagagcgtgcagagaactcgcgttctgtttgagggaggaggaatcggtctga

SEQ ID NO: 33359 - DNA, 537 bp, Zea mays
  Peptide Sequence Number=SeqID_75138
atggattctgccgccgagctttgtgcccagaagttgtccttggcggctgttgcagcccgtgacacactgaatgcttctgctgccgcgagtattgttgctgctgattattgcgccacattttcgttaggtaacgatgtggtttctactcttgatgttcttgaatccgctgtggcggcggaaaaaagtgctatgcgttcttacaaacaggcgagtgcagccgtcgattgtgctaaggagacagtggccaaatattttgaggtgaaccaaaaacttgcgcaagcactcagatatgccatgtctcaaatgagtgatacggctaagaaacttcaagatactgcctctttgtgctacacagatgaaaatgttgtagacggtttcaagctgactcaagtagctcgttcaatggacgagttagctgaaatgcttgaagtaactgcaattgactgccaggtctcgatgatggatccaactactatgttagaagctggctatgctagtgaagatactgcggtgtgggaggacgtattccgtgactga

SEQ ID NO: 33360 - DNA, 504 bp, Zea mays
  Peptide Sequence Number=SeqID_75139
atggattctgccaccgagctttgtgcccagaagttgtccttggcggctgttgcagcccgtgacgcactgaatgcttctgctgccgcgagtattgttgctgaaaatagtgctttgcgttcttacaaacaggcgagtgcagccgtcgattgtgctaaggagacagtggccaaatattctgagcctctttgctggtttccaaagatgatcttgaaccctcagttaactttggcagtattactggtgaaccaaaaactagcgcaagcactcagatatgccatgtctcaaatgagtgatacgactaagaaacttcaagatactgcctctttgtgctacacagatgaagaagttgtagacggtttcaagctgactcaagtagctcgttcattggacgagttagctgaaatgcttgaagtaactgcaattgactgccaggtctcgatgatggatccaactactatgttagaagctggctatgctagtgaagatattgcggtgtgggagtga

SEQ ID NO: 33361 - DNA, 1125 bp, Zea mays
  Peptide Sequence Number=SeqID_75140
atggcgacctccagcttgatggtgggggaaagcgagccgggctgcggcctctgcccccttcctcagcctcaaggattttcatcaccaaggctggggaggggggagtgccgagttggggtcggcccctgcgtgggcggtggcccgctccttcactcagtgatggggggagaagcgggcattgcccgtggccggtcccggccgccgcgccggacctccaacttctacggcctctgcccgtccttgcctcacgagttttggcacgagcggggcctcctggcggcggcatccaccctgaggtcagcgttgccgctgttcggccccccggagcagaagtcgccgtcgtcgccactgctggagcaggtgacggcgcgccgttcgttggccttccgttgctccgcaggccttccccctcggagtggggttgctcgtgcctgcggagggggaaccggagttccgtttgtaatggcacttcgaatgccagagtccctcggcccgttcggccttgttgcctggggctcctctagcttagttgaagagacccctcggccgcccttcgatgggccgaggccaggggtagcgatatcagtattagcagaggcggagttggctcgagaatgggaacctgcggagccgacgccaaagtcggtcagtcgaggcctcggatcgggctggcgcccttggaggctggttgaccgaggccccgggggtaaccggttgagccgcctgctcggcccggattcccggaggagcccctggaccgcggcgtcgcccgaggctgggtcgggctttgctgaagacgtcgtcgatgccgagggtgctatggctcccttcggcgtgaagacccgagcctgcaggatcagatcatcttgtagcgtgtgctttccgcggccgccgaggccagaagaacacaccctcgccccgcttgcgaagctgcgtcttttttcctcctgtttcgagcatctggacttcgtcggtaacagggatgtttgtgtgagcgagagttgcttttcgcggaagggacgagtgaggtatccgtatcccagaggcgtgggaatccctcggctcagtcggccttgccgcttacgcgtactttcacccgtccatgaggccccgtccccgacttag

SEQ ID NO: 33362 - DNA, 1566 bp, Zea mays
  Peptide Sequence Number=SeqID_75141
atggggggctcggagcccggttccttcgtggagaaggatccctttcggggtatccccctttcccggtccctgttgcaagagatagagaaagaggaaaatggaaaagggctggcatgtcaggagtcggagaagcgcgtccatctggcgcggttgcgtgccgcctgcatggctgcccgccccttctgcccgttggtctgggcgaaaatggggggtcgcctgaacgcaactccatgggagtgggtacctctcagccatcgttcggcttcaaggattttcatcacgcagcccggtcgcaccccttcactggcggtcacccgagatggcgacctccagcttgatggtgggggaaagcgagccgggctgcggcctctgccccttcctcagcctcaaggattttcatcaccaaggctagggaggggggagtgccgagttggggtcggcccctgcgtgggcggtggcccgctccttcactcagtgatggggggagaagcgggcattgcccgtggcgtccggcagctgcagcgtgcctggtcttcagccgcgagtggcttcggggccacttgcggcgtcggcgtctgccacggcagccggaagaggttcttccgccggcgcggcggccgggaccggccacgggctgacctccaacttctacggccttctgcccgtccttgcctcacgagttttggcacgggcgggggcctcctggcggcggcatccaccctgaggtcagcgttgccgctgttcggccccccagagcagaagtcgccgtcgtcgccactgctggagcaggtgacggcgcgccgttcgttggccttccgttgctccgcaggccttccccctcggagtggggttgctcgtgcctgcggagggggaaccggagttccgtttgtaatggcacttcgaatgccagagtccctcggcccgttcggccttgttgcctggggctcctctagcttagttgaagagacccctcggccgcccttcgatgggccgaggccaggggtagcgatatcagtattagcagaggcggagttggctcgagaatgggaacctgcggagccgacgccaaagtcggtcagtcgaggcctcggatcgggctggcgcccttggaggctggttgaccgaggccccgggggtaaccggttgagtcgcctgctcggcccggattcccggaggagcccctggaccgcggcgtcgcccgaggctgggtcgggctttgctgaagacgtcgtcgatgccgagggtgctatggctcccttcggcgtgaagacccgagcctgcaggatcagatcatcttgtagcgtgtgctttccgcggccgccgaggccagaagaacacaccctcgccccgcttgcaaagctgcgtcttttttcctcctgtttcgagcatctggacttcgtcggtaacagggatgatccgttttccgaagtagtcaagaagcacgaaagaaatcctgctaaaaagagatcctttttcgaggaaaaattcgacgcagagggggtctccccccttttagcccccgagggagggtcgggctttgccgaggctaggccgacccttccttga

SEQ ID NO: 33363 - DNA, 258 bp, Zea mays
  Peptide Sequence Number=SeqID_75142
atgaccctcggacagaaccaatgcaaaaacccaagtctacactacggaccgtccggaggttttgatgtcttcagttgggttaaattattattaatggaacgagcttccttgttagctgcatatctgtgggatgtttgctttcatgttttcagctggaacttgacattgagggttgatttggtgggctttcttatggaactgatgatcacagtcttagagtcgagtttgccaaatatggagatgtcattgaaggtttga

SEQ ID NO: 33364 - DNA, 216 bp, Zea mays
  Peptide Sequence Number=SeqID_75143
atgaccctcggacagaaccaatgcaaaaatccaagtctgcactacggacagtccggaggaaaagcaaggaccgtccgtgacctcgcgcggaccgtccggcctcaggcgcggaccgtccgtgtgtcgcagctcctccttggacgatgcgaaggacaaatagcggatgaacagcgattctccacctttagcggatgtcagagggcttctctaaattag

SEQ ID NO: 33365 - DNA, 594 bp, Zea mays
  Peptide Sequence Number=SeqID_75144
atggagaaggttggacgagcaagagcggtggagaaggctctctttggattgagatttctctatcgtgcatatgtcaggttcagacgtggcgcgtacctcggcgttgtaaatctcgacgccgaggaagggtctttgaccggaactacctttgccaactggtgttccggtgcctatgtgttttgtggtgatccttgcaaggttgataagtctgaggatcatgacacctatcgacaaaggtattggatgtgtgctaactatgcatttgagctaacgattgttcagcgccggatgaatttaatgaccgtcgatgagcgtgaggagaagggcgtgggcgcccggccggaggacgccggcgacgatgacgggcggcggagggcgcggccggtggcggagagcgatggagggcacagccaaagagccgtgcgggcgacgggacggctgggtggcgaggctccggggcggctgggcgggggggctctgggcgtggccagggagccgtgccgtgtgggcgcggggcgacagggacggcgcggggggcagggggcaggggggcggcgtgggacgaggttagaaaacggacgatgccctaactag

SEQ ID NO: 33366 - DNA, 522 bp, Zea mays
  Peptide Sequence Number=SeqID_75145
atgtctaggcgtggtaaagctgctaaacaaaggaagggtcctttgatcggaactgccttcgacccgctgtctttgccaactggtgttccagtgcctatgtgtttttgtggtgatccttgcaaggttgataagtctgaggatcatgacacctatcgacagaggtattggatgtgtgctaactatgcatttgagccaacgattgttcagcgtcggatgaatttaatggctcctccaccgctttgtgattttgagcagtggattgacacagaaatctcacagaaagacaagaagtggttggagaatcttaaaaagtgtgatgtggaggacaaagagagaatgaagaaaagacgagaggagcctgttgccgagcaacaacagaaagacgagcagggaatgaggcgtgttgctgaatgcagggaagagaaggagaagaagcttgagcgtgcacatcgtgcaaaggaagcaatggaggagaaccctgacgcatttcgcaagggcaaatggccccgttgcacccagtag

SEQ ID NO: 33367 - DNA, 702 bp, Zea mays
  Peptide Sequence Number=SeqID_75146
atggcggcgcgggctgaggcgacaggagatggggtgaatccgccatggcaggggcgtagctattgcaagggcgagaaccctgggctctgtataactattggaagccccgaccacccaccgaccagcggcgatggctgttccctcgggcgtgcgagcgccggtgatcctgggggccagcaacggtgccgccctgaggcaggcgaccgacggcggcgctccaccaggaacgagcgacagcgacactcccgaggcgggcgcgcaagcagcgacggcgttctcgaagcggatggacggcggcagcgcaccctaggcccgatggcaacgacgtttgtcccgtccgtctctgcgatgtccaccgccgctgccgctccaacgtctgtggcgtcatcccctgcgccaaaggccaacaacagcaggaaggcggtggtgcctgggatgactgggtacgagctgctcaagcgcgtcaaggagtcggcggcgctcagggacatcctcgtcgtcatcatgtcgttggagaacgtgtccacccgcatcatcccgttgcctggaggagttcgacccgcgcctcgcctcgtaaacgctgtccacagtgtcatattcgttccacgtgattcgggcgtcaaaagaatcctttatgcatgggctgacgccatagacgcggtggctgggtcgaacgtggtcgcggactggggcttccattaa

SEQ ID NO: 33368 - DNA, 651 bp, Zea mays
  Peptide Sequence Number=SeqID_75147
atggcggcgcgggctgaggcgacaggagatggggtgaatccgccatggcaggggcgtagctattgcaagggcgagggcccacgatcccacccacgcgctcgcagttatctagtcccacgccgccactacaaaaaaacacccccacgccgccagggattaggttttagcggcgatggctgttccctcgggcgtgcgagcgccggtgatcctgggggccagcaacggtgccgccctgaggcaggcgaccgacggcggcgctccaccaggaacgagcgacagcgacactcccgaggcgggcgcgcaagcagcgacggcgttctcgaagcggatggacggcggcagcgcaccctaggcccgatggcaacgacgtttgtcccgtccgtctctgcgatgtccaccgccgctgccgctccaacgtctatggcgtcatcccctgcgccaaaggccaacaacagcaggaaggcggtggtgcctgggatgactgggtacgagctgctcaagcgcgtcaaggagtcggcggcgctcagggacatcctcgtcgtcatcatgtcgttggagaacgtgtccacccgcatcatcccgttgcctggaggagttcgacccgcgcctcgccgtaatttaggccctattcgtcattacgaaataaattga

SEQ ID NO: 33369 - DNA, 621 bp, Zea mays
  Peptide Sequence Number=SeqID_75148
atggcggcgcgggctgaggcgacaggagatggggtgaatccgccatggcaggggcgtagctattgcaagggcgagttatctagtcccacgccgccactacaaaaaacacccccacgccgccagggattaggttttagcggcgatggctgttccctcgggcgtgcgagcgccggtgatcctgggggccagcaacggtgccgccctgaggcaggcgaccgacggcggcgctccaccaggaacgagcgacagcgacactcccgaggcgggcgcgcaagcagcgacggcgttctcgaagcggatggacggcggcagcgcaccctaggcccgatggcaacgacgtttgtcccgtccgtctctgcgatgtccaccgccgctgccgctccaacgtctgtggcgtcatcccctgcgccaaaggccaacaacagcaggaaggcggtggtgcctgggatgactgggtacgagctgctcaagcgcgtcaaggagtcggcggcgctcagggacatcctcgtcgtcatcatgtcgttggagaacgtgtccacccgcatcatcccgttgcctggaggagttcgacccgcgcctcgccgtaatttaggccctattcgtcattacgaaataaattga

SEQ ID NO: 33370 - DNA, 678 bp, Zea mays
  Peptide Sequence Number=SeqID_75149
atgactctgggtacgtccgatacatggctgaggctcgggctacgctcccgaggtaccctaggacatttccgagaccagcaggagcgattctgtaacggaatcccatcagagggaggcatcgagccctcggaccctatcaaatgggaccgggtccggcaaatcacctgcagtcgacagagccgaagtgaccgcagtcacttcgcctctccactgactgacctgacaggaaaacagcgccgcctgcgctgctccgactgcagtgccacccgtcagggcgccataggaagctccgcctcgcccgaccccagggctcggactcaacctcgacctcggacgacggactccgcctcacccgaccccagggctcggactcaacctcgactctggaagacggtctccgccttgcccgaccccagggctcggactcaacctcgactccggaagacggtctccgcctcgcctgaccccagggctcggactcaacctcgactccggaagacggtctccgcctcgcccgaccccagggctcggactcaacctcgactccggaagacggtctccacctcgcccgaccccagggctcagactcagcctcgacctcggaggagtcaccgcctcgcccgatctcgggctcggaccaaccacgtcacaggggggccatcattaccctacccctag

SEQ ID NO: 33371 - DNA, 747 bp, Zea mays
  Peptide Sequence Number=SeqID_75150
atgaatttgatgaataaggtgttcatggaatatcttgataagtttattgtgctggtaacccccatcagcacaaagctgcaaaggcctgatgggcgcaatccaggtcaaggctccgtccactcaagggacacgatctcgtctcgcccgagcccagcctcgggcaaagacagccgacccaggaggattcacgtctcgcccgagggtcccttcaagcaacaggcgcaccttcgactcgcccgagggctcggactcaacctcgactccggaagacggtctccgcctcgcccgaccccagggctcggacttaacctcgactccggaagacgatctccgcctcgcccgaccccagggctcggactcaacctcgactccggaagatggtctccgcatcgcccgaccccagggctcggactcaacctcgacttcagaagacggtctccgcctcacccgacccccgggctcggactcaacctcgactccggaagacggtctctgcctcgcccgaccccagggctcggactcaacctcaactccggaagacggtctccgcctcgcccgaccctagggctcggactcaaccttgactccggaagacggtctccgcctcgcccgaccccagggttcagactccacctcgacctcggaagacggtctccgcctcgcccgaccccagggctcggactcagcctcgacatcggaggagtcaccgcctcgcccgacctcaggctcggaccgaccacgtcatag

SEQ ID NO: 33372 - DNA, 222 bp, Zea mays
  Peptide Sequence Number=SeqID_75151
atgcccaaaccggacaaaactttccccctccttatcctcccggtgctccccagccttcttaaccctggggttggaccgcacgagttcggatcgagtgactgcccacacagtctcgagtggttgtacgataaaggagtacagaaggtctacttccggaagttcgggttccgacccttcttccggagctacgggatccggatctgcggttcccgcttcttctag

SEQ ID NO: 33373 - DNA, 1059 bp, Zea mays
  Peptide Sequence Number=SeqID_75152
atgtccaaaccggacaaaactttccccctccttatcctcccggtgctccccagccttcttaaccctggggttggaccgcacgagttcggattgagtgactgcccacacagtctcgagtggttgtacgataaaggagtacagggtgatgaggggaaggatggacttgccttcgttgaagctctcctggcacagaagatctacttccggaagttcgggctccggcccttcttccggagctacgggatccggatctgcggttcaatttggccggagagggttgggagggggctgcccacggggagggggcggagttccgcggcggggatcgccgccggtgggctctgggtgggggacgggggctggaaggtggtgcttcgggttcgtggcaacgtgagagagctgctccgctcacttaatttcttaccggaccaacggagaaggagagggaggaggaggaaaggactcaccggagaggaggacgacgccggcgcttcgcgaattgtgctcgggggaggggaggagagggatgaccgaggctggtgcgaggaagaaggagctcggggcgagccttttataggcgcgcgagggaagggggcggtggagcttcttggctccgacgagctacacagtgccgccattaatgctgcacagcgccgccgaggggacaccacggcggggcggtaccggcgaggacgctggtcaaaggaaaggggaggacggagcggtgccaaacttccctgtgcggcgagaagacggaggggaggacggaggcgacggccggaggtgactacggtgaagggacggcggaaggacgacgaagcaactgaccagcggggccactctgccagagggagcgagcgcgcgagagagagggcggctgacgagtggggacgccttgccagcgagagggaggcggggtgcggagcgggctggcgcgcgcgcgggggcaggccgaagatgggccgagagaggaggagcgcgggcgcgtgggaaggggaggccgcggatcctgatacggcggacggtccgcagtccttacccggactgtccgcggcctga

SEQ ID NO: 33374 - DNA, 2955 bp, Zea mays
  Peptide Sequence Number=SeqID_75153
atgccgtcttcctcctcgtctgctgcgaccacgccgacggccaaggcgacttccgaagatctctcgggcactgtggcggcggcggaattacgaccgggtgatacggtggaattcggtgtttcgcggatgtcgttggtccgcgtgcaagatatgcaacagttggtgtattttggcggcggggttggtcgagtcccggggccagaggaggtccccgagctcgagggcgaattggttgtttttgaggcatttttcatcgccggccttcgcctgcctgcgcatcgttttatgtcggaggttctgcagaagttcaaagtccagtatgtctgggcaacgacgtcgtatggcggtcagccttcggtggaagtcttcgccaagcaatacggtctgcattggcagaagagaaaaaatggacataagattgctcaattcggatcatgcactttcacgccgaagtccgggaagacttcgatggaagtggtggagctggtcccctgtgcccaaaataagtggggcaactggtgggactactggttctatgtttcggaggctgaagtcgaagatcacccagggctccctgccgccattatgtgctctcattactatgtggcatacccgccatttgaagtggcggaggatgatgaaaatgaaagggcccttcggatcgctgcccgcacgagtagtgggcgcgatctagttgaggaattcatagggtatggggtgtggcccttggcgcatggatgggcgttgggcaaagtatgccctcgcgagatgccctccctgggcgggcggaaggtgcgaagtccgctttttgctttggatgtgcgagggcgggatcctgccgcggttgtgcatgaggcggaggatggggcggtgagaattgttgggtgctacgtgccgaagacggaggcccagcggagttgggatatacgtggatccaacgaccgcctgaatagggtcttcgagttgaattgtttgccgtatggcggttatcccggggaagacgttgtcgaccacagcgggaaaaaaccagcggctgtgactgaagacgaccccgcgtcggaggccgccccagccactaagaagaggaagctaggtactgcggtgggagaactgggggtctccgatagttttgctatggagttgatggggacatgcgtggcccccgggggaaggatgtcttcgcccgagctccgggagtcttcggcgcggatgttggaggttaccgggggtcgatggcccaaaaacgttcctatcccccgcgcggctggcgaagacttctttacatctcgcatggctcgtgacttgagagtgtttccttacagacggaatattgctgttgttgtgtcgatagtgatgaacaaggatcaccaggatgctgcgcagaagcgtcgggcggtcatcaggctccccgacgctaggcgtgaagcgaagagagcgcgagggagtgcgaaggctatcgtccccggcggtagccagccgatgctggctgcaaagccggccgcgcctggatccagcaaggtgccggagagcgggaaggcggtcggcgccggtggaaccaagtctgccccggacggagctgtgaaggtccgggagctgccttcgacggggaaacgcgttgccgacttcggcatgaatattagcgtggacgactatctcgttgggtcgagtgaggggcaactggttgttgtcccacctgtggtggcaaccacggcgtcaaccgcggtgcttggggtgaagggtggcgctttcagcgctggcggcgagatttcggcggccactgccgtcaaggacgaagcgggcactatgtcccgccggctgagggaggcgtcgcagcagctaagtcaagcggccgacttcgccgaccgcgtggcgtcgggtgcccttactgcagatgtgtctgccgaagtcgagagactttgggcgcagcacgcggacgccgtccgggagaagtcggctgcggagagcaagagccacaggctggcggagaaggtggccgccctggagggcgagaggatggacctccggcgccagttggtggaggaaaggagggaggccaaccaggccatcgccaaggtgcaggcggcgcaggcggaggccaaattggcgtgggcggaggggagtctcgccagccaacgcgccgaggaatgggaggtgcggttcaacgctctgcacgcccgcatggagagggccgaggcctctacgcgctcggaagttgagcgaacgcgcaaacagctcgtggactcataccgggagctgggtgcgcggactgctgacttcgaggtgcccgaccgagaagcgagccttcgcttcctcgagtggctgcaagaggaattgctggcactcccgaccatcgtggagggattcatgtcttttgcctccctcgtcacctgcgaaggggccatgaatgcgttgtcccgcaagggatgcaatcactatgagggcttcgaccggtccgatgaagactttgggcgcgaaatttttaaggtcgaagaccctgtggtgaaggattctgcgggggccctcttcgatcggatgtggggtcctcatggccgggaggcggtcaaggagcggtctgatcgggcgagagagcatatggcgcatgctgaggatgtcaaagacctcggaggtctaaacagtgcgccgcccgaggctgcggagggcagaccggtgctgccctcggatgctggtgaacgcccatcggacgtgcccgtgcctgctgctgtcggcgaagaccctgtgtcggcccctgtgccgacagtcaaaggcgctcatgaggtggtggcggagccggtggtcgaaggccctacggccgcggaggcgcccgcgcaggttcagggttttgggcctgcgtacgcaaccgctactgaaagtgctaattttgtggcggcttcgaccgtggttgcggaaaatgattcgggtgattctgtgtctaagttttttgagtctgatgattct

SEQ ID NO: 33375 - DNA, 3303 bp, Zea mays
  Peptide Sequence Number=SeqID_75154
atgccgtcttcctcctcgtctgctgcgaccacgccgacggccaaggcgacttccgaagatctctcgggcactgtggcggcggcggaattacgaccgggtgatacggtggaattcggtgtttcgcggatgtcgttggtccgcgtgcaagatatgcaacagttggtgtattttggcggcggggttggtcgagtcccggggccagaggaggtccccgagctcgagggcgaattggttgtttttgaggcatttttcatcgccggccttcgcctgcctgcgcatcgttttatgtcggaggttctgcagaagttcaaagtccagtatgtctgggcaacgacgtcgtatggcggtcagccttcggtggaagtcttcgccaagcaatacggtctgcattggcagaagagaaaaaatggacataagattgctcaattcggatcatgcactttcacgccgaagtccgggaagacttcgatggaagtggtggagctggtcccctgtgcccaaaataagtggggcaactggtgggactactggttctatgtttcggaggctgaagtcgaagatcacccagggctccctgccgccattatgtgctctcattactatgtggcatacccgccatttgaagtggcggaggatgatgaaaatgaaagggcccttcggatcgctgcccgcacgagtagtgggcgcgatctagttgaggaattcatagggtatggggtgtggcccttggcgcatggatgggcgttgggcaaagtatgccctcgcgagatgccctccctgggcgggcggaaggtgcgaagtccgctttttgctttggatgtgcgagggcgggatcctgccgcggttgtgcatgaggcggaggatggggcggtgagaattgttgggtgctacgtgccgaagacggaggcccagcggagttgggatatacgtggatccaacgaccgcctgaatagggtcttcgagttgaattgtttgccgtatggcggttatcccggggaagacgttgtcgaccacagcgggaaaaaaccagcggctgtgactgaagacgaccccgcgtcggaggccgccccagccactaagaagaggaagctaggtactgcggtgggagaactgggggtctccgatagttttgctatggagttgatggggacatgcgtggcccccgggggaaggatgtcttcgcccgagctccgggagtcttcggcgcggatgttggaggttaccgggggtcgatggcccaaaaacgttcctatcccccgcgcggctggcgaagacttctttacatctcgcatggctcgtgacttgagagtgtttccttacagacggaatattgctgttgttgtgtcgatagtgatgaacaaggatcaccaggatgctgcgcagaagcgtcgggcggtcatcaggctccccgacgctaggcgtgaagcgaagagagcgcgagggagtgcgaaggctatcgtccccggcggtagccagccgatgctggctgcaaagccggccgcgcctggatccagcaaggtgccggagagcgggaaggcggtcggcgccggtggaaccaagtctgccccggacggagctgtgaaggtccgggagctgccttcgacggggaaacgcgttgccgacttcggcatgaatattagcgtggacgactatctcgttgggtcgagtgaggggcaactggttgttgtcccacctgtggtggcaaccacggcgtcaaccgcggtgcttggggtgaagggtggcgctttcagcgctggcggcgagatttcggcggccactgccgtcaaggacgaagcgggcactatgtcccgccggctgagggaggcgtcgcagcagctaagtcaagcggccgacttcgccgaccgcgtggcgtcgggtgcccttactgcagatgtgtctgccgaagtcgagagactttgggcgcagcacgcggacgccgtccgggagaagtcggctgcggagagcaagagccacaggctggcggagaaggtggccgccctggagggcgagaggatggacctccggcgccagttggtggaggaaaggagggaggccaaccaggccatcgccaaggtgcaggcggcgcaggcggaggccaaattggcgtgggcggaggggagtctcgccagccaacgcgccgaggaatgggaggtgcggttcaacgctctgcacgcccgcatggagagggccgaggcctctacgcgctcggaagttgagcgaacgcgcaaacagctcgtggactcataccgggagctgggtgcgcggactgctgacttcgaggtgcccgaccgagaagcgagccttcgcttcctcgagtggctgcaagaggaattgctggcactcccgaccatcgtggagggattcatgtcttttgcctccctcgtcacctgcgaaggggccatgaatgcgttgtcccgcaagggatgcaatcactatgagggcttcgaccggtccgatgaagactttgggcgcgaaatttttaaggtcgaagaccctgtggtgaaggattctgcgggggccctcttcgatcggatgtggggtcctcatggccgggaggcggtcaaggagcggtctgatcgggcgagagagcatatggcgcatgctgaggatgtcaaagacctcggaggtctaaacagtgcgccgcccgaggctgcggagggcagaccggtgctgccctcggatgctggtgaacgcccatcggacgtgcccgtgcctgctgctgtcggcgaagaccctgtgtcggcccctgtgccgacagtcaaaggcgctcatgaggtggtggcggagccggtggtcgaaggccctacggccgcggaggcgcccgcgcaggttcagggttttgggcctgcgtacgcaaccgctactgaaagtgctaattttgtggcggcttcgaccgtggttgcggaaaatgattcgggtgattctgtgtctaagttttttgagtctgatgattctgtgagttcggtggtgtggactgaagagtcttcggatgaggacttggattattttgcggcattggatgtggctgcggcggaggcttcgccgtgtgtgatgggtgctgaggttctcggtccgagcgctgggcgtaggcggcaaagggcggtggcgaagcgcggagtgagtgaggtggagggtggtcgtcttcgtgtggacagggctggtaggcgggaattgttgtccttgccagatggggcgagtgtaggtgagggggaattgcgaagtctgtttgagggtgaggagctgaggataatgttgtttaactatagggagatgggtatcatcccgaaggttgaaccattgtaa

SEQ ID NO: 33376 - DNA, 150 bp, Zea mays
  Peptide Sequence Number=SeqID_75155
atggcgttccccctggatgttggtgatctgttccccacggtgcaggcaaatgttctttccctccctgcagcagcaccttggtggttgtcgagcagcacatcgcacttgcgcagcctaggtcacgacgttgtccacctcggttgggtttaa

SEQ ID NO: 33377 - DNA, 1254 bp, Zea mays
  Peptide Sequence Number=SeqID_75156
atggcgttccccctggatgttggtgatctgttccccacggtgcaggcaaatgttctttccctccctgcagcagcaccttggtggttgtcaagcagcacgtcgcgcttgcgcagcctcggtcacgacgttgttcaccccgttgtagaggactttataagctttccaaaaagtcttagtttactatttttggatgaagattgtgatacctatatttggttagttcttgattggttgattggtagtcttgtggttttaagtgttacgcttccatttgttagtaaatctgcacttttaggagactcggagttcgtcctagatgcaaaagtaccttgctggttatggagaggtcagctgaaggttggagttgtagaagatcatttagctcaagctgggcttgtgccgagcttgaatcctcttgtgaaggagtttctcaatgctgctgatgacaagcggaaggaagtcctctctaaaatagaagaggatgttgctaagctcagcgctaagaagctacaagtgaatgccgaggagagcagcgatgacttggctaacccaccgaaggtagaggagaagcttggtgctgtccctcatggcctgtccaccgactctgaggttgcccagagggaagccgagtctatctctaggaagactctcaggagctcagccgagaagtttgagttccaagctgaggtttccagactcatggacatcatcatcaactcactctacagcaacaaggatatcttcctgagggagctcatatctaatgcctctgatattaggttcctttcccttactgataaggaagttctgggtgaaggggacactgcaaagcttgagattcagattaagttggacaaagagaagaaaatcctctccattcgggataggggtattggtatgaccaaggaagatcttattaagaaccttggaacgattgctaaatctggcacttcagtgcaggaacaggagctgctcgagtctcttgtcgaagctgatacgagaaggcaggaaagagctaaaaagatggaagaaaagaaagtgtatctgcaactatacgaagcaatggaggcgttggtcaagatcaatctggagaccaacaagatcatggacttcatcaagtttgacgtcggcaacgtggtcatggtgactggcgggaggaacaccggacgtgtaggagtcatcaagaacagggagaagcacaagggcagctttgagaccatccacgtgctgcttggagctttttgctatgtctag

SEQ ID NO: 33378 - DNA, 534 bp, Zea mays
  Peptide Sequence Number=SeqID_75157
atggccggaatcgcccggtccacgcgtgcaggcgggtgtcctcgtcggcggcgagtataccggccaaaccacggcgaactggttaaatccgagggcacggtgagcttcacggggtcacgcagcgactgtgtgcacaaggaatcgaaggatggtggagtggtttacccggtccacgtactccggcgggggcgagagctccggcgagcgtggactggcttctccggcgaagtactctccgattccttgctcggggagcctcacggagcttctagtgccaaagtggctctagccagggtaacacctggggtgttacatcaggtgttattgatgagggcgggtgtccagttatgttctggtgacatcattgtgacgaaaaagtcatcgtttcagaagctccaagaaaagaatcagaaattgaacctttccaccaagagccagcctatagtgaacttgaggttgcgcactttacccacaagtcgtgattccctcttgcctcgggccgatcaaacccttaaacactaccaaggtgaatag

SEQ ID NO: 33379 - DNA, 609 bp, Zea mays
  Peptide Sequence Number=SeqID_75158
atgagaagggtaaaggcaataagaagcaaaagcacaacaaaggatgaggttacaaactcgcgagccaaagaagaggatacgaccaagagaaagaaggtcagcggtcctacagtcagcacgactttgataccacttatgtcacacccggttttgaagaggttgcgcactttacccacaagctgtgattccctcttgcctcgggctgatcaaacccttaaacactaccaagagttgagcaatagcataaagctagacaataataacccaaaaggtaatctaggacaagcggctaacccccttaacaagagcattgatacacacttgatgaagatgttgccgactctgatcttgactgatttggaggagttggaggttgccaaaaggacaggtgcaaaaggaaagaataacgagaaaagggaaactactctaaggccaacaaaaggcaaggggaataataagacatggagggtaggggtgcaagataagcatcatggtaaagttcaagggatgacaagggttaaggtgataacagacaaacacaaccaaggaggtattttagacaaaacgtgcgaggtatcaaagaatgggaagcaatcaatggtgaagtag

SEQ ID NO: 33380 - DNA, 207 bp, Zea mays
  Peptide Sequence Number=SeqID_75159
atgaacgtatgtgagctcactcttgctgtctcacaccccccacaggtcaagagcagggatcttcgaactagaacccacggtatgaagaagcacggaaagaatacggaggatggaatagagccgaagctgtgcgcaagggagcttcggcatgatggcagaaaagaggaaaccgacttaaagaggaaaagactatctagacccagatag

SEQ ID NO: 33381 - DNA, 348 bp, Zea mays
  Peptide Sequence Number=SeqID_75160
atggccaaaagtccgattgaaaagcgttgggcccttgggcgctggcgtgggtgcatcatcgggtatgccgtgcagatttgggtcggttattggcgctggcgctcggaactgcggagttacttcctcaccggtgttgacttccccacctcggatcgctgttggcagtgggcggcactcatcatccaatcttgttgctgggatcttcgaactagaacccacggtatgaagaagcacggaaagaatacgaaggatggaaaagagctgaagctgtgcgcaagggagcttcgacatgatggcagaaaagaggaaaccgacttaaagaggaaaagactatctcgacccagatag

SEQ ID NO: 33382 - DNA, 474 bp, Zea mays
  Peptide Sequence Number=SeqID_75161
atggagcagggaactcggccaggaaagggactcggaaccgggcgcggcggctggacgcagggcgagccatggagatgggcgccgagctccatggatgcagggaggagggaggagctcgcaggctggctggggatggaggaggagaaatccacgcgcgccatagaagggcttcgacagggacagggcgctgctgagaaatggagggagagaagcaagggggcagctaggctcttggccgaccggagttggaggaggaagccgcggcctgaacgtcggcgagccaggcgcggccatggctggggaagaggaacaacaggcgatttggagcgcggcgtgcttgaagatggagcagaggaagcagtgcagagaaggaacgtggggtgcagagaagagaaacgggcgtggaggagctgcgcgacgatgatgacgacgaccgacggcagccgcgaccagataaagctcccgcgcgcgtaa

SEQ ID NO: 33383 - DNA, 402 bp, Zea mays
  Peptide Sequence Number=SeqID_75162
atggctcgccctgcgtccagccgccgcgcccggttccgagtccctttcctggccgagttccctgctccatctctgccctctgccggcgctccagctcctccatccatggccatgccctgctgctcatcggtgctcgccgcgggagacgacgcttggtcgcccaaccttcctcctcaccggctgtcgctcccaatcttcagctcatcgactcaccgtcgtgtttcttgttctccctcgtcggtcggcctcgccgtggctaagtatgtccaccgtgctatgtgcttcggtctttggtcgctgcctcttgctcaccatcccctattcgatctcgtcgtcaagcttcgcctcagccttagctcgtcggtcacgctcgtcagatgtgcgatcgaggacttcagctga

SEQ ID NO: 33384 - DNA, 385 bp, Zea mays
  Peptide Sequence Number=SeqID_75163
agcaggctgcagcaccgccgcgccggtgtgcggcgtgccggcgtgtgccctccgtcgtctgcccgtctgcccgtctgttcttcgctgtctgctcaagacacggtgaacagtctgttcttcgccgtctgctcgtcttccccgacggcgccctagccctgttcggctgtccggcctccggcgcccacttgcccatcgccggtcggcggctcgcctccatggaagcccaagaaccggatgggcacgaagctagcagtgtgtcatcagaatccacttttagcactaggggtaggatccttgatgattacaggagttcattgaagccagcaacaattcaggctttgggagaaggtgatgatggtgacatcgagtccgtggaatttccaaa

SEQ ID NO: 33385 - DNA, 555 bp, Zea mays
  Peptide Sequence Number=SeqID_75164
atgggcaagtgggcgctggaggccggacagccgaacagggcgagggcgccgtcggggaagacaagcagacgaaaaagaaaaaacgggtacccgaattccgggtacccgtatccgacccgggattttcgggtactgaccggggcattctggacaaacgccgctgggccaggttggaagttgagctttgctgttgagccatggactaagggctttagcacgtcgtgtgcggtgccatattctgctggagccacaaagcatcaattattgctcgatgagaaggtggataactccaccgttgcatctgattctgatgggctaataacaacattattcatttccatcccacaagaaggaatatcaatggtcttcttcgaaggaggagttaacctcatatctcttgctggtgtttggccatacataacacaagacatgctcaagagtaaacttattcctgaagatgaatttgattggagtttacttttggtgggctcaggttcagatgaacaagaaaggtgcaaactgaagtatattggtgggacagacattatggtttag

SEQ ID NO: 33386 - DNA, 1248 bp, Zea mays
  Peptide Sequence Number=SeqID_75165
atggcgccctccttttgcgccactgtcaacccaacgcctcttggcgcactgtggacctccccacatgttgtgctcacgcccgcgacttgccctcctctggccgccagcccctcctctgcccccgccgccggccgcccacctccagccccacctctgcctgctgccctcctctggctgccgcctaggcgcccacctccagtcgtcgaggcctccagccgtcgaggcctgcgccgccctcctctggccgccgcccaggcgtccacctctggctgccgcccacctccagccgtcgaggcctctggtgatcgaccacaaggggagtcaggaagccagcagccatatgatccaactaaagatcctaagagaaaggcaaaatcaaatgatccggcatggaactattgttattggccggatttgaacaaaaaagatgtggtgaagtgcatcctttgtggaaaaattgttcattcaggtgttagaaggttgaagcagcaccttgttggtagtcatggtgatgttgctaagtgcccgaagacaacatcggcaatcagcaaagagatgagtgattatttgaagaagaatgctagacagaagcctattgagttggatgatgataaagagggtgaaaagacgatgaagttgaagtatttggagaaggggaaagtagagcatctcattcagttgttcagcccagttccggaacagcccaaaagagaaggctctcagcggaagcaagccaaaacaatcaacacgtgtcgaagtcttctaagtcaattgcatccatgcttcgcaaagcacctgaggatgtggttcatgagaggcattgcaagggcaacactcaaactacattgcagcgaaagagcaaggaggagaaggaaagaacagatatgtatgttgctgattttatttatgagtgagtctacagttagagaaggggatgatcttgcatgggctcatgtggatgatgcaatcggtgcttctagttcacttcaaggtcgcaacttcccaagaagagcccgatatgagtctgtttattcaaggcgttgtcaagctgctgctacacaggaggagagagttatggaagaggaagagcaaggcaacgagggcaatgaacaagatgatgaagagtacatgcctaatgatgatgaagaagtggatgactttggtgaatccccacataacagtccaactcaagctggtgctggtcgtgaagaaaatgcaatggatgatcttgatttgggagatatttag

SEQ ID NO: 33387 - DNA, 288 bp, Zea mays
  Peptide Sequence Number=SeqID_75166
atgccgcccctctgcaagccctcacagcaagctctggtgagtcctgctccccctctcccgccctcacagcaacatgagccgctcctctgcaagccctcacagcaagctctggtgagtcctgctccccctctcccgccctcacagcaacctgcgctgcccctctgcaacatgcctaatgatgatgaagaagtggatgactttggtgaatccccacatagcaatccaaatcaagctggtgctggtggtgaagaaaatgcaatggatgatcttgatttgggagatatttag

SEQ ID NO: 33388 - DNA, 789 bp, Zea mays
  Peptide Sequence Number=SeqID_75167
atggaggtgcggccggaacttgggtcgctaggatgccgcgcggagatgatccgcaagagcggcgcagcccacaccggccaaggggacacccgtttaggatcgggtgcccattggtgtctgcggtgcaaccgcagcgaagtcttgatcgaggtcgcgaccatcgatgttctggcggcgctcgcgggcccttttcaaggagacccgggcatcctctcccgcacgcctgcgattgagctctgcccggaggtcgttggtctgtgcgcccttactgagggcgagcgcacagatgctgacgcctcgtgttggcgccgggatgaccgcgtcttcgatctggtcgaggtagaatgcgccattccgagcagtcagtcgacgtcgtcccgccattgcttcatcgctcctggtgaagccgtggagcttggagggtgtcgcaacaattccctggccaccgacaatgcccccggatacgcccttgatggagtccgggacgtttgcgctgctgtgtgctgtcgtgcggcgtgcacagtaggagtacctggtactgggcgaccgggaacctgcggtgtggaggaagcagcttctccttccaccgcaaagtctaccgaagtcttggcacaatgctcaatgatctgcaccatcatgcatgggctaggggaagcttcttgtagaagggaagatgagtacagcacgctgctcggcacgggtgcactgtttgccagtagactgatcagacgtgtagtctgctggatgggtctgacaccgtctgccagcggatgggacatggcgcattaa

SEQ ID NO: 33389 - DNA, 693 bp, Zea mays
  Peptide Sequence Number=SeqID_75168
atgaacttccagagggtctctcccgggctcctgcctcaccgcatggaggtgggcctccacaccgtgctgctggtgcggccggaacttgggtcgctaggatgccgcgcggagatgatccgcaagagcggcgcagcccacaccggccaaggggacacccgtttaggatcgggtgcccattggtgtctgcggtgcaaccgcagcgaagtcttgatcgaggtcgcgaccatcgatgttctggcggcgctcgcgggcccttttcaaggagacccgggcatcctctcccgcacgcctgcgattgagctctgcccggaggtcgttggtctgtgcgcccttactgagggcgagcgcacagatgctgacgcctcgtgttggcgccgggatgaccgcgtcttcgatctggtcgaggtagaatgcgccattccgagcagtcagtcgacgtcgtcccgccattgcttcatcgctcctggtgaagccgtggagcttggagggtgtcgcaacaattccctggccaccgacaatgcccccggatacgcccttgatggagtccgggacgggaagctttcttgtagaagggaagatgagtacagcacgctgctcggcacgggtgcactgtttgccagtaaactgatcagacgtgtagtctgctggatgggtctgacaccgtctgccagcggatgggacatggcgcattaa

SEQ ID NO: 33390 - DNA, 144 bp, Zea mays
  Peptide Sequence Number=SeqID_75169
atgatgcttatattatattccatgctttacgtgagtccttcgtcatcacttgttatgtttacgaagggtgttctggacaaagaaagcttgtaccttaaaataggaggatacaagaagctggagtggttgtctgaaggcttttga

SEQ ID NO: 33391 - DNA, 309 bp, Zea mays
  Peptide Sequence Number=SeqID_75170
atgagcagatggatcaacaattcaaatagcgggattcagaaacctagtgactggaatggcattgtaaccaataacttaaatgatggaattatttcttcagatgaaaacaatcttgtgaggggagctgagcatgctgcgataacaagaatcacatacgagactgctgtttctgggagtatcctaactcttgtttatggtgataatgggagcaacctggccaagcttagagagggtgttctggacaaagaaagcatgcgccttaaaacaggaggatacaagaagctggagtggttgtatgaaggcttttga

SEQ ID NO: 33392 - DNA, 129 bp, Zea mays
  Peptide Sequence Number=SeqID_75171
atggcggcggcctcccgtcgagcaacggtagcggcctcccgtcgagcaaagggtgttctggacaaagaaagcttgtaccttaaaataggaggatacaagaagctggagtggttgtctgaaggcttttga

SEQ ID NO: 33393 - DNA, 135 bp, Zea mays
  Peptide Sequence Number=SeqID_75172
atggcggcggcctcccgtcgagcaaccatggcggtagcggcctcccgtcgagcaaagggtgttctggacaaagaaagcttgtaccttaaaacaggaggatacaagaagctggagtggttgtctgaaggcttttga

SEQ ID NO: 33394 - DNA, 150 bp, Zea mays
  Peptide Sequence Number=SeqID_75173
atggccgaagtctgggagcggcaagatattctttctctaattgctaaacttgtactaaggggtgttgaacaaggtgttctggacaaagaaagcttgtaccttaaaacaggaggatacaagaagctggagtggttgtctgaaggcttttga

SEQ ID NO: 33395 - DNA, 774 bp, Zea mays
  Peptide Sequence Number=SeqID_75174
atggcgggtgccgccgccacctcacccttggtgctcgccgagctcgtcctcaaccctgtcgtgcccctgcgctcggtcctcgttgaagtcacgcctgggagcaggttgctgtttctcctcccatggactcgtctcctccatctcttcatctccctcacgcaagcttcctccctctttttatggcgcctgcagcagggagtcctccatcccctctccatcttctccccatgttgcttactattttctccgtatgttgatgtgttcgtattcaaaatggggtggatgggtagagaagacggaccattttttgtagttggttcaattgtgtatttgagcggcgtcagggtcacccagcagacggcgcgcctgaccagtctgttggcaaacagtgcacccatgccaagcggcgcacagtacccatcaccccttctacaagaagcttcccctgcacgccgaggatacggagatctcgggcgtcagggcacaagaagattaccccagcagcaaacattggtggctccaagcgctatattctttatgtccctgggccaacatgtcggggtccagcacctttgtgcatgccccccttcaactataaaaggggaggtgtggaggaaggtggccacggaggtatcggtggagctgcaacccctgcgcgagaagtgggggctcctactggccagtctgatctttcagggtgttctggacaaagaaagcttgtaccttaaaacaggaggatacaagaagctggagtggttgtctgaaggcttttga

SEQ ID NO: 33396 - DNA, 384 bp, Zea mays
  Peptide Sequence Number=SeqID_75175
atggcgggtgccgccgccacctcacccttggtgctcgccgagctcgtcctcaaccctgtcgtgcccctgcgctcggtcctcgttgaagtcacgcctgggagcaggttgctgtttctcctcccatggactcgtctcctccatctcttcatctccctcacgcaagcttcctccctctttttatggcgcctgcagcagggagtcctccatcccctctccatcttctccccatgttgcttactattttctccgtatgttgatgtgttcgtattcaaaatggggtggatgggtagagaagacggaccattttttgtagttggttcaattgtgtatttgagtaagcttaattgcatgaagcccacgccaaaagattcttgtgaagtatag

SEQ ID NO: 33397 - DNA, 270 bp, Zea mays
  Peptide Sequence Number=SeqID_75176
atggagcgagattgccggcggcgcgagggtcacggaggctggggcgtgcgcggagggggcatcggggcggagccatggtgtaggatgcggatgcgagatttggggcgcaggggcgcggacgcgcgggtggaggccagaggcgccagggcgggggcacggtggatccgaggcgccttccttaacgggcggtggggaggatggcgggggccgcgagcgttgatgggcgccgaggcagaaccgtgcgccatatactgtggacgtctacgatag

SEQ ID NO: 33398 - DNA, 1551 bp, Zea mays
  Peptide Sequence Number=SeqID_75177
atgaccacacactcccccaacacgactgataagctcaacgagaaggaagaaggtggcttgccaacatcgctcctcctcaacgtcggccgatgggctcaccgcaactgcacatcggtttgcgtcaacgtttggggttgcaccagcgaggatggagacagtcgcctcatgcctcacatcattccatcaagagaggcccttctcccgaagccgcagacgcagaaaacggctctgcatatggaggcgaagaagaagccgtcggcccccgccgccgtcggagccgcgccgccgccgccgggtaacgggtacttcagcaccgtcttctccgcgccgactgcgggaagcgcaagtgacgcaaagcatgcggacttgtacacgatgctgaacaagcagagctccagagggcagaatggcagagatggcaaatcccacagccgccctacttacaaggatggcaaacatgctcatccaaatgagccatcagaatctccttactttggctcatccgtgcattacggtggtcgggagttctacagcagcgttttacggaagcaaccagccaatgaaccccatacggattacaagggggacaacccggatggctctgctaccagaggtgattggtggcaagtatatggcgcacggttctgcctcggcgcccatcaacgctcgcggcccccgccatcctccccaccgcccgttaaggaaggcgcctcggatccaccgtgcccccgccctggcgcctctggcctccacccgcgcgtccgcgcccctgcgccccaaatctcgcatccgcatcctacaccatggctccgccccgatgccccctccgcgcacgccccagcctccgtgaccctcgcgccgccggcaatctcgctccatgatccccgcccccactcctccagcaatcccgaggtcctcgaggtgtccacttgcaatggtccctttcctccgtccccactcctccggcagtcccagatggaggcgccgacggcctccgacgaaaccctagccgacgtgctcgaccacctcaagccccacactatcgctctcctccaccttctctacagccgctgcccacctctagatccgcctcctccctacgcgaaatggcccctttcctccgcgccgccccagccccagaggttgtgcccccgcacccgccccctagcccgagacagtcgcctccccgagcatcggcccggagacaccgtcgtcctacccctccccgctgcctcgcacattcctccccccgcgtgcgtgagacaacgacgagcgaaagcctccaagcactgcttcaacgacggcaactgtgacccagcacgcaaggaccgggtggtggtcgaatcgagagaggccatacccctgtccttcggcaactccaccaccaaggatttagcggctgccatgaagcctaagcccaaggccaaggtcaggaagaaccccatgaagcagtcgcgcttcgacttcaccaaggtggacgtcgtgcttctccccatcgtcttcctcgtcgtctgccccaatgttggcaagtcaaccctcttcaacaggtga

SEQ ID NO: 33399 - DNA, 402 bp, Zea mays
  Peptide Sequence Number=SeqID_75178
atgccgccacgcacaaggctaacggcacgtaagtctacgggaccaattggagtgcctcggcatcaactggctccccgatatgaaagcagcagtagtggaagtaatgaccccatcggagatcttgaagcccaagatcagcttgctgatcgagacttagcacttgactgggccgtacagtctcgtttgctagcatgtgctaaggaagcaagggctcaggcccgaattgaagaacttagctcaactgtcgataacctgcaggtttactgcaatacgttgcatgaggaagtccatatactatactcacaactacaccctagtgtgcctgcacaccctgctgaggcggaagccggaccctctcacgttccgggacgcgcgctgggtggggagttagaccttttttga

SEQ ID NO: 33400 - DNA, 486 bp, Zea mays
  Peptide Sequence Number=SeqID_75179
atgccgccacgcacaaggctaacggcacgtaagtctacgggaccaattggagtgcctcggcatcaactggctccccgatatgaaagcagcagtagtggaagtaatgaccccatcggagatcttgaagcccaagatcagcttgctgatcgagacttagcacttgactgggccgtacagtctcgtttgctagcatgtgctaaggaagcaagggctcaggcccgaattgaagaacttagctcaactgtcgataacctgcaggtttactgcaatacgttgcatgaggaagtccatatactatactcacaactacaccctagtgtgcctgcacaccctgctgaggcggaagccggaccctctcacgttccgggacgcgcgctgggtggggagttagacctttttgagccccctccttctttgaggttggttgacgtctggactcccacacctgacgatgaggccgccaagagtaatggaaagcagggctaa

SEQ ID NO: 33401 - DNA, 537 bp, Zea mays
  Peptide Sequence Number=SeqID_75180
atggcgccgtttcctgatgtcgcgggccacgaagaaggcgatggccgcggcgatgaggaggagtgcgccgccggcgacgaggaggcccgtgcggagcgcatgcgagacgcctccggaatagcctccgtcttgcgaccccggatccccggatccaaggatggcgcggagacgacgggcccttgcgcggaccccgggtccaaggatggcgccgcggaccccggatccaaggatggcgcggagacgacgggagcaggggaaggggcgcccttgcgagacgatgggcccttgcgcggagacgacgggcgcttgcgagacgacgttggcaggggaaggggcgccgaggacttgcgcgtaggagggcaaggatggcaggggcgagtgggggcgaggatgccggagagcgggcgagggcaagaatggtggtgtaatccctggaatggcacccttccttcgatggagagcggggcgagggcgaggatggcggcagagacgcgaatcgcggaggagggggcatggcagaactgtgcaccaacctaa

SEQ ID NO: 33402 - DNA, 2805 bp, Zea mays
  Peptide Sequence Number=SeqID_75181
atggcgacgacgtgccaccatgccatgccgctgcgcgactgcaacgtactgatcaggaccctggccaggcgcggcagtttctcacgcgtcatggcggtgtactacgatctccgtgcgcgaggcctcgccgcagacagctacacctacccattcgtgctcagggcaatcggcacgatgaagctgtccgtcgaggggcgcaaggtgcacgcggccgcggtgaagaccggcttccgctgggatgcgtacactgcatgttcgctgatggagatgtacacgatgctgggccgtgcggattccgcacggagggtgttcgatgagatgccgcagcgattcctggtgctgtggaatatgatgatgaggtgctacatcaggtgcggtcgcttcacagcagcagttgcgttggctgtgcagatggagagtggcggtgccacacctgacagggtgacattggtgaccgccgttaccgcttgctcaagagcaggcgatctgaacttgggaaggaggattcattcatacatggatggagtttttggattcagtctcccagtcgcaaatgcgcttctggacatgtatacgaagaatggttacttggaagaggcggtgaagatgttcgagcaaatgccagagaggaacatcatatcttggactatactagtgtcgggatatggcattgctggtcagttggacaaggcaagagtgtttttctaccaatgcacacagaaggatctaatcctgtggacttcaatgatcaacgcatgtgtacaacatggaagctttgaggaggcattgatattgttccgagacatgcaattacaacgtgtggagcctgacaagttcactgttgtcactctcctcacatgctgtgccaacattggtgctcttgatcaaggtgaatggatccatcagtatgctgaaagcaggaatatgaagattgatgcagttcttggcacagcattgattgagatgtactcaaagtgtgggcatgttgacaagtcactgcaaatctttgggcgaatgcaaggcaaagatgctgcagcctggactgccatcatctgtggtctggccacaaatggtcaggccagcaaggctcttgaactgtttgaagagatgcagagaagcaaaacaaagcctgatggtatcacgttcattggagtattgagtgcttgttgccatggtggcttggtcgatgaaggacagaggtatttccaagccatgaaggaggtctatcatatagagccgagaatcgaacattatagttgccttgtcaatcttctaggacatgctggtctactgtatgaagctgagaagttgatcactgacatgcctgttaacaatgacactatgcctctgtttggtgcactcctcactgcttgcaaagctaatggcaatgttgagatgagcgaatggttgacaaaaagaattgccaaggaagattgttccccaaatcctgacgttaatgtactcatgtctaatgtgtatgcaacagcaagtcgatgggaagaagcaataagagtgagaagtaagatgacaaatcctgcggtcaagaagactgcaggttgcagcatgattgagacgtccacagggattacaccaccattcttgccctcgcccgctctccggcatcctcgcccccactcgcccctgccatccttgccctcctacgcgcaagtcctcggcgccccttcccctgccaacgtcgtctcgcaagcgcccgtcgtctccgcgcaagggcccatcgtctcgcaagggcgccccttcccctgctcccgtcgtctccgcgccatccttggatccggggtccgcggcgccatccttggacccggggtccgcgcaagggcccgtcgtctccgcgccatccttggatccggggatccggggtcgcaagacggaggctattccggaggcgtctcgcatgcgctccgcacgggcctcctcgtcgccggcggcgcactcctcctcatcgccgcggccatcgccttcttcgtggcccgcgacatcaggaaacggcgccatgtcgcggcgcggggtgactggaagatgacgcctttcgtcgtggatcttggtttcggggaggagtccatactccggggcctgacggaggccaatatcgtcggccgcggcgggtccggccgcgtgtaccgcatcaccttcaccaaccggctcaacggggccgcaggcgcgatacggaccaccgggaaattggacgggaagctggagcgcgagttcgagtcggaggccgacatcctcgacaacgtccggcacaataacatcatcaggctgttgtgctgcctctccggcgccgaggccaagctcctcgtgtacgactacatggacaacgagagcctggacaagtggctccacgacgacgctctcgccgccggtgagcacccaatggcggcgagggcgcggtctgcacgccgccagcggctggactggccgaccaggctcaaggtggccgtcggcgccgcgccggggctgtgttacatgcaccacgaatgtgtgtcgcccatcgttcatcgcgacgtcaagacgagcaacatcttgctggactcggagttccaggccaaggtcgctgacttcggccttgccaggatgctggcgcaggccgaggcgccagagaccatgtccgtcgtggccggctcgttcggctacatggctcctgttgatttcatctcctctcactttctttctgttcgattttggcccctgcagattgcaagaacgggactgctaagcaagctaagatttcattttttctggatcaatctcaaattaggatttctcggggagcggagggtcggctag

SEQ ID NO: 33403 - DNA, 193 bp, Zea mays
  Peptide Sequence Number=SeqID_75182
atgaacgtatgtgagctcactcttgctgtctcacacccccacaagtcaagaacagaactcctattatatagtaaagatgtgacattcgtttctgtaccactattcatcatatgtgtgagacttcgtcctagcacacctggtgattatttcgcgcctgggttttggacccttaaaactgggtatgacagatgtg

SEQ ID NO: 33404 - DNA, 495 bp, Zea mays
  Peptide Sequence Number=SeqID_75183
atgaacgtatgtgagctcactcttgctgtctcacacccccacaggtcaagaacagaactcctattatatagtaaagatgtgacatttgtttctgtaccactattcatcatatgtgtgagacttggtcctagcacacctggtgattatttcgcgcttgggttttggacccctaaaacccagtgtacaaggaaggtattgaggaacaaagaagttgatcagggaccaagtaatgatatttccagcatccccaatcagacaaccacatcatcatatttgaccccatacctgggtgaggagtacacgctagagtcgaggacgactctattgcaagaaggggaggatgatgaggacatcactgccattgatacaaccgcagcggcaacccttcacaagttattactaagcaaggacacaccacccgattacttgaaacaggaccccgacttcattagatccgttcaaggctgttcttggcacggcaatgagagcacctag

SEQ ID NO: 33405 - DNA, 594 bp, Zea mays
  Peptide Sequence Number=SeqID_75184
atgaacgtatgtgagctcactcttactgtctcacacccccataggttaagaacagaactcctattatatagtaaagatgtgacattcgtttctgtaccactattcatcatatgtgtgagacttggtcccagcacacctggtgattatgttagcgcccaggttccagcgtttaggtctgcgcaagcaaaccctgatgatgctatgagtgatgatattttgatggatgcaaatgcgatgtctcttagtggtaatgtgtcgggggaatcagactttgggtcgtggtcttcagagggtggaaaattggggagccctttttcgtggatggatgatgaatcctttgaggacgatttagactattttgtggcgttggatttagctgcagcggagtctccgttgaggaccccccctgcgaagcaccggggacttcaatcggtgcattcccagttgacttgcgggggcgaaaaaagatgggggtgtcgaaacaaaacatcggtgagtcttcgcaaggtgttagaagacatcactgaatgggaatggagaggtcacgtcttcggatcgaaccacggctggattagggtgcccgtcgcgaattaa

SEQ ID NO: 33406 - DNA, 429 bp, Zea mays
  Peptide Sequence Number=SeqID_75185
atggggaagacggaggggtacatggacgcgagcagcgccgccgcctcgttggacgccgaggccgagcgcgccaggagctccctgaccgccgagctccgcgccgagcgtgccctggaggcacggctccacccggggcggaccctggcgtcgctcgacgagctccacctctccggcctgaacccgacgagctccacctctccaccgtcgcaacttcaacttcagcttcctggacgagcttcacctctccaccgtcgcgacttcaacttcacggatctgaaggcggagccgacgagctcgttcctggacgcgaggagcccgcggtggggcgggctcggcaagtacctgtcgatgcggggagaggggaacacgaggcaggggcaggcggaggcacaggctgtgaacgctgacactattgtcttaatagagtag

SEQ ID NO: 33407 - DNA, 498 bp, Zea mays
  Peptide Sequence Number=SeqID_75186
atggggaagacggaggggtacatggacgcgagcagcgccgccgcctcgttgtacgtctggctggagaacgcgagcggcgggagggggagcagtcccggcagcctgcgggtgcgggggagggacgccgaggccgagcgcgccaggagctccctgaccgccgagctccgcgccgagcgtgccctggaggcacggctccacccggggcggaccctggcgtcgctcgacgagctccacctctccggcctgaacccgacgagctccacctctccaccgtcgcaacttcaacttcagcttcctggacgagcttcacctctccaccgtcgcgacttcaacttcacggatctgaaggcggagccgacgagctcgttcctggacgcgaggagcccgcggtggggcgggctcggcaagtacctgtcgatgcggggagaggggaacacgaggcaggggcaggcggaggcacaggctgtgaacgctgacactattgtcttaatagagtag

SEQ ID NO: 33408 - DNA, 489 bp, Zea mays
  Peptide Sequence Number=SeqID_75187
atggaggcaccggactgtccggtgtgcaccggacatgtccggtgcgccaacggctccaagactgccaacggtcggcttcgccatagaaggaatgaaatcgggcaccggacaatgtccggtgtgcaccggactgtccgatctgagcaaacggaggaaggagttgaaatagactccaagcccagggttatgaaggctggggagcaccgggaggataaggagggggaatgttttgtccggtttggacatggtcgtggcctgactccttctggtataaccgttaagaaaaaggagatcggaagtcagatggaggtccgctgccaaaccagcttttgccagaatgaagatggtttccccaagttggtgagagcatgcacagttcgcctcggaatcaggagccagccagagtatgatggtcgtgaattcgtcgagcatggaacaaagaagtgtgtcgtgaccattgtcggcgtttcgagaccggggggtccctaa

SEQ ID NO: 33409 - DNA, 495 bp, Zea mays
  Peptide Sequence Number=SeqID_75188
atggaggaaggggtgttggtgaagtccttcggctctagatcaataccacacttctcactatgggttcgcaggcggcgcggtggcgttgagcgcccgtcgttggtcaccattgccgcatcgggatcttgtgagagggtggcgtcgggaagtgggctcgggggtggggcgacgtgtcagcgaggaggtataacttgtgaggacatgaaattttttgctggacaaggagaaggcacgctgggtgggaatgcgtggcccatgtatggacaaggtggaatgcgtggcccatgtatggacaaggagaaggcgcgctgggtgggaatgtgtggcccatatagatggcagaacacgtcagaggcagaacacgtcaaaggcaaagatgatccacaaaacagtgacggttgcatacgattgagggagaagatgggtgagaaggagtacagattcctagcaactcagttgattaacctcatcaggcaccacagagcaactaagtag

SEQ ID NO: 33410 - DNA, 1308 bp, Zea mays
  Peptide Sequence Number=SeqID_75189
atggcgaccagcgacgggcgctcaacgccaccgcgccgcctgcgaacccatggtgagaagtgtggtatcgatctagagccgaaggacttccccaacaccccttcctccatcggcgtgacatcggccagctcatctgcgacgacgaggcatcttcgaccgacttctcgacaccccatcctccatcaatgcggctccagtaccccttcctccatcggcgcagcagcatccaattcatctacgatgacaaggcatcttcgaccaaccacgccctactacaagtggtgtcagtccatctcagataagtggactcaagggggcacatacaaggatgttgagccccgacatgtgggcacaggagcaaaccagatggaagtaaccaacgcctgtcacgccaggcacgggcgtactgcctgccaatggaatggacaggcacgccgcctgcgggatggcctggtcgccgcctgccagcggagtggacatgacacattaaatgctgaggcagcacatcgtctgtcagtggaatggacagagctcattaaatgccgaggcggcccatcacctgccagtggaattgacaggcagcgcgccttatccgcaataaatgcagaggccgcgcggcccaaacgccttacgtcaggctccgcccgctggcttacgtcacgggcagtaggccacgtggcggcatcggttctccgattgagcggggagcacaagcaatccccggaccctgctgtgagtggcctggaccccacacagaggggtccggaacccatcctaggggtccggtttgcgcccgtggaggtcccagacctctctcggaggtccggtctgcatatacaggggtccggcactctcccatgggggtccggactcactgttgatatcttggagtatatcatcttgtctagccacgtggcgaccccagagctgtccacgtggtggggtcgggtgctgtttaccacgcgaccagagatagtcgcgtgggcaccgcgtcttcacactgtagtaaggggcaaaccaccatattttgatggtgaagattattacatgtggagtgataaaatgaggcatcatctaacctcactccacgaaagtatatgggatattattgagtttggagcgcaggcaccacaggtgggcgacgaggactatgactcggatgaggccgcccaaattaggcattttaactcccaagcaacttctatactcctcgcctccttgtgtcgagaggagtacaataaggtgcaagggttgaaaaatgccaaagaaatttgggacgtcctcaaaatggcacatgaaggggactag

SEQ ID NO: 33411 - DNA, 2409 bp, Zea mays
  Peptide Sequence Number=SeqID_75190
atgatgcgcggcttcctccgcgccggaaagccaacccacgcactcaccctcttccgccgagtgctccgcgatcgcctcgccgtcgacgcgcgcaccatcgtcttcgcagttaaagccgccgccacttcctcctcccctacggaggccatccattgcgttgccttcaagcgaggatttattgggcagagcgtgctcgcggggaacgcgctggtgcacatgtacactagcagcatgttattacccgacgcgcggaagctgttcgacgaaatggctgacagggacgtggtctcgtggacaacgctgattgacggatacgcgcgaggtggcttgcccgatgaggcctggcgagtattctgccggatggtggttgctgagagtgtgtggccgaacgaggttactctggtcgcagcagcctcggcagctgggcaaatggggctacttgggttggggaggacagtgcatcagtgtatcgtggagagtggtggacgcatgagcgttaacttggagaatgcgctcgtcgatatgtttggaaagtgtgggtgtgtggccgcagcgaaggaagtttttgatgggatgcccatcaaggatgtatactcttggacgagcatggtcagtgcttatgccaagtgtggtgatttggagaatgcagcgaagcttttcaaggaaattcctaataggaatgtggtttcttggagttgcatggtcgcagcttattcacatgcaaatatgccagatgaagccattaggatattcaatgacatgattgcagcaggtgtggagccgattgatgctacacttgtgagtgttctgtcagcatgcgctcagctgtgttctttggatgttggtacatggttatatgacacttacattgtcagtcataaggttgagcttacaccgaatctaagcaatgcattcattgatatgtttgcaaaatgtggagatgtcggtgcagcatcaaggttatttagcaatatggaggacaagaatgtagtaagttggaacacaatgatcatggcacatggtttgcatggtcagcctgaagaagcccttcatctctttcaagaattcaaaggaaacggtattttgcctgatgaggccacatatattggggtactttctgcgtgcagtcatggtggtttagtatcagaaggacggtgccatttcaaagagatgaagatagtttatgggattgaacccagggccgaacattatgcatgcatgattgaccttttgggtaaagttgggcttcttcaagaggcgtttgaagttgcaaggagtatgccagtaggagctgacgaggctggttggggtgctcttttaaatgcttgcagaatgcatggtaatgtagagattggcaaatgtgcagcggataagctagcagggctggatccttcagacagtggaatctatgtacttatgagtcaaatatatgcaagtaaaagtaaatggggccaggtaaagatgctgagaacagtgatgagagatagaagagtaaagaagaatcctggatgtagttctatcgaagttgatgggaaatgtcatgagtttttggtggcagatgtttcgcatgttcactcagaagatatatatgctgcactggggaatatttaccttcattcaaaggcagaaggatctggagtcagcttctactgtggtccctgcactcaatttcttccacagaatcttgaatttttctccattggtgaaaatgaagtactacaatgcgtgtctgttccacaaggtggagaaggatttcttggcacaaatccaactggaactggcaccgatggtgattccgtatacaaatttctctatggtgatcaagctcgattttttgatgatgagatccgaccagagttgaggcattctaaaactggaactgttgctatggccagtgctggtgaaaactgcaatgcctcgcagttctacattaccttgcgggatgacatggattaccttgataaacacactgtgtttgggatggttgccaaaggttttgatatgctgacaaaaataaatgaagcttatgttgatgataaaggaagaccattcaaggacataaggacgtacttgggcaaatcttcctatccaagttccaaaaaaggcaaaggctttctttccactgttttgatttcagaagtggagaatggagcccacactctgttgatctgttctagacagacaagtggatcttgggtcaaagaaaataaggatacacatagcttggatgatcttttttatgatcctcctcgacttgctgaacttattcccgagaattctcatacaggaaagccacattttgaggttgtagaagagcgtttagaggatacttgggttcctttggaccaaactgtgggaaaccctaaccctgtcttagggatgagtgttgtattaatagatttgaattaa

SEQ ID NO: 33412 - DNA, 1944 bp, Zea mays
  Peptide Sequence Number=SeqID_75191
atgccgtcgccaccgacattggctcctccctccccgcgtccggcgtggaacacgaactgcaaccttgtggtgacccaccctctgctatccgtcctcgagtcatgcgcctccttccgccgcctccttcagctccaggcactgctcaccgtctccggcctcgcctccaaccgcttcccagcctcccgccttcttgccttctgcgcgctttccgacccgccgcgcctcgcccacgctgccgccgtcctcgctcaatgcacagaggggcccaatgcatacatgctcgccaccatgatgcgcggcttcctccgcgccggaaagccaacccacgcactcaccctcttccgccgagtgctccgcgatcgcctcgccgtcgacgcgcgcaccatcgtcttcgcagttaaagccgccgccacttcctcctcccctacggaggccatccattgcgttgccttcaagcgaggatttattgggcagagcgtgctcgcggggaacgcgctggtgcacatgtacactagcagcatgttattacccgacgcgcggaagctgttcgacgaaatggctgacagggacgtggtctcgtggacaacgctgattgacggatacgcgcgaggtggcttgcccgatgaggcctggcgagtattctgccggatggtggttgctgagagtgtgtggccgaacgaggttactctggtcgcagcagcctcggcagctgggcaaatggggctacttgggttggggaggacagtgcatcagtgtatcgtggagagtggtggacgcatgagcgttaacttggagaatgcgctcgtcgatatgtttggaaagtgtgggtgtgtggccgcagcgaaggaagtttttgatgggatgcccatcaaggatgtatactcttggacgagcatggtcagtgcttatgccaagtgtggtgatttggagaatgcagcgaagcttttcaaggaaattcctaataggaatgtggtttcttggagttgcatggtcgcagcttattcacatgcaaatatgccagatgaagccattaggatattcaatgacatgattgcagcaggtgtggagccgattgatgctacacttgtgagtgttctgtcagcatgcgctcagctgtgttctttggatgttggtacatggttatatgacacttacattgtcagtcataaggttgagcttacaccgaatctaagcaatgcattcattgatatgtttgcaaaatgtggagatgtcggtgcagcatcaaggttatttagcaatatggaggacaagaatgtagtaagttggaacacaatgatcatggcacatggtttgcatggtcagcctgaagaagcccttcatctctttcaagaattcaaaggaaacggtattttgcctgatgaggccacatatattggggtactttctgcgtgcagtcatggtggtttagtatcagaaggacggtgccatttcaaagagatgaagatagtttatgggattgaacccagggccgaacattatgcatgcatgattgaccttttgggtaaagttgggcttcttcaagaggcgtttgaagttgcaaggagtatgccagtaggagctgacgaggctggttggggtgctcttttaaatgcttgcagaatgcatggtaatgtagagattggcaaatgtgcagcggataagctagcagggctggatccttcagacagtggaatctatgtacttatgagtcaaatatatgcaagtaaaagtaaatggggccaggtaaagatgctgagaacagtgatgagagatagaagagtaaagaagaatcctggatgtagttctatcgaagttgatgggaaatgtcatgagtttttggtggcagatgtttcgcatgttcactcagaagatatatatgctgcactggggaatatttaccttcattcaaaggcagaaggatctggagtcaggtctgtattttga

SEQ ID NO: 33413 - DNA, 1889 bp, Zea mays
  Peptide Sequence Number=SeqID_75192
gatcaggaactacttcaaatgtaccggaagaccaatctggaggaggtgatactgaagaaatacagttggattacagtggtggagatcttgatgacatcttagattttatgagaacctcatcgtgtggtgatgacattgatctgcaagagagaaatttaaacagaacacctcctgatttacatggggcaatccgaagtcttgatgatatcttgcaaatgatgtattccccacagcactttgcaggcattgatggcgaggatcatataacttactcaaggaggagcgataggtccattcaagttgccaacacacagaaggcagaggctgagaagaaggctgagattgagatgaagaatgctgaagctgaggaggctgagaagagaaagactgaagccgaacaagctgataagaagaaggcagaagaagctgagaataagagaaagactgaggccgaagtagctgagatcatgagaaaggctgcagctgaagaagctgagaagaagaaggaagaagaagctgaggataagagaaaggctgaggctcacaacacacagcagcttttttcacagccacagcccaaccaaacagaccctgaggccgaagaagctgaggttaagagaaaggctgaggccaaagaagctgaaattaagagaaaggctgagaccgaagaagctgtgattaagagaaaggctgcagctgaagaagttgtgaagaagaaggctgatgccgagaagaaggttgaagcggaggagaaaaggatacaggttgcaatccagaaacagctgaaggacaacatcaaagctttgaaaaagccggtgcccgttgccaagttaaagaagatgttccagttacaaatgtcaaaagaatatgctgagcagcgccaacagtatgaggataggttgaacatgcttcgtcaggaggccaaagctgagattgacagtttggagaagagcattgatggccaggcaggacccagctcatcatttgatgatatccagttcccggcggagtctgatgatgatatcaacaatttgacccaaccaattcgactttctcaagacgaagtctcagtaggccaggctgatttcagtgagtttcaaaggatgatattcaagcgcctaggtgatagagtgctgaagaagcttagggagtacatatccccgttcaagatccctcgtaatcgacctgagatactcctggccaaggctgttgcacttaggcggaagatcgcctctgatcctgagctgaaaaggagaattttgttggagtttggccttcttgttggactcactggcgaggaaattttaacatatttttctaatgacacccttggtgagtcaggaatcatagactttttcgtgcactgcatgcgacatgatgatattgtgcacaaggttgattcttgtggatacagagtgtttctgaccactagtttttatgtttttgtccctatcaaagatggtgctcactattttgtatattgcttcaattttatccataagcgtattgatgtgctggactcgaacgactacttcctgaattgttctaatcaggaagaacggcacaaggctgtctttgccaaaatcccaatcattgatgcagccttccagaaagtttccaacctcaagttacccagagttagcaagtggaggcgaccttttattgatgtgccaaagcaagaaggtcaaagcgattgtcttttttttgtatggaagtacatggaatattatgatggggacaaaatgaccaaggaaaacaatccgttcaagggcccgatatacagatgtgagctgttgcattacgagatcttccaccctttgaaccaagctggaattcctggatcgcttgataagtttagaattggtggtcgtccgttgccaattgaatga

SEQ ID NO: 33414 - DNA, 2347 bp, Zea mays
  Peptide Sequence Number=SeqID_75193
ggaagatacgccgcgcctgcgccgccgccagcgggagaggcccgtggacctcggcggcctgctcctgtcgtgcaccaactccgtaaccggaagggcagcgttcggcaaccgctgcagcagggagctcacggcggatttcctgtccgccatctccgtggtgataagcaacatctcggggctctgcgtctcggacctcttcccgtcgctgcggttcgtggacgccctcaccggcaccaaacgccgcctgcggagggcgcaccagcggctcgaagacgtgtttgccaggatcatctctgacggggaggcacggcgggcggaaaggaaggggactggtgctggtgcaggaggagacgacgacgacgacgaccttctaagcgtcatgctgaggattcgcgacgagggtgagtttgagatcccgatcaacaacacaaacatcaaggcaatcatcctggatttattcacaggagggacggagacgacttcgtcggtggccgagtggctcatggcggagctgatgaggaaccccgacgcaatgcacaaggcgcaagacgaggtgcggcaagcattcgagcacagcagccccgacgagcacgaagcccagatggacaagctgcgctacaccaagacggtgatcaaggagaccctgaggctgtacccgcccctcccgctgctcctccctcgccagtgccgagagacctgcgacatcggcgggttccaggtggccaagggcagcagggtgatcgtgaacgcatgggcgatcgcgaggagcccggcgcactgggacgacgccgacaggttcatgcctgaaagatttgagcgcgacgatagcgcggcaggttattccagggctactactgatggcactacacagtttgagtacctgccgtttgggcacgggaggaggatttgcccgggcatgggcttcggcttgtccaccttggagatcctagttgcgcggctcctctactactttgactggagccttccggaaggaatgcaggtggtggacctggacatggacatgactgtcgtggtttttataatggatcaagaacagaatgtcataggccagcaaggcgctgacactgtccgtcgctctcctcatgtacaaaacaagagaaaggaattagataaaaatgaattgaagaaaaggaggaagaggttaaggttgaaagtccccttgtctcctattcaagatgaagaaagtgatgatgaacaagacccagagtttgctcctgccggtgatggttctggcgacgtcaatgttgttattgttggtggcgatgagaataagggtaaaaataagacacgagctatacgatgctcacctgggaagttcataaagcttgtgaatgctctctccgatgaattgaaaggtgaagtagttgccaaggggtttggcggcctgctgagattcaagctgcacttattgtccagaaaattgctcagctggctgatgcggaagcttaactcagagacgatgaaattagagattggtggtggaaaagagattccaatcactgagcacaatgtttggtgtgttttgctgttaccaaacgttggccgtgacccgccccccatgtctgatgcagatgctcgtgccttgcgggacgagctgggagagaaaatttgtggcaactcttatagacgcagatctggtatcaatctatctgttatcactgatcggctgcagaagaggattctcactggggagctgggcctgagagcctttttcatggctgcatttcagtgtctgctattatccaacactgacactcgcatcaggattgatgatgtaaagtatactcaggacatccagaacatggccaacaagaactggtgcaaagcggtagttgacaggctcagcatagctgctcgtctttataaaaaggattttgcggagaaaggcatcaatgcacccatcagtggatgcgggatcttcgtagctatagcaaataaggatctcaggggagatgttcctcctggcaccaccgagtttggacacctcaggctgagaagtatcgctgacacgtgctacgacgtccccattggtgctctagcaatattacatgctccagtaccagcacctgccccagtagcagaccctaacccaacagcagcacctaacccaggagcagcagcatctgccccagtagcagcagcacccactgcgcaggatcaggaactacttcaattgcaccggaggaccaatctggaggaggtgatagtgaagaaattatacggagtcccgttgcaattgacactagagcaggagcaggatcaggaactacttcaaatgcaccggaagaccaatctggagaaggtgatagtgaagaaatccagttag

SEQ ID NO: 33415 - DNA, 213 bp, Zea mays
  Peptide Sequence Number=SeqID_75194
atgagtgaggacaaagtgtgcacaaaagacttgtgttggtctgtggggacaatatatgatcctagcgagctgccaggaacggtgaggctttacgacgctgacgccaacgtgctcaagagggagttcatgcaccctggggccatcctcgactgctgcttccacgacgactcctcaggctttagcgccggagccgaccacaccattcggaggtga

SEQ ID NO: 33416 - DNA, 432 bp, Zea mays
  Peptide Sequence Number=SeqID_75195
atgagtgaggacaaagtgcgcacaaaagacttgtgttggtctgtggggacaatatatgatcctagcgagctgccaggagtaagtaccgctggtctgggatttggcggggtgttacataggagcgggtggaggagatcggcacccactagaaggggatggtgtggcgacatggatcccacctccccgagggggaggagttggaggttcatcgtgtgtacatgggaagaagaggtggccaacacgtcggttagagcaatatcacaagctccacaacgtagacatccagggggttgctggatagagtcggaagggcgcacgatggaggatggtggggtatgtggtggtggctctgagttgaaggagaggtcgtctatgggcacgaccatgatcgagaagggggtatctcagacgtggactgtggggtatcgatag

SEQ ID NO: 33417 - DNA, 455 bp, Zea mays
  Peptide Sequence Number=SeqID_75196
atgctaccttaccctaaccctcaccatcatttcggcgtctcccaagagcccccgcacccaaaccctactaccggcttccccatgcttccgcggggcgcgcatctggatcagcgctacgtggaccatcacttcttccccggccacggccacaccaactccgaaaccctggaggcggtgctgaggccgacgcgcgccgctccagagtgcgaggccgccgtagtgacggcgccaccgcagggtggaagtggaagacgaaacggcgccgtgcctgccgccggcggccagggccagggccacgcccacgcccacgcccgggcgccgcggaagcggccgtttcggacggacaggcacagcaagatccggacggcgcagggcgtgcgcgaccgccggatgcgcctgtccctcgacgtcgcgcgcgacttcttcgcgctgcagaccggctcggctttgataag

SEQ ID NO: 33418 - DNA, 861 bp, Zea mays
  Peptide Sequence Number=SeqID_75197
atgctaccttaccctaaccctcaccatcatttcggcgtctcccaagagcccccgcacccaaaccctactaccggcttccccatgcttccgcggggcgcgcatctggatcagcgctacgtggaccatcacttcttccccggccacggccacaccaactccgaaaccctggaggcggtgctgaggccgacgcgcgccgctccagagtgcgaggccgccgtagtgacggcgccaccgcagggtggaagtggaagacgaaacggcgccgtgcctgccgccggcggccagggccagggccacgcccacgcccacgcccgggcgccgcggaagcggccgtttcggacggacaggcacagcaagatccggacggcgcagggcgtgcgcgaccgccggatgcgcctgtccctcgacgtcgcgcgcgacttcttcgcgctgcaggaccggctcggctttgataaggccagcaagacggtggactggctgctcacccagtccaagccggccatcgagcggctcgccgccaccaccgagccctcacagagaagcgtcggcggcagcgacgacgctgctttgtcacccccgacgtcaggggtggctgatggatcaggtatgaggggaggtgttgcggagaagttgggttccagaagtggggggtcagcggcgtccatggagatggagatggagcacgcctccgagctggaccgcctcgtgtcggccgcaccagtgcttcgtcagtactactacggcctcagcgagatgatgagcaacgacaacggaggagatggcgatgacgacggtgagtacgaggaggaagacggtgatttcctcgacgatgcgatagtttgcagtgcatttgtgatttga

SEQ ID NO: 33419 - DNA, 177 bp, Zea mays
  Peptide Sequence Number=SeqID_75198
atggagaacgctatgagagagcagcaagaaaggtttcgtgaagagttgcggcaacaacaaatggcattcctccaacaacaatcagagtacatgactccaaaccagatgaacaacttcgtttatgacttgttcgcttctggaggtagtggtcacaactcaaacgccccttatatgtga

SEQ ID NO: 33420 - DNA, 465 bp, Zea mays
  Peptide Sequence Number=SeqID_75199
atggaggacgctatgagggagcagcaagaaaagtttcgtgaagagatgcggcaacaacaaatgacattcctccaacagcaatcagagtacatggctgcttacaacgcacaggcgcaacaagcaacgaactcgccgatgcctcagtgggaattacatgctccgccacctccacctccacctcagggatccaaggtcatgggccacaacacgccaccaccggtcatatcagcaccaggaggagcttatgtaggggagggagctactccaagagaggtgtactaccttgctgatgagcccgaggtgcacttcgtctggcagcccagccaagagtcatgggtactcgtcatgtcgcgcgcattcgatgactattatatcatggactatgacgtcatctcggcgccggaagtaacacagaggaggaccgacaacaatgatcagttcgtcatcctcgccaccgtctggtag

SEQ ID NO: 33421 - DNA, 312 bp, Zea mays
  Peptide Sequence Number=SeqID_75200
atgggctggcgaggcgagcacaacactggtgccgctagggatgagtcccatcccggtgtcggagctgccgacgtctatctccgacgcgctcccggtgctggactccgctgccgaccacctccgacgcctggaccagattcttggcgcccgcttggaggccgagggcggcaggctctgctaggcggtgatcaagacctacaggatttagcctgggaaaccaagccttatgtccggacctacagaatcacagccccaaatactaagaaggcaataatccgagtgtcgcgtgcaagcgattacaagattgcctga

SEQ ID NO: 33422 - DNA, 387 bp, Zea mays
  Peptide Sequence Number=SeqID_75201
atgggctggcgaggcgagcacaacactggtgccgctagggatgagtcccatcccggtgtcggagctgccgacgtctatctccgacgcgctcccggtgctggactccgctgccgaccacctccgacgcctggaccagattcttggcgcccgcttggaggccgagggcggcaggctctgctaggcggtgatcaagacctacaggatttagcctgggaaaccaagccttatgtccggacctacagaatcacagccccaaatactaaggctcaggacgcagcctgtgagaaattacattcatgccctttacaaatgcttacaatcaaaatacaagctatcacaggtcgattggtcatttcatctttaagtcggttcactccttcgtcttga

SEQ ID NO: 33423 - DNA, 255 bp, Zea mays
  Peptide Sequence Number=SeqID_75202
atgaagctggtataccccgagaatggtaacttctggctagcatggcataagtctgttcatgatagattagcttgtattgttgagatggaaaaagagaatgcaagtttggctgaacttcgcgaaaggaagctgatgaacaagtacaacgagctcaaggaggcaggaaagcttgatgcattcatggaaaagcggtggaggaagaatgcctccaaagatcatcggttcatgccgtaccgacgcagtggagatgtataa

SEQ ID NO: 33424 - DNA, 1050 bp, Zea mays
  Peptide Sequence Number=SeqID_75203
atggaggaaaagacagcgaagaaggcggcgccagacaaatctgaagttcatcccttgaacgtgatcaaggtcacgatggaggaccttacaaaggcggaccggaaggagattgaagaagaaatcgcacgagagctggaggagaaacggaacgagagattggcttgctttcgaaaaaccaagaatggtgtgatcaaactgattggtggggcaagcacgtccagcaagaaggttcaaggagaattgcagggttttggagatgagctggacgacgaccactcctacgacggacggaacgactggggattctgtgctacgctcaacgtgtggaccaaaggcccatcgttggcccagcgacgcatgtacatcgcccgtctccgcgaaatggccgggcagatccgcacccaccttgcctccgctcaacaaccgcaccactccgcatcccaatccgctagctccggcgtcgcccccatcacccgcccatggagtaaggctaggggattcgccggattcaccaagcgggctctggtggcggccgacgccgccgtcgtgtcctccattcccgtcaaccccctcgacgtcgccaagatccgagagcccaacaagcgcacccgcctttggctcggctccttcgccactgccgaggaggccgcgctcgcctacgacgaggtcgcgtgcaggctctacggccccgacgccttcctcaacctgccgcacctccgtgcctccgccgtctcctccaccgccgcgcaccagaggcttaggtggctcgctgcctccgccaggggcgccgccgccgtcccggcctacgacctgctcaacctcaacgcgcagcacaacgtccttgctttaattcatcaaaatgtcattccttcaatgtcaaacccttccatcttatgtgatttcttgactagatcatatgacattggtggtgttatcagtgtgatggccttaagtgctgaacttcgcgaaaggaagctgatgaacaagtacaacgagctcaagctttatgatagtgccatcgaattcgtcatcttatcgatagacctttga

SEQ ID NO: 33425 - DNA, 1029 bp, Zea mays
  Peptide Sequence Number=SeqID_75204
atggcacaatggtttatcccgtggttcggccaagtccaacacttgcctactccacgttgtggcgtcccaacggatgagggttgcactcaacccctttcaagcggtccaaagacccacttgaataccacggttgaagctgttacagtacatgtgactcagaagtattttgtgagtgcttccaaggataactcttggtgcttctatgatatttcaacaggatcttgcctgacacaggttggcgaggcttcaggacaagagggatatacatctgcgtctttccatccagatggtcttatccttggaacaggaactactgatgctgttgttaaaatttgggacgtgaaggctcagtcaaatgtcgcaaagtttgagggtcatgtcggaccagtcactgctatgtctttctctgaaaatggttacttcctagcgattgctgctcacgatggtgttaagctttgggatcttcgtaaattaagaaattttaggactttctctccctatgatttggacacgccaaccaatactggaaatgggtcagatactggacagactgattcttggtttgagttgaaggtttgtgtaacagctctccttactactgggcaatccctattaagcgtggtttatttatgcgggaacctgggacctgagtgcattatttatgccatgcttctattccatcgtttactgatgtttgatcctgttaaccaggatcaagcttacttcccatatctaacattgttctccatcaactggaagggaaatccagcaaagtcatttgaactaatgattcaaagggaactctcaaggaggatgttttcctgtagaggtgtagatgcttctactggccatgtcgggcgcacaaggccattctgtccaaacctggaattagcaaaatggtgctacctggtgactgaatgtattactatggcgcatcacagtgtatgtctgcaattgctctcatatggttatattgctccagcatatctgacacacctcttccaagggcagctcgatggaaccgattga

SEQ ID NO: 33426 - DNA, 1236 bp, Zea mays
  Peptide Sequence Number=SeqID_75205
atgacgctagagcacttttggctcaagctgagagacagattcctgcgtcagttgcaggagctgctcctgcagctgttgtttccaatggaaaaagaggtatctcataattcaactttctttgatacagtaattgaagatgaaattggccctgacgggaagaagatccgtcctggtatcaaccctgtcatgattgatgaacttacagagtgtaatgccatgctttcagcacagcgcaagaaaagacaggttcctccaactctggcaccgatcgatgcactcgagagatacactcagatctccagccatccccttcataagacaaacaaaccaggcattttgtccatggatattcatccttcaaaggaaaccagtgaattattcatgcaggccccatctcagaaaatattgagttataccaaatcatattcacaggacattgttgcaactgggggtatcgatacaaatgcagtaatctttgatcgttcatctggtcaaatcttgtgcacgcttgctggtcactcaaagaagactgttcgcatctggcaagagaatgagaatggaaactataactgtgtccatacactgaaagatcatactgatgaggttgaagctgttacagtacatgtgactcagaagtattttgtgagtgcttccaaggataactcttggtgcttctatgatatttcaacaggatcttgcctgacacaggttggcgatgcttcaggacaagagggatatacatctgcgtctttccatccagatggtcttatccttggaacaggaactactgatgctgttgttaaaatttgggacgtgaaggctcagtcaaatgtcgcaaagtttgagggtcatgtcggaccagtcactgctatgtctttctctgaaaatggttacttcctagcgactgctgctcatgatggtgttaagctttgggatcttcgtaaattaagaaattttaggactttctctccctatgatttggacacgccaaccaatactgtggaatttgattttagtggaaactatcttgccattggtggttcagatataagggtctaccaagtagctaatgttaaggccgaatggaatcttatcaagacattacccgatttatcaggaacaggccttactaattcttctgatgaggatacaatttgttttgttgactacgatgctaaacagctaaagttctctgcgcagattccagtgattcaaaacgaactacttgcttcttag

SEQ ID NO: 33427 - DNA, 546 bp, Zea mays
  Peptide Sequence Number=SeqID_75206
atggcttcgctagtccatcccgagcgcatccagtccgagggggcactcaacctggtgcgcaacctgctcggttggagcgcgccggcgttcgccgaaaggatacgcaccggcgccactcccctcggcgacctcgccgccggggagttcgtgctcttcgtctcctacctctcctacgggagttcgggctccagctttagcacctcacgccccactccatcctccaggcggccatctttgcccacctctgcgagatgttcgtgggggtggcacttcttccgccagagctcggacgaaagggtgttgcgcagcgaccttccggagatggaaagcgagttgagctgcggctccatctttcgcgtgaacttcattgcctcctgcagcggcctcgtcagctcctccttgaacttcaccagcacctcgtggtatgcctccatgaactggtccagctccggctccgtctcagcggccaggcccgccgagcgccatgcgctgtcgtgcctccatctctttagctttgatggcctcaaacgtcgcctccaacgatga

SEQ ID NO: 33428 - DNA, 822 bp, Zea mays
  Peptide Sequence Number=SeqID_75207
atggcttcgctagtccatcccgagcgcttccagtccgagggggcactcaacctggtgcgcaacctgctcggttggagcgcgccggcgttcgccgaaaggatccgcgccggcgccactcccctcggcgacctcgccgccggggagttcgtgctcttcgtctcctacctctcctacgggagttcgggctccagctttagcacctcacgccccactccatcctccaggcggccatctttgcccacctctgcgagatgttcgtgggggtggcacttcttccgccagagctcggacgaaagggtgttgcgcagcgaccttccggagatggaaagcgagttgagctgcggctccatctttcgcgtgaacttcattgcctcctgcagcggcctcgtcagctcctccttgaacttcaccagcacctcgtggtatgcctccatgaactggtccagctccggctccgtctcagcggccaggcccgccgagcgccatgcgctgtcgtgcctccatctctttagctttgatggcctcaacgtcgcctccaacgatgagggctccttcaccttgacgcacgcttcgaggaggccaccgccgttggcaagctgtagcaccgggttgccgctggcgccgctgttcccagtggtcgccaccgtgttcagggtgagcggcaggcctgcgcccggcggtgctgagggagggtgcccacgggcggtggtggtgatcgctggtccggttgccgacactgaagacgccgcccgggaggtcgtacaagatgttgtggagacggcggccacgcgcttccagcgcgaccctgctgatgtcaggtag

SEQ ID NO: 33429 - DNA, 3105 bp, Zea mays
  Peptide Sequence Number=SeqID_75208
atggagcctactggggtcgtcgctttgctgctccgacgcggcggggacgttctgtccgcggcgcggcacggcgcggaaacagagctaccgacaggcagtcacgcggcggctctcctccgcaggcagtcgcgcggcggcctcatccccgccggcgagcctccgctcccctccgccgcgacgaacgcgtcgaacccgtggtggctgacgttcgagaaggccatcgcctccgcaggtggggagctgtctaagcctgagatcctgtcttcgaccacggactcacgctttgcgaggcagctgggcatccctgccctcgggttttctccgatgaccacagaaccatgttttttccccttgtatctcggtgttgcagtttctggaagacagagtgttcctgaggggcatccaaagccatcagaggcctcctcctcctcgtcctcgtcgtctgatgatgatgatacaccttcaactgcagcccgtagcactagatcaagtaatcctgtgttgtcctcatgcctggactacggctttaagggcgccgagatcgccatggcgtcctactgctccgagttgcagttcctgaggaacccggtcaccaaccacgtcctgaagtgctccactgtgccagctcaacatgcgctctctggccggggcgtcgcgggcgtgcgcctgggtcgagtcgaagcacgcctccacgctatgccgcggccaccgccgccgcacggggtcacctccttgccccatcaatgctccgtcctcctgcggcgcctcgccgcgagccgttccctggcctcttcctcctacttcctccgcgcactccgctgcctccacgcgcgcctcctcacctccgcgctcctccatgcgccgccgcacccgcacctcaccctccgcctcatccacctctacactctctcccgagacctccccgccgccgcgaccctcttctgcgccgacccgtgccccgtttccgccacttccctcgtcgccgcgtacgccgccgcggaccgcctccccgccgccgtctccttcttcgacgccgtcccgccggcgcgccgcgacaccgttctccacaacgccgtgatctccgcctacgcccgcgcgtcccacgctgcgcccgcggttgccgtgttccgctccctgctcgcctccggctcccttcggcccgacgactactcattcaccgcgctactgagcgccgggggccacctgcccaacatttctgtccggcactgcgcgcagctacattgctcagtgctgaagtccggcgccgggggtgccttgtcggtgtgcaacgcgctcgttgccctgtacatgaaatgtgaatcgcccgaggcgacacgagatgcacggaaggtgctcgacgaaatgccgaataaggacgaccttacgtggactactatggtcgttggctatgttaggagaggcgacgttggtgctgcaagatcagttttcgaggaggttgatgggaagtttgatgttgtgtggaatgccatgatctcagggtatgttcattcaggaatggctgtggaggcgtttgagctgtttagaaggatggtattggaaagggtgcctcttgatgagttcacatttactagtgttctgagtgcttgtgcaaatgttggcctctttgcacatgggaaatctgtccatggtcagattattcggctgcagccaaattttgtacctgaggcagctctccctgttaacaacgccttggtgaccttctactcaaagtgtgggaatattgctgttgcaagaaggatatttgacaatatgacattgaaggatgtcgtttcttggaacaccattttgtcggggtatgttgagagcagctgtttggacaaggcggtcgaagtatttgaggagatgccatataaaaatgagttgtcatggatggtgatggtatcaggatatgtgcatggaggatttgctgaagatgcacttaaactgtttaacaagatgaggtctgagaatgtcaagccgtgtgactacacctatgctggtgctattgctgcatgtggcgagctcggggcactgaagcatggaaagcagcttcatgggcatattgtgcagcttggttttgaggggagcaattctgcaggaaacgcactcattaccatgtatgctagatgtggtgctgtgaaagaagctcatcttatgtttcttgtgatgcccaatattgactctgtttcgtggaatgctatgatttcagcccttgggcagcatggacatggaagagaggcactagaactctttgatcgcatggttgctgaaggcatatatcctgataggatctctttcctcacagtattgacagcttgcaatcactctggtctcgtagatgaaggctttcgatatttcgagtccatgaagagggactttggcattatacctggagaagatcactatacgcgactgattgatttgctcggtcgagctggacggattggagaagctagagacttgatcaagacgatgccttttgagcctaccccatccatttgggaggcaattctttctggttgccggactagtggagatatggaacttggtgctcatgctgctgaccagctctttaagatgacaccacagcatgatggtacatatatccttttgtctaacacttactcagctgcgggatgttgggtagatgctgccagagtaaggaagctaatgcgtgatcgaggggttaagaaggaacctgggtgcagctggatagaagctggaaacaaagttcatgtgtttctcgttggtgatacaaaacatccagaagcacatgaagtttacaaattccttgaaatggttggcgccaagatgagaaagcttggatatgttcctgatacaaaggttgtattgcatgacatggagcctcatcagaaggaacatatattatttgcgcatagtgagcgactggcggttggttttggactcctaaacttgcctcctggagctacggttacagttcttaagaacttgagaatatgtgatgattgtcatgctgcaataatgttcatgtcaaaggctgtcggaagagagattgttgttagagatgttagacggtttcaccatttcaaggatggagaatgttcgtgtggtaactattggtga

SEQ ID NO: 33430 - DNA, 399 bp, Zea mays
  Peptide Sequence Number=SeqID_75209
atggcggacttgagacaattgatgattgcttctgtgaaaattatacggaacaagcagactgggcactcagaaggctatggttttattgagttttcctctcgaggtgctgcagaacatactctgatgaacttcaatgggcagatgatgtcgaatgttgagataacttttaagctgaactgggcttctgctagcattggtgataagcgtggagatagtggttctgatcacacaatatttgttggtgatttggctcatggtgttactgactccatgttggaagatgtgttcagagctaagtacccttcagttagaggagctaatgttgttgttgataggatgactggatggcccaaaggatatggtttcgtgcgttttggagatctgaataatgcattgtga

SEQ ID NO: 33431 - DNA, 429 bp, Zea mays
  Peptide Sequence Number=SeqID_75210
atgcatatgactgattttatttttgttgacctaatactttcaagtaactgcatattgctttttgtgaaaattataaggaacaagcaaactgggcactcagaaggctatggttttattgagttttcctctcgagctgctgcagaacatactttgatgaacttcaatgggcagatgatgtcgaatgttgagatgacttttaagctgaactgggcttctgctagcactggtgataagcgtggagatagtggttctgatcacacaatatttgttggtgatttggctcatggtgttactgactccatgttggaagatgtgttcagagctaagtacccttcagttagaggagctaatgttgttgttgataggatgactggatggcccaaaggatatggtttcgtgcgttttggagatctgaataatgcattgtga

SEQ ID NO: 33432 - DNA, 375 bp, Zea mays
  Peptide Sequence Number=SeqID_75211
atgggggtggacgcgggcgaggagaggcacagatccgcctacggtgccggggccaaggtggacggggcgcggaggctgggtggttccatacattctttgatgaacttcaatgggcagatgatgtcgaatgttgagatgacttttaagctgaactgggcttctgctagcactggtgataagcgtggagatagtggttctgatcacacaatatttgttggtgatttggctcatggtgttactgactccatgttggaagatgtgttcagagctaagtacccttcagttagaggagctaatgttgttgttgataggatgactggatggcccaaaggatatggtttcgtgcgttttggagatctgaataatgcattgtga

SEQ ID NO: 33433 - DNA, 372 bp, Zea mays
  Peptide Sequence Number=SeqID_75212
atggatcttcgcggtcgcaacgcaaccacgtttgtgcgtgaggttgagaccatgaagattgttgggaagtatgtgtcgaagatggggactttaaggagttgggatattcgcggttcaaacgttaggttgaaccgtgtttttgagttaaaccatttgtcgtatggtggttacctggagggggactgtgccaacgttgctagccgccggggggaaacaaacgatgtcattggccgaggaaggcccctcacgggacaaggctccgggtgcggccaccaggaaaaggaaattagctcccggggaaatgatgtcttcgcccgagctccgagaatcttctacgcgaatgttgaaggttaccaggggtcgctggcctag

SEQ ID NO: 33434 - DNA, 408 bp, Zea mays
  Peptide Sequence Number=SeqID_75213
atgggtggccagatggtgcgaagtccgctcttcgccatggatcttcgcggtcgcaacgcaaccacgtttgtgcgtgaggttgagaccatgaagattgttgggaagtatgtgtcgaagatggggactttaaggagttgggatattcgcggttcaaacgttaggttgaaccgtgtttttgagttaaaccatttgtcgtatggtggttacctggagggggactgtgccaacgttgctagccgccggggggaaacaaacgatgtcattggccgaggaaggcccctcacgggacaaggctccgggtgcggccaccaggaaaaggaaattagctcccggggaaatgatgtcttcgcccgagctccgagaatcttctacgcgaatgttgaaggttaccaggggtcgctggcctag

SEQ ID NO: 33435 - DNA, 1792 bp, Zea mays
  Peptide Sequence Number=SeqID_75214
atggctgaaaggtgccgatctccacgaggccgcgctccaccaacgatagcaagagcaaggcggcgctggggcaccccatccaggggctcaaaaggcggaagggcgcaaggcatgaggggaggacgaaggcatggccactgcccaggggatcgatcccccttttataggcagacctcctcgcttgcaccccttagcgtcacgggcgaaatccccactgcatcctccagagttctcccctacgacacgggggctgggacccacacgtcatacgagctgatccaaagcacgaagaagaaaccggtggtcgaaagggtggattgccacgcgacgggcatccaactgcaccgcaactgtgcaccccttcggctccatccacatccggtggaccagcgcaaaggaagcgggcccacatgtcatgaaaccgacgcgtcggttacgacatgcgagaagctacaccgccactcgcgccaatgctgcgcctcctcgactgcagaaccagtaccgcaactcgaggtagccccgcgcatgacccaacagtgccaattaaaggcgacggccacgggtcagtcagccgcgggggaccgggaaaggggacgttgtggaaaggatccttcccgacgaaggaagcgggccccgagccctcctactgatcaggggttcgaaggctggcccttcggaagggtttcgacagccgccctagagcacttggacttcaagcccattactgatcaggggttcgaaggctggcccctcgaaagggttcgacagtcgccccagagcatgcagagtgagggatggctctgggtacgttcgatacataaccgaggctcgagctacgctcccgagcctcgggttggaacagtggtcccagacgagttcacgcctcgcccgaggccctcctcaggcagcgggcgccccctcggctctcccgaggcccagctcgggagaggcttcgttgtgaagcaaccttggccataccgcctcaccaaccgaccgcttcacaggcgcattaaatgcaggggatgcttgatgtcgtatcctgacacacgcgcctcagtcggccaggccgaagtgaccgcagtcacttcgcccctcttctttactgtccgatatgacaggaaaacagcgccgctcgctccgctccgactgccgtgtcagccaccccggcaacgactgacaataagtcacgatcaaccaccgagttcaagcctcgggcgcaacaggaagctctgcctcgcccgacctcacgctctggcctcaggaggtctccacctcgcccgacctcaggctccggcctcgggaggaggtctccgcctcgcccgacccccggactcggcctcgaccccgatcttgggagtaattgtgtcatcacccgaccccggcctcggcctcaagagaagtctttgcctcgaccgaccctgggctcggattgaccgcgctgataggggatgcatcatttccctatttctagcctgctcaggctacaaggaacaagaccggcgtcccatctggcttaccctagcgacgggactcaggcgctcctccggcggccacgccatcacatgtacagcgcccaagctctcccccaacggccacgttggcatggccaccttgagagaggttcacgcgagggaagcggtggacgagctcgggaccccccggggtcgaaacgccgacagaggccaagtaggaggcgaagcaactgtaccatgcccatggtgcctgtttgagaccgtacaacaagcgattcagtcggcagaccagatctgggtgagcggcgttgacgaagccg

SEQ ID NO: 33436 - DNA, 807 bp, Zea mays
  Peptide Sequence Number=SeqID_75215
atggggtgctccagcgccgccttgctcttgctatcgttggaggagtgcgacctcgtggagatcggcacctttcagccatcgctcggcttcaaggattttcgtcagcccggctgtagcggcccgctccttccttcagtgatctggggggaagggcgttcgccgcctgtggcgctggtagccgccgcgcgactggctccccggcacgagcggctctggtgctgcctccagtgccgccccaaagcgcgcccgcaggtcctcactcccgtcctcgccacaagaacgagaacagggccatcccagaacacgaacgccgccctcgcggcgtgcgacgcgttatgcgaccccccaattgccgacggcgcagcaaggagggctacacccggagtttgttatcccgcaagccttccggtgtggaggttgttcatacccgtgggagcggaacaggagtcccgtcgggagaaccgccgagggttctgccgacgtctaagtctgtgtagcatagttacccccaatttttgggaccctcggctgctctgcgatgagccggagccggaggcagcggtgttagcgcggacagacgcggagtcggctcagaaagagacttcgtcggcccgggagatggcggtggaggtccttttgcctgagtcgccgtccgaggccaggccaggttccgccgagggtggaaacaacaccgagggtgctgctgctccccctgccgatgcccgaacctacaggaacaaggggttcccccttctagccctcgaggtagggtcgggctttgccgaggcaaggctgacccttccttaa

SEQ ID NO: 33437 - DNA, 1350 bp, Zea mays
  Peptide Sequence Number=SeqID_75216
atgaagcacgtggaccgtcctctgaataaccccaaacataacttcatgccagctcttaagaagcgtaatgtttctgaaagccatacaagagttctaagaaaagttgtgacaaagaggattaaacctgaggatctaccccgacagaggctcaatgtgaggtgcaaccctcaagatgtcattgcaagcattaacatattgaatgaaaggcaacgtgaggccataagacgtaaaggtttctctaacattcttgatatgacagtagatgcgatgtgtagtagatcacaccttcaatggttgatggacaagctggaccacaaggacatgacaattcgtcctggtccaggaaaggaactaaagatcacaaaggacattgtgcatcttatccttggtgtaccaaatcatggcggtggaaaaccattggggattgacgaagcagttgcagcaagcaacttgagggcagagcttggtttggctaaagacgagttcaatgtgacatttctacaggatagtttaaggaaaggcgagaatgatgaccttacaatcagatgtttcttcctcattttattcaactgtttgttgtttccaactgctagctggggcataacaaatcatgaagtgcttctgacagaagaaatgcaccgtttccatgagatcgattggtgccagttgatttttaatgatctgtgtgaagctgcgaagaagtggcacaaccgaagcaccacaaatgtctccacgactatatacgaatgctccattgttgtccttttgtattacctggatcacctgcatgcagccgctgcccctcaaaataagcttggcacacctcgcattaaattctttgataagaatatcataaaagctttgactaaagccgacaagaggaagggggctgagaaccgccgtcgtcatggacgcacgcggggagccatcattacttgttactggggcgagcctggatggaacgccgcccaaggttgggcgaggcagagactcctcctgaggccgaggccggggtcgggcgaggatgcgattcctcccgaggtcgaggttgaggccgagccctggggtcgagcgaggcggagtcctccttccgaggccgaggttgaggtcgagccctggggtcgagcgaggcggagacctcctcctgaggtcgaggcccaaggtcgggcgaggcggagcttcctgttgcgcctgaggctgatcgtagctattgtcagtctcaccctggcgggtggcacagcagtcggagaggggcgagcgacgctgtctccctatcaggtcggtcagtggaaggtcgaagtgactgcggtcacttcgaccttgccgactgaggcacgtgtgccaggataa

SEQ ID NO: 33438 - DNA, 264 bp, Zea mays
  Peptide Sequence Number=SeqID_75217
atggagcaggtgacacaaggcaacaagtgcgatggagtgggggatggtgttgctggcggtaatggtggtgggtgcgctgcaaaagggtggcgtggggtggcggtagtgcgctgcaaaggaggtgtggggcagtgctttgattctcacggtcggtcctttttactgagcgacaggataggttcctctgtagcttattgcaggcttcaaggggctctagcccaaagtgaagaaaaacttcactacccaatgcatgcagaggactag

SEQ ID NO: 33439 - DNA, 153 bp, Zea mays
  Peptide Sequence Number=SeqID_75218
atggaggggcagtgctttgattctcacgatcggtcctttttactgagcgactggataggttcctctgtagcttattccatgcttcaaggggctctggccaaagtgaagaaaaacttcactacccaatgcatgcagaggactgggcataactaa

SEQ ID NO: 33440 - DNA, 712 bp, Zea mays
  Peptide Sequence Number=SeqID_75219
atgactgaaggagcagacgttgggatgcaacaacagataaccccgaatgtcaccaccaatgatgccgatgaaggtgtgctctttgtagagaatcatgacgaggatgtactttttgaagaagatgatgacgaagaagatggatacctattcgctgggcaagattgtgaatctattgaggatatcgagattgatgaaactcaagatgcatttactgttaccccagacgtacctgacccatacgataaggtgtatagtaacatacctgaagaaacacattcgttggacattgttgctgaccgcgtttactgcaaagcaaagaagtttcatatgactacaaacatgaattgtggtatttacacgttccgtgcacatggcatgatgtaccacaatgtaaggtcgttcggtagggaagctggggcagaacataaacaccttgaactttacttctacgatgatgatcctagcctcgagcatagatatcgtaaatgtcgtcaagatcaacttgagaaagacaaggtagttattaaacagttggttgaaatacttaagggaaacccatactctgagcaccttaggagtatgggacacgttgataacattgaagactaccatatcgccttgaaccttgaccaaatgctgaaccataatttatataatgcacccatcacttcagaggttgctgcagtttggattgaggggagtgaacgacgag

SEQ ID NO: 33441 - DNA, 3657 bp, Zea mays
  Peptide Sequence Number=SeqID_75220
atgactgaaggagcagacgttgggatgcaacaacagataaccccgaatgtcaccaccaatgagaatcatgacgaggatgtactttttgaagaagatgatgacgaagaagatggatacctattcgctgggcaagacgtacctgacccatacgataaggtgtatagtaacatacctgaagaaacacattcgttggacattgttgctgaccgcgtttactgcaaagcaaagaagtttcagtatgaaccacctagattttgttgtcgtaatggacagattgatctagccccattcgagacaccaccccaacttaggaggctgtgggagtgctcagatgctgatgcgagacacttccgtgataacattcgattttttaacggccatttctctttcacttctctgtactgttgccttgatagtatgactacaaacatgaattgtggtatttacacgttccgtgcacatggcatgatgtaccacaatgtaaggtcgttcggtagggaagctggggcagaacataaacaccttgaactttacttctacgatgatgatcctagcctcgagcatagatatcgtaaatgtcgtcaagatcaacttgagaaagacaaggtagttattaaacagttggttgaaatacttaagggaaacccatactctgagcaccttaggagtatgggacacgttgataacattgaagactaccatatcgccttgaaccttgaccaaatgctgaaccataatttatataatgcacccatcacttcagaggttgctgcagtttggattgaggggagtgaacgacgaggtgaacttggatggcatgcaaatattcctaagtccaatgtttccatggacgaagtagacgcgtaccgtgagcaacataggataagggatgcaaacgatgacgatacagtacttcatgggaagcggcttttccaacagttcgcggttgacacctacatcaagattgagagctctcgtttggatttcatacataaaaaccaagacagattaagggcggatctatacaagggtttggtagatagcttgcatgaaggcgagaacagagtagacaaaattggaaagcgaaccgtgctgtctacatcatttatcggtggtcctcgtgacatgagacgccggtatatggatgctatggtccttgatcgttcggaccttgttgtttgcatattccgtgcaaaactagaggaactgaagaagagattgactaagcaccatattcttcgaaaaatccgggcttatgtctacgtcgtggagttccagaagcgaggtttgcctcatgtccatttcctactcatcatgcagagaaagtacaagctaacttgccccgatcagtatgatctccttatctccgctgagatccctgacaagaagaagtaccctgaactatacaagatggttatcaagcatatgatgcatggaccatgcgggttgctaaatcctaaatgcccatgcactaagggtcctgcttcatgcaaaaaccattatcctagagcttttagcaatgcaacgtctcaaggaaaggattcatatcctatttataggcgtcgtgatgatgggcgtaaggaaacggttcgaggttgtgaattggacaacagatgggtcgtcccttacaacccttacctcctccggctcttcaactgtcacatcaatgttgaggcatgcgggagcatcaaggctatcaaatacttgttcaaatacatatacaaaggccacgatcgtgcgtctgtggctgtgacagatgcaaacaaggttgatggtgacgttgatgagatcaagcagtatagagatgctaggtgggtgacccctccagaagccctttggaggatattcagctttgatctaagtcaaaactttccaccagtgatgcaactgtcaatgcttacgacatattttgaggcaaataggctacacgaggaggctcggagcatcctttactgtgattttcctgagtggtacactttgcagcaaggcaaagtgtggcaaaggaggaaacgaaacacgggtggacaggttggtagaatagtctctgctcatccagctgagggggagcgcttttatcttcgacttctcttaaaccatgtgatgggtgctacctcctatgcggatctaaggatagtagatggtgacacactaccatcttttcgtgaggcagcacaaaggagtggactgcttgaagcagacgacacaatagatgagtgtctcaacgaagccgctatttaccaaatgccgtcagcactacgaaggttgtttgcaacaatactggtatactgcaagccgaacgatgtggcagaattatggcagagacaccttgattcaatgtcagaggactatcaccgtagtactcaaagcaaaacccatgtgcaacagatggtcttgattgacattagaaacattttgcagtcaatgggtaaagacataaagacattccctctccctactatcatcgacaaatatgacgattcacatggtactgatagagagatttacgaggaggaaagtatcgagccgacagcagaagacgttgctatgaaagaaaccctaaatgaggagcagaggtctgcctatgataagatcctatctgccgttgacaccaataacggtggagtgttctttgtggatgggcctggtgggactggcaagacctatctgtataaggcactgtttgcggcactacgcagtcaggacaagattgcagttgccacagctacatctggtgttgcggcttccatattgcctggggggaggactgcccattcgcgcttcaagataccacttactattaatgatagtgttgtatgtagcttcacgaaacaaagcaggacagcaaagttgctacaaaaagcatcgctcattatctgggacgaggcatcgatgactaagagacaagcaattgaggcgctagacaatagcatgcgcaatataatgggacgacctaggctgccctttggtgggaggactgttgtgttcgggggtgatttcagacaagtactccctgttgtacgcaagtggtcaagggctcagatagttgctgcctctctacggagttcttacctctgggaatccatgtgccacctaaagcttgttcaaaacatgagggcacagagcgacccatggtttgcagaatatttgttgcacgccggtggtggaactgaggaagcgaacaacgatggtgatgttcatcttccaaatgaggtatgtgtgccatatactggtaatgaccgcgaccttgatagactgatagatgacatttaccccaatctaaatgaaaacatgtctaacacaagctacatcacttcaagagcaatattgtctacacggaatgactgggtggatatgataaatatgaggatgatcgatcgtttccaagggaagcagatgatgtaccatagttttgacactgcggtggatgatcctaataactattacccatcagagtttctaaacacgctgactcctaatggactacccccgcacattctgaagctcaaagttggatgcccaatcatgttgcttaggaatatagaccctgctaatggactttgcaatggcacgaggatcgccgatgacctggctccggccatgtccgccgtcgtagccggcggcgttgccgccgtgctctgggtggggagaagggggtag

SEQ ID NO: 33442 - DNA, 1236 bp, Zea mays
  Peptide Sequence Number=SeqID_75221
atgggtaaagacataaagacattccctctccctactatcatcgacaaatatgacgattcacatggtactgatagagagatttacgaggaggaaagtatcgagccgacagcagaagacgttgctatgaaagaaaccctaaatgaggagcagaggtctgcctatgataagatcctatctgccgttgacaccaataacggtggagtgttctttgtggatgggcctggtgggactggcaagacctatctgtataaggcactgtttgcggcactacgcagtcaggacaagattgcagttgccacagctacatctggtgttgcggcttccatattgcctggggggaggactgcccattcgcgcttcaagataccacttactattaatgatggtgttgtatgtagcttcacgaaacaaagcaggacagcaaagttgctacaaaaagcatcgctcattatctgggacgaggcatcgatgactaagagacaagcaattgaggcgctagacaatagcatgcgcaatataatgggacgacctaggctgccctttggtgggaggactgttgtgttcgggggtgatttcagacaagtactccctgttgtacgcaagtggtcaagggctcagatagttgctgcctctctacggagttcttacctctgggaatccatgtgccacctaaagcttgttcaaaacatgagggcacagagcgacccatggtttgcagaatatttgttgcacgccggtggtggaactgaggaagcgaacaacgatggtgatgttcatcttccaaatgaggtatgtgtgccatatactggtaatgaccgcgaccttgatagactgatagatgacatttaccccaatctaaatgaaaacatgtctaacacaagctacatcacttcaagagcaatattgtctacacggaatgactgggtggatatgataaatatgaggatgatcgatcgtttccaagggaagcagatgatgtaccatagttttgacactgcggtggatgatcctaataactattacccatcagagtttctaaacacgctgactcctaatggactacccccgcacattctgaagctcaaagttggatgcccaatcatgttgcttaggaatatagaccctgctaatggactttgcaatggcacgaggatcgccgatgacctggctccggccatgtccgccgtcgtagccggcggcgttgccgccgtgctctgggtggggagaagggggtag

SEQ ID NO: 33443 - DNA, 738 bp, Zea mays
  Peptide Sequence Number=SeqID_75222
atggcgggactccacctgcacgggccgacggcgagacgacttcaccagttcttctacacgggcggcggcggggctccacttgcacgcgcggcgatgggcacatcattcagcagatccgaagcaaacatggctccagggaggaagggaatacgaagcataagggaacccccaccagcagaaatcactcctactgactatgagaaacagagggcagagaatgtgatgaggaataatcagatgttccaacgacttgggattaatcagttacgcattatgatgactgccacaagagcaaggagcaaatatgatggtcctcacgaatcagggtctttgtttgacggcgaggacagtgaaggctctgagcaagaggaagattcccatgttgcaaaaggtgtacttggccacaaccccactcatgttgctgacaaaactacgcaaggaacacgaggatctaagagggttgtggcccctgatgttcctggacaagaaattcgattcactaggcaaaggagtgctgacataaaccaacaatcctccttaagcctaactactactacacatgctagttcacgagccaccacaaaccaagcatccacacagaacttgactaccgcaacacgtttcacttcaagtgttgccactgagcaagattacaccgaaggcctgaatactgctgcacaacctacttctcccatacaagctgaggtcaatgaccacaatagagatgaaggcaagtga

SEQ ID NO: 33444 - DNA, 639 bp, Zea mays
  Peptide Sequence Number=SeqID_75223
atgactaccgcaacacatttcacttcaagtgttgccactgagcaagattacaccgaagacctgaatactgctgcacaacctacttctcccatacaagctgaggtcaatgaccacaatagagatgaaggcaaagggttaggcactaagattccaatccaaatctctgatggaaagcgaaggcaagacccacctattcaggctgcaaagtttgcattggagggtgggatcatactgaggcaacacattccaatatttccgcactgcaaggagtacaagaagcaagagaacgaggataaaattacagactacattgggaagcttgttggtcaattcaccatggatgttgagagtaatgcagtaaaagatgcatgtgttgatatgctaaagggtggacaacgccaaatgaggtataggctaaaaaagtacttcactggagatcctgcaaatcaagtgaggactacatcacctgtttcatgtatgactgatgatcaatggagagagttggtacaaatgtggtctagcccaaaccacaagttaaacgcgtggaacacaactggtttcacgataacagggagtacaagccgatacacacaatctcgaatggggaagatcagtagcaatctaagtagaaggaagtag

SEQ ID NO: 33445 - DNA, 681 bp, Zea mays
  Peptide Sequence Number=SeqID_75224
atggatgttgacagtaattcagtaaaagatgcatgtgttggtatgctaaagggtggacaatgccaaatgaggtataggctaaaaaagtacttcactggagttcctgcaaatcaagtgaggactacatcacctgtttcatgtatgactgatgatcaatggagagagttggtacaaatgtggtctagcccaaaccacaagagacaagaaaatataaagatgtcgaacctagtgcaattgatcttttcaaggagatgcattgtagcaagaaaaaaagggtttagtgaagttgttcagaaagctataggtgatatggaagcaatggtggcaacaccagtagaagatggacagcttgcaaagtctgcaacaaaagttgtttccaatgttctgcctggttcaagtaaatttcttcacaatgctggccttttgccctcctccaagagaagcaacacagggactgttttagcaagaatgcaagaacttcagtctcaattggacaatgagaggagagaaaaagatggacttcgagaagatatggataccttaaaggccaagtcagaatcatctgaggcaaccattgctaatcaatcaactaagattgcagatttaaagaagtccttagcagaaaatagcatcctacttcgacagatattaagtattagtcgtgatcaggtcaatccttaa

SEQ ID NO: 33446 - DNA, 1053 bp, Zea mays
  Peptide Sequence Number=SeqID_75225
atggaagcagcccgccagcacccgccgtgcccctccccccacgaccgcacaggcaccgtcccccggccgccccgccccggatctcgcccccgccgcggatcccgcgctggccacgaccgccaatctcggccagcccccgccgtaccctcgcctatgtctcgccccgtgatcctctccccctcatcgtcgtcgcccgcccttccatccacgcgtcgtgcccctatccacgctctgtatcgatccccttccatcggcgcatccgatgaggatccacatctgtcgcgcccgttcgtcgtcggcgccccacatcgatccccgcgcatcgtcggtgcccccctccatagttgcaaagatccggggggagtggagacgcccggaccggtggaccttgggaagctggagtctgatgcgcaaaaggaggacacctactacgtgctcatgcagatccagtcgcgcgtggtctccttcgaggagcaggagccctgcgagtctgtgtattgcgctattctgtgcttcggtgaggaggaatggggtggtggggttggggtggcacaggcgcacatcacagcacagccacagcccctgtccatggatggtgaaacagaacttagaggtgcagtttttgctgggtttcgggtcgggatttggggcggcggcgcggcggggcagagccacccgttctcgtggctagacgctgccatctcggagccctactacttcctgcaccacctcgccttcttctcttactttgcggcccgcagcacggcgctctccgccgacgacagaggggagctccacgaccgccttctccgtagggagatccaggcagtgctcgtgttcctggtgctcttcgtagtgaagactattgttgaggttgagaaaactgagctggaagaggaggcagatgttctatctgagatagaggaggaaaaacttgaatctgaattagacggagaagaagggagttttgaggttgcaaagcttcgccatggtgtcagaaaacaatctcctgatgccgaactggtggtgctacctccaccattttggggtgcg

SEQ ID NO: 33447 - DNA, 712 bp, Zea mays
  Peptide Sequence Number=SeqID_75226
atccacctccacgacggcgacggaggcgtctgcgccggcggcaggcggcggcgcggcggggcagagccacccgttctcgtggctagacgctgccatctcggagccctactacttcctgcaccacctcgccttcttctcttactttgcggcccgcagcacggcgctctccgccgacgacagaggggagctccacgaccgccttctccgtagggagatccaggcagtgctcgtgttcctggtgctcttcgtagtgaagactattgttgaggttgagaaaactgagctggaagaggaggcagatgttctatctgagatagaggaggaaaaacttgaatctgaattagacggagaagaagggagttttgaggttgcaaagcttcgccatggtgtcagaaaacaatctcctgatgccgaactggtggtgctacctccaccattttggggtgcggacccaaattctgttttccaagtgtttcttgtgcctgctccaaaactgcttgtagcttcaagatcactaattgattccatggtcatcatctgtgtcggacagagtgcacaggtgcacttgggccaacaaggcgcagcaggcttccacaacacgggagtgagcagcctttgcatgctgcatgagatcaagcaaaccattcagtttgttggtgagacaacaggccagaaggccatactgcacttcatccattccatggttccatga

SEQ ID NO: 33448 - DNA, 405 bp, Zea mays
  Peptide Sequence Number=SeqID_75227
atggcattcattcttatatatatacctatatggttatatttagaaaacgaagaagagagtgaagtgactcaagagaagacatcaccacctttggaatctcaggcagagacttggctctacttcgacatctgcttgatgatcgaggacccctttaactggtcacatgcctcgtcatggcatacccttgagagtcttttccttagtcgggtgaggaagcgacaaagttttgttgcttttgctccaaggtggtatctaatgaagaaaaacaagaatgaagatacaggaggacttggtcctccacataggatctttttgtttgataattacttgggaggttccgtcacagcaatttcttgggaggagtttttgcctcccttgatatgtgtactcagcactcgtttatag

SEQ ID NO: 33449 - DNA, 1119 bp, Zea mays
  Peptide Sequence Number=SeqID_75228
atggcattcattcttatatatatacctatatggttatatttagaaaacgaagaagagagtgaagtgactcaagagaagacatcaccacctttggaatctcaggcagagacttggctctacttcgacatttgcgagtccgagcctgactcacctactaacaaaggcaagccccgaagggatggcttctacctgcaagaatattttcatttggagcaatggtgggatcttactgcaaagttccctgtgatgctcttttcatccttgggaacagaaacaatcctaaggatggaacatacccttgagagtcttttccttagtcgggtgaggaagcgacaaagttttgttgcttttgctccaaggtggtatctaatgaagaaaaacaagaatgaagatacgggaggacttggtcctccacataggatctttttgtttgataattacttgggaggagtttttgcctcccttgatatgtgtactcagcactcgtttatagctctgatgaatcaacaagaagctcctacaggagttggagagtttctacgagattttggtgttctagtggtcctgtggcgactacttcaagaggtcggatataccgaagcacccaagtaccagtggtcacgcactgttcttagaggacaaccatggtatgaggtagtagtgcgtattccagaacgtgctagaaaaccatcttggccgtattggatgttccatgccgaaggaatgactccttgggagggtgctcaggtagctgccttagaggtactaacaaccatttgttaccagaaaagggaagaaatacaagccacatctatgaggttgttccctgcagttgccttaagtgacccgttggtgtatcatcaccaggcccgattaatggaaagcattcctattgggcaggattctgttgaatcggcatctgctcgggttttgatggccgtgctagagttgcaacttactcgggggcacagtcgtcaaaagtggcagcagttgtacactgggagctatgcagcatttaagatgatggaaaaggccaagaacagtgcttgtactcaagcacaagaacgacttgaggaaacgaaggttcaagcggaacaggttattggactcgagcatcag

SEQ ID NO: 33450 - DNA, 1371 bp, Zea mays
  Peptide Sequence Number=SeqID_75229
atgctgccggcgctcattgccctgctgctgtccctgctccccgcggtcgccgacgcagcgtcaatggatccaacagagagggagacgctgttccgcgtcatggaggccgtgtcctccgaccgggactggcgcgtcgagagccccgacccctgcggcgggccgtggccggggctggagtgcaagccggccgccgacgcgggcgcggcgcgcatgcacgtcacgcggctggacttcggcgtggagcccaacccgacgtgcaaggactcggcgtccttccctcccgaggtcttcaccctgccgcacgtccagtccctcttcttcgtcgactgcttcaccaacccggccgccaccacggcgctcgccctgccgccgcccgccaacctctcggccaccggcctgcagcagctcagcatccgggccaacccggcgctgtccggcgtgatgccgccggcgctggccagcctccggtcgctccaggtgctcaccatctcccagaacggcctggtccgcggcgagatcccgccgggcatcggggacctcacgtcgctgctgcgcctcgacctcagctacaactcgctctcggggccggtgccaagccagatcggccagctcaagagccttgtcggcctggacctcagctacaactcgctctccggcgccatcccgagccgcctcggcgagctgcgccagctgcagaagctggacctcagctccaacaacctcaccgccggcatcccggacgccgtcgccaacctcacgtcgctcaccttcctggcgctcagcaacaacggcctcaccggccgttttcctccgggcatctccgggctgcggagcctccagtacctcatcatggacagcaaccccatgggcgtcccgctgccttctgagctcggcagcctcgcccgcctgcaggagctccgcctggccggctccggctactcgggcccgataccggacgcgttcggccagctggcgagcctgacgacgctctcgctgcaggacaacaacctgacgggacccatccccgcggcgctcagccggctgggcaggatgtaccacctgaacctcagcaacaacgcgctcggcggggccgtgccgttcgaccgcgcgttcctgcgccggctcggcgggaacctcgacctgagcggcaactccgggctgtgcctggacgaccggagcgccctgcggggcatcggcgcctgccgaggcggcggcgacggtggcactccgatgtcgtcgtcggcgcgcactagctcggggagcagaggtgtacccgccggtgccataaacccgcgggtagcgggtttggctaacttacgctatccgtcgcgagtagcgggtgtgggtacgggtttaatattaatctcgcag

SEQ ID NO: 33451 - DNA, 471 bp, Zea mays
  Peptide Sequence Number=SeqID_75230
atgaagaggaaaactctatcccaagaaaataatgaagagaaccaagatcagactagggatggcaacgagtttaaaacccgcgggtacagagattacaaactcgtacccgcgagattaatgttaaacccgtacccacacccgctactcgtgacgggtagcgtatgttacccaaacccgctacccgcgggtttatggcacctgcggtctacacagacacacaatgcacaccagtacaccacacatacgcaggcatgggcgctcgacgcaaactgttcatcggtcggtgacctagagtgggggaaggaggggcgacgtgaggaggatgacagcgtgccctggatgtcagggttcatcgtctacctccctcccgtgcatggagcaggcaccatggtcagggtgccgacgctcgagggaaaaagggggacgtggggcagcagcggccgaccgaaggaccctagcatgatggtgtaa

SEQ ID NO: 33452 - DNA, 726 bp, Zea mays
  Peptide Sequence Number=SeqID_75231
atggggtcgtcggagccgtcgtcgcgttccgtgcagaacctcgtgctgtacgccgccagcgccgcgctcagctgcctcgtcctcttggccggccttcgccacctcgatcccaaccgcgccgcctctcagaaggcgcagcagcagaagaaggagatcgccaagcgcctcggccggcccctcgtctccaccacgccctatgaggacgtgattgcgtgcgacgtcatcaaccccgacagcatcgacgtcgaattcgattccatcggcggcctcgacaaggtcaagcaagcgctctacgagctcgtcatcctgcccctgcgccgccctgagctcttcgcctccggcaagctcctcagcccccagaagggcgtccttctctatggcccgcccggcacaggaaagaccatgctcgccaaggccattgccagggagtcccggtgccgtcttcatcaatgtcaggatctccaatctcatgagcaagtggttcggggacgcgcagaagctcgtctcgctcacaagctccagcctgctattatcttcattgacgaggttgatagtttcttggggcagcgacggacaactgatcatgaagccatgactaatatgaagacagagttcatgtccctctgggatggcttcaccactgatcgtgagtccttttatactttgcctgctgccatgaaagttgatgtacaacttacatttgtcgacaatgatgtgaacttgtga

SEQ ID NO: 33453 - DNA, 903 bp, Zea mays
  Peptide Sequence Number=SeqID_75232
atggaggtgatgcgtcagtggcgactggatctagaggaggacgaagcgagacggagatcagacgagacgaggccgcgagacggggttttggctgctgtctttagtctcgctcacaagctccagcctgctattatcttcattgatgaggtcgacagtttcttggggcagcgacggacaactgaccatgaagccatgactaatatgaagacagagttcatgtccctctgggatggcttcaccactgaccaatcgaagagattaacgactgacaaaaaaaccctgcaagcacaactaagtgtttcttacagggcacctgcccaaacatccacatttgacatatttggtgattggcaggatatttcacagccaaattttgaggctaatccacctgatggggttttagcggttcctttattgaggcatcagagttggccaggtctaccaaggggtgtagaatttaatcccagtgatagtgatcttctgtggcatctagcagcagaagttgggaacgctctagctgagcgccatccatttatcaacgagttcattaaatttgttgatgatgttagagaatttatttgcactcatcctcaacatataccaggtgttaggcaagatggtcgtgcatcatacttcttccatagaagttttgagccctacatcaatgagaatgatgtaaataactgctggaagaaaattggaagccatatatccatcatcctggatggaacactgatgggttgcaaggaagtgtttgccctgtatgcagacatgccgagtgataaaagatctcaggaaactgattggagattacatcagtatcatttacaaaaacacagtgaaggcagagtcagagatagtggcgtcgaaaatattccttgcatcacggaacagtctgtgtga

SEQ ID NO: 33454 - DNA, 324 bp, Zea mays
  Peptide Sequence Number=SeqID_75233
atgatgcttcaattgggtgggggtgttttcaaaataaaacttgatgtggtgggatccatcatgggccatgatgggttccacatcgaaaaagatgtacctctgccagaccgggcgggtgacttgcatgagaagagagtctcagtgtctccgtcagagtcgattaaggaccgtcttgatgtaggcttgatgatcgaggaccttttaactggtcacatgcctcatcatggggtgaggaagcagcaaatttttgttgcttttgttccaaggtggtgcctaaggaagaaaactaagagtgaagcctcgggaggaagtgtcctcctttaa

SEQ ID NO: 33455 - DNA, 432 bp, Zea mays
  Peptide Sequence Number=SeqID_75234
atgtctagtgatagtgacagggacaatgacaagaagggaaagaagaaggagaagaagaggtactacaagaagggcggcgatgcccacatgtgtcgagaatgggactccgatgagagctccaccgactcctcctccgacgaggatgccgccaacatcgccatcaataaagccttctcttccccaacgtcggccacaaatgcttcatggcaaaggatggcaaaaagaagaagctttaggaccgaaaatgatagtttaatttccaaggctaaagaattaaatgtttgcaatgattctatttcctatgacagaacctcccaggcaccaccttggaacaaaagcaacaaaagtttgctgcttcctcacctacaacaacatgggttcaaaaaccctgagtacggagtgtactttcgcaagtcttacccatcaaaataa

SEQ ID NO: 33456 - DNA, 288 bp, Zea mays
  Peptide Sequence Number=SeqID_75235
atgggcaacagagctaatgcaatcaaccttgacttctcagatgtaattgttgacatctatatattgtctgatgaagagctagaaacatatctaaaggtgattgcagtaatatccatgggaacagaagttattgaacatgacttgttaaatatcagagagctatatgatcatgtgttggccctactatatgactatttaagaagcaagatgaacactatcaccccaattctaacagcactggtgggtgaatcagttggtgccatattgtgcatggtggaagtttggtaa

SEQ ID NO: 33457 - DNA, 834 bp, Zea mays
  Peptide Sequence Number=SeqID_75236
atgggcaacagagctaatgcaatcaaccttgacttctcagatgtaattgttgacatctatatattgtctgatgaagagctagaaacatatctaaaggtgattgcagtaatatccatgggaacagaagttattgaacatgacttgttaaatatcagagagctatatgatcatgtgttggccctactatatgactatttaagaagcaagatgaacactatcaccccaattctaacagcactggtgggtgaatcagttggtgccatattgtgcatggtggaagtttgctctttttttggatttattcagagctctaaagaaaagcattctacacccaagtatgggctcatctaccatgcatcctcaattgggaaggcttctcaaaagcataatggaaaaaatctcggtctctatctgcaaaagctgctcttgctatccgataggatgcccttggtgttgatgaggacaactccattggcactaagagtcgactcaagatggccttgtgacatgttactactgaacaacttgagacacagcttcaaattattgaaggatcaacaaacgatctgccaacggtggattccatgcttagaaatagttgtaccgttaggattaatatatggttcagactttgagaatccagacttgaacctagaagttttgtgtgctcacaatctcacattgcatgagcaggtcgtgacggttgggctggagagcacgctggtagcggaggacctcaacgactgtgcctttgtctatggcttccttagcttcctggacaagatctcttgcgtaatcatcctatttgtcttggaattgtacggagctaagtga

SEQ ID NO: 33458 - DNA, 252 bp, Zea mays
  Peptide Sequence Number=SeqID_75237
atggctgtcggagtggtgacctatagcctcagaatggatgtgaccaccagggagagggcggtgaagtatgaggagatcaggcccatctcgtacctgctcaccgaagctaaggaagccatagacaaaggcacagtcgttgaggtcctccgctaccagcgtgctctccagcccaaccgtcacgacctgctcatgcaatgtgagattgtgagcacacaaaactggcaggattggacatgtagtgtggcgtgctag

SEQ ID NO: 33459 - DNA, 1245 bp, Zea mays
  Peptide Sequence Number=SeqID_75238
atggacaaggatcgtcaagatgcggcgcggaagcgtcgggcagtcactagggtcggggaccctatgcacgaggtgaagcaggcacggggaggtgcgaagtccatcgcccctggcagcagcaagccaccgccggcggcgaagcctgccgtccctaggcccagcaagtcttcagcgggtccgagggctgccgcttccagcgcgggcaagctgccctcggctgagcctgcaaaggagcgaaggccgccgtcgccggtgcgcaccgatgaagcggcggcaggtggtgccgattttgacatggacagctgcgtggatgattacctcgttgggtcgggtgcgaggcagctggctgttgtcccgggtttggtggcgggctacttcgcctacggcggcggggtggagcgaagggcggacgccttcgccgaccatgttgcctcgagcgccttaacttcggagttcgctgccgagaggcaacgactcgagggcaggatcaagcgcctccgagtgcagcatgtggatgttgttcgggacaagtcagttgcagaaaacaagagccgcaggctgtcagagagcctgcgcgatcgcctagacaagacgaagacctcgacgtgcgtgaaggtcgagcagacgcatacacagcttgtggacacgtaccaggagctgggtgcgcggaccgcgcccttcgaagcacccggtcaggaggtgggcctccgcttccttggatggctacaggaggagctggaggtgctcccgaccattgtgacgggcctcatgtccttcgcctctcttgtcacctgcgaggggaccgtgaatgccttgtcccacgaggggtgcgggcacttcgaggccttcgaccagtctgatgaaggcttcgagcgcgaaatcttccagttcgaggacccgatgctgaagtcgtcggctggggcgctttttgataggatgtggggccctcacggccgagagactgtctgggagaggtccgaccgggcgatggatcagatggcgcatgacgaagaggttgaggaccttggtgatctggacagcatgctgcccgaggcatcgggggtggagctggcgccgccatccgatgcgggcgagggcccctcggcgacccccgcgccgactagagctggcgaagaccccgcgccagccactgtgctgatgggtgaggacgccttgaaggtggtgggcgaaccagctgccgaagacccagcggcgtcggccgggccttcgcaggtggcggaatag

SEQ ID NO: 33460 - DNA, 360 bp, Zea mays
  Peptide Sequence Number=SeqID_75239
atggacatcggcatggatgattaccgcgtgggtggtgtcatgatgtttgatgcccacatgggcagaggactcgttgggtcggatgctgggcaattggctattgtcctggctccggtggcagccacgccggctgcgttagcggccgaggcgaagggtacttcgcaggacccgtggtccaaattttgcgccagcggcgagatttcgtcggtcgccgccgctaaagacgtggcgggttctatttcccagcagctgaagcatgcggtcgcctttgccgaccatgttgcgtcgagcgctctaacttcggagttcgctgccgagaggcaacgactcgagggcaggatcgagcgcctccgagcgtag

SEQ ID NO: 33461 - DNA, 627 bp, Zea mays
  Peptide Sequence Number=SeqID_75240
atgaccagtgaagcagatcgacacaagggcggatcggtgcgagcccagacggcccaacaacgtcgagcaagcaggcgaccgacggcggcgctccaccaggaacgagcgacaacgacgctccgaggcaggcgggcaagcggtgacggcgctgtcgaagcggacggacgacggcagcgcaccctaggcccggcgacaacggcgggttgtcccgtccgtctctgcgatggcaccgccgccgccgctccagcatctgtggcgccgtcccttgcacccaaggccaacgacagcaggaaggaggtggtgcccgtggacgcgtcagagctggagaagcacgtgctggcggtggacgacaaatccgtggaccgtgccgcgattgccaggatcctgcgcggctccaggtacagggtgaccgccgtggagtcggcgacgcgcgcgccggagttgctcgcgatgggcctgctccccgacgtcagcatgataatcaccaactactggatgcctgggatgaccgggtacgagctgctcaagcgcatcaaggagtcagcggcgctgaggggcatttacgtcgtcatcatgtcgtctatgaccatcgtgatttatacattttcaaacaaaattttacgatag

SEQ ID NO: 33462 - DNA, 1482 bp, Zea mays
  Peptide Sequence Number=SeqID_75241
atgggcgtcggcgtcgccatcccactgcgtcggcggctgtgtcctcctctgtgggcaaggatggcgactccgccacggctctcactcgcagcctgcgagcgaccacctagggtgttctcgacttggcgtcacctgtcgcctggcaccctggcttcctcggctggctgcctggcttcggtgtttggtcctcagcctgtggaagaggaaagaatggatttggtgtcgcgttggcttttccaggagtcgctttccttcggtgatctcccaagcctattttattttgtttatgctctttttagtatattttgcctcgttctacttgtcgtctgtgtggttattttttcgctaaagattggcaagcggttgttacatgatagacgggtagatgggactacgtacaaagctgttctggaggatggaacaacagtggtggtcaagagattgaaagaagtggtggcgggaaagagggaatttgaacagcagatggagctaattggcaaggtgcctttgtgctgctttgcatgttatttcacctgttttgctaacttattgtctgaaagtctgactaggcacattatacatatttctgtggaaatgaaactgtatggtaacaaagctgctggaagaaccccattggactgggagaccagggtgaagataactctgggcatagcacgcggaatggcttaccttcactccgtgggtagcggcgtgaagttcattcacgggaacatcaagtcaagcaacatccttctctcacaggaactcggcgcctgcgtcaccgagttcggccttgcccagctcatgtccacgccccacgtccacccactgcacacggaatggcttaccttcactccagcttttggatttgtaggcattgctggttgtcttgaagaagatgatggtgggctcttcccaccaccaccagctatagaggaagggaagtctgtggctgacaagggcctgccccgcaattgtggtggcagagaaggtggtggcgcgattagggcagccacaacaccccatcatctgggcgaggcggtagcatcatacttgtcatcatcccgtcacatagctttgattaatgtgaggtataatcttgttttcggctctcctgatgttatagctgttgagtgcaagaaatcacatgcaagctggattgtgttagacaatttatgcaaatatagtctgcacatattacgtgcatcgggcccacaatccggcccacgcgttcacaattattcagtcccacgccgacactataaaaacaccccacgccgccagggattaggttttagcggcggtggcggttccctcgggcatgcgagcgatggtgatcctgggggccagcagcggtgtcgccttgaggcaggcgaccgacggcggcgctccaccaggaacgagcgacaacgacgctccgaggcaggcgggcaagcggtgacggcgctgtcgaagcggacggacgacggcagcgcaccctag

SEQ ID NO: 33463 - DNA, 208 bp, Zea mays
  Peptide Sequence Number=SeqID_75242
atggatacactccaagaggcccccttcagaagattaaatagcaaggtagagatgcaaactctcgtggatgacgccggttttttaccaagagagccgtgggccttctccacgcgcaagtggtgctccgcttctggctcctctcggacgctccctgccgtctccactattgagcttctggccaaaaacgtcgtgggcctcgttccctccg

SEQ ID NO: 33464 - DNA, 507 bp, Zea mays
  Peptide Sequence Number=SeqID_75243
atggacgacaaacatctcgggagggtggttcgcccacgaccgattgatcaggccaacaacgtgcgaggaggagacaatgatggccacgccagctgcaccgtcaaagaatatggggaagctagtgttgttgaagccgatgtcgaggacacaagctcgatagtggagacggcggagagcgtccgagaggagctagaagcggagcaccacttgcgcgtggagaaggcccacggctctctacgaatttactcgattgagcatggaagagagaagaggcagatccagaccatcactgtagcgaccaagggggtggcacaacccgtcatcacagtgacaagggaagggcgcagctcgcggaccatggagccaagacgacgtgggactggagggacacgtcgagcagcctctgccgatccgagctacctccccgtggccgtcaccacgacggcgagcgaagaggaagctcggacgcagtggcctagccacaatcgtcaccatgatgacgtgtga

SEQ ID NO: 33465 - DNA, 3729 bp, Zea mays
  Peptide Sequence Number=SeqID_75244
atggggaggagggcccgcggatccgcgtgggggaggaccgctttgattgcggcggcggtggggaggagggtgggggatccgcgggcgttgattggtggcgacatggtgtcaatcgaggaattggtggcgctgatggcgggcgggtttgaggcatggcttgctaaaatggcaaatttaaacataaccaacatcttggagaagatgacagggaaagataaagactacagatatatggcaacatcagatctgcttagtgaattgaataaagaaagcttcaaagctgatcaagaccttgagccaaagttaacgattactgttcttcaacaacttgaggatgcttcgggagatgtttctggtttagctgttaaatgcttggccccactcgtcaagaaggttggtgaggacagggttgtggagatgaccaataaactttgtgataagttgataaatggaaaggaccagcatcgggataccgctagtatagccctcaagacaatcattgctgaagttactacaccgtcacttgctgaaaagatcttgctttctcttgccccgcaactcatcaagggtgtcaatactccacagaagcttttcaattctctagatattataaactacattttgtccagtgcaatgaagtacttttggaatgacattattgcatggcagtttcaccacctattgtggcaagcaaaaagtgctgaaattaaatgcgaatgtcttgatatattggcggatgtgcttcatagatttggcaacttgatcacaaaagatcatgagtacatgctcaatgcacttttatcccaattgggttctaacccagcaagcgtcagaaagaaatctatttcttgcattgcatcacttgctccaagtttatcagatgatttgttagcaaaggcaactttgcaagttgtccagttgctgaaaaatagaggtgcaaaatctgaaattacccgaacaaatatccagatgattggttctctaagtcgttctgttgggtaccgttttgggccacaccttgctgaaactgttcctttgcttataagctattgtacaagtgcatctgaaaatgatgaagagctccgtgaatacagcttgcaggctcttgagagctttatgctcaggtgcccaagggatatatccccatattgtgagggcatcttgaatcttgctttggaatatgtgagctatgatcctaatttcactgatagcatggatgaggatactgatgaggaagcgaaggaagaggatgatgacgatgagagtgcaaatgagtacacagatgatgaggatgcaagctggaaagtccgtagggcatcagcaaagtgcctatctgcaattatagtgtctcgtcctgaaatgttgtcgaagatgtttctagaggcttgtccaaagttaattgaacgatttcgggaaagagaggagaatgtaaagatggatatatttaacaccttcattgagctgttacgccaaactggtaatgttacgaaaggacaaggcgacatcgatgagtccagccctcgctggttgctgaagcaagaggtcccaaaagttgtcaagtctatcaacaggcagttacgtgaaaaatcaatcaagacaaaggttggggcattttcagtactgaaggagcttgtggttgtattaccagactgtcttgctgatcatttcgggtcacttgttcctgggattgagaaggctttgaatgacaagtcttctacctccaacctgaagattgaagcccttgtattaacaaggcttgttatggcttcacattcaccatctgtgtttcatccatacatcaaggctctttctgcacctatactgtctgctatcagagatagatattataaagtcactgctgaggctttgcggacaacctcagttgattttaagccatacattggtccaatctataatgcaatactgggacgtttggccaatcaagatcaggatcaggaggtaaaagaatgcgccatatcttgcatgagtttggtggtctctacttttggtgatggtcttgaaagagaattaccagcatgccttcccatactcgttgacaggatgggtaatgaaattacaagacttacagctgtcaaggcattttcagttattgcgaattcacctctacgtattgatctctcgtgtgtcctggatcatgttgtttctgagctcacagctttccttcgcaaggccaacagagctcttaggcaggcgacgttgggaactctaaattctttggttgtcacatatggtggtcagattggctcttcttcgtatgagacaataatcgcggaactttcaaccctcataagtgacatggatttgcatatgaccgctcttgcattggaactttgttgcacaataatggttgacagaaaatctattcaaaacgttggtttagctgttagagataaagttttgcctcaggcccttgttttgatcaggagtgccctgttgcaagggcaggcactgcaggctcttcagaggttttttgcatcacttgttcaatctgcaaatactagctttgatgctttgttggagtcccttatttctgctgctaagccatcacattcagcagctggtgaccagaagtgtgcatctacaattgaaatgcttaaaggcattttgaaagacgacagcactactaactctgctaaacaacacatggccttattatgtctgggagaaattgggaggaggaaggacctcagcaatcatgttcaaattgagaacatcgtcattgaatcgtttcaatcaccttttgaggagattaagtccgcagcatcctatgcacttggaaacattgctgttggcaacctctccaagtatttaccatttattttggatcagattgacaatcaacagaagaagcaatatctgttgctccattcacttaaagaggtaatcgtgcgacaatctgttgatcatactggccagagtgagctacaggattcaaacattgagaagatattggcattgctcttcaatcactgtgaaagtgaggaggagggagttcggaatgttgttgcagagtgtttaggaaaaatttctctaattgaaccaaaaaaactagtccctgctttggaggtacgcacgtctagcccagcagcaaatacaagagctacggttgctattgctataaaatattcaattgttgaacgacctgagaaaatagatgaaatcatgtactccaagatatctactttcttgatgttgattaaagacagcgataggcatgtgagaagagcagcagttctggctttgagcacagcagcgcacaacaagccaaatttgattaaaggtcttcttccagagatattacctcttctatacgaccaaactgttattaaggtggtcaagaaaacccccgaacccctgccccacccatacacagcggcatcgaagcccatctctaccatttcagtcctggactccatagttgaaccaatcgagaaaactataagccacaaacccaagggggatgcagtgaagcaggaggttgatcggaacgaggacatgatccgcagcgctctcagggcaatatcttctctaagccgcataagcggcagcgactacagcatacggttcaagaatctgatgaacaagataacggccacccccgcgctcgccgagaagtacaactcgtcacctcttgcatacatcggtaaggttacccccacagtccaagaggggatcaaacagcaagctcctttgaaaccatttacttga

SEQ ID NO: 33466 - DNA, 909 bp, Zea mays
  Peptide Sequence Number=SeqID_75245
atgaagcgcgtcgggatcgtggggagaacaggagtgctgcagatcgccgtcgaacgctggttcctccgctgggtcagctgcgccgtcattgtaacgcgtccacaccacggttctgcccggtgcccgcgatcgtcctcccccacccgccccgccatcagcaccccattttgctcggtcgacaacgcgccgccaccaatcaacgcccgcgcatcttcgtcaatcaacgcccgcggatccgccaccctcctccccaccgccgccgcaatcaacgcggtcctcccccacgcggatccatgggcgttcctctccaccttcgccgcaatggaaggtcgtttgtaccacgccgtggatccaccactcagtaccgcgccgtggatggcagacctcccagtaccgtgcccgcgctgtccgcgcatcactagcagcagcagccgcagacctagacaccaccaccaccaggtcgccgtgccagagagcttgggggttaggcggacgacgcagatggcggggaggtctacgacaggcttaggccctagcacaggaagtttcttgcgtccatggctagctctcgtggccctcggttgtccgcctcaccgtcgtgcccttcatgttccccatcgagaaggtccgaccttctctgatctccatcttgcccctggcaagctcgtcactgccaccttgttatcattgataacgtcactaggtacgtcctccctccctctccctagatctacgcgcggaggcgcgacgccgccgacggtgaagggcgctcctgccagggggaactggcttgctcatcacatcaccagagtcatggctgacctcgacttctacattggtgaggaggcactagccccatcccgcgccagcagctcgcacagcttgagctatcccatctgcaatggctag

SEQ ID NO: 33467 - DNA, 1455 bp, Zea mays
  Peptide Sequence Number=SeqID_75246
atggcgctgccgtttaccgggctactcctgtcctgtccctgtcgcctgctcacgttccattcatcgcccggcttcagcgaagccaagtacagtgctcgatcgcacgctgtctgcctgcccccgccactgggatgcgcctcgccgccggcaatggcgtccgccgtagctagcagcgtgcacgcgggacccgccgcggcaggggccttgacgttcgggtggctcggcccgcgcctgtccctgggcggccgcgacgcctccgccaccgccgcggaggcggaggaacccgccgcggcgtccaatgcggcggagccggcgatctccaaggacttcatcgacttcgagttctgcctcggcgtgtcgtccaccacgatgctgcccgcggacgagctcttcgccgacggcaagctgctgccgctccgccccccgcaggcggccgccgcccgcggggtggagaggcggcgggacaccgcgctggtcgaggaggtcccggccgcaccggagctgagccgggcggcgcgactctccgcgcccgaggcggcgctggacctggacccgtacgtgttctcgcccaaggcgcccacgtgctctagccggtggcgggagctgctgcggctcaggaaggccggccagacgccgtccgcgtccgcgtcgcccccggcatcccccgcggcgaccccttcgtcgagggcatccagctcctcggcggccaggtcgctgaagctgctcctccagcggagcggcggcggccgcgtggcggacctcgccgcggcgcctctcctgctgcgcgacagctccgactcggaggcgtcgctgtcgctcacgtcctcccgctactcgctctcgtcgtcgtcgtcgtcgtccgggcacgaccacgacgacttcccgcgccactccctcgactccgtggacccaaccccacgtccccgcatccgccttgtccgctcccacccccaggcgccgcagccgcaaccacacccgcccgtctctgcttcggcctctgctcccgctcccgctcctgcgcgcgccgcgcatagccccgctcgccgccgcccgtctccgtcgccctcgccgccgccgccgcagcagcagcagcagcaggcaagcgtgatctcggtagactccccccgcatgaacgcctcaggcaagatcgtgttccagggcctagagcgcagctccagctcccccgccggcagcgcccactcgtccatgcggtcgcggtcgcggtcccggtcccgcgtgatggaccggtcctactcggccggcgtccgcgccacgccggtcgtgctcaacgtcccggtgtgctcgcgcccggtgttcggcttcttcaaggacaagaaggaagccgcggcggccgccgcgcggtcgcggtcggcgctgggccggaggacgacgacgacgacgactgctgcggccggtggagtgggcggcagagatctcggcaatggtccgcagtga

SEQ ID NO: 33468 - DNA, 1305 bp, Zea mays
  Peptide Sequence Number=SeqID_75247
atggcgtccgccgtagctagcagcgtgcacgcgggacccgccgcggcaggggccttgacgttcgggtggctcggcccgcgcctgtccctgggcggccgcgacgcctccgccaccgccgcggaggcggaggaacccgccgcggcgtccaatgcggcggagccggcgatctccaaggacttcatcgacttcgagttctgcctcggcgtgtcgtccaccacgatgctgcccgcggacgagctcttcgccgacggcaagctgctgccgctccgccccccgcaggcggccgccgcccgcggggtggagaggcggcgggacaccgcgctggtcgaggaggtcccggccgcaccggagctgagccgggcggcgcgactctccgcgcccgaggcggcgctggacctggacccgtacgtgttctcgcccaaggcgcccacgtgctctagccggtggcgggagctgctgcggctcaggaaggccggccagacgccgtccgcgtccgcgtcgcccccggcatcccccgcggcgaccccttcgtcgagggcatccagctcctcggcggccaggtcgctgaagctgctcctccagcggagcggcggcggccgcgtggcggacctcgccgcggcgcctctcctgctgcgcgacagctccgactcggaggcgtcgctgtcgctcacgtcctcccgctactcgctctcgtcgtcgtcgtcgtcgtccgggcacgaccacgacgacttcccgcgccactccctcgactccgtggacccaaccccacgtccccgcatccgccttgtccgctcccacccccaggcgccgcagccgcaaccacacccgcccgtctctgcttcggcctctgctcccgctcccgctcctgcgcgcgccgcgcatagccccgctcgccgccgcccgtctccgtcgccctcgccgccgccgccgcagcagcagcagcagcaggcaagcgtgatctcggtagactccccccgcatgaacgcctcaggcaagatcgtgttccagggcctagagcgcagctccagctcccccgccggcagcgcccactcgtccatgcggtcgcggtcgcggtcccggtcccgcgtgatggaccggtcctactcggccggcgtccgcgccacgccggtcgtgctcaacgtcccggtgtgctcgcgcccggtgttcggcttcttcaaggacaagaaggaagccgcggcggccgccgcgcggtcgcggtcggcgctgggccggaggacgacgacgacgacgactgctgcggccggtggagtgggcggcagagatctcggcaatggtccgcagtga

SEQ ID NO: 33469 - DNA, 456 bp, Zea mays
  Peptide Sequence Number=SeqID_75248
atggagtggagcggatccacggcggcgcttgaaccacggcgggcactacccgctgcggcaatgcccaactaccctgcccagatgatgcgccaacaggaaaagaacaaggcgagccagcaggaggtagctattaccgtagctgttggggagaatcgccaattgccgatggagcatatgtcgcggcgaaggagcacgtcgacgaccaattccagtcgacgccggtggagccccgaattggtggatggagggaagggggtcgcggagcttcggcttttatgcaccacggtgaagtccgagtggagggaacctaacggcgaacatcgcggcgagggagtgctgaccatgcgagcctggtgggttctgttgagatgcgcacggaacaagggaataggtgatgacagggcggccccacccgtaagcgagagagaaatcgggagcgcgtgtgaaagagactga

SEQ ID NO: 33470 - DNA, 456 bp, Zea mays
  Peptide Sequence Number=SeqID_75249
atggagtggagcggatccacggcggcgcttgaaccacggcgggcactacccgctgcggcaatgcccaactaccctgcccagatgatgcgccaacaggaaaagaacaaggcgagccagcaggaggtagctattaccgtagctgttggggagaatcgccaattgccgatggagcgtatgccgcggcggaggagcacatcgacgaccaattccagtcgacgccggtggagccccgaattggtggatggagggaagggggtcgcggagcttcggcttttatgcaccacggtgaagtccgagcggagggaacctaacggcgaacatcgcggcgagggagtgctgaccatgcgagcctggtgggttctgttgagatgcgcacggaacaagggaataggtgatgacagggcggccccacccgtaagcgagagagaaatcgggagcgcgtgtgaaagagactga

SEQ ID NO: 33471 - DNA, 1116 bp, Zea mays
  Peptide Sequence Number=SeqID_75250
atggaaggtccgaccccgccgtcgcgatccccgcgcagctgctccaaggaaggaaactctgatcccgctatccccgcccccgctctcctctctcggccgccatcatggaaggtccgctctctctcgccatccccacgcggctgctccaaggaaggaaggtccgaccccgccatcgccatccccgcgcggctgcattcccctctcgccatccctgcgcggctgctccaaggaaggtccgaccccgccatcgccatccccgcgcggctgctccaaggaaggaaggtccgacaccgccatccccgtagtgggagattccgatcctccacgcccgcgcgcgccatggagacggtgtctcggaagcgcaagggcgcgcccccggtgtgctccgccaccaggtccctccaagatttggcctcccgcaagcgcgcctaccggggctccgagccgcagcaatcccactgcaccgacgcccccgtcccagccgtgcgagggtcctcccggggcgcgggctcaagcggaaaggtgggctgcatcgacaacgccacgcggatcgggtggcggaagcggctggagagcgagtacgacctcggcgatgagatcgggcacggcaagttcgggttcgtccgcgtctgccgccccaaggccgggacccggggcgaggaggagttcgcctgcaaggccctgccaaagaacggcggtgacacgacccaccgcgaggtggagatcatgcagcacctctcgggccacccgggcgtcgtcacgctcagcgccgtctttgaagacaccgacgctttctacctcgtcgtgtcaccgacatccccgcagtgggagattccgatcctccacgcccccgcgcgcgcaatggagccggtgtcccggaagcgcaagggcgcgcccccggtgtccgccaccagcagcgagcgagggcaagtcaatggagatggtattcgacagcagcatgttagggatcgagccctactccagggaggtacccagaatggcgaactactcgtcatggactccatgaacagcaacatctacaggatggcgctgccgctgtcccaatgtgcatttgctgcatatgactattctggctatggtgcatctactggcaag

SEQ ID NO: 33472 - DNA, 363 bp, Zea mays
  Peptide Sequence Number=SeqID_75251
atggcgatggcggggtcggaccttccttggagcagccgcgcagggatggcgagaggggaatgcagccgcgcggggatggcgatggcggggtcggaccttccttccttggagcagccgcgtggggatggcgagagagagcggaccttccatgatggcggccgagagaggagagcgggggcggggatagcgggatcagagtttccttccttggagcagctgcgcggggatcgcgacggcggggtcggaccttccatgatggcggccgagagagatgtaattgtggacattactccacaactaatcacacacaatcaaagatccaaatcagacagatatcataagaacaaacactcaagcgtatag

SEQ ID NO: 33473 - DNA, 150 bp, Zea mays
  Peptide Sequence Number=SeqID_75252
atgggtattggtgttaacataactagggacatagttgagataggtgtgggtacatgggatgtaattgtggacattactccacaactaatcacactcaatcaaagatccaaatcagacaaatatcataagaacaaacactcaagcgtgtag

SEQ ID NO: 33474 - DNA, 957 bp, Zea mays
  Peptide Sequence Number=SeqID_75253
atggccgattacctcgactattcgaggattctcgaagccaccgatcccagcggcatcgtggacgggctctttagtggccacgggaacggacgcttcctcggctcttggagcattgggacgtcgcccgtggaggaagtgggtggcggagatccgggacccgcagaaggcggcgcgggtgtggctgggcaccttccccaccgtcgaggacgccgcgcgctcctacgacgccgccgcgccaagctcaactcccccgaggacgccaccgcacaccgcgccagggacgccgaggcggccttcgccgcggccagggcggggccgcccgccgcgctgctcgactcgcaggccgtcggcgacgacatggccgattaccttgactattcgaggattctcgaagccaccgagcccagcggcatcgtggacgggctctttagtggccacgggaacggacgcttcctcggctctgggtttgaaatgggctcggtggcggccggcgcggatgaggggtggtggggaagggcgagggcgggggcgacggaacacatccacgctcaccagcggtgggcggcgccgctgctggtatcggtcctgctctcgccgctcctcatctccgcgtcgctctccttctcctcctcccgcgcgctgctcatctccttctcgccgctcccatccgcagcctccgccgagcccctcttcgtcgaggccccgcgcggggcgccgtgcccaggatggtgcgggggacggtgctgcgcggttgtggtgggaggggcattccatcgcgcgtgggagggcacgcggttgtgggctagcgcgagatccgcggggggcgagatccgcggcggatgcgagggacatccgggcgtgcggaggtttcgtgcggggctggcgtgcgttgtttcaccactacattgcaaccatcagtatcatgcagacttcgatattgtcggggaccataattag

SEQ ID NO: 33475 - DNA, 837 bp, Zea mays
  Peptide Sequence Number=SeqID_75254
atgggtccattagaaccaacagctgactttttaaaaataatcacaataacacaaaagcgttggagtgtagctctgagatgtcctgaggacacaggaggttttgctcaggagcactttgccgacctcgaggacgtctatcccaagccactcctagaactgccttgcaaactcacggcgaaagaggctgagtgcccgtacgttgcaacgttgtttcaccactacattgcaaccatcagtatcatgcagacttcgatatatgctacgatttgtatggtctcatcattggagagcacgttccacacatgctggaagaaatttccttcgtacatcgttagtcatcagacacacaccaccatacgctcttgcttaaacaaaaagaacaacccgagagtcgtcaatgttggcgacaaccatgaggcccccctgcttaacgatggacagcgcggtgcagctgctctggaccgcgtccaagtggtggcttcgcgggagcttgtcgtacacagcggcgcatgtgaccacgtaggactgcttctagaggtcgaactgacagtcgccaacctccttctcgtcatcgataagcgacgccaacctagacgtgggctgtacaggggaatgagaatgggaatgagctctgcgggaggagggaatgagaaagacaaaataaagaatgagaatgacagacatgggaatgggaacggtggcagaacacgggaatggccgactactcttacagccttaatagtagtagagatatggcaaaatctaccctacacacacgtcatgcatgccgatgtcgctcaatcacgatgtgttacttccctgggacctgggtgctag

SEQ ID NO: 33476 - DNA, 510 bp, Zea mays
  Peptide Sequence Number=SeqID_75255
atgctggtgagcgaccccaaatctggcacgagcacgcggtcgtccttcttctcggtgcctcggtctgaagtcctccgcgcctccgcgagaggagctcggctgctcagcgcccgcggagaggagctcgtccagtcgtcctgtcgagcaggcgggcggcctgggtggagctcgggtaggcggcgcctcagcctggtcgcgggcagccgaagggtccacgtcctcgtccgccaacccaaagtcatccagcccgtcatcgctgggcatgcctccaccgccgcccttcttgagaaggtgctttcggggcttggaggaggaccctgccccgccgtcgtcgccgtggacgggggtcggagagcggtcgcgggtccaatcgccgccgccgtcgaggtcgtcatcgaggtcttaatacggctgatgctcaggggagggttcccgttcgtcgaggttcacgatcggctcgccttcgtcatcgtagctgggagagtagatcgaggaggggaatcaaagtga

SEQ ID NO: 33477 - DNA, 1602 bp, Zea mays
  Peptide Sequence Number=SeqID_75256
atggcggaggagaaatcacggcacaccgtcctgggtccgccggcggtcgcagaccgctgtcaagcgggccccacggtcaggcgcacgctacttcctggttgggccgcgcggctggcttcatctggtgggccaaaagatgaggtatgggcccagggtttcgcttcccgtctcgccgccgtcagcatgggggacaactacgatgacgaaggcgagccgatcgtgaacctcgacgaacgggaaccctcccctgagcatcagccgtacgaagacctcgatgacgacctcgacggcggcggcgattggacccgcgaccgctctccgacccccgtccacggcgacgacggcggggcagggtcctcctccaagccccgaaagcgccttctcaagaagggcggcggtggaggcatgcccggcgatgacgggctggatgactttgggttggaggacgaggacgcggacccttcggctgaggcgaggaagaggaagggctcgtcgtcgctgagggacctcgcgaggggcggggcgggcagggagaagaaggctaagaaaatgcggatggaggacgacgggagggggagggacactgggatggtgagggataggcggggatcaggaggaagggactcaggcggtagggatgaccaggatgatggggagagggagatccaggagctctgggataccattgctggtggtgagtcagaggatgaccaagaaggtgttagaaccgtagatgatgataatttcattgatgacactggagttgatccagctgatcgttatggcagcgataatgagcgacattcacctggacgttatgcacaggctgaggagggtgaggaggacgatgaaatcgaacgactcttcaagggtggtaagaagaagaagaagaagaatgatcgccctcgtgcagatattggccttatagtggaacaattcattgctgagtttgaagtagcagccgaagaagatgcaaacttgaataggcaatcaaaaccagccattaacaaacttatgaagcttcctctgctcatagatgttctctccaagaagaatcttcagcaggaatttcttgaccacggagttctcactcttctaaaaaattggcttgagccattacctgatggaagcatgccaaacatgaatattcgatctgctgtactgaaattattaactgattttccaattgacttggaacagtatgaccgaagagagcagcttaagaaaagtggtctgggaaaggtcattatgtttttgtccaaatctgacgaggagactactgcaaataggaaattggctaaggagctggttgataaatggtccaaaattgaccctgagcagatacgggctcgtgctaagcaggctgtccaagaccagcgtcggctgaagatgaacaagaaattgcagcagctgaaagcgcccaagaagaaaaaccttcaggcgtcgaagctcagcgtggaaggccgtggcatgatcaaaagggatgaggagcacagtgcgccgctcggcacgggcgcactgtttgccaacagtctggacaggcgtgccgtctgctggatgcccctgacgccgtctaccagtggattggacaggacacattaa

SEQ ID NO: 33478 - DNA, 714 bp, Zea mays
  Peptide Sequence Number=SeqID_75257
atgccccgttcgttaggggtcggctggtggcccagaggcgcgctccaaaagtacctgcgggtgattcgccggacccagaccccttcgacagggtctgagggctcgatgcctccctccggtgggattccgttacaaatcgttcccgccggtctcggaaatgtcctaggggctgcctcgagtcatgatattggttccgcagtcgaggaggcgcggcattcggcgcaagtggcggtgcggctctttgcacgtcgtaaccggcgcgccggttacatgacatgcaggcccgcttcctttgtgctggtccaccggatgcggtcgaagccgaaagggcgcacaattgcggtgcggttggatgcctgtcgcgtggcagtccaccctttcgaccaccggtttctgcgaagatgggagagcgcttgtaaccgcggggcggttgcatgcctcgcgtgcggcggttcgccttcttcacactttggattagctcgtgtgacgtgtgggacccagcccccgtgtcgtagggggagaaccctggagtatgtcagtggagactttgcctatgacgctaaggggtgcaagcaaggaggtctgcctataaaaggggatggatcccccgggcagtggccatgccttcgttctcccctcatgcatcgcgcccttccacctttcgagcccccagatggggtgtactggcatcgccttgcactcgctgtcgtttga

SEQ ID NO: 33479 - DNA, 1212 bp, Zea mays
  Peptide Sequence Number=SeqID_75258
atgccttcgttctcccctcatgcattgcgcccttccacctttcgagcccccagatggggcatactggcatcgccttgctcttgctatcgttggaggagcgcggcctcgtggagatcagcgctcttcagccatcgctgggcttcaaagattttcgtcgtgcagcccggctgcattccctcaccaatggtcagtctagtggggagaagcaagccgggctgcggcctccgccccaccctcagcttcaaggatcttcatcatccttgctatggcggagggcgagctgagtcggggttctacctcccgcatgggccggcaggccgcctcttccttcagcattcaggggagagggcgctcaccggccttgcggagggggcgaactttggcaacacgggaccggtcgaccgcaagcgtcgtcagctccagcgtgcctggctcgctggctcagctggctctttcgcggcctccgacgctgcctcctgccgcttgatccgggcgtggccgtccgtccatcgcgcgggcgactgttgtgccgtgcgcaccggggaatcgtccaagacgccgtgcgccgcatgggcggcgttcgtgttcttggattgtcttgtcctcactccggcacgacgcctccgcgcggaggctggggcgtccgccattcgtcggcgtggcgctggcgcgtgggtggccgctgtcatcggtgctgaggtggtggcagccagagaaggtttctccgccgatgagaccgtcggcgctatctggagtttgttgtcccgcaggccctctggtgtggaggttgttcatacccgcgggagtggaaccggagtcccgtttgtaaggggatatactgggtttttgccggagaaaaataaccctcggctgctctgcgatgagccggagccggaggcagaggtgttggcgcgaacagaggcggagttggctcgaaaagagacttcgtcggcccgtgagctggcggcttcccaggttaaggaagatgtggcagcagcagttggagcttggccaagacatccgctggcgcggtgctggcgtcctcccttgggtggaggtcctttcgcctgggtcgtcgtccgaggccgggccaggttccaccgagggtggaaacaacgccgagggtgctgctgctccccctgccgatgcctgaacctgcaggaacagtttgtctgtagcatgcgcatgtttttcacggccgtcgaggcctaa

SEQ ID NO: 33480 - DNA, 207 bp, Zea mays
  Peptide Sequence Number=SeqID_75259
atggagggggacgatgttgctagcgataatggtggtgggtgcgctgcaaaggggggtggcggtggtgtgctgcaaaagggggcgtggggcggtggtagtgcgcatggaggtgggcttattccagacttcaaggataagctttccagtatcttcttgggtaaggtgctttttctcttgagatgggttaagatgagaatggaagcataa

SEQ ID NO: 33481 - DNA, 165 bp, Zea mays
  Peptide Sequence Number=SeqID_75260
atggcggtgggtgcgctgcaaaagggggcgtgggtggcagtagtgcgctgcaaagggggcggcacgcgtgcagggggcacgggcttcaagggtaagcttcccggtatcttcttgggtaaggtgctttttctcttgagatgggttaagatgagaatggaagcataa

SEQ ID NO: 33482 - DNA, 318 bp, Zea mays
  Peptide Sequence Number=SeqID_75261
atgcccggattcgcgccctgctcgcccagatccgaccacgactttgatttcccaaacgacgcaggagcgcgatgcttccgttgcgccgtctacaactacgacggtaagcgaccacgcccctcgttccaagatgaatctgacacgcaatcttgtgctcatggtcgtcatgcgtcgtttttttctgtttcgtcaggggactacaaggacaaggatggtgtcaaaggcctatatgcgtctgagaacatcattgcatcatgccactgggcatacaagggtgttgaggaagactcaaccctagaagatccctatttcttataa

SEQ ID NO: 33483 - DNA, 153 bp, Zea mays
  Peptide Sequence Number=SeqID_75262
atgacgcacagagaatgctcggagaagtgtccagctgggaagcatgcgacaagaaccagactatatgcgtctgagaacatcattgcatcatgccactgggcatacaagggtgttgaagaagactcaaccctagaagatccctatttcttataa

SEQ ID NO: 33484 - DNA, 228 bp, Zea mays
  Peptide Sequence Number=SeqID_75263
atgcccggattcgcgccctgctcgcccagatccgaccacgactttgatttcccaaacgacgcaggagcgcgatgcttccgttgcgccgtctacaactacgacggggactacaaggacaaggatggtgtcaaaggcctatatgcgtctgagaacatcattgcatcatgccactgggcatacaagggtgttgaggaagactcaaccctagaagatccctatttcttataa

SEQ ID NO: 33485 - DNA, 247 bp, Zea mays
  Peptide Sequence Number=SeqID_75264
atggcggggatcgcagagcggaggggtaggagagcgttgatggcggccgcgcacctcctccctacgccctcaacgtgcgcgccatcgacgtcgtgggggaggtgcgcgttgatggcggcctcggatccccgtaatcacggagcagagggggaggagggtggggggatccacggcaaccttccaggcaacggctcgaatctggctgctgtggcctttggccccacctggcttgttcaagctcgcggtg

SEQ ID NO: 33486 - DNA, 630 bp, Zea mays
  Peptide Sequence Number=SeqID_75265
atggcggcctcggatccccgtaatcacggagcagagggggaggagggtggggggatccacggcaaccttccaggcaacggctcgaatctggctgctgtggcctttggccccacctggcttgttcaagctcgcggtggcgtgaatcgagatgctgccggtgttgctaaccacgcccgcatcccgcctacctccagcaggggagccgtgcccccggatgcttccaggggcagggagcggatcctaaggcgaggtcgtcgacgggatcacgctggcctggacgatggcgacgagcgccctagcggcgcgcgcgtatggcgggctcgtgcctgcgtgggggaatcgaacgacgagggcgtgtgcgagtcaggcggagagaggaagggaggtgaggcggagaagggctcagcggctatgaagaggctctcgcgacgggaatctcgcgatgcgggacatacccgcatgcgggggcacggcaggggcctagaaggtgggggaggagggtggggcggatcctcggccacctgggatctgcgcgcgccatcgaaggcgtggggaggaaggtggggcagagcagataggagggcgcgatggggtggaacctcgggcaccttccatcgacggcgtgggtag

SEQ ID NO: 33487 - DNA, 1289 bp, Zea mays
  Peptide Sequence Number=SeqID_75266
atgacgtcgcggaatcaccggaccctgcctggcctcgaagccacggagccggagaggccggcggcggccctcagcatcgatctcatggaagagatcttcctccgcgttgcctcccctgcagacctcgcccgtgcctccactgcctgcgtctccttccgccgcatcatcagtgatccgtccttcctccgccggtaccgctctatccacccgccgctgctcctcggcttaatcggcgttgcaggtttcacacctgccgacccgccccatccctccgctgctctatcccgcgctgtcgcccgcgccgccgacatctccttcgacttcctacctcgcagtcgcaccgccaattggcgccactcgcatccgtggtatccgtgcgatgtccgcgacggccgtgtcctcgtcaagtgcattcgcgaggaacccgtcgtatacttggacctcgcggtgtgcgatcctttgtcccgtagatacctgctgctgcctcctttggccgaggacctagtactcgcctccgtcgggctccaaaaaccaagtgtggtccattctggggtctcgtttatcccttctggaggcgtggaggagacatcattcagagtgatcagctggaaatattccaagacaaggctttattcggtccagtgtgtgtatggccactgctattggagattatgtggcacaagcaagttaatcaagctcgacatgaacagcatggagttctccactgttgacctcccacctgatcacgaaaagaggaatgtcatcattgtggagtcatggggaagcaatgttgcaatgtttagtatgattgatgaaggcgcatctgtggattattacacctcttcgcaaaatgacagcgagaagtcccatgagtggcatatgatgattagcatccctttgcctgcagactatattattggcccctgctttaagggtccagctgaaggccagccccgaaaaccaagcgcgcaggcaacaccgcccgtcatccgcgccgccatcaacggaaggtgccgaggatctcctaccccgccatcaacggaaggtgtcaaggatcttctacccctgtactctgcaatccccgtcatccgaggccgccatcaacgccctcctacccacgccgtcgatggaaggtgcccgaggttccaccccatcgcgccctcctatctgctctgccccaccttcctccccacgccttcgatgggcgcgcgcagatcccaggtggccgaggatccgccccaccctcctcccccaccttctagggcccctgccgtgccccccgcttgcgg

SEQ ID NO: 33488 - DNA, 546 bp, Zea mays
  Peptide Sequence Number=SeqID_75267
atggaatcccaagcagaggcactcgaccagttagcaactgatgatttattagaaggaaagtttgcactgcttgagacttcatctgttgatgatgatctttcacaactgaaaaaggaattgtctggaagctctttgattctctttgtttctggtgtcttgctgaccattgggtcaaaaccaactgtgcagttcttcactaagcctaaggatcacaagtgtgactcatcggaacctgatttatgtgattcgggatgcaatggtgtgcagatgatgcgtccttcagtcatctccaaggctggtggccttgaaagagagaaggattatcgttacactgggagtgatgtcgcgaagacgctccccaaaaacctaattgccgatcccccgtgcaaggtctcgaacggcaccggcttcggaggcacctgccctctcgcttctctgtgcgcgcttgccgagtcacgccataagtcggcagctcaaggagaagggtcactcggcagacgaagagacatggtcactcggctgacgtacgcggttagtgagtgctaa

SEQ ID NO: 33489 - DNA, 447 bp, Zea mays
  Peptide Sequence Number=SeqID_75268
atgcggcttcatacccttagagtcatctccaaggctggtggccatgaaagagagaaggattacccgtacactgggagtgatggtaaatgcaagtttgacaagtccaggatttcttcagttcaaaactttagtgttgtatctgtggatgagggtcaaaatgttgctaacctcatcaaagatggaccactagcaattggcatcaatgttgcctacatgcaaacatacatcgaaggcatgccatgtccatacatttgtggaagacaccttgaccatggtgttctccttgttggctatggcgcaactggttttgcccccatccgcctcaaggacaagccttactggatcatcaagaactcatggggcaagaactggagggagaacggatactacaagatatgcagggttccaacattcgcaacaagtgcggtaacaccattcatgtattaa

SEQ ID NO: 33490 - DNA, 2583 bp, Zea mays
  Peptide Sequence Number=SeqID_75269
atggtcacgttccccgtcttctgccagtgcccggccgccgccgacaatgccacgacgctcgtcacctacgtcatgcagcccggggacacggcacctagaagcgacaatgctgcaggtggcatgcttagaaatttgcaggtgaggtaccgctcaagctacactggtagctttccacactggatacgggaactggactccccaagagaagcttctctgcttaaacagatctataaaagcgatccagaaagagttgtacaaatctttgaaaggcacccttcattgcattccaactctgctgctctttctgagtacataaaagctcttgccagtcttgacaggctggaggatagccccttgctcaaaacattgcagagaggatttgctacttcagcagctgaggaagaaagaagtactggtcttgctgctttcgggagtgtgggtcggcggacgaaagatggagctcttggtacagcgaatgcacctattcacatggttactgctggaaccggtcaatttaaggagcaactttggaagaccttccgaagcgttgcacttactttccttgtgatctccggcattggagctctccttgaagacaggggaattagtaaagggcttggattgaacgaagaggttcggcccaacatggattcgaagacaaagttcagtgatgtcaagggagttgacgaagctaaagctgaacttgaggaaattgttcactacctacgagatcctaagcgttttacatgccttggtggaaagcttcctaaaggtgttttgctggtgggaccacctggaactggaaaaactatgctggcaagggctatagctggggaagctggtgttcctttcttctcatgcagcggtagtgaatttgaggagatgtttgtgggtgtcggggctaaaagagtgagggacctgttcaatgcagcaaaaaaatgttctccttgtataatattcattgatgagattgacgcgattggtgggagcagaaatcccaaggatcaacaatacatgaagatgaccttgaatcagttgcttgttgaactagatggctttaagcagaatggcggggtcattgtcattgctgccactaacttccctcagtcacttgacaaggcgcttgttaggcctgggcgcttcgaccgtcatattgtggttcctaatccagatgttgagggccggcggcagatcctggaggctcatatgtcaaaggttttaagagctgatgatgtggatctgatgatcattgcaaggggaactcctggtttctcaggtgcagatcttgcgaacttggtgaatgtagctgctctgaaggccgctatggatgaagcaaaagctgttacgatgcaggaccttgaatatgcgaaggacaggatcatgatgggcagtgagcgcaaatcagcagttatatctgatgaatccaggaagattactgcgtatcacgagggagggcatgcccttgttgcgatccacacagagggcgctcaccctgttcacaaggctacaattgttccgaggggagtttctcttggtatggttatacagctcccagagaaggaccagcatagcgtttcaagaaagcagatgctggcgaggctggatgtgtgcatgggaggaagagtggctgaggagcttatatttggggaaagcgaggtaaccaccggttcctcgtctgacctaaactacgcgactaggctggcaagagccatggtgaccaagtatggtatgagtaagcgtgtgggtcttgtttcctacagtgagaatagtgttagcggccaaacaagtgtgattgataaggaggtgaaggaaattctggagaaggcgtacaataacgcaaaggcaattctgacaactcacgataaggagcttcatatgctagcgaacgcccttcttgagcatgagacactgtctggagcgcagatcaagaaattactgccacaggtggacaatagtaacaataagcagaagaaggctgccaaggtgccgcagaagacaccggcagccagagccaagggagttgcacaagaggcggcagggaaagccaagggagttgcagtacagcagcggtggcacaagaagcggcaacagcgaacaccgagggaggtgcaggtacagcagcggcgccacaagaagcggcaacgtcggtggcagcgaaagccaagggagttgccggtacagcggcggcggcacaagaagcggcaacagcaaacaccgagggaggtgcaggtacagcagcggcgccacaagaagcggcaacagcaaacaccgagggaggtgcaggtacagcagcggcgccacaagaagcggcaacgtcggtggcagcgaaagccaagggagttgccggtacagcggcggcggcacaagaagcggcaacagcaaacaccgagggagttgcaggtacagcagcggcgccacaagaagcggcaacgtcggtggcagcgaaagccaagggagttgccggtacagcggcggtggcacaagaagcggcaacagcaaacaccgagggagttgcaggtgttggctcatagtggcattggggagaagcacaagtcagcgttttgtgcagccccaactagatga

SEQ ID NO: 33491 - DNA, 276 bp, Zea mays
  Peptide Sequence Number=SeqID_75270
atgcggtaccagatcggcctaggggacacctattggatcgtctccaccaccaagctgcagaacctcacgcactaccaggccatggagcgcgtgaaccccacgctggtgcccaccgacctcgacgttggcaccatggtcacgttccccgtcttctgccagtgcccggccaccgccgacaacgccacgacgctcgtcacctatgtcatgcagcccgtggacacgagaattagaggatcagctccttccgagggttcaggatccggaactaatgaatag

SEQ ID NO: 33492 - DNA, 489 bp, Zea mays
  Peptide Sequence Number=SeqID_75271
atgaggaaactcgacctcgagccatggagaatggaagggagctcgcaggggcgaactgctgagagatgggagcggctgctccctgctcttggggaagaagggcgccccacttgccgctgtgcagaaccagggaggaaggagggggcgcggtggagagagcctgcagtgctgcggccgagccagggatggctgctccctgcgccaagctccattgcaggagacagcaggggcatcgacgttgagggaggagggtgcagggagcttggagctgctgctgggtgccggcccatggagaaagcttctgcgcggcgtccaaggcaggggaagtggagctcgcgcccatgggaggagaagggcaggggacgccatggctggccgaggggaggagcaggcctgggcgccatggagaggagcatggctccctgctgctgctgccgtgggaggaagaagacatggaggctgtggcggctggaaatttttgaggggtgg

SEQ ID NO: 33493 - DNA, 366 bp, Zea mays
  Peptide Sequence Number=SeqID_75272
atggcgtcccctgcccttctcctcccatgggcgcgagctccacttcccctgccttggacgccgcgcagaagcttctccatggccggcgcccagcaccagctccaagctccctgcaccctcctccctgaacgccggcgctccctgtcctctatccctcggcgcgcgcccctgcaaacccccagccagtcgatcctctctactcggcctcctagcgctcgattaataatcgtgaatagctatttatcgtggtccaaatcagttgaaggtgcgctagttgatcacatgatgcggaagacgagtcgagtcgaccccaagatgatgtacgggtgggcttcttcacaaggtgatgctggtggatcaacctaa

SEQ ID NO: 33494 - DNA, 480 bp, Zea mays
  Peptide Sequence Number=SeqID_75273
atggagaacagggagctcgacatggctcccatggcagtagcggccaccaagaccagccatccaactggaggagccgagcgccttggggagaagatccgacgcaggggcgtccatggagctagcactgttcggccaccatgggagaagagcaggggctcagggtaccgagcgctaggaggccgagtagagaggatcgactggctgggggtttgcaggggcgcgcgccgagggatagaggacagggagcgccggcgttcagggaggagggtgcagggagcttggagctggtgctgggcgccggccatggagaagcttctgcgcggcgtccaaggcaggggaagtggagctcgcgcccatgggaggagaagggcaggggacgccatggctggccgaggggagaagcaggcctgggcgccatggagaggagcatggctccctgctgctgcgtcaggaatagagaaggaagaaggctgtgcgtga

SEQ ID NO: 33495 - DNA, 1293 bp, Zea mays
  Peptide Sequence Number=SeqID_75274
atggggggcgcggagcccggttccttcgcggagaaggatccctctcgggcaactggcgtgccggttgctcgacgcgtgggcctgggttccaagctggcgtgtcagaagtcggagaagcgcgtccatctggcgcggttgcatgccgcctgcatggctgcccgccccttctgcccgttggtctgggcgaaaatggggggtcgcctgggagggccttggagcgtgttggagaagactcggcccgcggcgcctgggggcgcaccgccgggtcttcccgtcttccaagcccccggatgggggatatccgccgccttcccgcctcctcgttggaggaacgcaactccatgggagttggtacctctcagccatcgttcggcttcaaggattttcatcacgcagcccggtcgcaccccttcaccggcggtcacccgagatggcgacctccagcttgatggtgggggaaagcgagccgggctgcggcctctgccccttcctcagcctcaaggattttcatcaccaaggctggggaggggagagtgccgagttggggtcggcccctgcgtgggcggtggcccgctccttcactcagtgatggggggagaagcgggcattgcccgtggcgtccggcagctgcagcgtgcctggtcttcagccgcgagtggcttcggggccccttgcggcgtcggcgtctgccacggcagccggaagaggttcttccgccggcgcggcggccgggaccggccacgggctgacctccatcttctacggccttctgcccgtccttgcctcacgagttttggcacgggcgggggcctcctgacagcggcatccaccctgaggtcagcgttgccgctgttcggccccccggagcagaagtcaccgtcgtcgccactgctggagcaggtgacggcgcgccgttcgtcggtcttccgttgctccgcaggccttccccctcggagtggggttgttcgtacctgcggagggggaaccggagttccatttgtaatggcacttcgaatgccaccccgtgtcaaggtgacgggtgaggccgggggtagcgatatcagtatgaacagaggcggagttggctcgagaatggggaacctggtcggccggagcctagccgtgtcgcccgtcagcggtgccgacgcccaagtcggtcagtcgaggcctcggatcgggctagcgcccttggaagccggttgcccgaggccccagggacgtcgtcgatgccgagggtgctacggctcccctcggcgtgaagacccgagcctgcaggatcagatcgtcttgtag

SEQ ID NO: 33496 - DNA, 1149 bp, Zea mays
  Peptide Sequence Number=SeqID_75275
atggggggcgcggagcccggttccttcgcggagaaggatccctctcgggcaactggcgtgccggttgctcgacgcgtgggcctgggttccaagctggcgtgtcagaagtcggaggagcgcgtccatctggcgcggttgcatgccgcctgcatggctgcccgccccttctgcccgttggtctgggcgaaaatggggggtcgcctgggagggccttggagcgtgttggagaagactcggcccgcggcgcctgggggcgcaccgccgggtcttcccgtcttccaagcccccggatgggggatatccgccgcctttccgcctcctcgttggaggaacgcaactccatgggagttggtacctctcagccatcgttcggcttcaaggattttcatcacgcagcccggtcgcaccccttcaccggcggtcacccgagatggcgacctccagcttgatggtgggggaaagcgagccgggctgcggcctctgccccttcctcagcctcaaggattttcatcaccaaggctggggaggggagagtgccgagttggggtcggcccccgcgtgggcggtggcccgctccttcactcagtgatggggggagaagcgggcattgcccgtggcgtccggcagctgcagcgtgcctggtcttcagccgcgagtggcttcggggccccttgcggcgtcggcgtctgccacggcagccggaagaggttcttccgccggcgcggcggccgggaccggccacgggctgacctccatcttctacggccttctgcccgtccttgcctcacgagttttggcacgggcgggggcctcctgacagcggcatccaccctgaggtcagcgttgccgctgttcggccccccggagcagaagtcgccgtcgtcgccactgctggagcaggccgggggtagcgatatcagtatgaacagaggcggagttggctcaagaatggggaacctggtcggccggagcctagccgtgtcgcccgtcagcggtgccgacgcccaagtcggtcagtcgaggcctcggatcgggctagcgcccttggaagccggttgcccgaggccccagggacgtcgtcgatgccgagggtgctacggctcccctcggcgtgaagacccgagcctgcaggatcagatcgtcttgtag

SEQ ID NO: 33497 - DNA, 795 bp, Zea mays
  Peptide Sequence Number=SeqID_75276
atggacgagtctgaaaaaggagatcggggtaaggagttacgactgttcccaaccttgcctgtggctgttggaccgctgatttgcttcgctgcgtatatcgggctgcttcagccccactctgatgatatgtctcgagttgtggaccaactcttaaagttgttcgccacctttgtagaaagatgcagagaagcgcaaccgtcagctgcatgtggatctcaccacagctcaagcccgtgcaactgccttggagatgccttggagagtcgtgaagtcattgctgttgaagccctgaagcaagccaaggatgagcacgtccagaagttgatggaggcctacttggtcacccataaccaacgtagagccctacggatccaagagctcgcttcatccaaccctgttcaacccatcaaagcagaagacccccagattcttaaaggtcacccagtctctaccagaggagaaaagaaggcttgggaactcccggaaggatccatagtattggaaggaattccagtctcccctaaggctatggataagcaagagcaccctgaatcctcccaagatcccccgccagagttgcttgagcccctcaccatgaagaagattccagcaccgtcccttgaggtcaaggaagaagctgcaagcaccccgccagcaccgccaccctcagaggagctacaagagccagtcccgcttgaagaagagttcgaccccgtgttgccatctcagtcgctgccagaagaagtcatcaacatcagctccctgttgacccatccaggagatgtctcagattga

SEQ ID NO: 33498 - DNA, 354 bp, Zea mays
  Peptide Sequence Number=SeqID_75277
atggaaacaaccacaagccacgggaaggctccatcaagagagttcggcgccaaaggaagggaggaatcacctccccgcatcaagtcgcatcggagtggcgacaagaagaagaagatgaagaaagtggtctactacgagactgattcttcgtcgccctccacctccggctccgacgccgcgtccgttacttctaagcgctatgagcgcaagaagtttagtaagattcctgaagcgccccaatcctctgggactcaaatcccgatatacatagcgaagcaaatcagcggtccaacagccacaggcaaggttggaaacagtcgtaactcttacccgatcatcgaccaccttctctga

SEQ ID NO: 33499 - DNA, 285 bp, Zea mays
  Peptide Sequence Number=SeqID_75278
atggccttgaccgttactttctctttctcgcttagtcgtaggtgtgagccctacgtcgaacgtctgtttatttattacattctattgtatggtgtactgttcccttgtattaaatgtgtggaatgtggtgacgaggatgatggttttggttatgactatggtactggtaagtggtattctttccgtttggaaagggtacatcaggttgtcagccaaaacaatacaggtgaagatgaagtcgtggaggaggacttccaggagtttcaagagtatgatgagttctag

SEQ ID NO: 33500 - DNA, 255 bp, Zea mays
  Peptide Sequence Number=SeqID_75279
atggcctcgaccattactttctctttctcgcttagtcataacggtcagttggcggagtccgaaggagttgcaggtgaagaccctgagcagcagctgagatacttgatcagagatgtatggtttactggtggtgacgaggatgatggttttggtaatgactatggtaccggttgtccgcgttgcaaccactgctcaggtgaagatgaagtcgtggaggaggacttccaggagtttcaagagtacgatgagttctag

SEQ ID NO: 33501 - DNA, 1029 bp, Zea mays
  Peptide Sequence Number=SeqID_75280
atgactcgtcttagacacactgctcgtaagtcggtgatccctttcctgccgtctcgccttgcggagcgtcctctacgccgcacactgtccggtcagtcgagtcacctggagagcttgcaccatcgcttgcgtgaggagcaagagcgccagtgtcagcagagggagcagcagggctcttcctccctgcctgagcaggaggtggagtctgtgaggcgccgctcccctgttccccagctggaggcgccccctgcaccaccgcaggacgccccggctattggaggagctactggaggaggtcctggaggagaccccgatggagacgacgacgacggctcataccacagtactgagccctttgagccgcaggaggcggagggatgggtcgcccgacccatcacccgtgatgccgctcgcggttgtcacttccacgacgcactcgacaccttgttgcgccgggctttcgaccgacacacctggtcgatcgagtatcgttgtgtagtctaccagcactgtcgcgggaggtacccgaaccgctcggaggctacctgcctagtatgccatccggaggatgacctccggggtgcagaggccttctcggagcattactccatctccgagagggacactgcggaggcggctatgcaggacgcagcacggcgtgcactctcccagtattgttctttattcggtggggtggccgacggtcttaaccttaggtactacccccgccgtcctactggtagcacagagagtgtggttgtctcacctattggtgaggataaccctaggttgagccgcacagttaacctagtcgctgtgcttaacaccaagctggaccactctctggacgagctgagcagggctcgagcgaagattgctgagttgcgtgctgagctggcggagcgccgccaccaggagggtggttcccccgctcctgttgggactcagcacccttaccgctcgccgccacgtggtcaccacacctatggttcccctgcctgtaggaccaggatagatctggatccttag

SEQ ID NO: 33502 - DNA, 972 bp, Zea mays
  Peptide Sequence Number=SeqID_75281
atgctgactatgactcgtcttagacacactgctcgtaagtcggtgatccctttcctgccgtctcgccttgcggagcgtcctctacgccgcacactgtccggagcaagagcgccagtgtcagcagagggagcaagcagggctcttcctccctgcctgagcaaggaggtggagtctgtgaggcgccgctcccctgttccccagctggaggcgccccctgcaccaccgcaggacgccccggctattggaggagctactggaggaggtcctggaggagaccccgatggagacgacgacgacggctcataccacagtactgagccctttgagccgcaggaggcggagggatgggtcgcccgacccatcacccgtgatgccgctcgcggttgtcacttccacgacgcactcgacaccttgttgcgccgggctttcgaccgacacacctggtcgatcgagtatcgttgtgtagtctaccagcactgtcgcgggaggtacccgaaccgctcggaggctacctgcctagtatgccatccggaggatgacctccggggtgcagaggccttctcggagcattactccatctccgagagggacactgcggaggcggctatgcaggacgcagcacggcgtgcactctcccagtattgttctttattcggtggggtggccgacggtcttaaccttaggtactacccccgccgtcctactggtagcacagagagtgtggttgtctcacctattggtgaggataaccctaggttgagccgcacagttaacctagtcgctgtgcttaacaccaagctggaccactctctggacgagctgagcagggctcgagcgaagattgctgagttgcgtgctgagctggcggagcgccgccaccagggagggtggttcccccgctcctgttgggactcagcacccttaccgctcgccgccacgtggtcaccacacctatggttcccctgcctgtag

SEQ ID NO: 33503 - DNA, 269 bp, Zea mays
  Peptide Sequence Number=SeqID_75282
atgaacgctgatctaggaatggtatggttgtcaggtagtttgcagggcaagtacatgttttgctggctggactggccagcgcgcgtcgaggagctggacgtgctgaaaggcctcgtcgcgccggtggaggctgagctggagaccgaggaccatgccgagcacacgcttacgcagcagagatacgagcaggccgtcgccactgcgcccaacaattcgctcatcctcgccaacttcacgcagttccgcttggccgtcctactactgtcgcg

SEQ ID NO: 33504 - DNA, 1833 bp, Zea mays
  Peptide Sequence Number=SeqID_75283
atgaagcataaagtggaaccctcacagtacgtccctagcacctacggacccttattaaaagtgccccaacgccttcctttgttttcctcgcatttgtccggcctcctgcgggctgcggttgtgcgcgcactgctatttccacacctccccagtgcggcggtggtggcccaatcaaaggccagccggggggcgctcgaggtctctcgttggacacccgccgcggccgaacaagatcatgggcttccaggtggccgcggtggcaccgtcgccgtgcgcgcgctcctcctccgcctcaacgtcgccctcgacctcctctcggccgttgcccgccttccttggaggaggtggccgcgggtgcgccgggctcgcgagatcccggtcacccgtatactggggaaccggtgtgatggtgcggccgccgcctccagctcggacgccagcgagccggcgggcgcggtgggctgcggctggcccgcgagcgtggagcggagcgcgagcaacgtcgggctgccgctgtcgctgcgaatgatgaagcggaaaaggcagcaacagctggtggcggcggcgcggcatccgcgctgggacgaggggctgctggtctccgccgccggggagtcggtgggccgcgccttctcctcgatggtgctcattgtgcgggagctgcagagcttcgcgctgcagcagatacgcgacgcggtggtctgcgacgacctgcagggcgtcctggcgcgcgtgcagggcgagatgcacgcctccttcgtctggctcttccagcatatcttcgcgggcacgccggcgctcatgctctccctcatgctcctcctcgccaacttcaccgtccagtcgatgggccacagcgtcgccgctgcagccgccaccatccccccaactccgcctgccgagcgcgcggagccgtcccggtcccggtcccggttcgacgcggcttcggtgaaggcgttctctgtcggcaggacggcctcggtcagcgggaacgacggtgggggcggcaagacgccgcctgtctcgggcgccaccggcgatggccggtcggacgagtcgtccttatatcgaccaagccgtgtgacgccgcagcagccctcggcaccccccggggctgagaccgccgcccaatacgctgcgaacgcggcggaggaggccatctgggaaatgatgctcgcggaggcctccaagatgcaggccagcgcgcgcgccgaggagctgagcgactcggacgtgctgagaggcctcgtcgcgccggtggagactgagctggagaccgaggaccacgccgagcacacgctgacgcagcagagatacgagcaggccgtcgccgctgcgcccaacaattcgctcatcctcgccaacttcgcgcagttcctctacctcgtgcagaacgaccacgaccggtccgttccccccaagcccgttcgacgaactgacgacgcacccgcagttgttcatcaaatagctcacacgtctcttcgcagggcggagcactacttcgagagggccgtgcgcgcggagccggcggactcggaggcgctgagctggtacgctacctttctgtggaaggcgcggaacgacctcgccggcgcggaggagacctaccaggaggccatcgcggccgaccccgggaacgcccaccacgccgcggcctacgcgcacttcctctggaacaccggagacatggtggtggcggtggcgctgattcgcccgctccggggaacccgggcaaatggagctcttgacccggcaggggagatcagggtcctgactcccgacgaacttgtcagggccgaccggcggcagggaggcatggacagctggctgtag

SEQ ID NO: 33505 - DNA, 270 bp, Zea mays
  Peptide Sequence Number=SeqID_75284
atggccttcaagagcatagtgaatcggacccacttacagttagtccgtgaggtagaagccattggaggaaatgtctctgcatcagcttcccgtgaacaaatgagctatacctatgatgcattgaagaactatacaccagaaatggttgaagttctcattgacaatgtgaggaatccagcattcctcgattgggaggtcaaagagcagcgcgtgcggacgccggagtcggaagagttcccgttgaggagaagcttgtcgcggcccaaatag

SEQ ID NO: 33506 - DNA, 834 bp, Zea mays
  Peptide Sequence Number=SeqID_75285
atggccttcaagagcacagtgaatcggacccacttacggttagttcgtgaggtagaagcaattggaggaaatgtctctgcatcagcttcctgtgaacaaatgagctatacctatgatgcattgaagagctatacaccagaaatggttgaagttctcattgacaatgtgaggaatccagcattccttgattgggaggtcaaagagcagataagaagctttgtgcatatggccaacgacgccttcggcaggagagtcgccaaacttcttggcgatgtctttcatgtgttgcttttagttcttttaaagactcctctgagtgttgtgacaaaaacgattccaagaaaccacttcttgtcttcctccactggctgtctgtcatcttgctctaaaacaatcgcagtcctgcaagttgttgctgctgctcctacccctgcctctgcaattgggtttgagggatatgagaagcgcctcgagatcagcttctatgaggcacctgtcttcgctgaccccaacggaaggggattcctgtttgtctacccatacaagattctgatcaagacctgtgggactacaaagcttctgctcggtattctgaggatccttgagcttgctaaagagctctcattgccacttgttgcagctaaatactcccgtgggacattcatattccctgatgcacaaccttccccacacaagaactttgatgatgaggttaccttcctaaatcacttcttcgatggcctcaggtttggtggtaatgcttatgtgattggtgattctgcaaagcataagcagaagtggcacgtctactatgccaccactgagcacccctaa

SEQ ID NO: 33507 - DNA, 834 bp, Zea mays
  Peptide Sequence Number=SeqID_75286
atggccttcaagagcacagtgaatcggacccacttacggttagttcgtgaggtagaagcaattggaggaaatgtctctgcatcagcttcccgtgaacaaatgagctatacctatgatgcattgaagagctatacaccagaaatggttgaagttctcattgacaatgtgaggaatccagcattccttgattgggaggtcaaagagcagataagaagctttgtgcatatggccaacgacgccttcggcaggagagtcgccaaacttcttggcgatgtctttcatgtgttgcttttagttcttttaaagactcctatgagtgttgtgacaaaaacgattccaagaaaccacttcttgtcttcctccactggctgtctgtcatcttgctctaaaacaatcgcagtcctgcaagttgttgctgctgctcctacccctgcctctgcaattgggtttgagggatatgagaagcgcctcgagatcagcttctatgaggcacctgtcttcgctgaccccaacggaaggggattcctgtttgtctacccatacaagattctgatcaagacctgtgggactacaaagcttctgctcggtattctgaggatccttgagcttgctaaagagctctcattgccacttgttgcagctaaatactcccgtgggacattcatattccctgatgcacaaccttccccacacaagaactttgatgatgaggttaccttcctaaatcacttcttcgatggcctcaggtttggtggtaatgcttatgtgattggtgattctgcaaagcataagcagaagtggcacgtctactatgccaccactgagcacccctaa

SEQ ID NO: 33508 - DNA, 321 bp, Zea mays
  Peptide Sequence Number=SeqID_75287
atgagttccaatcgtggaactgagtcgtatcacaggtatggaggtgatgatcattttcgtttggcaaaacgaatggaagcccaagggatacacgtctcggtgccccccaccaccacctcttgttcattatccttggtcttcacctccacctacacctacatctccacctaccgaacatcagttgttgatatatttgttatgttgctaataaaaataaacagcatttgtaatgctggtcaaattaacttcctagaggccaattgggtcgtaggagctaacttcttaggggctacagtcagccgtaggaagttagccagctaa

SEQ ID NO: 33509 - DNA, 186 bp, Zea mays
  Peptide Sequence Number=SeqID_75288
atgacctcccgttcattattcttggtcttcacctccacctacacctacatctccacctaccaaacatcagctaccttgccgacgcatgaacgagaagacgggttagactttgtcgaaaccctcttcgctagtggaggtatcgaccatcactcgtcactgtaccccgatggtgatcggcgatcttga

SEQ ID NO: 33510 - DNA, 453 bp, Zea mays
  Peptide Sequence Number=SeqID_75289
atgcaggcggcatgcaaccgcgccaagtggacgcgcttcttcgagtcccgacacgccagcatggaggcccaagcccacgcgtcacgcgaccggcgcgccggatgctgcatgcaagcaactgcaccgccacttgcgccaccatcgcgcctcctcgatcgcggaaccaataccgcgactcgaggcgacccggcgcacgacccagcagcgccagcccgacacgacggcgggcgggagcagcggtcacgtcgtcggccaagctcacgtcccatccaggggcagcaagagaaccccctctcgcggcgtgaagacaacgcgcccgtgatccgttcctcgaacgactcgcgcacgcgcaacggccgccccgccaaccgctcgccccgtcgcattaactccgcggcaagacaggcgtcgcttctggcaggaggagcgggcgacgcttcgccttcgccgtaa

SEQ ID NO: 33511 - DNA, 585 bp, Zea mays
  Peptide Sequence Number=SeqID_75290
atggctgaaaggtaccaacttccacgaagttgcgttcctccaacgacaaggcggaaggattgcgggtgttccccatccgggggctcggaaggtggaaagacacgatgcataagggagcgcgaagacatggtcgcctttcaagggggtcaccctccttttaaaggcgactctccctacttgcgtccccagccgtcgcgggctgagtcttctccaacacgctccaaggccggcggaagcaacggtcacgtcgtcagccaagcttacgtcccatccagggacagcaagggaaccctctcccacggcgtgaagacgggaccgggaaaggggataccccgaaaagggatccttctccgcgaaggaaacaggccccgagcctccctactgatcagaggtttaaaggctagcccctcggaggggttcaacagccgcctcagagcgcttgggctccgcgcccactactggtcagaggttcgaaggccggcccctcggaagggttcaacggtcgcctcaggccactcgggctccgcgcccactactgatcaggggttcgtaggctggccctcgaagggttcacatccgccttag

SEQ ID NO: 33512 - DNA, 1563 bp, Zea mays
  Peptide Sequence Number=SeqID_75291
atggtcgcctttcaagggggtcaccctccttttaaaggcgactctccccacttgcgtcctcagccatcgcgggctgagtctcctccaacacgctcgaaggtcctccccctacggcacgggggctgggtcccacgcgtcatgcaagctggcccagggcggaagaagccaaaccgccgcgcgcggtgcatgcaactgcccagcggttacaagcattcctccgctttcgcccagaccagcgggcccacacgtcatgcaaccggcgcgccggttgctgcgtgcgagcaactgcaccgccactcgcgccactaccgcacctcctcgactgtggaaccagtaccgcgactcgaggaaaccctgcgtgtgacccaacagtgccagccaggcgcatcggtcatgggtcagtcagctgcgggagaaggcgcgacggtcaatacagctgaaaatgggccgacagtaatggcggtggcagcgggcggaagcagcggtcacgtcgtcggccaagcttacgtcccatccagggacagcaagggaaccctctcccacggtgacaggcggcaccgttggcaggagaagcgggagacgcttcgcctccgccataatggccgcatcaaaaaagggaccgggaaagggtataccccgaaagggatccttctccgcgaaggaaacgggccccgagcccccctactgatcagaggttcgaaggctgacccctcggagggggtcaacaggcgcctcagagcgctcgggctccgcgcccactactggtcagaggttcgaaggccggcccctcggaagggttcaacggccgcctcaggccactcgggctccgcgcccactactgatcaggggctcggggactgctctcgcaaacccggctccggccaaaccgttgacagcgtcaacataccagcccgagaacttgggacccgaccgtgcacccgggctacggccagctcgcatgagggaacaaccagaccggccgaagcattgcgaaatgcattaagacctcgaaggagtcaaaccactcctccgaggcctcgggggctacacccggagggtgcactcgcgcgcacccaccggaacaaaacgcaacagagagaggctggtccccttgcaaaaaagtgcgacaaaagcctccaagcgagtattaacactcccttcgaggctcgggggctactgtcggggaccataattaggggtaccctcaagactcctaaatctcagctgcctcgggcaaaggcagccgaccccggaggacttacgtctcgcccgaggcccccctccagcaatggacacaccttcggctcgcccgaggcccagtcttcaccaagaagcaaccttggccaaatcgccacgccaaccgaccaaatcgcatgggcatttaatgcaaagggctcggactcgagctcagctccggaagacgatgaactccgcatcgcccgaccccagggctcggactcggggctcagccccctgaagacgacgaactccgcttcgcccgaccccagggctcaaactcgggctcagccccggaagacgacaactccgcatcaccgaccctag

SEQ ID NO: 33513 - DNA, 307 bp, Zea mays
  Peptide Sequence Number=SeqID_75292
tgataccctgccggaccacctaggaagtgatcaatggggattagctctccccgggcagaacgggaatcacggctcatgggtaaaatggttcgagatacaaggattatgttatggttttggttcggctatgatgatgttgttcctcgatgaggaaatgccaaacgggacatttgctgagtacgttgatgtgtactcatccttgctttaccaccaaacaccaggttgtccgcattgtaaccactgctcaggagaaggcgaagccgtggaaggagacttccaggagttccaagactacgatgaattctag

SEQ ID NO: 33514 - DNA, 223 bp, Zea mays
  Peptide Sequence Number=SeqID_75293
atggttcgagatacaaggattatgttatggttttggttcgactatgatgatgatgttcctcgatgaggaaatgccaaacgagacatttgctgagtacgttgatgtgtactcatccttgctttaccacaaaacaccaggttgcccgcattgtaaccactgctcaggagaaggtgaagccgtggaaggagacttccaggagttccaagactacgatgaattctag

SEQ ID NO: 33515 - DNA, 897 bp, Zea mays
  Peptide Sequence Number=SeqID_75294
atggagaaactgctgcgcctggagaaccgcgtcgagccgtgggtcgcggtggtgacgagcggacgcagcgattcccctccatggacggcgcacgggaggtcgcgggcgcgagagaaggacgccgcggatcttgggaagcgcgcggcggacacgagagaagcgcggtgtggattggagaagcgcgcagcggacgagcggacggagtcgagtgcgtgctcgtctgacggcgtgacgctacctggggccccacacacagctgccagcgcgaagcgcagacggagctcgtctgacggcgtgacgctactgagggccccacacacagctgccagcgcgaagcgcggacggagcgtgaaaccccagcgggttttaacaagaagtaattttgcgcgtgggagtccgagtcaatcagataataaaggcaaattgatggaactaagtccaaatgagcaaaaagtggggactacaaagtgcaatatgggtaaaatgggaagctctcaagattattcgaaaaaattggaggaattgggctcaaaagagcctaagatgtgctggtctagacctcaccggactagtcagatggtgcactggaccagatcgatgcagtgcccactagtgaaggagggcgtccaattatatcgtggactatgggcacatggacccagactggtccgggatggcagcgggtcgggtaaagtgcgggtaagccatttacccgcccaccaacatattcgcgcctctagtgcttacccgtgcccgcgagagcttgcgggtaaaattttcgacccgtaccctcaggatatcagcggatatcgggcaacccgttacccgccagaaaataccatacgaatgtacctccaatttgaaggaaatgaaagtacaagcgtgacgcaaaagtga

SEQ ID NO: 33516 - DNA, 237 bp, Zea mays
  Peptide Sequence Number=SeqID_75295
atggaggggatggctccgtccgctcgtcaccaccgcgacccacggctcggcgcggttctccaggcgcaacaggttctccatcccggtgcgggtgagggacaccgcgatggggctctcaaagatgtccgggtggccgccgagccgttcccgttggtggacctaggggcctccgcctgggcgtccttgtcgctagctggagagcttgatcttccttgctatgactcaggccgggcctag

SEQ ID NO: 33517 - DNA, 525 bp, Zea mays
  Peptide Sequence Number=SeqID_75296
atgctcacccgatggggtgagttgctggccgagcatgagctcgaggcagaggagaaagagaggaagctggaggagcagatccaccagttcaacgcagcgcaggcggcgctgggtccccaggcgatggaggccaccaggaaggcccttgaagatctccaagcggagcaccgcgccggggtccagcgtattgttgcgtgggctggcgaggcaagcatgacactggtgccgctagggatgagccccatcccagtgtcggagctgccaacgttgatgtccgatgcactcccggtgctggactccgccgtcgatcgcctccggtgcctggagggagagggcggcaagctctgccgggtggtggttgagtatgtcctgacgtgtttccggagccacgaccctgccatatctttggcgccggtgatcgctggtcaggtagccgccacaaaagacgccgcccgagagggtgtacaagatgtcgtggagctggtggccgagcgcttccagcgcgatcctaccgacgacctgtag

SEQ ID NO: 33518 - DNA, 330 bp, Zea mays
  Peptide Sequence Number=SeqID_75297
atgacagagtatcaggccaagctgagcgccctggaccagactctggaagcccagcgggcccaccaggtcaaggttgtggagaggctgcaaaagtggcagcaagagctcgagggcaaggctagcgataccgccctcgccgaggagaaccttaaggcgaaggagcagtccttggacaggcgggagaaggacctcgtcaggcgagagacggatttcgtcttcagggaagaaatgctcacccggcggggtgagttgctggccgagcatgagctcgaggcagaggagaaagagaggaagctggaggagcagatccgccagttcaacgcagcgtag

SEQ ID NO: 33519 - DNA, 405 bp, Zea mays
  Peptide Sequence Number=SeqID_75298
atggaagaaagggtggaggggcttaccggcagcgagactgctccggcgggggagctcgtcggcggtgaggagtccggcctatccagggcacaattgaccaatcaaatgggcgggcggccgaagttcggtgagggcgatcttggccttccggtgaagttctgccgggtccgagggctgggaaagcttcacaagctaatggcgaagctaaccgagcggctggcgcggcttggaagtgacaggagtgggctggccatggtggccgaggctctggcggcaatggcgggcggaaaagagctcgccggagctaaagatggacgtctggccggcgaagagatttggagcccggaaatccggtctgtctctctgctcaaacctgaggcaaatccaaggttttgtcgtgtctag

SEQ ID NO: 33520 - DNA, 449 bp, Zea mays
  Peptide Sequence Number=SeqID_75299
aggaaagagtggaggggcttaccggcggcgagactgctccggcgggggagctcgtcggcggcgaggagtccgacctatccagggcacaattgatcaatcaaatgggtcagagagcttcaccagggattaaggaaggtccgagagcttgggaagcttcacaagctataggcgaagctaaccgagtggctgcgcggcttggaagtgaccggagtgggctggccacggtggccgaggctcgagtggcaatggcgggcggaagagagctcgccggagctaaggaggggtgtctggccggcgaaggtgcgggcgggcacgaccgaggctctgacaagcgctttgggcgtgcgcgggcgaacgccagtgcgcgctctggcgtctggcacggcgtcgagcacgaggcagcgcagagagaggtcaagttcaagcgcagattgtctccaaatctttga

SEQ ID NO: 33521 - DNA, 375 bp, Zea mays
  Peptide Sequence Number=SeqID_75300
atgacaagttcacgtgaacagtacagaggctggctggtcggcgccggcgaggccagcagcatcaagtccgtcacggcgttctaccccgagcaggctgccgccgactccagcggcttctgcgtctctctctctcttcttccctcgccaccagtcagcgtcgccatcaccgggagcgggccggacttcaccagcctcaagtccttgggcgacgtcgatgccttcgccgagggcctggcctgtactacctggaatacacgctgcagaaccccggcgagcggcggcggcacatcgtctcggccatcgggatggccttcaacggctggtacaactgcctccactgcgacgacccaggtgagccaggttagcgcaaagtaa

SEQ ID NO: 33522 - DNA, 939 bp, Zea mays
  Peptide Sequence Number=SeqID_75301
atggctgccgtgaccagcaccgcctccatctgcccggccgcagccggcgccctctcttcgctgccgtccttcatcacgcgcaagcccaccagcggcagcaggaggttgcagcaggcagcagcgacgacagtctgccactgccgctctgctcggtacacacctcagtctcctatcggcgcgcacctcgctcgccggcacaattcggcgtcaccgctgctcgaggagctccggatgacggtagaggaggggctgctgggccggagggacgccttattgctcggcatcgtcttctccgccgcgacgccgccgctgctcgcccctgccggcgctctggcggacgaggccaccgccgagtcgcaggagggcttcactacgtacgaggatgaggccaacaagttcagcattcaagttccgcaaggctggctggtcggcgccggcgaggccagcggcatcaagtctgtcacggcgttctaccccgagcaggccgccaccgactccaatgtcagcgtcgccatcaccgggatcgggccggacttcaccagcctcaagtccttcggcgacgtcgatgccttcgccgagggtctggagctggcagaggccgccggggctcgccgccaagctcatcgactccagggcggcaaacggtactacggcctgtactacctggagtacacgctgcagaaccccggcgagcgacggcgccacatcgtctcggccatcgggatggccttcaacggctggtacaaccgcctctacactgtgacgggccagtacatcgacgacgatgactcggagaagtacaggcctcagatagagaaggcaaatgccctctcatttccatgtgaaatcctatatgattcctccgaaactcttgcattccaaaagggccaaggttcctgtaacttggcttcaaaacaagcaaatggctttgtttcttga

SEQ ID NO: 33523 - DNA, 386 bp, Zea mays
  Peptide Sequence Number=SeqID_75302
atgccgtctatcgacgccggaccaagcacacgtggccaccgaagccagctgccaccaggcacgagtgccccagcactgggcaccacccctagccctaagggccccggatccagcgacgaagatggagaatccagagccctagaccagcgtaaccacacccaacatggtcgacacaccggcaccgcccctaacttgggggcgccagatctagcccaccgcggttcagcagtgcgtgaccatgtcgtagtggaccttggtgaggcagcccaagaaaccaatctccgccacctgcacctggccgtagctgaaggggaatccagtccagtgcagatgcaccggccgtggaacggacaaaacgcttcaccaccccacacgccacctttatg

SEQ ID NO: 33524 - DNA, 987 bp, Zea mays
  Peptide Sequence Number=SeqID_75303
atgccgtctatcgacgccggaccaagcacacgtggccaccgaagccagctgccaccaggcacgagtgccccagcactgggcaccacccctagccctaagggccccggatccagcgacgaagatggagaatccagagccctagaccagcgtaaccacacccaacatggtcgacacaccggcaccgcccctaacttgggggcgccagatctagcccaccgcggttcagcagtgcgtgaccatgtcgtagtggaccttggtgaggcagcccaagaaaccaatctccgccacctgcacctggccgtagctgaaggggaatccagtccagtgcagatgcaccggccgtggaacggacaaaacgcttcaccaccccacacgccacctttatgggcgtccacaggcctcaccacacccccgcccgtgatgaccgccgccgcgcgcgtctccctccttcctccccacatcccgcacgccccgcaccgcgaactgctcctcccgcacgccccgcccgtgatgcctgccgccgcgcgcgtcttcctccttcctccccgccagcttcgcgcttccttccccggcagcccgcacccgccaagtcccccaccagctccgcgcttccttccccggcagcccacacccgccagctccgtgctccacgctccacgctccgtgcgccccaccagccgcgcgagccgccgctgggatacccgcctcccccgcgcccccaccaaatcggaaggcgagatccaccgccagttccgcgctccgcgcgtcaagagcagccgtcacagtgatgccgcggtgattccatgtcccgctcgcgatggcccctgcactaccgctttcgattcaagggtcgcctcgccgcagacaaagcccacgagggcgcacaaggagagccccgacggttttgtcacgaagccagagatgctgaccgatgggatagtgaagctgatgatttggcaccgcaccattcccagcatgcaagggtaa

SEQ ID NO: 33525 - DNA, 201 bp, Zea mays
  Peptide Sequence Number=SeqID_75304
atggcgcatccaccacgggcaggtgtttctcaactccagcatggcagaacggaagtgaatgcggagttgaagaaggaagctgaattttttcgggacattgtttttgtgcccttcctagacaactatgatcttgttgttatgaagactcttgcaatatgcgagtatggggtatggcagagaatttcttgttgtttgaactaa

SEQ ID NO: 33526 - DNA, 555 bp, Zea mays
  Peptide Sequence Number=SeqID_75305
atggggtgcacccgtgttgccttcttcttgcggctgttggaggagcgcgaccccgcgggggttggcgttcttcagacatcgctcggcttcaaggattttcatcatgcagcccggctacagtccctcaccaacggctggggaggagggcgcaccgagttggggcctgcctccgcgtgggctggtgacccgcttcttcctccggcattcgggggagaagggcatcctctagctctgcggaggaggcgtcctccagccatgcgggggaaggcgaactgctgctgcctggccagggtgcaactgtccgtcctccatccgggcgacaatcgcgccgtgcacaggcggctgatgtcgtcggtgccgaagcggcggccgtcgctggagaggcttcccaccgcagtggtggttgcttccgccgacgagactgttagtgccacctgcgctcggggcctctggctctttggctttaatggctggttctcgtcctccgtgaggggacatgaacgagggcctttcagcggtagcgttggccctgaggccatcgctgctgctgtctag

SEQ ID NO: 33527 - DNA, 507 bp, Zea mays
  Peptide Sequence Number=SeqID_75306
atgaccgatctctctatggaataccgaggcaaggtaagggtgttgtgtgagaatgcgaatgggattctaatagaggaaagaaatgttcaggatagttctgacatcattgccatagtgctggtttactgcatggctaataacaacattattcgtttccatcccacaagaaggaatatcaatggtcttctacgaagtttttttgcagacattgagtcgaaattgagacagatagaggaagatcctgaaggtgcaggtactgctcacttgtattcagtgacactaaaaattagtggtgtggcaaatcgtgcatttgagcctctatttgagaggcaggcccaagctgaaaagatcagatctgttcagggaatgcttcaaagattccgaacactatttaacctgccaagtgcaatccgtgggaacattagaaaaggagaatatgatcttgctgtcagagagtaccaaaaagcaaagtcaattgttctagaatactgtatccgacttctgtaa

SEQ ID NO: 33528 - DNA, 453 bp, Zea mays
  Peptide Sequence Number=SeqID_75307
atgtctcaaggtttggagcccaatatgcgagacaaagttatctattcatctccaaattttgatcccaaagttttcctttcgtgggtccacaaagacacgagcgctgctgacttagaggctagtgctctcaccttgaaaactgatctcaaagggagaacacagcagaaaaaactgttagtcaaggagaactttgattgttttgtctcgtgcaaaactacaatagatgacattgagtcgaaattgagacaaatagaggaagatcctgaaggtgcaggcattagtttatgtgctgataccgtcatacgccgttgtttcatggcaatgtccatcagacagacaaagagtgacgacgacactagctcacatatgaactgcaaagggttttcttacttcttgcatgttggtgtaaagagtaggctgtggaatacggagttcacaagatctaggagatga

SEQ ID NO: 33529 - DNA, 2595 bp, Zea mays
  Peptide Sequence Number=SeqID_75308
atgcgtgaagcaaaggtggctcctaacattcaagaacttgatcagaaagcagcagctgctgctgcagctgctgctcgaaaggccctcacgagtgtacagactttaccaaaaggagttgaggttttagatcctttgggccttggtgtcattgataataaatccctgcggttgatcactgacgcttcagtaagttctccaatttcaagggagaagtctcaaggtttggaccccaatatgcgagacaaagttatctattcatctccaaattttgatcccaaagttttcctttcgtgggtccacaaagacacgagcgctgctgacttagaggctggtgctctcaccttgaaaactgatctcaaagggagaacacagcagaaaaaacagttagtcaaggagaacttcgattgttttgtctcgtgcaaaactacaatagatgacattgagtcgaaattgagacagatagaggaagatcctgaaggtgcaggtactgctcacttgtattcagtgacacaaaaaattagcggtgtggcaaatcgtgcatttgagcctctatttgagaggcaggcccaagctgaaaagatcagatctgttcagggaatgcttcaaagattccgaacactatttaacctaccaagtgcaatccgtgggaacattagaaaaggagaatatgatcttgctgtcagagagtaccaaaaagcaaagtcaattgttcttccttctcatgtggggatactaaaacgtgtactcgaagaggtcgaaaaggtgatgcaagaattcaggggcatgctttataagtccatggaggatcctcatcttgatcttgctgagattgagaacattgttcgtctattgttggagttggaacctgaaacagatccagtgtggcattatttaaatattcagctggaagttgattctaccattggtgattctcctcgagttgatcagttgtcaacaaactttatggctgaggaagctgatagtttaagggccacctacattcgtaggctaacttctgtactgatccagcatgttccagctttctggagattagctttatctgttttcagtggaaaatttgccaaggcagcttctggtaacgtagtttctgattttgatgtgaatgcaaagccgactgcaaataagaatgatgaaaaaggtggagaagtaaagtacacaaaccacactcttgatgaagttggtagtatggttcaggctactatatcggcttttgacactaaggttcagagtaccttccgtgattttgaggaatgcaacattctttgtccatacatgagtgacactataaaagaaatagctaaggcctgtcagactcttgaagggaaggattcgtctccaactgctgtaaaaatgttgcgcacacttcattttgaaatgacaaagctttacattctacggctttgttcatggatgcgggcaacaacaaaggagatatcaaaagatgagacttgggttactttatccacccttgagagaaacaagtcccagtatgcgatttcatgcttgcccctggagttccgtgacataacagtttcagctatggaccgaattgatactatgattcttaatctgatgagcgagactgcgaagtcatatgacatttctcaaccacttcaggaaatcaatgagtctgttagacttgcatttttgaattcctttctggactttgctggttatctggagaggtttggagatggagatttgcacaaaaagctgctggttgttttgagtaacattgggtattgtaaagctgaactttcagaagaactttacagcaaatatagacacatttggtctccagtcaggaataatgaggagcgaagttctgacatgcgagacctgaggacttctttctctgcacttgaagagaaagtcctggaccaatatacttttgcaaagtcaaacttgatcagaagtgctgcacaaagttatcttttggattctgggatttattggggagcagcgccaatggtaaagggcattcgagatgcaactcttgacttactgcacatccttgtagcagtacatgcagaggtatactctggcgctcggcctctgttggagaagacaatgaaaattttggttgagggtttggtcgacatctttcttagtgtttttcatgagaataagaccaaagatattagattgttggatgcgaatggtttttgtcaactgatgcttgagcttgagtattttgagactgtactgcacacgtacttctcacctgaggcgcaacaggctatgaaatctttacaagagaatttgttggaaaaggcctgtgaaagtgttgcagaagccatggaaaatcctggacaccaacgtcgaccaacccgtggcagtgaagatacagcatcggatgacagacagccatcagtatcacctgatgatttgcttgtgcttgctcagcagtgcagtagtgatctgctgcaaggggagttggagaggactcgattgaacatagcctgtttcatggagtcgaccctttcaaccaacagctgcgccagcaggcccaaagcctgccgcacattcttcttaccaagcacagcatgctcccgtccaaacgtcctcgcctag

SEQ ID NO: 33530 - DNA, 1320 bp, Zea mays
  Peptide Sequence Number=SeqID_75309
atgtaccgagaggcgttgtggcagaagagaggtcgtcctcgggagttatatccggacgtatctagtaaggatgctcctgttcctcctgaactccccgtgcctaactgtgactgtggcagactggcttgggtacatcaatcacaacatccagacacggctgctcgctgctactacctttgtggcactttggacggacatcagaggtgtttctttttccagtggatcgatggtcctgataaatttgaccctcgatatcttcttttcgttaattggttgagtggaaggaccactcatgagcgttttaagcgttgggtacctcctcccccgaatcctccaccaatgacggatgcggagaaggaggtagcaacagaaaggcggatggactcaccgcctcgatgcgattgtggagatcgtgctgtcatcgacgaagactatgacaagcagttctgttgtccgaacattgattatccatacgggtggcgtaagtgtcgtttcagagagtggttgtatggtcctttgtcccattggccagagccacaggagacgaggaaatgtagttgggagagttacgacgacaaaggagaggtgatgcggacaatagagtccaagagaataatgggacagaagatgcgttgtggatctcagctcgttgattcgtacattaacgatcgcatacgcgacatgcgtagggaagcaaagtctgccttttatgatagcccgaagcgtgcagagtataggaggttgaaggcggcagatgagaagagagcacaggatgcaagggaatgggaagcggctcaagccgagaaacagatgttggataatcttgctgatcgcctcaagggaaagattggaagcggcgtaaactatttggccgatgaggcgcatgcgagatatgttcaggataaaatggcaacggttgagctgatggaggaggaggacgacgacacatctagattgagtgagcttatcgccctcgcagaggcaggattacataaagaagaggaggacgacatgtcaaggttgagtgagctcatagcactagctgaggcaggattacgtgctcaagaggaagaggatgagtttctgtcacaggccgccgcagaggtagaggcagcttattacaagaagaagtctgatgaggctgaggctgaggatgagctattctcccaagctgcagatgaagcagaagccaattattacaaaagaactggtgacaagtgtgatgcaggacaatgcagcaagtggaatgaggttgttgttgaggattgcgagacggatgactccgaagatgagttactcatagattgtgattcagactga

SEQ ID NO: 33531 - DNA, 1362 bp, Zea mays
  Peptide Sequence Number=SeqID_75310
atggcgtccgtttccctttcgatgtgcaaacgagacaatgccgtggcagcagtcgacgcgacgtccgcgacggcgatggctgacgcgcgcacccagatgaaagacatgtaccgagaggcgttgtggcagaagagaggtcgtcctcgggagttatatccggacgtatctagtaaggatgctcctgttcctcctgaactccccgtgcctaactgtgactgtggcagactggcttggggacatcagaggtgtttctttttccagtggatcgatggtcctgataaatttgaccctcgatatcttcttttcgttaattggttgagtggaaggaccactcatgagcgttttaagcgttgggtacctcctcccccgaatcctccaccaatgacggatgcggagaaggaggtagcaacagaaaggcggatggactcaccgcctcgatgcgattgtggagaccgtgctgtcatcgacgaagactatgacaagcagttctgttgtccgaacattgactatccatacgggtggcgtaagtgtcgtttcagagagtggttgtatggtcctttgtcccattggccagagccacaggagacgaggaaatgtagttgggagagttacgacgacaaaggagaggtgatgcggacaatagagtccaagagaataatgggacagaagatgcgttgtggatctcagctcgttgattcgtacattaacgatcgcatacgcgacatgcgtagggaagcaaagtctgccttttatgatagcccgaagcgtgcagagtataggaggttgaaggcggcagatgagaagagagcacaggatgcaagggaatgggaagcggctcaagccgagaaacagatgttggataatcttgctgatcgcctcaagggaaagattggaagcggcgtaaactatttggccgatgaggcgcatgcgagatatgttcaggataaaatggcaacggttgagctgatggaggaggaggacgacgacacatctagattgagtgagcttatcgccctcgcagaggcaggattacataaagaagaggaggacgacatgtcaaggttgagtgagctcatagcactagctgaggcaggattacgtgctcaagaggaagaggatgagtttctgtcacaggccgccgcagaggtagaggcagcttattacaagaagaagtctgatgaggctgaggctgaggatgagctattctcccaagctgcagatgaagcagaagccaattattacaaaagaactggtgacaagtgtgatgcaggacaatgtagcaagtggaatgaggttgttgttgaggattgcgagacggatgactccgaagatgagttactcatagattgtgattcagactga

SEQ ID NO: 33532 - DNA, 4111 bp, Zea mays
  Peptide Sequence Number=SeqID_75311
atgtccgatgaacagaaaaacgagaaaaacaaaaagcgtcgagaagcacgtctacgaaataaagagttgaataagaagcgttctgaagcaagtggagacgaaaaagtaaatgttgatccagatgatgatttcgactggttgcatatcaattatacattacagtcaaacgacattgatgcaacgacagaagttctaacaccaggcagtgtgcacgaaaatgttggccacacacctaagcatactagacagaggaccgcctactttagcgagcggtacaaaaacttaactcccgtcgagagggagtttaggcgtgaacgccttaggttgtataatagaacaccaaggcgaaaagaggcaaaggtagaccacaacaggagacgtagagttatgcaagccgacactttgaatcccacatccatcgccatggaggacccaacatatacccctgagttggtacaccctacagcagatgtaaagggatctgatggatccatattaactgtctgcgactgggttatccctgaattcgtcaacgcacctttcttgccatctccaacccagaccgaggatgtcgcttcgcccgatatgtctaccaatacactaaagcgtaaacatcatgttcctcgtggggaaagacaagctatattagctcgtcgaaaccagcaatttgaatcagccatatcaaggaaggtgggtacttcgattgaggatactagcggtgacgctgttgaaggggacgattggacacagcgccatacgcctatgaagatcaccaacaatggtgatgacgatgagggtgtcatattcgaagacgacgatgatgagaacgagggatacctattcgctgcgcaatgtactattttcgatttttattatcctagcaaggcttatgtaaatattcatgtcttactcattgttttcaaaaaaatatcagatgaggataccgatgaggatatcgagatcgatggtactcaagaagaatctgctgccacttatgtttctgacccgtacgacaaggtgtacaacaacatccctgaagaaacacatatgctcaagcttgttcccaactgcggttattgcaccgcgaagaagtttgagtatgagccacctgggttttgttgtcgtggtgggaaggttgagctagctccagtggagacccctccccaactcaagaggttgtgggatagtgcagactctgatgctaggcactttcgtgataacattaggtttttcaatggccatttctctttcacttccctatactgttgcctcgatagtatgacaactaatgtaaggggttctggtatatacacgtttcgagcacagggcatgatgtaccacaatatcaagtcatttggtagggaaggtggggcagagcataaacaccttgagctttacttttatgatgacgatcccagcctcgagcatcggtaccgtaagtgccgtgaagagcatcaacagaaagacaaggaggttatcaaacagatagtcgacatactacgtggaaacccgtactccgagcaccttaggaccatgggccacgttgacaaccttgatgactatcgtatcgcgttgaaccttgaccagacgttgaaccagaagacatataacacacctctcacttcggaggtggtcgctgtctggatcgaagggagcgaagggcgaggccaattcagcaagagtgttatgctccatgggaaggacagttcaagacactgcatccgctcatatcatggatgctacgatgcactatcatatccattgttcttccctagaggcgaacttggatggcattcaaatatcccaaaggttggagtattcatggacgaagtggatgcataccgcgcgacacatagggcaagtaatgcaaatgatgaagatgcggaatctcctagccatttatgtgtgtctgtacgtgactactactgctacaaattccagattcgtcccggggtattcaatccaatacttcatggaaagcggcttttccagcagttcgcggtcgacacatacataaagattgagagctctcgtttagatttcatacgtaagaaccaagatcgattaagggcagacctatatcagggcttggtggatagcatgctagatggagatattagagcagagaagattggcaagcgaactgtgctgtcgacatcgtttattggcggtcctcgtgacatgagacgtcggtatatgaatgctatggctctggtgcgcaagtttggtaaaccagacatctttcttaccatgacatgtaacccaaactgggatgagataaggagggagcttctccctgggcagacactgcaagatcattcggatcttgtaaagcggggtttgccgcatgcccattttctactcataatgcagaggaagtacaagctcacatgccctgagcagtatgaccttttgatctcagctgagatcccaagcaacaagtaccctgaactacgaaagatggttatcaagcatatgatgcatggcccgtgtgggtcgctaaaccctaactgcccatgcactaagggtcgtaaatcgtgcaagaatcattaccctcggaatttcagtgacacaaccttgcaagggaaggattcgtaccctgtttacagacgtcgtgacgatggtcgtaccgaaaaggttcgagggtgcgaattggacaatagatgggttgtcccttacaacccatacctccttcgtctcttcaactgtcacatcaatattgaggcatgtgggagcatcaaggctgttaaatacctgttcaagtacatatacaaaggccatgatcgtgcttctgttgttatgagagatgcgagcaaggcagatgatgatgtagatgagatcaagcagtacagagatgcaaggtgggtgactcctccagaagccttatggaggatatacggctttgagcttagtcagatatctccacctgtgatgcagttgcaactccatcttccaaacatgcacatggtgtcgtttcacgagcggcaaatggtcgagcgagtcgtcaaccgtccaggtgttgataggtcaatgctcacagcatattttgaggcgaatagtctacacaaggaggcttgtggcatcctgtatcgtgacttccctgaatggtacacttggcagagtggtaagggaaaagtatggcaacagaggaaacgagatacgggtggacaagtcggtagaatagtctctgctcatccggccgagggggagcgctactatcttcgtgttctcctaaaccatgtgactggcgccacttcctatgtggatctaaggacagtagatggtgtcacgctaccgacttttcgtgaggcagcagagagaaggggactgcttgagtcggacaacacactggatgagtgtctcactaaacgtgctcttttccagatgccatcggcgccgcgccgactttttgccacaatacttgtgtactgtgagccaagcgatgtggttgtactctggcagaaacacctagattctatgtccgaggactatcaacacaggaatccgtgcaaaactcatgttgagcagatggtattgattgacattaggaacatgctgcagtcaatgggaaaggacataaagacattccctcttcctcctatcatggatgcgtatgacgatgctattggtactgctagggaggtttacgaggaggaaattatcgaaccggcagcaggagatgtggctctcaaagactgtcttaacaaggaacagagggccgcctatgataagattctgtctgccgttgacactgatcagggcggattattctttgtggatggacctggtggcaccggaaagacttacctatatagagtgcttctcgcgacgctacgcagccagggcaagattgcagtggcaacagctacatctggcgttgctgcttccataatgcctggaggaagaaccgcccattcacgcttcaagatacctctcactattgacgatggcgctgtatgtagcttcacgaagcagagtggaaccgcagagttgctacggaaagcatctctcattatctgggacgaggcttctatgactaagagacaagtcgtggaggcactggacaatagcatgcgcgatataatgggtcgacccggactgccattcggtg

SEQ ID NO: 33533 - DNA, 4551 bp, Zea mays
  Peptide Sequence Number=SeqID_75312
atgtccgatgaacagaaaaacgagaaaaacaaaaagcgtcgagaagcacgtctacgaaataaagagttgaataagaagcgttctgaagcaagtggagacgaaaaagtaaatgttgatccagatgatgatttcgactggttgcatatcaattatacattacagtcaaacgacattgatgcaacgacagaagttctaacaccaggcagtgtgcacgaaaatgttggccacacacctaagcatactagacagaggaccgcctactttagcgagcggtacaaaaacttaactcccgtcgagagggagtttaggcgtgaacgccttaggttgtataatagaacaccaaggcgaaaagaggcaaaggtagaccacaacaggagacgtagagttatgcaagccgacactttgaatcccacatccatcgccatggaggacccaacatatacccctgagttggtacaccctacagcagatgtaaagggatctgatggatccatattaactgtctgcgactgggttatccctgaattcgtcaacgcacctttcttgccatctccaacccagaccgaggatgtcgcttcgcccgatatgtctaccaatacactaaagcgtaaacatcatgttcctcgtggggaaagacaagctatattagctcgtcgaaaccagcaatttgaatcagccatatcaaggaaggtgggtacttcgattgaggatactagcggtgacgctgttgaaggggacgattggacacagcgccatacgcctatgaagatcaccaacaatggtgatgacgatgagggtgtcatattcgaagacgacgatgatgagaacgagggatacctattcgctgcgcaatgtactattttcgatttttattatcctagcaaggcttatgtaaatattcatgtcttactcattgttttcaaaaaaatatcagatgaggataccgatgaggatatcgagatcgatggtactcaagaagaatctgctgccacttatgtttctgacccgtacgacaaggtgtacaacaacatccctgaagaaacacatatgctcaagcttgttcccaactgcggttattgcaccgcgaagaagtttgagtatgagccacctgggttttgttgtcgtggtgggaaggttgagctagctccagtggagacccctccccaactcaagaggttgtgggatagtgcagactctgatgctaggcactttcgtgataacattaggtttttcaatggccatttctctttcacttccctatactgttgcctcgatagtatgacaactaatgtaaggggttctggtatatacacgtttcgagcacagggcatgatgtaccacaatatcaagtcatttggtagggaaggtggggcagagcataaacaccttgagctttacttttatgatgacgatcccagcctcgagcatcggtaccgtaagtgccgtgaagagcatcaacagaaagacaaggaggttatcaaacagatagtcgacatactacgtggaaacccgtactccgagcaccttaggaccatgggccacgttgacaaccttgatgactatcgtatcgcgttgaaccttgaccagacgttgaaccagaagacatataacacacctctcacttcggaggtggtcgctgtctggatcgaagggagcgaagggcgaggccaattcagcaagagtgttatgctccatgggaaggacagttcaagacactgcatccgctcatatcatggatgctacgatgcactatcatatccattgttcttccctagaggcgaacttggatggcattcaaatatcccaaaggttggagtattcatggacgaagtggatgcataccgcgcgacacatagggcaagtaatgcaaatgatgaagatgcggaatctcctagccatttatgtgtgtctgtacgtgactactactgctacaaattccagattcgtcccggggtattcaatccaatacttcatggaaagcggcttttccagcagttcgcggtcgacacatacataaagattgagagctctcgtttagatttcatacgtaagaaccaagatcgattaagggcagacctatatcagggcttggtggatagcatgctagatggagatattagagcagagaagattggcaagcgaactgtgctgtcgacatcgtttattggcggtcctcgtgacatgagacgtcggtatatgaatgctatggctctggtgcgcaagtttggtaaaccagacatctttcttaccatgacatgtaacccaaactgggatgagataaggagggagcttctccctgggcagacactgcaagatcattcggatcttgtaaagcggggtttgccgcatgcccattttctactcataatgcagaggaagtacaagctcacatgccctgagcagtatgaccttttgatctcagctgagatcccaagcaacaagtaccctgaactacgaaagatggttatcaagcatatgatgcatggcccgtgtgggtcgctaaaccctaactgcccatgcactaagggtcgtaaatcgtgcaagaatcattaccctcggaatttcagtgacacaaccttgcaagggaaggattcgtaccctgtttacagacgtcgtgacgatggtcgtaccgaaaaggttcgagggtgcgaattggacaatagatgggttgtcccttacaacccatacctccttcgtctcttcaactgtcacatcaatattgaggcatgtgggagcatcaaggctgttaaatacctgttcaagtacatatacaaaggccatgatcgtgcttctgttgttatgagagatgcgagcaaggcagatgatgatgtagatgagatcaagcagtacagagatgcaaggtgggtgactcctccagaagccttatggaggatatacggctttgagcttagtcagatatctccacctgtgatgcagttgcaactccatcttccaaacatgcacatggtgtcgtttcacgagcggcaaatggtcgagcgagtcgtcaaccgtccaggtgttgataggtcaatgctcacagcatattttgaggcgaatagtctacacaaggaggcttgtggcatcctgtatcgtgacttccctgaatggtacacttggcagagtggtaagggaaaagtatggcaacagaggaaacgagatacgggtggacaagtcggtagaatagtctctgctcatccggccgagggggagcgctactatcttcgtgttctcctaaaccatgtgactggcgccacttcctatgtggatctaaggacagtagatggtgtcacgctaccgacttttcgtgaggcagcagagagaaggggactgcttgagtcggacaacacactggatgagtgtctcactaaacgtgctcttttccagatgccatcggcgccgcgccgactttttgccacaatacttgtgtactgtgagccaagcgatgtggttgtactctggcagaaacacctagattctatgtccgaggactatcaacacaggaatccgtgcaaaactcatgttgagcagatggtattgattgacattaggaacatgctgcagtcaatgggaaaggacataaagacattccctcttcctcctatcatggatgcgtatgacgatgctattggtactgctagggaggtttacgaggaggaaattatcgaaccggcagcaggagatgtggctctcaaagactgtcttaacaaggaacagagggccgcctatgataagattctgtctgccgttgacactgatcagggcggattattctttgtggatggacctggtggcaccggaaagacttacctatatagagtgcttctcgcgacgctacgcagccagggcaagattgcagtggcaacagctacatctggcgttgctgcttccataatgcctggaggaagaaccgcccattcacgcttcaagatacctctcactattgacgatggcgctgtatgtagcttcacgaagcagagtggaaccgcagagttgctacggaaagcatctctcattatctgggacgaggcttctatgactaagagacaagtcgtggaggcactggacaatagcatgcgcgatataatgggtcgacccggactgccattcggtggtaaaaccattgtcttcggtggggatttcagacaggtcttgcctgttgttcgtaaagggtcaagggctcaagtggtcgcttcttcgctacggatgtcttacctatgggagtccatgtcccacttaaagcttgttaccaatatgagggcaaaaaacgacccttggtttgcggagtatttgctgcgtgtaggcggtggaactgaggacacaaatactgacggcgacatccgtcttcctgacgaggtatgtgtgccttacagtgggagtgacaacgatcttgacaacctaatagacttcgttttcccaaatctcaacaaaaatatgtctgattcgacctacatcacttcaagggcgatactgtcaacacggaacgaatgggtggatatgataaatgttaagatgattgatcgtttttcaaggggagcatatggtgtaccatag

SEQ ID NO: 33534 - DNA, 486 bp, Zea mays
  Peptide Sequence Number=SeqID_75313
atgccgacgccgaccttcaatcactcggcgctgcctctaaaacgcagaccatgggttcaatcgctcggcattacttctaaaatgccgacgccgacttgctatcactcggcgctgcctctaaaacgccgaccacgtgttcaatcgctcggcattacttctaaaatgccgacgccgactttcaatcactcggcgctgtctctaaaacgccgaccatgtgttcaatcgctcggcattgcttctaaaatgccgacgccgaccttcaatcactcggcgctgcctctaaaacgccgaccacgtgttcacacgcccagcattacttctaaaaatgctgatgccggtattctatcactcggtgttatttctaaaatgctgaccccgtattttgtcactcagcattatttccaaaatgccgatgccgaccttctatcattcggcattgcctctaaaatgctggtcttgtgttcgattgctcagtgttacttctaa

SEQ ID NO: 33535 - DNA, 582 bp, Zea mays
  Peptide Sequence Number=SeqID_75314
atgggcaagaacaacaagcgtaagcgtgagccgactcctccatcggaggagtttggtgactcagaatactcggaggaggagttctcctccgaggctgaggggtccccggctcccgcctctcccccggcgtcgtccgatgactcggacgactcccaggggatagccgcggaggtctggacatatatccgggccgtcgagcgcgccgggctcgaaggctcggatgagtcggagtgctcctcggatgaggaggactcggacggcggcgacgagggtgaagacgacgacgacgacgacgacgacgacgacgacggctgggggtggcggcgacggcagcagggacagcaccaagggcagcagcaggggcagcaccaagggcggcggcggcggcagcagggacagcaccaagggcagcagcaggggcagcaccaaaggcggcggcggcggcgggggcaggggcagggccagtggctagacgccactgtagaaacagcgccgagtgatgtgaagattgacatcagcgttttagaagtagcactgagcaatcgaacacaagaccagcgttttagaggcaatgccgaatga

SEQ ID NO: 33536 - DNA, 843 bp, Zea mays
  Peptide Sequence Number=SeqID_75315
atgggctccgatccgtcgcgagcgggtccagcacttctcaagctcccttccattgatgctgggtaccgtgtagtccaccacgctcacggggctcccgccctctgcctccttgaaaacccaaacgccaacaggttgttgaaaacattgcaaggaagaatggtatcagtaagagtgagttacttgatagagaagcagatgattgctattcgtattgctcttggtgagacacacatcattgcagagactaagaaatttctatcaaggtctggagttaatgttgctgcattggaagaacatgcttctaaacgaaatgataagttcaaaagaagcaattatgtgatattagtaaagaacttgccatttaattctactaaggaagaactcgcgacactatttcagaaacatggtagtttggataaaataattctacctccaacgagagtgtttgccttggtggtctttgttgaagcaactgaagcccaatacgcattcaaaaaactattatatacaccatataaggatactcctctgtatttggagtgtgcacctgaaaacatattgtctcctacctcagcaccggtggatgaggaagtaaaaaacgaagatggcgagcgtattcttactaaagctaatatagatcaaactgtagaaggagtaagcgctgaagatattgatccagatagagtggaggactcagcttctttgattgcatctccaaatgagtcatctgccatgctgcatcaaaattttgctagcacgtttagtttcccacaaggtggggagctagggaagttgcagattgacataagcaagttcatggcgagaaaaccaggttacagatga

SEQ ID NO: 33537 - DNA, 1494 bp, Zea mays
  Peptide Sequence Number=SeqID_75316
atgtcgtcgcggctgtgcgtgaagaacctgcccaagggcgccgacgagaggcggctgcgggatgtgttctcgcggaagggcgaggtcaccgacgccaaggtcatccgaacaaatgcaaagaatctgcatgtaattgagcttttgcttttggtcagggatggcaagagtcggcagtttgcattcattggttacagaaccaatgaagaggcagatgaggcactcaagtatttcaacaatacatacatcgacacttgtaagatcacctgcgaggttgcccgaaaaattggtgaccctgatgctcctcgcccttggagccgccattctttaaagaagtctgaatatggtagtaaagacaagaataatgctggagctgttgatgcaccacctaaaggttccaacgcacaaggaacatcggctcatgctagtggttctaaaggcagtgtagctaatgatcccaagtttctagagttccttgaagctatgcagccccgttctaaagccaagatgtgggcaaatgatacagctgctactcttgacactgctgcaaaagatagtgtagtagccgctaaagaatctaagggacctctaaaaaatgttctgacctctgagaacgattcatcttctgaagacacttctgatgagaaagtggcaaatgatttgtcttccgaaaatgcttcggagcagctaaagacagagaataaacaagacaagaatatgactgatgcagatttcttcaagagtaaagtcaagaaaaattggtcagattctgaatctgatgacgaaggttctgctcaccagtcaaataccaccactgatgatgaagactcgtcagatgaatcacaagattcagataaccagttggcagatactaagggcgatcctgacaagagaaacattgtggacaaggacactcttgtggagaatactgacttgcaagagccggaggatcttgacaacaaagagagtgaagatcttgatggcagaccaagaggaactgaaattcatgaagatcaagaaagggcagatgaaaacggtgctccaattactgatgaaaagaagttggccctggagactggtcgtctatatatctgcaaccttccatatgcaaccagcgaagatgatttagtggagctgtgccgccaatatggtgatgtggaacaggcacatattgttgtcaataaagccacaaagatctcaactggtagaggctatgtgctttttagccttccggactcagcagtcagggcacttgatgaactagataactcaagctttcagggacgagtgttacgtgttaaggctgctaaaccgctaaataagttggagtcttttcatgaaacaaaatgtggagaaagtaagtctcaagcagaaaaggttgaagaaaacattgcaaggaagaatggtatcagtaagagtgagttactcgatagagaagcagatgatcttcttgttcgtattgctcttggtgagacacacgtcatgcagtttttgtaa

SEQ ID NO: 33538 - DNA, 453 bp, Zea mays
  Peptide Sequence Number=SeqID_75317
atggaagcgcatttcagttcaaatgaactgattgacccaagattagccggcaacttcactgcagaaggaatcaaatacagcaatttctcagatttgtgccagaagcaagaggctgttaaagaagtgcttggatctttagcaaagtttgcatgtgttttattccctaatattcctgaagcctacttggatcgctggtgcgacgtttacagctttggtgtcatattatgggagctggcaacgcttagaatgccatggagtgggatgaatccaatgcaggttgtgggggcagttggtttccaggatagacgacttgatattcccaaggaagttgatcctctggtagcaaggatcatattcgaatgctggcagaatgaccaaggtggtgaagatgataactttgctattgtgtttgctgctatgggagtgaacatggaaaaaactcaattcttgtaa

SEQ ID NO: 33539 - DNA, 816 bp, Zea mays
  Peptide Sequence Number=SeqID_75318
atggcgggcgtgagtgctgcggctaggcgggtgcacccgggcggggtgcgggagaagctggtcggagctcaggatacggagattctgctgttgcttgccaactggcgagaggctcagacaatccatcgggtgctggcgacgcagctcttcttcatgttcctgccgctcagtgataagagcagactgggctgcaagatcgccaggttcataagcaagtacgtcattgagtattttcccgtcactttgcacgtggaagactatggcgcctttgatcccaatagagcttatgtgttcggttatgagcctcattctgttttgcccatagctgttgggatccttggggaccttgttggattcatgccgctaccaaagctaaagattcttgcaagcagtgcggtgttctacaccccgttcctaaggcaaatatggacgtggttggggttggctcctgcgtcgagaaagagtttctactcctaccttggagctggttatagctgtattatagtgccaggaggttttgttaagatagctattgagatgggttgccctgtagtccccgtttttgctttcggacagttgattgaccggcctgagggtggatatttgactgctgatttaccaatgcctcggggagaaattgtcatcggaggtccaaatataattaaaggctatttcaagaatgaagctaaaacaaatgaagtctacaagcaaggaatcaaatacagcgatttctcagatttgtgccagaagcaagaggctgttaaagaagtgcttggatctttagcaaaggaatgtatcattatatttttggcttga

SEQ ID NO: 33540 - DNA, 255 bp, Zea mays
  Peptide Sequence Number=SeqID_75319
atgaactcgtcggtctcgggaaatggaaaaggcgatgtggctaaaattcaccggactgtccagtggtacaccggactgtccaatttgagtcttgcgtgtgttgctctccccaatcttactctatgctttctttgtgatctccattgtaagggcgagagactccaaactgtggagattcctcgtacacgagaaaagactctaacgaaaaagaccgtggtattcaagttgatcatcggatcacttgaaaggggttga

SEQ ID NO: 33541 - DNA, 333 bp, Zea mays
  Peptide Sequence Number=SeqID_75320
atgacgtcggatcgctctcaacctcctatggaagcaaggaaaggtcagcaacatccatgccgcaccgtcagggtatgcttctacaaggctcaaggcgcttctccgacggccacgttagcccgtctacaggggctcaaggcgcttctcccacggccacggacacgcagcaacaaatttactggtcggttgacggtccctgcgggtccgaaacaccgacaaatgtacaagggcgagagactccaaactgtggagattcctcacacacgagaaaagactctaaagaaaaagatcgtggtattcaagttgatcatcagatcacttgaaaggggttga

SEQ ID NO: 33542 - DNA, 423 bp, Zea mays
  Peptide Sequence Number=SeqID_75321
atgtcacttaccggcagaggtggcgcagaggcccttgaccacgcgaacagatcgagatccgccagggcattgaactccgacgacgaattccacccgattcggggtcgccccgcccgctccgaaggcacggacgaattcccctggacgttggcgcacccacgcgactatgcacagaggatggaacaccggcgccgagtactgagcacacttgcccaaggcgacaggcggtggtcgggtccgtccgcccatggcaagggtcccaagcgcccagaagcttccttcgcgcacgccccagagaagatcccgagcggcgcccaaagcctgggcgaggtcgcatctgcggtcgacgttgctggctacacgattctctccccctctcacgggcaacgggcgatggtggcggactggataagattaatttaa

SEQ ID NO: 33543 - DNA, 1051 bp, Zea mays
  Peptide Sequence Number=SeqID_75322
atggacaccagcgtccttctactcctccttccccatggctgtgcacctctctgcagcaacccatccgcaacgccgtcgaccctcggtgagcgcaagcacagtcacttccctatgaaggtcggtcccgccgtgggcggtggcggcggcggccacccatcgtcgatcatcaccaagcataccgcgcggtcagggtcctcgcgctccatcgccaacctttggcacgccacgcaatcgggatcgcatcagcaagaagcagcagatcgcgtggacacagcgacgtccgtcaccgacccgctcctcgagtgggcacgcgaggcgcactggtccatgcggggtctccccgcagtaatctccctaacccgcgccaatctccctccccgtaatggcgtgccaaagcaattacagccatacatgctcagatccagtttccctcgagttccagaaactccgcccccaatagccctcgcgtttgtagatctcgcgtcctcgatggaaggttcgcctccacgccattcatgctgctccgtgagtcccgctcccttcctcttcctgacttgtggcttccaattctcctttctgccctcagatggagttctagatcagcgcggcagggtccacggcactgtgtcgggggcagcgttggagttggaaaagggctgcgtcgcgaccgcggagggaacaacgccaatgagcggtggaggtgttccactccacaaccctccaaccccgccactgccatccaaccacgtcggcgccgaggtgtactaccttccctacgtcaccgacgtcgagtactacacgaccggtggtaagaagatatcttccacctcgatctactttgagagcctgccgatcaacccttcactggatgatatacaatacgtgctgctccgcttgctcctgtcccgcgcagatcgccctcaggattttattccgccctccgtctctgggctcgtttggatcgagatgggcgtttgcgtgtccaaggacacccgctgctgctgctgccgcgagccgcacaacagggttactaacgacaggactgatgctg

SEQ ID NO: 33544 - DNA, 327 bp, Zea mays
  Peptide Sequence Number=SeqID_75323
atgcaggttggtggagcatttgcttattttggccaaaagactcaagtttaccatcaaagtttaccatcaaagtatatcccctacctcccacccagagaagatcccatccactaccgccgggtcgccgtcctcccttccgtcgcgcccctcctgttccacccgctccgcttgctcaccgcagatcgccctcaggattttattccgccctccgtctctgggctcgtttggatcgagatgggcgtttgcgtgtccaaggacacccgctgctgctgctgccgcgagccgcacaacagggttactaacgacaggactgatgctggtgcgtga

SEQ ID NO: 33545 - DNA, 438 bp, Zea mays
  Peptide Sequence Number=SeqID_75324
atggtgagggacgagcatgttaaatttacactgaaatttgagtacggatttggctatgactctttggtgcttgagaaaagtgagttttctcttggagacgttatgaatgctgttgtcagccaaacaatgtcattgttgagggagagggatttacaacttattcgggatatccctgatgaaatcaaggatgcattagcatatggtgatcaatttagaattcaacaagttttggctgacttcttgctaagcatggcacagtctgctccatccgagaatggctgggtagaaatacaagtcagaccaaatgtaaaacagaattatgacggaatagatacagagcttttcatcttcaggtttgcctgcccgggtgagggcctcccactgacattgtccaggatatgttcagcaattcccaatggtcaacccaagaaggcgtag

SEQ ID NO: 33546 - DNA, 843 bp, Zea mays
  Peptide Sequence Number=SeqID_75325
atgaggctgtcgttcagctctctggctccattgttcttgtacttcatccaatggttggactacggctgctgttatgcccttcccagctatttaggactatttcacattctcacatgcaaggtttatgctgatggagatagctcagtgtcgacatatgaaaggcgggcaagccttagggaattctatggtataagagaagccaccacagctaaccccaacgatgctcatgtcgccggtgttggaaaggcatatctgcgaagttattcgagctccacagacacctttgtcgtgccgccgcggctgccctctccatccagctctttggtgcttgagaaaagtgagttttctcttggagacgttatgaatgctgttgtcagccaaacaatgtcattgttgagggagagggatttacaacttattcgggatatccctgatgaaatcaaggatgcatcagcatatggtgatcaatttagaattcaacaagttttggctgacttcttgctaagcatggcacagtctgctccatccgagaatggctgggtagaaatacaagtcagaccaaatgtaaaacagaattatgacggaacagatacagagcttttcatcttcacgtttgcctgcccaggtgagggcctccccactgacattgtccaggatatgttcagcaattcccaatggtcaacccaagaaggcgtaggactaagcacatgcaggaaaatcctcaaattgatgggcggcgaggtccaatacatcagggagtcagagcggagtttcttcctcatcgtccttgagctgccccaacctcgtctagcagctggtagagaaaatcagctgatatgttaa

SEQ ID NO: 33547 - DNA, 555 bp, Zea mays
  Peptide Sequence Number=SeqID_75326
atgaacaaacacaccggcattcgaagtgccattacaaacggaactccggttccccctccgcaggtacgaacaaccccactccgggggggaaggcctgcggagcaacagaagaatgatgagcggcccgctgccgcccgttctaaccacgacgccaaccacccacgccccgggcagcgaagcggcttaggcagcagctttgtggcaggtgtcatgacgggagggctctcccccgctgaggacgagaaccagccattcgggccgggagacggaggcccagggccactggcgccctacctatcccggcatggctggaggaagtccccgtgggactcaaggacgccattctcccccaggcgcgggggaagaaaaaggcagccgacccatgcgggggcagcccccccgactcgcctcatcttccatcttggcctggatgacgaaaatccttggggccgagggaggagtagaggccacgacctggcccgctttccccaccgtcgaactggaggtcaccatcttgggtcaccgccggtggcggggcgtggccaggctgcgtga

SEQ ID NO: 33548 - DNA, 384 bp, Zea mays
  Peptide Sequence Number=SeqID_75327
atggtgtctccggtgagctgcaagcgggtaatccgagtggacgtccgtgccccgttcgttgggggtcggctaggggcccagaggcacgcccaaaagtacctgcggcaactggcgcgccggttgcttgacgcgtgggcctgggcttccaagctggcgtgtcagaagtcggagaagcgcgtccacctggcgcggttgcatgccgtctgcatggctgcccgccccttccgcctgttggtctgggcaaaacctggccacgccccgccaccggcggtcacccaagatggtgacctccagttcgacggtggggaaagcgggccaggccgcggcctctactcctccctcggcctcaaggattttcgtcacccaggccaagatggaagatga

SEQ ID NO: 33549 - DNA, 1005 bp, Zea mays
  Peptide Sequence Number=SeqID_75328
atggacggcgcaacgggctccagcgaggccgtgggtgacgacggggcgagctcgcgacgggtggtgaacggagacgacgcagcgaaccgttgcgcagcaaggcgaggcgcgacggaaggcggcataacgcggcaacgacgtagaggcagggcgtggcctgggcacgcaggccaggggacagacgacggcgagctgcttagagcggacgtctggttcgacaaagatggtcgcggttggggcgtgcgcggcgagagcttcctgcgtggccgtggcctccggcgaccagggctaggacgagcacgaacgccgcgacggcgatggggaatccgcgcctggggctgccggtgtgctcgcacagacccttgccgcgcaggggtcgagacagggagtgttgaacctccatggctgctcggtcaatgtgttgatggaggtcggatggggccgagcagcagaaaagcgagacaaggcgaggggaggagagagggaggaagaaggtgctatgcgcggctgcgagttggcgacgtgggcgcagggactcggacggttggagaagacgtgccctggcggccagagaacgagcagcggctgcgcgagcggctgggcgacctgttctgcgcgcgcgagctgggcttgctgggagcgctggcgagcaggcctggcggcctgggcgtgggcgagcgcccctggcgcgcgagctgggccacggtggggggctgcaccagcggctgggctggggcgcgagttctggccgcgcaaggggggagcggggtgggccgcgcaagaggcgcgctaatgggccggctgggggcgcgcgagcagcgcagatgctcgagaccgattgatgcaattcttgaggatctcctggacctgtgggttaggacccacacacgctttcgctgcgccaatctgatcttgttggttgatgttgattgcattgtcttcattggggagttggaggttgccaaaaggacaggtgcaagaggaaagaataacgagaaaaggtaa

SEQ ID NO: 33550 - DNA, 699 bp, Zea mays
  Peptide Sequence Number=SeqID_75329
atggacggcgcaacgggctccagcgaggccgtgggtgacgacggggcgagctcgcgacgggtggtgaacggagacgacgcagcgaaccgttgcgcagcaaggcgaggcgcgacggaaggcggcataacgcggcaacgacgtagaggcagggcgtggcctgggcacgcaggccaggggacagacgacggcgagctgcttagagcggacatctggttcgacaaagatggtcgcggttggggcgtgcgcggcgagagcttcctgcgtggccgtggcctccggcgaccagggctaggacgagcacgaacgccgcgacggcgatggggaatccgcgcctggggctgccggtgtgctcgcacagacccttgccgcgcaggggtcgagacagggagtgttgaacctccatggctgctcggtcaatgtgttgatggaggtcggatggggccgagcagcagaaaagcgagacaaggcgaggggaggagagagggaggaagaaggtgctatgcgcggctgcgagttggcgacgtgggcgcagggactcggacggttggagaacacgtgccctggcggccagagaacgagcagcggctgcgcgagcggctgggcgacctgttctgcgcgcgcgagctgggcttgctgggagcgctggcgagcaggcctggcggcctgggcgtgggcgagcgcccctggcgcgcgagctag

SEQ ID NO: 33551 - DNA, 198 bp, Zea mays
  Peptide Sequence Number=SeqID_75330
atggagctaggactccgcttgaaggcggatctaatacttttgctttttgtaagaccaacaggccgggcttatgagggcggacctcaccgggctagcgtacacccatttctgcatggatttgtcaaaagcctggacccgtggggagtccagaagggtttccgagggaaggtcggcgacgaggtggggagccgtctttag

SEQ ID NO: 33552 - DNA, 162 bp, Zea mays
  Peptide Sequence Number=SeqID_75331
atggagctaggactccgcttgaaggtggatgtaatacttttgctttttgtaagaccaacaggccgggcttatgagggcggacctcaccgggttggcgtacacccatttctgcatggacttgttagaagtctggacccatggggagtccagaagggtttctga

SEQ ID NO: 33553 - DNA, 381 bp, Zea mays
  Peptide Sequence Number=SeqID_75332
atggactggcttctccggcgaggcaaagtccgattccttgctcggggagcttcaccgaggcatgcatggtctactctgagggtcggacgtggttgggagaggctctgctggccggtctacggtggctggggatcgggtggccgcgggcacgccgtgcgcggggcaatgacggcgatctggtgctccggcccacggtatggacccaggctgagcggctacatgggctccagaccaccccaggagacaaaccaacaggccgggcttatgagggcggacctcaccgggttggcgtacacccatttctgcatggacctgtcagaagtctggacccgtggggagtccagaagggtttttgggggaaggcaggcttcgaccccgtag

SEQ ID NO: 33554 - DNA, 612 bp, Zea mays
  Peptide Sequence Number=SeqID_75333
atgggcatgtcggcgctacagaaagttgtagcagcggtagtccacgatgtcaacgctgagggctgggatcgaggattggagggggataacggtggtccagcatttgaaactgattttgcagaccaattgaaaaacttcagtaagatgggtcatggtgttagcagtgggggtggcaccgtagttgataataatatctgccacccaacagaatttgatttcttcgtgtgcatccatgctggggccaagggaacaagccgtcctacgcattaccatgtgctacgagatgacaacaagttcaccgcagatgctctgcagtctctaacatataacttgtgctacatccccgccgccctcccgcagcccaccgccctcccacgctccatccctccatccatccaccggcagccccgcatcctcgcctcgctcgcctcctccgccgatcatccagggcggacctataagatgtcaagtgtgtacgccccaacaacccacagatgcggctcgacgctctccatcgtctggtataccagagtgcccctgcgagatgcaaaaaacagggcaaatggaaccacaaagcctactatggtagcagccagattccagaacctgtag

SEQ ID NO: 33555 - DNA, 900 bp, Zea mays
  Peptide Sequence Number=SeqID_75334
atggcctctctgccttgttcacaaataaagttaagcaaagtacttgtcaggaggaagtttcatgagagtggacagaccaatttgccaaggcctcttcactggaaacccttgcgaccaggccgttttgaaaatcttgtgctgcaatgcaccaagaatttgtcatgggaaacatctcttccatatgcctctgcagaggatgatgccagtatcatcaagggaacaggtgttgttgaacctattgatacagaagaagctccacagattccaatcctccagagtgatgaagatgttgtagaggtgaagaatgaaccttcttggcatcttaaggcatttaaattggcaatgtggctagtagggccttcaatcctgttggttacgggtatagttccaactttatggctgccattgtcttcagtgtttcatggtcccaacatcgctggccttctatctctagtcggacttgacttcatttttaatatgggagcaatgttgtttttccttatggctgatgcatgcagccgtcaagagaacaatatttttgacctgaaaaggtccgccctggatgatctgcgcactgaaactacaagttctaagaagacgtccacctttaacgttgatgtgtcggcgtgtcgcaacggaccaggacacaaggggcctgtttggttcggcgatgggaggagcgagggaaaggcagaaggaggaggcgaggatggtcggaccggcggaggaggcgagcgaggcgaggatgcggggctgccggtggatggatggagggatggagcgtgggagggcggtgggctgcgggagggcggcggggctgccgacaggatgcagggcgaggtgcgaccgcgggcggatgtggggcggatgcggaggcgcggcagaaccatgtgggtgtga

SEQ ID NO: 33556 - DNA, 969 bp, Zea mays
  Peptide Sequence Number=SeqID_75335
atggcccagcggttgagggaggaatcgcagcggctgccgcagcagctggggcaagcggccgacttcgccgaacgcgttgcgtccggtgtcctgacagcggacgtggctgccgaagtcgagagacttcgaacgcagcatgcggatgccatccgagagaagtcggtcgcggagagcaagaatcgcaggctggcggagaaagtggcagccttggaggccgagaagacggacctccggcgcaagctggcagaggagcggagggaggcgaataaggtcgttgccgaggcgcagtctgcggaggcggaggccaaagtggcacgggcggaggtgagcctcgccagccagcgcaccgaggagtgggaggcgaggttcaatgccctgcgcggccgtgtggacaaggctgaggcctccacgcgctcagaggttaagcagacgctcacacagttcgtggactcatacagcgagctgggtgcgcgggccgctgacttcgaagtgcccgatcgagaagcgggacttcgctttctcgagtggctgcaggaggagttgttgaatctcccgactatcgtggagggtttcatgtccttcgcctcccttgttacctgcgagggggccgtgaatgcgctgtctcgcgtgggctgcaggcactacgaggtcttcgaccaggccgacgagaactttgaacgcgagatcttcaaggtcgaagaccctgttgtgaagcagtctgcgggggctctttttgataggatgtggggggcgcatggtccggaggctgtcagggagcgatccgaccgggcgagagagcagatggagcatgccgaggatgtcgaggaccttggaggtctgaacgacgcgccgcccgaggctgcgggggacattccggtgctgccctcggatgctagtgaaggcccctcggccgtgcccgtgcctgctgcggccggcgaagaccctgtgccggtccctgcgccgacttag

SEQ ID NO: 33557 - DNA, 1632 bp, Zea mays
  Peptide Sequence Number=SeqID_75336
atggcccagcggttgagggaggaatcgcagcggctgccgcagcagctggggcaagcggccgacttcgccgaacgcgttgcgtccggtgtcctgacagcggacgtggctgccgaagtcgagagacttcgaacgcagcatgcggatgccatccgagagaagtcggtcgcggagagcaagaatcgcaggctggcggagaaagtggcagccttggaggccgagaagacggacctccggcgcaagctggcagaggagcggagggaggcgaataaggtcgttgccgaggcgcagtctgcggaggcggaggccaaagtggcacgggcggaggtgagcctcgccagccagcgcaccgaggagtgggaggcgaggttcaatgccctgcgcggccgtgtggacaaggctgaggcctccacgcgctcagaggttaagcagacgctcacacagttcgtggactcatacagcgagctgggtgcgcgggccgctgacttcgaagtgcccgatcgagaagcgggacttcgctttctcgagtggctgcaggaggagttgttgaatctcccgactatcgtggagggtttcatgtccttcgcctcccttgttacctgcgagggggccgtgaatgcgctgtctcgcgtgggctgcaggcactacgaggtcttcgaccaggccgacgagaactttgaacgcgagatcttcaaggtcgaagaccctgttgtgaagcagtctgcgggggctctttttgataggatgtggggggcgcatggtccggaggctgtcagggagcgatccgaccgggcgagagagcaggtgaagatggagcatgccgaggatgtcgaggaccttggaggtctgaacgacgcgccgcccgaggctgcgggggacattccggtgctgccctcggatgctagtgaaggcccctcggccgtgcccgtgcctgctgcggccggcgaagaccctgtgccggttcagggttttgggcctgcgtatgcaaccgctactgacaatgataattttgtggcggcttcgaccgtagtcgttgaagatgttttggatgattccgtgtctaagttttttgagtctgatgattctgggagttcggttgagtggacggaagagtcttcggatgaagacctggattattttctggcttttgatgtggctgcggcggaggcttctccgcgcgtgatgggtgctgaagtttttcctgttgcgagtggtgggcgcaggcggcggagggcggtggcgaagcggagggtgagtgaggtggaggctggtcgtcttcgtgtggacggggccagcaaacgggaattgttgtcctcgccagctgggattgaccaagttgatataaggcttcaggcagttcacctgattgggaggcttcttgccttgtctaatatttattttggtgaaaacaacaaggtggtttttatagaattcctaaagagattctcgaacaaatctgctaaagttagaattgttgcaattgatgcagtcaaagcatgctacatggaagttgtatttgttttggtgattttgatctttgcaactcttcctcatgagattttggagatgactagcaagtttatgactaaaccacctaggatccttatgaagcgtgaggagttgactctgacgtaa

SEQ ID NO: 33558 - DNA, 1620 bp, Zea mays
  Peptide Sequence Number=SeqID_75337
atggagaagtgcaaaccaatcaagacccccatgcctacaaatggacatctcgacttagatgagggagtgaccttgattgcacgtgtgccgtctcccgtcctgcctggatcgtcacctctcgtacatcagttcaggatgccgcgcacgaagaatgtgtcggtgccagggggaggcgatgatgaggatcctcgtcgccccttcaggcaggtcaaggggaagactgtttacttggagcagcaggaaggccgcaagaagcggcgtacggacagagcagcccgtgcagcggcagcggctgcagcggccgctgcgcaggctgagcttggagatcagccgcagactccatccgatcagattgcataccgtgttcgtcgtctcgcctctcggcatcgctcctccactcacacctccgcttccactccaccaccaactctgcctgctcccgtcactcctattgctccatccacctccacagccatacccgctacctccactacgctagcttccactactcctcctcctcccgctcccgcttcagctcctcctgtccctccacctcgattccgggagcgcgatgagactgaggttcgacccctggctacggatccttgtctgtttgaccttcagcgtgctacagcggcccgagctcagatgtctgctcagatagctctgcgagtgcaccggcttttggatcttccagcctttctgcttgcagccggtgctgactctgaggcgcacctcacctatctgcctggccttcagacccttttgactaccagcggcagcctttgctacggcacttctgaccctcctcgtcgccctcacggcggtgtggctccgggtacagctcacgtcgcggctctgttccgcccgcccttctcagatgggtcgcgacgttcaccggcagattttactacagcagcaaagtacttatatgagctcatcagacggactcttctgccgaggatgggatacagggaggctaccactcatattcagctttggctccttggtgccctggtctcccactctgagtttgacgttgtggacttcctgatttgtgagatcgaggacaccattttggatgggattcatgctcgtcggcatttgccctatgctcactacttgtgccacatctttgcgcagctgattcagcctcctcgatttcagggcacccttgaggcctcacgcctcgtttttggatcctaccgtcctgcgcctgagattcctgtgccagcttctgctcctgtttttgactctcaggccgaggatgcagctcttcgtcagttcgacactcagggtacagcagctgatgatgatgatgatgatgatgatgattttggggttccgcctccgcctcctatgcctccacgctctcatgatcatgaggctgggaattctagtgctgtccctgctactcctcaggctatggaccctgctcttgcttcgattctccagactctcactcagcagcaggctcacctggcagccgagcaggcccgattatccgagaggatgctctcgatgtttcagaacatgcaggacaggcaggatgcgcttcagcagcagctacttctggatcgggctgagagtagggcattcatggctctcatgctacagtag

SEQ ID NO: 33559 - DNA, 1449 bp, Zea mays
  Peptide Sequence Number=SeqID_75338
atggagaagtgcaaaccaatcaagacccccatgcctacaaatggacatctcgacttagatgagggagtgaccttgattgcacgtgtgccgtctcccgtcctgcctggatcgtcacctctcgtacatcagttcaggatgccgcgcacgaagaatgtgtcggtgccagggggaggcgatgatgaggatcctcgtcgccccttcaggcaggtcaaggggaagactgtttacttggagcagcaggaaggccgcaagaagcggcgtacggacagagcagcccgtgcagcggcagcggctgcagcggccgctgcgcaggctgagcttggagatcagccgcagactccatccgatcagattgcataccgtctcctcctgtccctccacctcgattccgggagcgcgatgagactgaggttcgacccctgggctacggatccttgtctgtttgaccttcagcgtgctacagcggcccgagctcagatgtctgctcagatagctctgcgagtgcaccggcttttggatcttccagcctttctgcttgcagccggtgctgactctgaggcgcacctcacctatctgcctggccttcagacccttttgactaccagcggcagcctttgctacggcacttctgaccctcctcgtcgccctcacggcggtgtggctccgggtacagctcacgtcgcggctctgttccgcccgcccttctcagatgggtcgcgacgttcaccggcagattttactacagcagcaaagtacttatatgagctcatcagacggactcttctgccgaggatgggatacagggaggctaccactcatattcagctttggctccttggtgccctggtctcccactctgagtttgacgttgtggacttcctgatttgtgagatcgaggacaccattttggatgggattcatgctcgtcggcatttgccctatgctcactacttgtgccacatctttgcgcagctgattcagcctcctcgatttcagggcacccttgaggcctcacgcctcgtttttggatcctaccgtcctgcgcctgagattcctgtgccagcttctgctcctgtttttgactctcaggccgaggatgcagctcttcgtcagttcgacactcagggtacagcagctgatgatgatgatgatgatgatgatgattttggggttccgcctccgcctcctatgcctccacgctctcatgatcatgaggctgggaattctagtgctgtccctgctactcctcaggctatggaccctgctcttgcttcgattctccagactctcactcagcagcaggctcacctggcagccgagcaggcccgattatccgagaggatgctctcgatgtttcagaacatgcaggacaggcaggatgcgcttcagcagcagctacttctggatcgggctgagagtagggcattcatggctctcatgctacagtag

SEQ ID NO: 33560 - DNA, 387 bp, Zea mays
  Peptide Sequence Number=SeqID_75339
atgcaaatccactatgttatcctaaaagaaaacctaaacctagaagactgtaatcttgctaacggagagtacatcctcgtgccggagcaaggagctgctcaggaggtagccccagatccagcacccgagcctgcaccagaggacctgcctgccactgctttggaaggcaagccccgcagattgccctcctcatgcgacctgagacgaggtctcccattccggttatggtgggtacaagtgcggtcactgcacgacggccagtcggggtcagtgaggcattgttctctggaggagatggttgctgggataacttggccgtccaccttgccaccgggttggactgtcgagtgggaccctgcctcggctgaggaggagcatgtggagtga

SEQ ID NO: 33561 - DNA, 846 bp, Zea mays
  Peptide Sequence Number=SeqID_75340
atggaagaaacacacctccacgtgttcgacgctttctgcccgcgccagagcacgctcacgcgcgcccccgcatgcccagcgccgcgcctgagccaaaccagcaccgtggcccgcgcccgagcctataaagccctcccaggcttcgactacactcttccgcgcaccctcaaacctcaccggagtttcgctcgtcgccgtttgcccgtgcgcagcgagtccgcggccgcccaatccccctgtcaccgtagaccggccattagagccattcccaaccccgtccagccctcggagaagcctgtgcacacctccgtgaggctccccgagcaaggaatcggagtttgcttcgccggagaggccagcccacgctcgccggagctctcaaccccgccggagtacgtggaccgggtaaaccactcaaccatccttcgattccttgtgcacaccgtcgctgcgtcaccccgtgaagctcaccgtgcccttggattgaaccagttcgctgtagtttggccggtacactcgccgccgacgagcacacccgcctgcgctcgtagaccgggcgattccggccatccccgacgtcaagccgtacctcgacgtgaccgccagagtctccccgagccaaccctacccttcaccggacctccctcgccgccgacaatacaaatccactatgttatcctaaaagaaaacctaaacttaaaagactgtaaccttgctgacggagagtacatcctcgtgccggagcaaggagctgctcaggaggtagccccagatccagcacccgagcctgcaccagaggacctgcctgctactgctttggaaggcaagccccggttttatgcataa

SEQ ID NO: 33562 - DNA, 285 bp, Zea mays
  Peptide Sequence Number=SeqID_75341
atgaccggaatgggagaccacgtctcaggtcgcgtgaggggcaaagtctgcgggcaggttcactcaggtactaggcttaccgatttaccatatttctcgtggcaggcaggtcctctggtgcaggctctggtgctggatctggggccacctcctgagcagctccttgctccgtgtaggtttgaactacaacagtggtttaataatttccaaaaaatttgtaaaaattacagtgggttgccatttgctattctagcctgctttaagaatttgaagcttaaaatatag

SEQ ID NO: 33563 - DNA, 237 bp, Zea mays
  Peptide Sequence Number=SeqID_75342
atgaccggaatgggagaccatgtctcaagtcgcgtgaggggcaaagtctgcgggcagtggcaggcaggtcctctggtgcaggctctggtgctggatctggggccacctcctgagcagctccttgctccgtgtaggtttgaactacaacagtggtttaattatttccaaaaattttgtgaaaattatagtgggttgccatttgctattctagcttgctttaagaatttgaagctttaa

SEQ ID NO: 33564 - DNA, 468 bp, Zea mays
  Peptide Sequence Number=SeqID_75343
atggcctttttcatgaagtatggcaatgggtattattttgcagcttccaattgggttttgcatttttctctggcgggggagctcgtcggcggtgaggggtccagcctatccagggcacaattgaccaatcaaatgggtcagagagcttcaccagggatcaaggaaggtgggcgaccaaagtccggcgaggacgatcttggttctccggtgaagttctgccaggtccgagagcttgggaagcttcacaagctattggcgaagctaaccgagtggctagcacggcttggaagtgactggagtgggctggccacagtggccgaggctcgggtggcaatggagggcggaaaagagctcactggagctaaggaggggcgtctcgccggtgaaggtgagcacggggtgagcgtcgagcacgaggcagcgcagagagaggtcgagttcaagcgcggattggctccaaatctttga

SEQ ID NO: 33565 - DNA, 705 bp, Zea mays
  Peptide Sequence Number=SeqID_75344
atggccagcccactcctgtcacttccaagccgcgccagccgctcgctctctgacccatttgattggtcaattgtgccctggataggccggactcctcaccgccgacgagctcccccgcctgcgcacgtggaaccggccgactccgaccatccccgacggcgacccgcatatcgccatgatcctgaggacctcccctacaccctcgaccacctcaccggagcagtctcgctgccgatgaattcacccacccccgccagtggaggagacactcgtttcagctctgacttcctttctcatgatggctttccttccatcttgtgggaagtgcttaactctgccggttaccctacaccccctttgtacacggtgcagttgtatgaggagcaccgggtacctcgttgtcgggtctggctgactttggaggctcatccccttcagccgggttggcgttcccttgactccgagacgattggattcaggacggacgacaccactgaggcagcagccatgaagactctgacgaccttctgtggctaccatcccttggagatggtgatgcaccccttgggactcttccctgctgagaagaaggatgaccccatgtggtgtaaccacgtgagccatgtgaaagatgtgtgggcaatgtatcctgacttggttgggagggtcactgttcagtgcatgagtgcgctgtaccgcctctag

SEQ ID NO: 33566 - DNA, 153 bp, Zea mays
  Peptide Sequence Number=SeqID_75345
atgtcgcagaagctgcagaagggagtaggcgcacaggcatcgtcgacacaagcaacattgattatggcactagtagattacgtccgcgtcatcgattatgtaggacacatgatccggcacagagatataatcgagtttgggatggtcttttag

SEQ ID NO: 33567 - DNA, 558 bp, Zea mays
  Peptide Sequence Number=SeqID_75346
atggagaaatctccaagatccattccaatgggatctggacctgctaaggccgacatacgcagagatgtcgcagaagctgcagaagggagtaggcgcacaggcatcgtcgacacaagcaacattgattatggcactagtagattacgtccgcgtcatcgattatgtaggacacatgatccggcacagagatataatcgagtttgggatggtcttttagacgccattagacagatgcaattatctgccgatgagttgaggaagttgagccgccgcaaccatgttcctgaatatttggatatgttgcacaagaattgcctgattaatgccatgagtgatgttactcaaattgcaaaaggtctagacactatgagcagggatttggaggaagttcttattggtcctcagcctctacttgaggattatgaagcccttggaatgtacgatgatttcaagactgatgttcattgtgattgtactgagctgtgtggttcggatgaggacaactcttcttttgactccgatgagattcctgatcgccgtatgaagggtcctatatga

SEQ ID NO: 33568 - DNA, 309 bp, Zea mays
  Peptide Sequence Number=SeqID_75347
atgggggggggggaacctgcggagcaacagaagaccgacgaacggcgcgccgtcacccgctccagcagcggcgacgacaacgacttctgctcctgggggccgaacaacggcagcactgacctcagggcggatgctgctgccaagaggcccccgcccatgcccaaactcgtgaggcaaggacgggcagaaggccgtagagttggagacaccggcgccgcgagcggctccgaagccactcgcgcccgagagccaggcacgctgcagctgccggcgccacagacgacgaccgcccatccctccgatcactga

SEQ ID NO: 33569 - DNA, 448 bp, Zea mays
  Peptide Sequence Number=SeqID_75348
cccccgcgcgtcgtacgtggcggtgcgggcggcgagcctgtacgcgctggtgtacgtgcagacggaggcgctggacgacgtgcaggccacggtccgggtggaggcccgcaacggcaacacgcactcggcggcctacttctcgcgcctcgagtgccgcctcgcgttcgccggcgcgacgctggcggtgctccgcgcctacccgttccgcgtgcccgccaggggcgtcctcccgctgggcgacgccggcagcgctgccatggagaccgcgctccgcgacggcgtggtgccgttccgggtggagggggaggcccggacgcgatggaaggtcgcggggatcgtcggcgtcgaccagtggacgcgcctggcgtgccagctccgcttcttctggtccaacggcaccgtgctccccttcagatgcagctccaagtccaagttcttgttcttctaa

SEQ ID NO: 33570 - DNA, 147 bp, Zea mays
  Peptide Sequence Number=SeqID_75349
atggtgctggcggtcgtggtgctgctggacgtcgtggtcgtccttgtggtggtgctgctgcagccccgcacgccgtacgtggcggtgcgggcggcgagcctgtacgtgctggtgtacgggcagacgggggcgctggacgacgtgcag

SEQ ID NO: 33571 - DNA, 378 bp, Zea mays
  Peptide Sequence Number=SeqID_75350
atggcgctggccaccaactccgccgcagccgccgcggccgtgtccggcgtggaggcgacgatccattccgccccccgtaggattttgctcctcccgatccagacgtcagatctcgcatggcggcacgcggatctggtggtttctctagaggcggcggcggcggccggaacaggggcagatggcgctctcggggatgcgggggctctctgtcttcatcagcgaccctcctccgacgctcctccgacgctcgccccgctgtgggacctccgctggcgagcccctcaccgccgagggacgtccgctggcgagcagaccaggacaagcgcagctcctccaaacttggatgaacaacaacgtaatcagtgcttgtttatttga

SEQ ID NO: 33572 - DNA, 330 bp, Zea mays
  Peptide Sequence Number=SeqID_75351
atggcgctggccaccaactccgccgcagccgccgcggccgtgtccggcgtggaggcgacgatccattccgccccccgtaggattttgctcctcccgatccagacgtcagatctcgcatgggcggcacgcggatctggtggtttctctagaggcggcggcggcggccggaacaggggcagatggcgctctcggggatgcgggggctctctgtcttcatcagcgaccctcctccgacgctcctccgacgctcgccccgctgtgggacctccgctggcgagcccctcaccgccgagggacgtccgctggcgagcagaccagggaaaccattaa

SEQ ID NO: 33573 - DNA, 1428 bp, Zea mays
  Peptide Sequence Number=SeqID_75352
caagacggcaagcgctccccctcacccttccccgcggcaatctcggcgtccccgctgcagtctcccaccctcgcggcaagctcgccctcccccgtaatggcgcaccaatgcaatctattgccccacggcgtccacacctcgcccccacccccgcctgcccgcgatgcctcctcctccagtcgattcgccattccggtggtgaatcagcctcggtgccacaccccgccccatcctcggtgtcacaccccgccctcgtccttcattgcccccaccaccagtgtctcgctcctccacgccttcgccactctcactgtctccaacgggcgtgcgcccgttccgcgactgcgacggtcgtatgcgacacttccgctcgcgcctcacagggcagcacagatctatcaccttcgacttggagggctactactccaccgtcgtccggggacctgtgcatggtgggcaccagatccaggagcgcatctccgaccacctccacccgtggagctgcagagctgctccgcacagttttgggtctgcgccgcggacatctacaccatctacgaggtaggttggtgctacgagcggggttcttcaaggatgatggcgagcttttctgccagccgcccgctctctcctccctctcttcttgctcgccagtctccattcgccgccgcccgctcgtgtggcctggttgtgcgccattggcaaaaaatctcctccaagctggtgtccaactgcctgttccggatgggcggcaccgcggtgctactctcgaaccagcggtccgaccggcggcgggccaagtacgagctggtgcacacggtgtgcacgcacaagggcgccgacgaccggtgcttcggctgcgtgacacagaaggaggacggcgagggcgtcctaggcgtgtcgctgtcgagggacctgatggcggtggcgggtgacgcgctcaagacgaacataaggacgctaggcccgctggtgctgccactgtcggagcagctgctgttcatggcgacgctggtcgccaagaagctgctcaaaatgaagaaggtgaagtcgtacatcccggacttcaaacaggcgttcgagcacttctgcatccatgccggcggccacgccgtgctggacgaactggagagcaacctggcgcttacggattggcacatggagccgtcgcggatgatgcttcaccagttcgggaacacgtccagtagctcgctctggtatgagctagcctacagcgaggccaaggggaggatccggcactgccaccgggtgtggcagattgcgttcgggtcagggttcaagtgcaacagcgccgtgtggagggcgctccggtcggtgaacccggcggaggagacgaacctgtggatggacgagatcgataggtttcccgtggatgttcccaaggtctctaaagtttcaagcgactga

SEQ ID NO: 33574 - DNA, 237 bp, Zea mays
  Peptide Sequence Number=SeqID_75353
atggcgaatcgactggaggaggaggcatcgcgggcaggcgggggtgggggcgaggtgtggacgccgtggggcaatagattgcattggtgcgccattacgggggagggcgagcttgccgcgagggtgggagactgcagcggggacgccgagattgccgcggggaaggggggagcgaatgcttatattgatcacaatcgtgagacaataaatgtcatattctatgccctaaaggcgtga

SEQ ID NO: 33575 - DNA, 777 bp, Zea mays
  Peptide Sequence Number=SeqID_75354
atgagcgtggagatcctggacgggagcacggtgcagagctttgtggaggacgagcgcgccttcaactcctcagtggacggccgcttcgccgcgctggacgccgaccacgacggcctgctcacctacgccgagatggccggggagctcatgagcctgcgcgtgctggagaagcacttcggcgtggacgaggccgcgatggcgccggaggagctcggggcgctctaccgcggcctgttcgcgcggttcgacagggacggcagcggcaaggtggaccggcacgagttccgcgcggagatgaaggaggtgatgctcgccgtggccaacggcctcggcttcctccccgtgcagatggtcgtggaggaaggcagcttcctcaaggtcgccgtcgacagggagctcggccagctcgccaaagctgcagatcacgaagagatacatgaatatgagggggaatctccttgcctgtcaacaaccaccgccacgacccttccacccgtgcctatgcccgcgcccgcgcccgcgacgcaccacgtggacctcgcggaggttccacacgttcctggactgcatgcagaagacggacgtcatcgagcgaacagcacgaagcaaggtatcaccgtcttcgtgcccaaggactcggctttcgcggcgtttggcgaggagacgacgctgggcaacctcagctccggtcgctgctcccgtaccacgcgctgggcggagttcgaccagctgagcagccacggcccggtggacaccctcgccggctcgcagtgttag

SEQ ID NO: 33576 - DNA, 2328 bp, Zea mays
  Peptide Sequence Number=SeqID_75355
atgtcgctcgacacgaagctcatcctcgacgccattagcgagctcttcgacaagttcgatgcgcgatgggccaagcgggacaccacgcgcgacctcttcgacagcggcaatgactccgtcgagcagcactatgaggagcccatcatcgctgacaactggggcgggttcttcaacgacgacgagcagtactgcgcggcgctggacgcactgcccaacaacatccacccggacctcctcaactcatcctcgcgtcacagccacgaccatctcttcgtcctcaaccccgtggtcgcccaggattactctgccgaggaggccatggccgcgatggaagcagtcatgaacgcgggggatcccgcgaggctcaaccagccctcaccgtccccttccctactcgtcgtggggaacctgttgctgccctccctcgcggtgccgcaactacaagccgaggtcgtggacaagcagtaccgcgccgcgatgagtccagtgcatcctcttcccgtcgtcgacgacctgtaccatgacgacgctgcgggggtgatgaccttgggctcaaccgcgttcaaggtgttcgatgtctggcggccccgagtggacgcctccatcgagcatcttcaaacctctatggcgcagatctgtgcgtccctcccctctctagagtcgccatggtcccagtacactcgccatgacggatccggacacccgaacgcccacggcgccgccagcatcctcgtcctcgtcaagtgcgtgctccacgaacccccactcggtggctatgacggctccctcgatgacgaaccagagtccggtgtcacctacatcgacgcgccactcgaccgagccatcggttgcgttggccacgcatcggtagcggcggccacacaccgcaccgatgctgtgggtgtagtaggtcatgggctactggctcatgtggtggctgccgggtcaacacaagccacctgttcgacgatttacctggccgacgaccgcaacttcgctgacatctccgttggcgcgctctgggaggagacgatggaacaagcgacaacgactctacatcctagttttcctaagaagaaattggtgctcctctcctcatccactgatggtaaacttggaggtatgaaggcctatcatctctggttcgacccctccgtgttggtcatgctgctcaccaggtacctcgctgagcggatgacgctctactacgacgccaacaccgatgactaccacaacgtgccccgcgtcgagactagggtatccgacttcgggtccacctccaccctccgctacctgccaagggggcaaccttctcagatgggtagcgcgtacctgcagcgcctcaggctactagtggtgtcggcttgcgaccaactgcgagaggcccgcgatcctggtggcgcacagcctggacgacatcttcgcactataactgccagtgcgcagcccgctgtagtggcgcgcggcgcacgtgcagcatctcatcacgctctccacgccatggggcagccatgtgcaagagatgctcgagaacatcttcgactgtctctgttaaagcatgacccacccaggtcgactgttatgaaccttggaagtcttaacgtgatgattgatgcatactgccatgttgaatggtttttagatgcgattttggtgtttggaaagatggtcgagaagaggtgtgctcccgatgcactctcctacaataatctgattgactggctagggaagaacaaaattctggaggaggcattagacaaagagggtagagatggtgttcaagtcagaccaatgccttggccatccttctttggtattaccatttggaggcacttgttggaatctctatcattggtgttttactgctcagatgagacgcctgtagtcatcaggcaagttgttaagacaggagccaacttgtttgccggcatcaggatcctggatatgttcagactccgtatcgacttgggggcaagtcgaattttaaggaggggagaatggttatcggaatgggccttggtggactgcttggtggaatataaagggttgctaacactgcgagccggcgagggtgtccaccgggccgtggctgctcagctggtcgaactccgcccagcgcgtggtacgggagcagcgaccggagctgaggttgcccagcgtcgtctcctcgccaaacgccgcgaaagccgagtccttgggcacgaagacggtgataccttgcttcgtgctgttcgctcgatgacgtccgtcttctgcatgcagtccaggaacgtgtggaacctccgcgaggtccacgtgggaaaaaataaggattggttaaaggattga

SEQ ID NO: 33577 - DNA, 768 bp, Zea mays
  Peptide Sequence Number=SeqID_75356
atgtcgcgtcttctcgagactacagaaccagtgcaatggctcgaggcagccccgcgcatgaccctacaacatctacagcataaagacgacgcactcgtgttccattcctcgaacgactcgcgcacgcgcaggagataccccgcgagtcgcccgtcccgttgcattaactacctgggatcgggaaaggggacatttcgaaggagcccttcgcagcaaaagaaatgggccccgagccctcctactgatcaggggttcaaaggttgcaccctatggggttcagcaacctccccagagcactcgggctctgagccctttactgatcaggggttcgaaggctggcccctcggagtgattctacagccgcccagaacatgcagagtcagggatgaccctgactacgtccgttacatggccaaggctcgggctacgctcccgaggtaccctaagacattttcgagaccagcgggaatggtttgtaatggaatcccaccgaagggaggcaccgagccctcggaccctatcaaatgggtccgggtccagcgaatcacctgcaggggtacccccaatactcctaagcatggctggaaaacatcttcaaaacagaccataaagactggaaaacaacactattcaccccgttccgactactgtgccaaccaccagggtaaaactaaggacaggcgttatgtggagtttggagaggatttgatcacttgggtgtgtctagaattgaatgctagagctcttgtgaccgttggcgtgaagtag

SEQ ID NO: 33578 - DNA, 366 bp, Zea mays
  Peptide Sequence Number=SeqID_75357
atgtcgggtaccgtaattaggggtacccccaatactcctaagcatggctggaaaacatcctcaaaacagaccgtaaagaccggaaaacaacactattcaccccgttctgactactgtgccaaccaccagggtaagactaacaacaggaactctgcctcgcccgaccccaggcctcggcctcagcctcggcctcgggagaaggtctccgcctcgcccggctccaggcctcggcttcagtctcagcctcgggagaaggtctccgcctcacccgactccaggcctcggcctcagtcttggcctcgggagaaggtccccgcctcacccgacctcagcctcggcctcaggagaagtcgccgcctcgcctga

SEQ ID NO: 33579 - DNA, 177 bp, Zea mays
  Peptide Sequence Number=SeqID_75358
atggacgtggccgacctgcgcatggcgcgaccgtcgcccgtgcggtggacggatagccacaccacgaccaggcagcaggtggcagttcgcctcctccgcaaggctgggatcgggaaaagggacattttgaaggagcccttcgcaacaaaagaaatgggccacgagccctcctactga

SEQ ID NO: 33580 - DNA, 780 bp, Zea mays
  Peptide Sequence Number=SeqID_75359
atggcttgggcggaccgggcagacccgacggccacgaccaggccctccgcaagggtcccggcccgagtggtcgtctcgggcaaataccagtacattcccttacaaacaggatcccagctccattcccgcaggaatgaactacctccacaccagaagggctgcgagataacaaactccaagcggctcacgggcgaccactgcatcaccagcgacaacgacctccgcctcgggcggctagacagcagcagcgattgccctagggcaaacgctactgtgaaaaggttctcgccctcaccccccacacgggggcgagaacaagccattaaagccaaagagccagaggttcagccacaggtggcactgacggtctcgtcggcggaggcaaccacctctgcagtgggaagcctcacctgtggcggccaccacctcagcaccgacgatagtggctacctgcgcaccaacactgcaccggcgaatggcggccgccccagcgtgcacaaggaggtcctcactcccgtcctcgctacgggagtgaggacaagaccatccagggacgcggacaccgcccctgcggtgtacgacgtcttgtacgatcccctggtgcggccgacggcgcgagaagggccatggacgtggccgacctacgcacggcgcgaccgtcgcccgtgtggtggacggacaaccacaccccgaccaggcagcaggtggcagttcgcctcctccgcaaggctggtgaacgcccttctcccccaaatgctggaggaagaagcgggtcgctag

SEQ ID NO: 33581 - DNA, 849 bp, Zea mays
  Peptide Sequence Number=SeqID_75360
atgacggatgcagagaaggaggtagcaacagaaagacggatggactcaccgcctcgatgcgattgtggagaccgtgctgtcatcgacgaagactatgacaagcagttctgttgtccgaacattgattatccatacgggtggcgtaagtgtcgtttcagagagtggttgtatggtcctttgtcccattggccagagccagaggtaaaggaaaagagatacatggggtgggcggcagaagaggtcaaatttgatccagtactctgcaaatgcggtattgaagctaagtatggattagttccttcggagcttggtgttggatatttttgtggacatatggtcgattacgatgaggagacgaggaaatgcagttgggagagttacgacgacaaaggagaggtgatgcggacaatagagtccaagagaataatgggacagaagatgcgttgtggatctcagctcgttgattcgtacattaacgatcgcatacgcgacatgcgtagggaagcaaaatctgccttttatgatagcccgaagcgtgcagagtataggaggttgaaggcggcagatgagaagagagcacaggatgcaagggaatgggaagcggctcaagccgagaaacagatgttggataatcttgctgatcgcctcaagggaaagattggaagcggcgtaaactatttggccgatgaggcgcatgcgagatatgtgcggcagtgggcggagctcgggcgcggcacagggcgggcggcggcgaccgcgctcgggggagctcgagcgggcggcggcgaccgagctcgggggagctcgagcgggcggcgagctccggcgacgtcgggcggggctcgctaa

SEQ ID NO: 33582 - DNA, 1188 bp, Zea mays
  Peptide Sequence Number=SeqID_75361
atgtaccgagaggcgttgtggcagaagagaggtcgtcctcgggagttatatccggacgtatctagtaaggatgctcctgttcctcctgaactccccgtgcctaactgtgactgtggcagactagcttgggtacatcaatcacaacatccagacacggctgctcgctgctactacctttgtggcactttggacggacatcagaggtgtttctttttccagtggatcgatggtcctgataaatttgaccctcgatatcttcttttcgttaattggttgagtggaaggaccagtcatgagcgttttaagcgttgggtacctcctcccccgaatcctccaccaatgacggatgcagagaaggaggtagcaacagaaagacggatggactcaccgcctcgatgcgattgtggagaccgtgctgtcatcgacgaagactatgacaagcagttctgttgtccgaacattgattatccatacgggtggcgtaagtgtcgtttcagagagtggttgtatggtcctttgtcccattggccagagccagaggtaaaggaaaagagatacatggggtgggcggcagaagaggtcaaatttgatccagtactctgcaaatgcggtattgaagctaagtatggattagttccttcggagcttggtgttggatatttttgtggacatatggtcgattacgatgaggagacgaggaaatgcagttgggagagttacgacgacaaaggagaggtgatgcggacaatagagtccaagagaataatgggacagaagatgcgttgtggatctcagctcgttgattcgtacattaacgatcgcatacgcgacatgcgtagggaagcaaaatctgccttttatgatagcccgaagcgtgcagagtataggaggttgaaggcggcagatgagaagagagcacaggatgcaagggaatgggaagcggctcaagccgagaaacagatgttggataatcttgctgatcgcctcaagggaaagattggaagcggcgtaaactatttggccgatgaggcgcatgcgagatatgtgcggcagtgggcggagctcgggcgcggcacagggcgggcggcggcgaccgcgctcgggggagctcgagcgggcggcggcgaccgagctcgggggagctcgagcgggcggcgagctccggcgacgtcgggcggggctcgctaa

SEQ ID NO: 33583 - DNA, 444 bp, Zea mays
  Peptide Sequence Number=SeqID_75362
atggccggaatggctcaccggagttactccggcccgcccgaggccttctcaccgccgttctcccctctctgcctgtggattcgtggcctcttccccgccattgagttcgtcgtggcgccctcttcctctctgcccaaccccggagccaccctagctcgcgccagcctcaactccggcgacctcaccgccgcggagaggagcagcgccgcccgcagctacaacgagcagtccgaggttcctgagtgtgttgttggagacctccttgagcaaaaacctggtgaaggcaaatggccgtcaatggggtcgaggcgtagtgctcgctctgccaaggttggggtgcagaggttctttcaatttggttttgttagtcacccaccttggggaggaggtgatgctggcaacatggatgacttcgaggacttccaggaatatgacgagttctag

SEQ ID NO: 33584 - DNA, 369 bp, Zea mays
  Peptide Sequence Number=SeqID_75363
atgagtgatgggtctagcaatctgtccctccggctttggctcctccgagagctccgtgtcgtgactggaactgtcaccggcgtcgtcgtcgtctctgtctccgtcaagggggcatctctggctgaggtgcaggggaaggcgacctctcagactccacctcctgctgaggcgagggggaagagtcctgctgctcctactcctgctcctggcgtcggcgctcctgctcctcgtgcaggcgacgatgcagtctctccagatgctaagcctacacaggcagctgactgggggtttgccactaagaaagaactagaactcgtcatattcctggaactcctcgaagtcatccatgttgccagcatcacctcctga

SEQ ID NO: 33585 - DNA, 1224 bp, Zea mays
  Peptide Sequence Number=SeqID_75364
atggggcggcctcggaggcgcgaccccggtggctcgcagcggctcggccgcgggagcacgaggcgcggtcctccgggcgtggccccccatggcggagcgggcgcggccccctgggcgtgcgggggctcggccaggcgggcgaccacggctccgaaggcgcggcggcctcgtgccctcccgctacgcgcggccccgcagcccctcggcgtgctgccttgctccgacgacctcggcctaggcggcgcgagggtggctcccagcggcccgggtctccggcagccccacgcagggcacggcttcgacgttcgtgggcgcgacgcggcatcctggggccacccctgcgggcgagcgtgccacggcggcgcgggtgcagaggccccgggcggggcgggcgctccggccagcccctgcggatcgagcgcccccgctgacggtgggcagactcgggcgtgccccccagcgcgcgggcacaaggcctttccaccggcggctccccgtccatgcggccacgacgagcttggttctggcgcggacacgcggacccggcgagcgcgcggatccgtcgagcgcgcgggcgcgcagtggccatgtcgcggcatggctgcctggccccgtcacgggcacgggcgcagtggccccggccttggcctaacggctacgctggcccccttgcctcgtcgcgggcgcggtggcctcggcctctgcacggcggcgcttgtcccgaccctagcgtgggcgcacagccccgatggcgcgtcccctggccacagcgcggcgaggagccccgactcgacacagcgtgcgctggttcgaatacgaaggggaacgatagccatctatcttttcccgtttgtgaggaatctccacaatttggaatctctcgcccttacaattgaagtcacaaagaaagcacagagcaaggttgggaagagcaacacaaacaagacgcaaatccgcagcacaaccacacacaagtcacaacttgagcttgaaacacaacgcatggagttcgcaactcaaatggagctcaattcgctaacactgagaatcaaaagcgtggagtcggagtctgggagtcttagaatgtttcgtgaaggcttggtgttgtcctccatgtgcctaggggtcccttttatagccccaaggcagctaggagccgttggaggccaacttggaaggccaaacttgccttttgtcgggtggtgcaccggacagtcactgtag

SEQ ID NO: 33586 - DNA, 267 bp, Zea mays
  Peptide Sequence Number=SeqID_75365
atggaggcacgcagcccctaccagaggacatggggcggcctcggaggcgcgaccccggtggctcgcagcggctcggccgcgggagcacgaggcgcggtcctccgggcgtggccccccatggcggagcgggcgcggccccctgggcgtgcgggggctcggccaggcgggcgaccacggctccgaaggcgcggcggcctcgtgccctcccgctacgcgcggccccgcagcccctcggcgtgctgccttgctccgacgacctcggcctag

SEQ ID NO: 33587 - DNA, 345 bp, Zea mays
  Peptide Sequence Number=SeqID_75366
atggatggagtcacacaagctgttgaaaatcttccaaggttgaatggttctgcacaggatgctctgcagttgctgaagtcactgcagttccagcttgatcttctagcacagcagcttcccacttttgatgaggtgcaatctggtcaagcaaccttgaagtcatgggatgaacaatacaagaagacacttcttctaggcgatggtgaagagtctaccatccgtaggcgtaatctccagcccttgctcagccaaacaagcgactgtgttcattgtctgagcacgttcctcatggttaccgtaggaaatcactttctgaagatcaagggccacattgcaccattgtga

SEQ ID NO: 33588 - DNA, 345 bp, Zea mays
  Peptide Sequence Number=SeqID_75367
atggatggagtcacacaagctgttgaaaatcttccaaggttgaatggttctgcacaggatgctctgcagttgctgaagtcactgcagttccagcttgatcttctagcacagcagcttcccacttttgatgaggtgcaatctggtcaagcaaccttgaagtcatgggatgaacaatacaagaagacacttcttctaggcgatggtgaagagtctaccatccgtaggcgtaatctccagcccttgctcagccaaacaagcgactgtgttcattgtctgagcacgttcctcattgttaccgtaggaaatcactttctgaagatcaagggccacattgcaccattgtga

SEQ ID NO: 33589 - DNA, 345 bp, Zea mays
  Peptide Sequence Number=SeqID_75368
atggatggagtcacacaagctgttgaaaatcttccaaggttgaatggttctgcacaggatgctctgcagttgctgaagtcactccagttccagcttgatcttctagcacagcagcttcccacttttgatgaggtgcaatctggtcaagcaaccttgaagtcatgggatgaacaatacaagaagacacttcttctaggcgatggtgaagagtctaccatccgtaggcgtaatctccagcccttgctcagccaaacaagcgactgtgttcattgtctgagcacgttcctcatggttaccgtaggaaatcactttctgaagatcaagggccacattgcaccattgtga

SEQ ID NO: 33590 - DNA, 332 bp, Zea mays
  Peptide Sequence Number=SeqID_75369
acaacgggcagtctgtgtttcccgaggaggttgcagaagaagtccctgatcagcagtttggtgaaggcaaaggaactagaggtgtagttgcttcgtcgtcgtgccgtcaatggggtccaggcacagtgtttgctctgccgaggctgagtgccgagctacgtagtgataccctgccggaccacctaggaagtgatcaatggggattagctctccccgggcagaaagggaatcatgactcatgggtaaagtgtgcaacctctgcagagggtagtgaaactgatatatcagccgtgctcacggttatgagctgccttgggatcctctttgattag

SEQ ID NO: 33591 - DNA, 267 bp, Zea mays
  Peptide Sequence Number=SeqID_75370
atggggtccaggcacagtgcttgctctgccgaggctgagtgccgaggttctttcgttttgcttttgttagtcaccctcctgcggggagagctacgtagtgataccctgccggaccacctaggaagtgatcaatggggattagctctccccgggcagaaagggaatcacgactcatgggtaaagtgtgcgacctctgcagagggtagtgaaactgatatatcagccgtgctcacggttaagagcagccttgggatcctctttgattag

SEQ ID NO: 33592 - DNA, 332 bp, Zea mays
  Peptide Sequence Number=SeqID_75371
acaacgggcagtctgtgtttcccgaggaggttgcagaagaagtccctgatcagcagtttggtgaaggcaaaggaactagaggtgtagttgcttcgccgtcgtgccgtcaatggggtccaggcacagtgcttgctctgccgaggctgagtgccgagctacgtagtgataccctgccggaccacctaggaagtgatcaatggggattagctctccccgggcagaaagggaatcatgactcatgggtaaagtgtgcaacctctgcagaggatagtgaaactgatatatcagccgtgctcacggttatgagcagccttgggatcctctttgattag

SEQ ID NO: 33593 - DNA, 918 bp, Zea mays
  Peptide Sequence Number=SeqID_75372
atgaagcatgaaaataatgtcgatgcggaatcgaacaaggagcgtcgcggtctcaccggggtgaatgacgacgacgacggggctgcgcaaaacagcaaacacccggcaggcatcccgacgtgctgttcgctgcgcagtgcaaagcagcgagccgcgcggagacgtcggagctgctgctcatggcgagaaaagctgggcgcggggaacttggatgccacggctgctgaccgagcagagaggggcactgtgcagggaaggtacgactgctgctgcgtaagggagaacgagcaggggaacaggggcgcgaaggctgctggccgagcagaggcgtcggccagggcgagctgctgctgcatccatggacagggagctgtgttcggccatgtgaaaaaggggagccggctggacgaaaaacgaacagggcgctgcaaggaaaatgggagcggctgctcctggctcttggggaagaagggcgccgtgggaggagctggaaaatttttctggacgccatccatggaaagtggagctcgtgcccatggagtggaggacagggagcagatgcgtcgcgccatggggatggggaaggagagctgggcggccctgcagttcctgcgcgctggagaagacagctccctgctgcagccgcgcttgaaggggagaggcgtcgagcgccatggtgggtgttttgctgctcgccatggacagcaagggagagggaggaagagattggcgccatgggagcagcttcagcgcgccgaggaagaggggcgtcctgctgcagggataccgagcgcagggagcagagggccggccaggggagagaggccagcgtcctgggaggagctcggcggcatgggggcttggagctcggctccctgcctgctgccgtgtaggaggaatgggggagctgctgcgtga

SEQ ID NO: 33594 - DNA, 918 bp, Zea mays
  Peptide Sequence Number=SeqID_75373
atgaagcatgaaaataatgtcgatgcgaaatcgaacaaggagcgtcgcggtctcaccggggtgaatgacgacgacgacggggctgcgcaaaacagcaaacacccggcaggcatcccgacgtgctgttcgctgcgcagtgcaaagcagcgagccgcgcggagacgtcggagctgctgctcatggcaagaaaagttgggcgcggggaacttggatgccacggctgctgaccgagcagagaggggcactgtgcagggaaggtacgactgctgctgcgtaagggagaacgagcaggggaacaggggcgcgaaggctgctggccgagcagaggcgtcggccagggcgagctgctgctgcatccatggacagggagctgtgttcggccatgtgaaaaaggggagccggctggacgaaaaacgaacagggcgctgcaaggaaaatgggagcggctgctcctggctcttggggaaaaagggcgtcgtgggaggagctggaaaatttttctggacgccatccatggaaagtggagctcgtgcccatggagtggaggacagggagcagatgcgtcgcgccatggggatggggaaggagagctgggcggccctgcagttcctgcgcgctggagaagacagctccctgctgcagccgcgcttgaaggggagaggcgtcgagcgccatggtgggtgttttgctgctcgccatggacagcaagggagagggaggaagagatgggcgccatgggagcagcttcagcgcgccgaggaagaggggcgtcctgctgcagggataccgagcgcagggagcagagggccggccaggggagagaggccagcgtcctgggaggagctcggcggcatgggggcttggagctcggctccctgcctgctgccgtgtaggaggaatgggggagctgctgcgtga

SEQ ID NO: 33595 - DNA, 409 bp, Zea mays
  Peptide Sequence Number=SeqID_75374
atggccatgcttcagtcagtggaaacagatacgtggtttggcagtctcggccgctgcctccagaaggcagaatctggagatgcaccgaaccaagacgagatgcatgctcgcgcgtacagcaggacggacgcaagcagcttattgaagcatgtaactggcaccgcaagtttgcaaggctatgcggatagcttgttggatgcgacagtcagacattttggttcagcaccgtctgctcagcctgaagaaaatgggttcaagggccacggcatgctggcgccttttacagctggctggcagggcaatgatttacaccctctgatcattgagagatctgagggttcctatgtctatgacattaatgggaacaagtatctggactctcttgcaggattatggtgcacaactttag

SEQ ID NO: 33596 - DNA, 249 bp, Zea mays
  Peptide Sequence Number=SeqID_75375
atgcggatagcttgttggatgcggcagtcattgcacccttctatcattgagagatctgagggttcctatgtctatgacattaatgggaacaagtatctggactctcttgcaggattatggtgcacagctttaggtggtagcgagcctcgattagtcaaagcagcaactgagggtgcatggttatgttgtgcgataagatccatctatgaattgtttgtgcttctacatttaggaacaatgggcaattag

SEQ ID NO: 33597 - DNA, 432 bp, Zea mays
  Peptide Sequence Number=SeqID_75376
atggggaagcatgtcccatcactcctcatgctcctcctcagccgagatagggtcccactcgacagtccaacccggtggcagatcctctggtgcaggctcgggtgctggatccggggctacctcctgagcagctccttgctccggcacgaggacgtactctccgtcagcaaggttacagtctatcgaaatgcaatgaacatgcaggggtcctcgtcggcggcgggtgtgccggccaattcacggcgatctggttcaatccaatggcacggtgagctccacgggggacgtagagactgtgagcacaaggaatcggaaaatggttcagtggattaccgttccacgcactccggtggggttgtgaactccggcgagcgtggactggcctctccagcgaagcagacttcgattcctcgctcggggagcttcaccgag

SEQ ID NO: 33598 - DNA, 675 bp, Zea mays
  Peptide Sequence Number=SeqID_75377
atggggaagcatgtcccatcactcctcatgctcctcctcagccgagatagggtcccactcgacagtccaacccggtggcagatcctctggtgcaggctcgggtgctggatccggggctacctcctgagcagctccttgctccggcacgaggacgtactctccgtcagcaaggttacagtctatcgaaatgcaatgaacatgcaggggtcctcgtcggcggcgggtgtgccggccaattcacggcgatctggttcaatccaatggcacggtgagctccacgggggacgtagagactgtgagcacaaggaatcggaaaatggttcagtggattaccgttccacgcactccggtggggttgtgaactccggcgagcgtggactggcctctccagcgaagcagacttcgattcctcgctcggggagcttcaccgaggtgtgctcacttgtctccgagggttggacggggttgggaaaggctgggctagccggtctacggcggcaggggctcgggtggccgcggacacgtcgtgcacgggcaaacgacggtgagctgagcttcggtgagagcgcgtcgaacacgtggagcttttcttctgcccgtgttccacagctcgcccaagtcgctaacttgcgaatcttggcaaaaatccggcgcgagtcttttcctggcacctag

SEQ ID NO: 33599 - DNA, 570 bp, Zea mays
  Peptide Sequence Number=SeqID_75378
atgcatcccaagcccgagggcggcggcgacgacgacggggccgccgcggaggtgggctccccgcggtccggctacttccggcagcggagcatgcacgccgccgccgccgccgcggatccggaggcggcgcgccggccgttccacgtcgagaacccgccttgctccgccggcggggggctgcggcccagcgagtccgtcaccaagctggagtcgctggagcgtgccgcgctggcgcccgccgtggtgctcaggaccgggttctacatcctggtgtggtacgcgttcagcacctgcctcacgctatataacaagacgctgctgggggataagctcggcaagttcccggcgccgctgctgatgaacaccgtgcacttcgcgctgcaggcggggctctccaagctcatcatctggttccagcccaaggggcccgaggccgccgtcgacatggggtggaaggactacttcatgagagtcgtgccaactgctctcgggacggccttggacataaacctgagcaacgcgtctctggtgttcatctcggtgacgtttgctactatggtactactttaa

SEQ ID NO: 33600 - DNA, 1377 bp, Zea mays
  Peptide Sequence Number=SeqID_75379
atgcatcccaagcccgagggcggcggcgacgacgacggggccgccgcggaggtgggctccccgcggtccggctacttccggcagcggagcatgcacgccgccgccgccgccgcggatccggaggcggcgcgccggccgttccacgtcgagaacccgccttgctccgccggcggggggctgcggcccagcgagtccgtcaccaagctggagtcgctggagcgtgccgcgctggcgcccgccgtggtgctcaggaccgggttctacatcctggtgtggtacgcgttcagcacctgcctcacgctatataacaagacgctgctgggggataagctcggcaagttcccggcgccgctgctgatgaacaccgtgcacttcgcgctgcaggcggggctctccaagctcatcatctggttccagcccaaggggcccgaggccgccgtcgacatggggtggaaggactacttcatgagagtcgtgccaactgctctcgggacggccttggacataaacctgagcaacgcgtctctggtgttcatctcggtgacgtttgctactatgtgtaaatcagcctccccgatattcttgttgctctttgcttttgcatttaggttggagaatcctagcatcaagcttctaggaattatagttgttatttctactggagttctgttgacagtttccaaggagacggagtttgacttctggggcttcatttttgtgacgcttgctgctgttatgtcaggattccggtggtccatgactcagattctgttgcaggctaatggtttctttatttatgtgcatgtggatcttcatgtttcaagaaagacaattacggcctactctggcctggttcttacaagtgtatctctaccaattaggggtggcctgaagaatccgattaccttgatgagccatgttacaccagtgatggccatcgccactatgatactatctctattactggatccttggagtgaatttcaaaagaattcatattttgatagcccttggcatgtcatgcgcagttgcttacttatgcttatcggaggatccttagcttttttcatggtgttaacagagtatatacttatttcagcaacaagtgccataaccgtgacgatagctggggtagtaaaagaagctgtaaccattttggttgcggtattttatttccatgatgaatttacttggttgaaagggtttggtcttttcaccattatggttggtgttagcttgttcaattggtacaagtatgagagattcaaaaggggtcagataaatgaggatgacgtcagctctccatttactggtgacgtcaagtacattattatagacgacttggaatatcagaatgaatttgaggaagatacataa

SEQ ID NO: 33601 - DNA, 228 bp, Zea mays
  Peptide Sequence Number=SeqID_75380
atggcagaactcaaatcccaatttcaatcctggttctcctcaatcctccccctcggctctctctctctctcttggctttgcccgagcatggcggcgattggtgagctcgggaccacggatagggtacttataccgacggccaagcctatattggcggcggattcacgggccgttgaagcagtctgcgagctcatcgatgaggacgaggattgcggcaagtggttgtaa

SEQ ID NO: 33602 - DNA, 237 bp, Zea mays
  Peptide Sequence Number=SeqID_75381
atggcggcgattggtgagctcgggaccatggatagggtacttataccgacgaccaagcctatattggcggcggattcgcgagccgttgaagcagtctgcgagctcatcggtgacgagctgaggatgggccacacggggctggtggttaatatgggccacgaagtggatttggcccaaactcgagaaaagcagatccccaggtacaagatcaatgacatacttctggttatatcatga

SEQ ID NO: 33603 - DNA, 258 bp, Zea mays
  Peptide Sequence Number=SeqID_75382
atggcggcgattggtgagctcgggaccacggatagggtacttataccgacggccaagcctatattggcggcggattcatgggccgttgaagcagtctgcgagctcatcggaaggatgtggctcaggaaagaagataagcctgacatatggggcccccatccgtcggtggcaggcgaccagagcgcgcgcacacatgggcaaatgggtgatgggctgactgctggggaaataggcccacgatttttaattcgaatttaa

SEQ ID NO: 33604 - DNA, 117 bp, Zea mays
  Peptide Sequence Number=SeqID_75383
atggcggcgattggtgagctcgggaccacggatagggtacttataccgacggccaagcctatattggcggcggattcatgggccgttgaagcagtctgcgagctcatcgatttttaa

SEQ ID NO: 33605 - DNA, 213 bp, Zea mays
  Peptide Sequence Number=SeqID_75384
atggcggcgattggtgagctcgggaccacggatagggtacttataccgacggccaagcctatattggcggcggattcacgggccgttgaagcagtctgcgagctcatcggtgtatatgtagatgtaattgtggacattactccacaactcatcacaatcaatcaaagatccaaatcagacaaatttcataagaacaaacattcaagtgtatag

SEQ ID NO: 33606 - DNA, 207 bp, Zea mays
  Peptide Sequence Number=SeqID_75385
atggcggcgattggtgagctcgggaccacggatagggtacttataccgacggccaagcctatattggcggcggattcacgggccgttgaagcagtctgcgagctcatcggaaggatgtggctcaggaaagaagataagcctgacatatgggccccatccgtcggtggcaggcgaccagagcgcgcgcacacatgggcaaatgggtga

SEQ ID NO: 33607 - DNA, 207 bp, Zea mays
  Peptide Sequence Number=SeqID_75386
atggcggcgattggtgagctcgggaccacggatagggtacttataccgacggccaagcctatattggaggcggattcgcgggccgttgaagcagtctgcgagctcatcggtgacgagctgaggatgggccacgtggggctggtggtgaatatgggccacgaagtggatttggcccaaactcgagaaaaggtgaattccaaagtataa

SEQ ID NO: 33608 - DNA, 3960 bp, Zea mays
  Peptide Sequence Number=SeqID_75387
atgccagcagcggcacctactactccaaggaggcacccgtcaccgaatgccggcggtcgggcgtcgtccccgacgccagctgggtcacaggcgaagaggtcccagtccaccgaacggcggccggtgactccgtcaaggccgtcttccggcggctcgcggccgagtactccgtccaggatctctgccccggcatcgccatcgtctgcgacttccagcccgtcctcattctctagctcgtcgacgccagtgggtgatgccgttccagaaacgcaaatcgctctgaggaggttgcctggtggccgggctcctgatgggctgtggccttcaatgcggagtctgtcttcttctttccagctcgaatcaaaggggaaaaagatttctagtagctcctctgcagatcaggccaagacgagggatgcagcacccgctgataggaagaggagcccattgagaggtagagctacccctgagcaatcggagaatccacatgccaaggtgattgatcatcatcgctggcctgctatgatggggggcagggtgtctgcaagcacaatgtccaagagcatggatctcactgataagatcagtaggtctgctcttccatcagttccgtcacgtggtgtttcaccgaagcgaacaacagtgtcctctgctgcaaataccttgtcaagaagtattgatcttgctgataaaattgatcggctggtctcttcgtcaatgtcatcacaaggggaatcaccaagaaagtcaccttgtaatggtgcagatgatgtgtccaaaaaggttggtgttcgtaaagatctcaaactctcatccttggcaatatcaagaagggtgtcaccagtaacaacagatgataaaattgatcggctggtctcttcgtcaatgtcatcacaagggggatcaccaagaaagtcaccttgtaacggtgcagatgatgtgtccaaaaaggtcggtgttcgtaaagatctcaaactctcatccttggcaatatcaagaagggtgtcaccaataacaacagctgcatcagatggcactagaaccttatcaggaagcatggatcttactgaaaaagataacagtacactctcgccagtttcatcacccagcatttcaccaagtgcatcattatcaagtgtgtctaatgccgcatcacagactactacaaagtcatccgagagattaattggacctgtttccaacctgtcctcatcgagaggactttcacctagaagaacaacttctggtggcattgttgatttaatgaaaagcattgatttccctgaaaaagataggagaccagcttcatcaagagggttttcgccaaggaggagactcgtgtctgatggtgttaatgatattgggaaaaatatggattttgctgaaaaggatagcagagtagtcagctcatcaattccatctcgaggggtttctccaaggagaagacttgcctctgatggtgttgatactatgtgcaggagctcggagttttctggaaaggataacaggccatccacctcatcttccacatcacgtggaatgtctccccgaagaaggcttgcttctgatggcataagtgctgtaaccaaaggcatggactttggtgataatgctaacagaccatcaacctctaaaggagtgtcacgagggatttcaccaagacttcaattagcctctgatggtgttggcaatgtatcaaaaggcacagatcttgctgatggactggacaggccatcaacctcatatgcaacaccgcgaggtatgtcaccacgacgcagggttgcatctgatgccagcaatgccacttcagaaaggatcaagttcaccaaagaggattctggaactgtgtcctcttcagttgcacctagaggggtctcaacattaagacaacttgcttctgatggtgttgaatctgtctcaaaaagtatggatcttgttgagaaagatactagacctactacctcatcagcttcatcacgagggctttcaccaagaaggcgactttcctcagatggtgtcaatgtgatttcaaagagcatggatcttgttgaaaacaataacaaacttgtcaccatgtcagctgcagctcgaggggtttcaccaagaagacggctcgcctcagatggtgtcaaagtgacatcaaagagcattgatcttgttgaaaacagtaacaaacccttaacagtgtcagctgcaacacgaggggcttcaccaagaagacggctcacctctgatggtctagcatttatatcaaagagcacaaatattactgaaaaaagtatcagaccttcaacaccgtcaatgtcatcacgagggatgtcaccaagaagacggctggcctctgatggtatcaatgctgtattggacacagaatttgctgacaaaaattgtagaccatcttcctcatcagctgctttacgaggggtttctcccagaagcaggtctgcctctaatgccatatcaacaggcatgactaatgctgaaaatgacagcagaccatccacaacatcaagtccgtcatgtcagactctgcagagcagcaggcttgaatctaatggtgttaacatcctatcaaaagatatggaaatctcatcaactgtatctggttgcacttcagacagtagacttgatggcgctggtgctctagtaaaaagcatagatgtcactgagaaacttactgtgtcaactgaagatggtggtggtgaagacgatcctggaagaatagattctagtgacgtagttactagtgcagtttcatcatcccttgcatctcaagaggtatcatcaagacatgttactgatgacgttaagaatgcgtcagagagtgttggtgcaacgcaaaaaggtaacagaccattatcagtgaaggttccatctcgagtagcttctccaagaagacgacttgcatccgatggcattgatactatatctaaaagcatggattttgctgagaaagataagaaacccatgacagtgtcagttccatcacgtggaatgtcaccaagaagaacagcaagatctgacagtgctgatataatgtcaaaaagtatggattttcctttacaagtgttttctacaagaagagtactaggacctgatggtgctaatgccatgtcaagaagcatggatctaactgataaaattagacagaaaatatcttcaactatgcaatcatccagagtctcaccaaggaaaatgcctcttgcttataacagaataaaaggccctgaaattttatcaggtgatgctgagagccctggttctgctgatggaaatgaaagtcaagaggagaatgccagttcaagtccagatgcaccttcaaatagttcagaaaaatctacacctccaaagcagctagctaggagatcaccttcgccatcacatattttaatatgcccttcatcatcatccaatgcttcatcgacaccatcatttgtctccaggagattaccaagcccatcaaggactagaccttcaacacctgtctcaccatgtagttctgccagatctgattcagcctcttcaattcttagctacattggtgatgctacaagagggaagaagagcccaactcacacggaagatgcccatcagttgcgcctcctgcataataggaacttacaatggtgttttaccacttcttatgttgatgaactgctgtcaattcagaagataagtgctgagactatgttgtatagtgtatgggatgctaactcaaggatgtgtgactctatggttataaaaaggaactatgtacaacagctaaggcaagaggtcaaattgggaattgtcttgaaggagcaagagtcaataaccatcatcgaactcatcaatattaagaccatgagcatccacgccttgatcatcaccatcttttccactattgcttccttcaatttcatcttccacatcaagatcatcaagaatatattcctcatcctcgtcatcttcatttgctaa

SEQ ID NO: 33609 - DNA, 381 bp, Zea mays
  Peptide Sequence Number=SeqID_75388
atgaggtcctcgggggacagctgggcgcaggtggctggagaagtcctcatcgccgacgggatcgctgctgccatctgcgctccgggcctccggctctttggctttgatagcttgtcctcggccctcgagtgggggcgtgggcgagggccttgtcgcagtagcgtctgccctgaggtcatcgctgctgctgtttggccgcccagagcggaggtcgttgtcgctgctgccggagcgggcggcggtgagccacctggggttttgtcgcccgcaggccctccaatgtgggggggttgttcgtacctgcgggggcgaaaccggagttctgtttgtaatggcaccttgagtgccggtgtcttgttcattgcgtctgtcagggcctga

SEQ ID NO: 33610 - DNA, 723 bp, Zea mays
  Peptide Sequence Number=SeqID_75389
atgcctcggcaaagcccgaccctccctcgggggctcgaaggggggaaccccctctgcgtcaaaattttcctcggaaaaagtctttctgccagaacatctttcgtgcttttcgactacttcgaaagtgggatcctgaaaacgacggagtacacccagctgtcccccgaggacatcagcccggctcatggcctcggcgacccgactcaggcgttggtcccgccagtggacggcccggccaggctccggccgacgaagattcttttcgagccaactccgcctctgtccatgctgacaccgctgcctccggctccagctcatcgcagagcggccgagggccctgacagacgcaatgaacaagacaccggcactcaaggtgccattacaaacagaactccggtttcgcccccgcaggtacgaacaacccccccacattggagggcctgcgggcgacaaaaccccaggtggctcaccgccgcccgctccggcagcagcgacaacgacctccgctctgggcggccaaacagcagcagcgatgacctcagggcagacgctactgcgacaaggccctcgcccacgcccccactcgagggccgaggacaagctatcaaagccaaagagccggaggcccggagcgcagatggcagcagcgatcccgtcggcgatgaggacttctccagccacctgcgcccagctgtcccccgaggacctcatcccggctcatga

SEQ ID NO: 33611 - DNA, 675 bp, Zea mays
  Peptide Sequence Number=SeqID_75390
atggcgggcaaccaattccaacagcacggaggcagagttcttccacaaggaccgcgtgatactacttatttggaattctctgagactcgaccaccgctcttcattgaagcagaggaacccttagaagccgacgaatgggtggatacagacttgaagaaaaagaattgttttatgagggggcttaatgacaggcttcagcggaaaaaggcaacatgcttggacctcacctacaataaggctgtcagtacagcactggcagtggaagccaaaaatgtgggacatggaaaatcaaaggggtttggaggtgaaaggtcaaatcaagggcctgaaaagagaaccaggttggtgatccgaccttttaatcaaaatcgttcttcgcctcgcccaccttcatatccattcaagcatcccgtctttattcgtcccactactgcccccactcttaccaatcagccgactgcccctggtactcatttccctacccttctcagttcttccagtgggtgcttcaactgtggaaagtccgaacatttcatcaaggaccgcccatacccgaagcaaaataaatctaactttcagcagactcctgggaactcaagtcaaggaaagggaaacatggctgactcttcaaagagcaagaatttcaagaaaactagacgagaatattatacctag

SEQ ID NO: 33612 - DNA, 501 bp, Zea mays
  Peptide Sequence Number=SeqID_75391
atgacgcgcactaagactaccaagcgcaaatcgactggacctcttagtgtgccacgacatcagctagcctccaggcacgaaggaagtagtagtggcagtaatgacccaattggagcctccggtcagaactacgccacaggaatagggcacctgcacccggacgtgccactagacgtcgctgcaatgggagccagaccatcgggaatagctaatgaaggacctgatggggagttggacctttttaggccgcctccttccatgagccttgctgacgaacgatgccatcacgaactcgcgcacatgacggtgcggggacatcccacggtgggggaggatactcccaacctaccaccagtaccaccaacattggtcgaggctatcgctgccctggtcaatgccaccgctaataatacacgcttcttccatgaaatggcgggcaaccagttccaacagcacggaggcagagttcccccacaaggaccgcgtgatactacttattag

SEQ ID NO: 33613 - DNA, 732 bp, Zea mays
  Peptide Sequence Number=SeqID_75392
atggcattgctacgtaccgtcggcggcggcgggcggtctgcttcactcgagccagaacgcccggcgagcaaagggagcagcggcggaaaaggagcagcaagaagaacggggcggctaggggcagggcgcggctcttcgggaaacccgcaatccgacaggccgcgacgcttcgggaaacccgcaatccaacagtacgccgtccatcaacggtcacatcaaaaacccccgcggaaccacttcgagcgagggcagcgtctccgccatctagcgacgtcttcggcaccagccgctggtccgacggagacaaagcgggcagggacacccttcgcaggactcggcactttgacgaaggcctgcggcgacgtcctcccacggcgcggcctcgttcagccccaaggcccaccagagagcaagttccaacagggagacgggttctctacatcttcttgcgcctctactgctgatggaagggaagggaaggtagcggatctggtgatccgtgatcgcacgtgggcctctgagctggacgaggccgcactgtgggatgacttcgtcgccggtcttcgtctggtgctgatcaagcgaagggtgtccctgcctgttttgtctctgtcagagcagcggctctcagcgaagacttcgagcgaagggtggcgtctttgccttcgccccaacatttgccctccgagggaccagttcgacaaagtcacctggtgccgaagacgtcgctag

SEQ ID NO: 33614 - DNA, 645 bp, Zea mays
  Peptide Sequence Number=SeqID_75393
atggcattgctacgtaccgtcggcggcgggcggggcgggcgcggctcttcgggaaacccgcaatccgacaggccgcgacgcttcgggaaacccgcaatccaacagtacgccgtccatcaacggtcacatcaaaaacccccgcggaaccacttcgagcgagggcagcgtctccgccatctagcgacgtcttcggcaccagccgctggtccgacggagacaaagcgggcagggacacccttcgcaggactcggcactttgacgaaggcctgcggcgacgtcctcccacggcgcggcctcgttcagccccaaggcccaccagagagcaagttccaacagggagacgggttctctacatcttcttgcgcctctactgctgatggaagggaagggaaggtagcggatctggtgatccgtgatcgcacgtgggcctctgagctggacgaggccgcactgtgggatgacttcgtcgccggtcttcgtctggtgctgatcaagcgaagggtgtccctgcctgttttgtctctgtcagagcagcggctctcagcgaagacttcgagcgaagggtggcgtctttgccttcgccccaacatttgccctccgagggaccagttcgacaaagtcacctggtgccgaagacgtcgctag

SEQ ID NO: 33615 - DNA, 597 bp, Zea mays
  Peptide Sequence Number=SeqID_75394
atgaaatcattaattaagatggttgaccgcctacctcgagcgcaccaccttcttggtctgcaggaacatggtggcggcgctgctctctgcttcctgttccttgtcgcagtggtcgcctccgccgagggccacaaaatgggaagaaaaaaatctgaagccctctcagtgcggcaggaactaacggcggcggtgctccaagtcgcaccggaagaagtcgtgtctattttctacaacaagtgttgcgccaagtgcctacaggacctcctggccgcggacccggtgacgtcgctgtggagacttggctcgagcgcgcatttgaagcaccgacggggtataattacagaaactgcgccggcgtcgccgtctaacaggccggagcaagtgcgaacaccaccacgcgtcactcatcatatcagcgtcggtggagagcaagtcgtcgaccacgttggatctcttccccgcgaacaacagattgatcgatcccataacaacgttgaggtagagcgtgctgataacgtgttgagtgatccgctcccttccctcccgtcagcagtagaggcgcaagaagatgtagagaacccgtctccattcccataa

SEQ ID NO: 33616 - DNA, 252 bp, Zea mays
  Peptide Sequence Number=SeqID_75395
atggaattaccactagacgcgcagagcagtggaagacgtctcgatgtagacgaacgcgtcgagcagtgccgtgcagtcgccggcgtccttcacgtcctcgcacggttcgtccaagtgctccagatgcagcacctccgagggcatatttctaacacacgtccccacacgaggggcgaggacaagccgtcaaagccaaagagacggaggtatctgtcatggattgagcgtcatagattaacaagtttgttgtag

SEQ ID NO: 33617 - DNA, 1068 bp, Zea mays
  Peptide Sequence Number=SeqID_75396
atggtgaccaccggttcgatggtggggagaagcaagccgggctgcggcctctgccccgccctcagcttcaaggatcttcatcatccttgctggggcggggagcgaggcgagccggagctctaccttcagcattcaggggagagtgtgctcaccgacctagcggagggggcggacttcgacaacgcagggctagccagccgcaagcgtcgtcagctccagcgtgcctggctcgctggctcagctagctctggcgctgcttccggtgccacctcccaccgctggggtggagcgtggttgtccgctcaccgtggggcgactgttgcgtcgtgcgtaccgggggatcgtccaagacgtcgcacgtcgctagggcggcgttcgtgttcttggattgtcttgtcctcgctccggcacgacgcctccgtgcggaggtcggtgcctgcccgtccgcgaggacttgagtggggatctgccggtgcaggctgggggggccactcgcggacagacctccgtctctttggctatgacggcttgtcctcacccctcgtgtggggacgtgggcgagggccttcccacagcagcatctgccctgaggtcctcctatgtggaggttgttcatacccacgggagtggaaccggagtttcgtttgtaatggcaccttgagtgccggtgtatgttcattgcggctgtcggggagtccctcggctcagtcggccttgccactcaaggcttctcttgctcagttaaggaacccttggccgctctgcgatgagccggagccggaggcagcggtttcagcatggacagaggcggagtcggctcgaaaaagggcttcgtcggcccaggagcaggtgacttcccaggccgaggaggtgcagcagcggcggctggagcctggccgggtcatccgtgagcgggaccaacttcggagtcacgcttccgaggccatgaaccgggctgatgtcctcgggggacagctggctgaggctatggagtggccagccgagccgtttgctcgggctgggttcctggaggagaccctggctgcgatggcccaggcacgatgctga

SEQ ID NO: 33618 - DNA, 822 bp, Zea mays
  Peptide Sequence Number=SeqID_75397
atggagaggctagaaccccgggcagaatgggaatcacgacttgtgggtaaagtgtgcaacctctgcagagtgttagaaactggaggagatgctggcaacatggaggactttgaggagtttcaggactacgatgacttctacattgagcaggagcagcaggactcttccccctcacctcagcaggaggtggactctgggaggcagccttcccctgcacctcagccagtgatgtcccctgcaccaccacagggcatcccgtatgctggaggaaaccctgacggagacgacgacgatgccggtggcagttcgagccacagcatggagctctcggaggagcaagagcctgagggatgggtcgctagacccatcacttgcgacgctgctcacgtgtgtcacttccacgacgctctcgacaccttgctgcgtcgggcattcgaccgacacacttggttcatcaagtatcgttgtgtagtctaccagcatcgttgcgggttatacccggtccagtgggaggcgacttgcttggtgcgtcgtccggacaatgatctccagggtgcagaggccttctctaagcactattctatcactgagagggatactgccaaggcagccatgcaagatgcagcacgacgtgtgattgtctcgctagttggtgaaggaaatcccaggctgaacagcatggtcaaccaggccaccgtgttcaacactgagctagaccacgcccttgacgagttgggcaagcacccttaccgttcaccaccccgtggtcgcttcaagtatggtaccccagactgtaggacccagatagatttggatccatag

SEQ ID NO: 33619 - DNA, 159 bp, Zea mays
  Peptide Sequence Number=SeqID_75398
atggcgctccaccaggaacgagcgatggcgatgctcccaaggcgggtggacaagcgaactcatcgtagtcctgaaactcttcaaagtcctccatgttgccagcatctcctcctgagcactgagtacagtggggacaacctagggtggggtggtttgtaa

SEQ ID NO: 33620 - DNA, 762 bp, Zea mays
  Peptide Sequence Number=SeqID_75399
atggcgctcgccgcttcccaccacggcctcctgcccttcgcccccgctgccacgcctaccccgtcacgggggcacctgcgcttccgcgccgcgcgccctctgccccgccccgcccggagaatttgttgccaatctatcaactcagctaatgtgttgggagcttcttcaacgacatctgatgaggcaatcccagtcccagttgtccagatagatcaggactcagaccgtgatgcgactattgtgcagctaagttttggagatcattcggggatactacttgacacgtttttgtcatatctgccaattatttttcctgatattcactgttttcctgattctttcaaggcaatcaacgatgaaggcatgtccatgtatcagaggcccttcatgaagggcaagctgtacatccacttctcggtggagttcccggactcgttgagcctggagcagtgcaaggccctggaggctgttctcccgcccaagccagtatcacagtacactgacatggagctggacgagtgcgaagatacgatgccctatgacgtgaacatcaaagaggagatgcggaggcggcagcagcagcaccaggaggcctacgacgaggagatgatgtgccaggcggtgggcagagggtgcagtgcgcccagcagtaggcagcttgcggcaaatttgttgtttcgctttgggcgactattgagtttgcccgcttgtattggtctgatgatacttctgttacaagagtgcagtattactaaggattag

SEQ ID NO: 33621 - DNA, 330 bp, Zea mays
  Peptide Sequence Number=SeqID_75400
atggcgctcgccgcttcccaccacggcctcctgcccttcgcccccgctgccacgcctaccccgtcacgggggcacctgcgcttccgcgccgcgcgccctctgcctcgccccgcccggagaatttgttgccaatctatcaactcagctaatgtgttgggagcttcttcaacgacatctgatgaggcaatcccagtcccagttgtccagatagatcaggactcagaccgtgatgcgactattgtgcagctaagttttggagatcattcggggatactacttgacacgattctttcaaggcaatctctactaactattaagggggcagtgtag

SEQ ID NO: 33622 - DNA, 1041 bp, Zea mays
  Peptide Sequence Number=SeqID_75401
atgaccccacctctggcgatagtggcggcttcgaccctgccttctgcgcctggagctggtgcggggacctcagggttgggtggagaagccgatgaagcggatgatgaagacccccctaccagcacaagcccaccccagaccccagacctttccccttccgtccccggccggcgccaacgccactccagtgagctgagggcggagacggtcacggtgggcagaatgacacgccgcacgcctctccgccccgctccacaccagattgcgcgcacccacccatgggcgctcgccgcttcccaccacggcctcctgcccttcgcccccgctgccacgcctaccccgtcacgggggcacctgcgcttccgcgccgcgcgccctctgccccgccccgcccggagaatttgttgccaatctatcaactcagctaatgtgttgggagcttcttcaacgacatctgatgaggcaatcccagtcccagttgtccagatagatcaggactcagaccgtgatgcgactattgtgcagctaagttttggagatcattcggggatactacttgacacgtttttgtcatatctgccaattatttttcctgatattcactgttttcctgattctttcaaggcaatcaacgatgaaggcatgtccatgtatcagaggcccttcatgaagggcaagctgtacatccacttctcggtggagttcccggactcgttgagcctggagcagtgcaaggccctggaggctgttctcccgcccaagccagtatcacagtacactgacatggagctggacgagtgcgaagatacgatgccctatgacgtgaacatcaaagaggagatgcggaggcggcagcagcagcaccaggaggcctacgacgaggagatgatgtgccaggcggtgggcagagggtgcagtgcgcccagcagtaggcagcttgcggcaaatttgttgtttcgctttgggcgactattgagtttgcccgcttgtattggtctgatgatacttctgttacaagagtgcagtattactaaggattag

SEQ ID NO: 33623 - DNA, 3000 bp, Zea mays
  Peptide Sequence Number=SeqID_75402
atgacgccggtggctctcagccccttacggcagcaaggagacgtcagcaggatccttgccgcactgccagttgtgcttctacaggactcaggcgctcctccgacggccacgctatcacgtgtacagggctcaagctctcccccgatagccacgttggcatgtacacaaggcttaggcatctctctgccggacacgttagcgcagagctacaccccccattgtacgtctggaccctctccttacgtctataaaagggaggagccacgccgtcgtcgggctcgacctccgcacgactactggcagcatgacagcttcttcagcgaccacgacagtggcaaccactggctgcgtgggcagataagcccctccataaccgccctgcggcgcctgaggcgcctggacctcagcggaaacctcctaggaggtccaggcgtcaccatacccggcttcctcggctccctcagcagcttggtgtacctcaacctctccgccatggacttcgacggcatggtgccgcctcagctcggcaacctctccaggctggtgcgccttgacctcaacaatccgctcctcggtaaccagtactcaccagatctgtcgtggctatcacggctctctttgctggagcacctcaacctgaacatagtgaacctgagcacagtggctgatccgacccaggctatcaacgcccttgctaacctgagagtgctgcacctagatgaatgcagcatcagtatctattccttgctctcgcgcctgaccaaccttacagccgtcgaggagcttgacctctcgaacaatttcctgttcagcggcccattctcgtcccgctggtggttctgggacctgggcagccgcctcaggagtctccagctcgatgcgtgcggactgtttggatcgtttcctcgcgagctgggatacatgacctcacttgaagtgcttgatcttggcaacaacgatctgaatgggatgttgccagagacgttcagaaacatgtgcagtctcaacacactgacccttgcctacaccaacattggcctggacatagcgcgtctgctggacaggctaccaagctgcccagagaggaagctgagggagttagacctgagccaagccaacttgacagggaccatgttgaactggctgccgaaccaaaccagcctgaccctacttgatgtttctggcaatcaccttactggccctgtgcctgtggagataggcgagcttgcagccttgagttccctagatgtgtctggcaacaacctgaatggcgtcatgtcagaagagcacttcagcaagctaacaagtttgacatctctcgatctgtccgacaacaatctacagatcagagtggatccggactgggtgccaccgtttcaactgaatgtagcagagttttcatcctgtcagctgggttcccgattccctgcctggctacgctggcagaaccaagttaacgtccttgacatttcgtactcgaaccttaccggtacgattccagaatggttttgggctgtgtttgctaacgcatcaagcttggacctctcttacaataagattactggtgagctgccccgtgatttggagttcatgtcagtgggaatccttcagctcaggtcaaaccagctcactggctcggtaccacggctgccaagaagcattgtgacgtttgacatctcaaggaactctttgaatggaccactgtcactgaattttgaagccccactactacagctggtggttctctactccaaccgaattactgggcttattcctaatcagatttgtcagtggaagcagctgcgagttcttgatctatcagacaatctacttgcaggggagcttcctgattgtggcaccaaagttgcaaaacaaggcaattcttctagcacctccatgcctcattctagtcccgcgagtcctccaagcttgaatatccgtacacttcttttaagtagcaacagcctttcaggagaattcccattgttgctacagagctgcacaaatcttcttgtccttgatctatcacacaataagttcactagaaacttgcctgcatggataggtgagagattacagaatttggaaattctagcattaaggtccaataccttttccagccacattccaggcgagataacaaggcttcctgcccttcagtttctggatcttgcaaataacaacttatctggaacattgccacagtctctagcgaacttaaaagccttcactactatcgcatatacaggtggaacaggaaacccttttgatgaagaatatgatggagagtatggttttgttactatgggaccatctgacgacagtttaactgtggagaccaaagggcaagaactcaactatacagaaagcatgatatttctgatgagcatagatttatccaacaacaatttagctgggccgatcccagaagaaataggcactcttgttggcttgataaatttgaatctgtcacggaacttgattagcggaaagattccggagcagattggaaatttgcaatcactggaatctcttgacctgtcgaacaaccacctttctggtgaaattccctgggatttatcaaatttaacttcgctgagttatatgaacttgtcctacaacaatttatcgggcagaataccctctggacatcagctggatacactcagcagtgatgatccaacttccatgtacatcggcaatcctgatctttgtgggcatccactcccaaagcaatgccccggagatcatcagacaccagatgtggaacatcccatcagagatcatgaagatggctcaggctcagatcgaatgatggacttgggtcttggtttacttgttggatttgtggtgggcctttgggtggtgttttgtggcctcctgttcaagaagaagtggaggtgcacgtatttcatgctattagacaaactgtatgacaaggtatttgtcttttccgtactcatttggaggaaatggttcagcgaggcaggtgaacactaa

SEQ ID NO: 33624 - DNA, 264 bp, Zea mays
  Peptide Sequence Number=SeqID_75403
atgacgccggtggctctcagccccttacggcagcaaggagacgtcagcaggatccttgccgcactgccagctgtgctcctacaggactcaggcgctcctccgacggccacgctatcacgtgtacagggctcaagctctcccccgacagccacgttggcatgtacacaaggcttagacatctctctgccggacacgttagcgcatagctacaccccccattatgccgggtggaagatgcacccgacagcctggcttggggagtag

SEQ ID NO: 33625 - DNA, 528 bp, Zea mays
  Peptide Sequence Number=SeqID_75404
atgcaccaagggagtctttgtatggtttttgtgtatccctggccattcacctcggtagtgaagattgggtctgtacaacccaggctggaaagggatcacgacttgtggttctactcttactcttgtgcttacgatgtcttttgtagatggcccgtatcaggtgcactgcactattgctcgttgttcaccgaggtagctgatggcctcgacctgaagtactaccctcgtcgttcgaccgacagtgctggaggtgtgattgtctcgccagttggtgagggcaatcctaggctgaacagaatggtcaacctggccgccgtgctcaacatagagttggaccacacctttgatgagttgggcaaggttcgggcggaggttgcagaattgtgtgctgagtgtgcaacacgccactatctggatggtggttctcccacccctgtcgggattcagcacccttaccgttcgccgccccgtggtcgcttcaactatggtaccccagactgtaggacccggatagatttggatccctag

SEQ ID NO: 33626 - DNA, 531 bp, Zea mays
  Peptide Sequence Number=SeqID_75405
atgcaccaagggagtctttgtaaaggatatgttgtgtatccctggccattcacctcggtagtgaagattgggtctgtacaacccaggctggaaagggatcacgacttgtggttctactcttactcttgtgcttacgatgtcttttgtagatggcccgtatcaggtgcactgcactattgctcgttgttcaccgaggtagctgatggcctcgacctgaagtactaccctcgtcgttcgaccgacagtgctggaggtgtgattgtctcgccagttggtgagggcaatcctaggctgaacagaatggtcaacctggccgccgtgctcaacatagagttggaccacacctttgatgagttgggcaaggttcgggcggaggttgcagaattgtgtgctgagtgtgcaacacgccactatctggatggtggttctcccacccctgtcgggattcagcacccttaccgttcgccgccccgtggtcgcttcaactatggtaccccagactgtaggacccggatagatttggatccctag

SEQ ID NO: 33627 - DNA, 672 bp, Zea mays
  Peptide Sequence Number=SeqID_75406
atgcaagaagcatgcaaccgcaccgtggttgtgcaccctttcggcttcgtcacatccggcggtccagcatggaggcccgaaccagtgcagcgattcgaggctgccccgcgcgtgacccaacaatgccaattaagtgcgacgatcacggggatcgggaaaggggatatttcaaaaaaggatccttctcagcgaaggaaatgggccccgagccctcctactgatcaggggttcgaaggttgcgccctccgggcttcggcaaccgccccagagcactcgagctccgagccctttactgatcaggggttcgaaggctggcccctcggaagggttcgacagccgccccagagcactcgggctccgagccctttactgatcagggattcgaacgctgcccctcggaagggttcgacagccgccccagagcatgcagagtcagggatgaccctgggtacgtccgttacatggccgaggctcgggctacgctcccgagcctcgggcacaacagaaggtctctgcctcgtccgaccctgggcctcggcctcagcctcggcctcgggaggagtcacaacctcgcccgacctcagcctctgcctcaggagaagtctccgcctcgcccgacctcggcctcggaccgactacgctacaggggatacatcattaccctaccactag

SEQ ID NO: 33628 - DNA, 1095 bp, Zea mays
  Peptide Sequence Number=SeqID_75407
atgctggtccaccggatgcgacggagccgaaagggtgcacaaccgcggtgcggttgcatgcttcctacgtggcgatccaccctttcgactgctggttttggcgaggatgggggaatgcttataaacgcggggcggttacatgcttcgtgtgcggcgattttgctttttccgtttctggtcagcccgcatgacgtgtgggacccagcccccgcgctggagggagtgcgacctcgtgggagttggcgttcttcagacatcgctcggcttcaaggattttcatcatgcagcccggctgcagtctctcaccaatggtcatccgtagggatgatcaccagctttgtggtggggagaagcaagccgggctgtggcctctgccccgccctcagcttcaaagatgttcatcatccgggctggggaggagggcgcaccgagttggggcctgcctccgcgtgggccggtgacccgcttcttcctccggtattcgggggagaagggcatcctccagctctgcgggggaggcgtcctctagccatgcgggggaaggcgaaatgctgctgcctggacagggtgcagctatccgtctttcacccgggcgatggtcgccggctgcaccggggggtcgcacaacacgtcgtacgtcgcgagggcggtactcgtgttccgggacggtcccgttctcgttcttgtggcgagagcgggagtgaggacctgccggtgcgctttggggcgaccgtcgctcgctggtgcggtgttggtgggcaggtggccgctgtcgtcggtgctgaggtggtggtcaccataggtgaggctgcctctaccgaagcggttgcttctgccgacgagaccgtcagtgtcgcctgcgctccggacctccggctctttggctttaatggctggttctcgtcccccgtgaggggacgtgaacgagggcctttcaacagcagcgtttgccctgtggccatcgctgcagctatcttgccgcccgagacggaggtcattgctgcgctgttggtgcagtggtcatcggcgagccacctggagtttgttgtctcgcaggccctctggtgtggaggttgttcattcctgcgggaatga

SEQ ID NO: 33629 - DNA, 1038 bp, Zea mays
  Peptide Sequence Number=SeqID_75408
atgtcggtggcaggcgggagcagcggtcacgtcgtcagccaagcttacgtcccatcctggggcagcggcgcctctggcaggggaagcgagcgacgcttcgccttcgccataatgaccgcatcaaaaaagggaccaggaaagggggataccccgaaaaggacccttctccatgaaggaaacaggctccgagcctccctactgatcagaggttcgaaggctggcccctcggaggggttcaacagccgcctcagagcgcatgggctccacacccactactggtcagaggttcgaaggtcggcccctcggaagggttcaacggctgcctcaggccactcgggctccgcgcccactactgatcaggggttcgaaggctgggccctcgaaggcgggaacgatcttgtaatggaatcccatcagagggaggcatcgagccctcggaccccgtcgacaggggaccgggtccggcagatcacccgcagaggctcgggggctgctctcgcaaacccggctccggccaaaccgttgacagcgtcaacataccagcccgagaacttgggacccgaccgtgcacccgggctacggccagctcgcatgaggggaacaaccagactagccgaagcattgcgcaaggcattaagacctcggaggagtcaaaccactcctccgaggcctcgggggctacacccggtgggtgcgctcgcgcacacccaccggaacaaaacgcaaccgagaaaggctggtccccttgcaaaaaagtgcgacgaaagcctccaagcgagtattaacactcccttcgaggctcgggggctactgtcggggaccataattaggggtaccctcaaggctcctaattctcagttggtaacccccatcagcataaagctgcaaaggcctgatggggctcggactcgggctcagtcccggaagacggagaactccgctccgcccgacccagggctcggactcgggctcagccctggaagacggcgaactccgctccgcccgacccagggctcggactcgggctcagtcccgtaa

SEQ ID NO: 33630 - DNA, 498 bp, Zea mays
  Peptide Sequence Number=SeqID_75409
atgggtgccggttcctgggcgcagagaagtcgaaccgtagaagacaaagaaggtgaattttcaaaaccaatgcagcggtatcgaggcaccccgcgcgtggcccagcaaaaccatcaagtgcggaggccacggtcgtgcggtaaaaagcgcccgacccccaccacgtgggcagctccggggtcaccacgtgaccagaggaggcaatatactccaaggtatcaacaatgggtccggacccccacgggaaagtgccagacccctggatacacagaccggacctacgggcgaggttcaagacctccacaggtgtactatcttgctgaagagcccgaggtgcacttcgtctggcagcccagccaagagtcatcgatactcgacatgtcgcgcgcgttcgacgacaactatattatggactgtggcgtcatctcggcgtcggaggtgacacagaggaggaccgacaacaatgatcagttcgtcatcctccccaccgtcgggtag

SEQ ID NO: 33631 - DNA, 279 bp, Zea mays
  Peptide Sequence Number=SeqID_75410
atgttgctcgcgttcgacgactactatatcatggactgtggcgtcatctcggcgccggaggtgacacagaggaggaccgacagcaatgatcagttcgtcatcctcaccaccatcggggtagctttttgtgctgtaagcgcgtatggtggtacatgcctgatgactgacgatgtacgaggaaacttcttctggcaggcgtggggtgtgctctccaatgatgagaccatggaaatcgtggcatatatcgaagtcggtatgatactgatggttgcaatgtag

SEQ ID NO: 33632 - DNA, 381 bp, Zea mays
  Peptide Sequence Number=SeqID_75411
atggcgctctcggtcgcaccacatcggatcatccttcttctcagcgaggaagagtccggtggtgtcatccaccctgaatccgatagtttcggaatcaagcgaatgccacctaggctgcagagggtgaggctccacgagtacctcccacaagatagagggaaagccctctcgggaaaggtagtcgaagttgaagcgggtgtctccaccatcggctggggaggtgaagtcatctgtgtaagaggggtcaccttttctgtgaaagacatcgaattctccgagtggaagggcgatattctcgttgtcgccatcacgaagaaggatctgtccaaagatgcggactccaaatttgagaatgtcgtcttgaagaagctggacggctag

SEQ ID NO: 33633 - DNA, 639 bp, Zea mays
  Peptide Sequence Number=SeqID_75412
atggaggagacacccgcttcagctttgactacctttcctgagagggctttccctctatcttgtgggaggtatctccttaccgctaccttagcacttgcacttacccctctttcacagatgacttcacccacccctacagatggaggagacacccgcttcagctttgactacctttcccgagagggctttccctctaccttgtgggagcctaggtggcgttcaattgattctgaaactatcggatttagggcagatgacaccattgaggccgcgacattgaagactttgacgactttttgcggataccacccgctagagatgatgatgcacccacttggcctcttccctgctgagaagaggaatgatccgatgtggtgcaacagagtgagccacgtcaaggatgtgtgggccatgcatctcgaccaggttgggagaatcaccatccagtgcatgagtgcactgtaccgcctgcaggccctgcaaagcgaggccatgacgcacctcactgggctcgctcaaactgcaaagaccaccctcgatgatagggacgacttcgtggtcgatctatctttagagttggtggagaaggatctacaggttgaacagatgagcaaccccatccaagagttggagcagtag

SEQ ID NO: 33634 - DNA, 780 bp, Zea mays
  Peptide Sequence Number=SeqID_75413
atggagattggctctttttgggcagaatgggaatcacggcttgtgggtaaagtgtgcgacctctttagagtgctagaaactgatatatcagctatgctcacgatggctcgtattagatgcactgcacgtaagtcagtgatcctatttttgccttctcgcctggtggagcacccactgcgtcgcccggtgccagctactggaggagaccctgacggagacggagacgacgacaacgccgatggtagttcaagccacagcacggagctctcagaggagcaggagccggagggatggatcgctagacccatcacccacgacgccgctcgtgggtgtcacttccacgatgctctcgacaccttgttgcgtcaagccttcgaccgacacacttcgtccatcgagtaccattgtgtagtctaccagcatcgtcgcgggttatacccggaccagtgggaggctacttgcttggtgcgccgtccagacaatgatctacggggtgcagaggccttctcagagcactattctatcactgagagggatactgtcgaggcagccatgcaagatgcagcacgacgagccctttcgcagtattgtttgttgttcagcggggtagctgatggccttgacctgaagtactaccctcgccgttcgaccggaagtgctggaggtgtgattgtctcgcccgttggtgaaggcaatcccaggatgaacagcatggtcaacttggtcgtcgtgctcaacaccgagctggaccacgcccttgacgagttgggcaaggtttag

SEQ ID NO: 33635 - DNA, 156 bp, Zea mays
  Peptide Sequence Number=SeqID_75414
atggagattggctctttctgggcagaatgggaaatacggcttgtgggtaaagtgtgcgacctctgtagagtgttagaaactgttctatccgaaaagtcactaaaagcaggtccagaggtgctttcagatttgcactacgagaaagtcggcttttag

SEQ ID NO: 33636 - DNA, 156 bp, Zea mays
  Peptide Sequence Number=SeqID_75415
atgacggatgcggagaaggagccatacgggtggcgtaagtgtcgtttcagagagtggttgtatggtcctttgtcccattggccagagccagaggagacgaggaaatgcagttgggagagttacgacgacaaaggagagagattggatgtggcgtaa

SEQ ID NO: 33637 - DNA, 156 bp, Zea mays
  Peptide Sequence Number=SeqID_75416
atgacggatgcggagaaggagccatacgggtggcgtaagtgtcgtttcagagagtggttgtatggtcctttgtcccattggccagagccagaggagacgaggaaatgcagttgggagagttacgacgacaaaggagagagattggaagcggcgtaa

SEQ ID NO: 33638 - DNA, 978 bp, Zea mays
  Peptide Sequence Number=SeqID_75417
atgtaccgaaagacgttgtggcagaagagaggtcgtcttcgggagttatatccggatgtatctagtaaggatgcttctgttcctcctgaactccccgtgcctaactgtgactgtggcagactggcttggttgagtggaaggactagtcatgagcgttttaagcgttgggtacctcctcccccgaatcctccaccaatgacggatgcggagaaggagccatacgggtggcgtaagtgtcgtttcaaagagtggttgtatggtcctttgtcccattggccagagccagaggagacgaggaaatgcagttgggcgagttacaacgataaaggagaggtgatgcgcacaatagagtccaagagactaatgggacagaagatgcattgtggatctcagctcgtcgattcgtacattaacgatcgcatacgcgacatgcgtagggaagcaaaatctgccttttatgatagcccgaagcgtgcagagtataggaggttgaaggaggcagatgagaagagagcacaggatgcaagggaatgggaagcggctcaagccgagaaacagatgttggataatcttgctgatcgtctcaagggaaagattggatgtggcgtaaattatttggtcgatgaggcgcatgcaagatatgttcaggataaaatgtcgacggttgagctgatggaggaggaggaggacgacacatctagattgagtgagcttatcgctctcgcagaggtaggattacatgaagaagaggaggacgacacatcaaggttgagtgagctcatcgcactagctgagacaggattacgtgctcaagaggaagaggacgagtttatgtctcaggccgccgaagaggtagaggcggcttattgcaagaagaagtctgatgaggctgaggctgagcatgagctattctctcaagctgcagatgaagcagaagccaattattacaagagaactgttgacaagtgtgatgcatga

SEQ ID NO: 33639 - DNA, 408 bp, Zea mays
  Peptide Sequence Number=SeqID_75418
atggttttatcaagcaactcctatcacctaatgcagcaatcaagtgagaaagattttgaaatagcaagggaggtggcaaatgcaccggggcttgccttcgtttacagttcacgaaaaggtccccgggttcttgtcaattcacaactcgcagtccccgacggtgttcaagcacggccgcgctccggcgagcaactacgccggccgattgaggctaagactggtgctaatcttcggctgagcccaaattcgagttcctatgaacgttttccccaactaaattacactatcggtggactagggagctccggccacggtggccgtaagcacaacggcaacatgatcgtgttcccggcgatgggcgccggtctagttcaattaaaggggtcggggagcatcacagaggcatga

SEQ ID NO: 33640 - DNA, 618 bp, Zea mays
  Peptide Sequence Number=SeqID_75419
atggttttatcaagcaactcctatcacctaatgcagcaatcaagtgagaaagattttgaaatagcaagggaggtggcaaatgcaccggggcttgccttcgtttacagttcacgaaaaggtccccgggttcttgtcaattcacaactcgcagtccccgacggcgttcaagcacggccgcgctccggcgagcaactacgccggccgattgaggctaagactggtgctaatcttcggctgagcccaaattcgagttcctatgaacgttttccccaactaaattacactatcggtggactagggagctccggccacggtggccgtaagcacaacggcaacatgatcgtgttcccggcgatgggcgccggtctagttcaattaaagggggtcggggagcatcacagaggcatgagaatgctcaaacgaggaagaaaagggcgggcactgaccggagttgggctggctacggtatatttacacaggatcatgctcaaaacccagcttgaagtcgagttaagggcaccccattccaccctcatggttgcactgttttcccgggcggtcatccatagaacaggtccttatggagaggcacttgagaaaccgctcgagcccccttga

SEQ ID NO: 33641 - DNA, 153 bp, Zea mays
  Peptide Sequence Number=SeqID_75420
atggacgtcgagcttaagagggaggtcatcaagaaggcatacgagatggaccttgcccagttgtacaaccaaaaaaagctgaagattacagaaatagtttgcaaaaagaagcacaagcaaaagctcaagcattacactttgaagatgaattag

SEQ ID NO: 33642 - DNA, 369 bp, Zea mays
  Peptide Sequence Number=SeqID_75421
atggacgtcgagcttaagagggtggtcatcaagaaggcatacgagatggaccttgcccagttttatcttaactgttgccatttcttttactttgcagtttgttggtcatcattttcctgtttggttgtgttgcttctgcttgttattcttgcattgagcgtgagcgaggtcgaggcattgtacaagctgttcaagaagatcaacaacgccttcatcgatgatgggctgattaacaaggtcatcaatgggtgtctgctgctacaggccaaccacgctaggcgatcgcggaggccaaccacgcttcaggcgcgatcagccgccgccatgcagggcttccccggcggcgcccccgatccgcagcaactatag

SEQ ID NO: 33643 - DNA, 203 bp, Zea mays
  Peptide Sequence Number=SeqID_75422
acagcgtgggcgaggtcgaggcattgtacaagctgttcaagaagatcaacaacgccttcatcgatgatgggctgattaacaagtaccattgccaaagatgtggaggcttgttctgcaccagcattacccagcagaggacgattttacgtggacaaggtgattcacctattagaatttgtgatccttgcaaaaagcttgaataa

SEQ ID NO: 33644 - DNA, 459 bp, Zea mays
  Peptide Sequence Number=SeqID_75423
atgggcgggtccagagccgccacgtggccagagaaggtgatacactccaaggtagtagtagtgaacccggacccccatgggaaggtgctggaacccaggatatacagtccggacctccaagattggtctaggacccccacgtgtacagaccggacccccccatatggggttcggaccgcccacagtagggtcctgaggttccaggacaaaacacacccaggccttaggtccggtgccgacacatgtccagatctggtctggtgggatccggaccagtccgcatacactcctgctccctgcttaggcggagacccgttgctgccatgtgtcatcaagactcccggtgattactcaggcgttactagcattagttactcacataatgtattccttccattatgctcctgggcccgtatgtcggggctcagcatccttgtatgtgcctcccttaaactataa

SEQ ID NO: 33645 - DNA, 159 bp, Zea mays
  Peptide Sequence Number=SeqID_75424
atgtcggccttctgcttctccatcaccgtcgttatcatgcagcctgctggaatgccacagcgggacatgagcatggggatgagcagctcaagggaggcacatacaaggatgctgagccccgacatgtgggcccaggaacataatggaaggaatacctag

SEQ ID NO: 33646 - DNA, 552 bp, Zea mays
  Peptide Sequence Number=SeqID_75425
atgccattacaaatgggactccggttccgttcccgcgggtatgaacaacctccataccaggaggcccacgggacgacaaactgcaagcggctcaccggcaaccgctccagcagtagcgacaacgacctccgtcccgggcggcaagacagctgcagcaacggcttcagggcaaacgctgcggcagaaaagccctcgcccacgaaggacgagaaccagccattcaagctagggagacggaggtccaggcgtcgcgggctaagtcttcaccaacgcgctcaaagatcctccccctacgacacgggggctgggtcccacacgacatgcaagctggcccaggacagaagaagcaaaccgccgcgcgcggagcgtgtaaccgcccagcggttacaagcattcctctgtcttcgcctaaaccagcgggtgaaagggcggaccaccatgcaggcagcatgcaaccgcgccatggggatgcaccctttcgacttcaacgcgtccagcatggagtcccaggcccacacgtcatgtaaccggcgcgccggttactacgtgtga

SEQ ID NO: 33647 - DNA, 870 bp, Zea mays
  Peptide Sequence Number=SeqID_75426
atggaggcccgggcccacatgtcatgtaaccggcgcgccggttactacgtgcaaaggaaaaccgcaccaccacttgcgccaatgccgcgtcttctcgacagcagaaccagtgcagcgactcgaggcagccccgcgcgtgacccaacagtgccaattaagtgcgacgatcacggggcaagcgacacctctggcagacgaagcgggcgccgtttcacctccgtcatgatgaccgcgtcaaaaaagggatcgggaaaggggatatttcgaaaaaggatccttctcagcgaaggaagcgggccccgagccctcctactgatcaggggtttgaaggttgcgccctgcggggctcggcaaccgccccagagcactcgggctccgagccctttactgatcaggggttcgaaggctggcccctcggaagggttcgacagccgccccagagcacgtagagtcagggatgaccctaggtacgtccgttacatggccgaggctcgagctacgctcccgaggtaccctaggacatttccgagaccagcgggaacgatttgtaatggaatcccaccggagggaggcactgagccctcggaccctatcaaatgggtccgggtccagcaaatcacctgcagggtaacactgagtcacgacctcccccgagttcagcctcgggcgcaacagggagctcctccttgcccgacctcaggcctcggcctcagcctcggcctcggggagaaggtctccgcctcgcccgacctcgggcctcggcctcagcctcggtctcgggagaagtcgcatcctcgctcgacctcgggcctcggcctcagcctcggcctcgggaggagtcacatcctcgcccgacctcagcctcggtag

SEQ ID NO: 33648 - DNA, 247 bp, Zea mays
  Peptide Sequence Number=SeqID_75427
atgtcgtcggtatcgaggaattgggcaaggcctagcccactactcctcgtgctcctctcctgccggagcaacatcccactcgaccgtccaacccggtggcagggtggcctcaccgccttggcatacaatgctccactgacccccggctgccgcggtgcagtgaccgcacttgtacccaccatagctagcatggaagacccagtctcaggtcgcatgagggataaagtccgcgcccggcttcactcag

SEQ ID NO: 33649 - DNA, 207 bp, Zea mays
  Peptide Sequence Number=SeqID_75428
atgtcgtcggtatcgaggaattgggcaaggcctagcccactactcctcgtgctcctctcctgccggagcaacatcccactcgaccgtccaaccccggtgggcaggggtggtagggccaagtcacaccatcaaccatttcctgaaatgtacaaggaatcaagcagtctcattagctgcgagaagcagacgattcgaatcgagttttaa

SEQ ID NO: 33650 - DNA, 399 bp, Zea mays
  Peptide Sequence Number=SeqID_75429
atgtcgtcggtatcgaggaaatgggcaaggcctagcccactagtcctcgtgctcctctcctgccggagcaacatcccactcgaccgtccaacccggtggcagggtggtaggccaagtcacaccatcaaccatttcctgaatggtacctgcaaaaattatgccacaagcaaggctgagtatactaatactcagctagacttaaccggttacaaggggtcaagcagtctcattagccgcgagaagcagacgattcgaatcgagtttaaaccttgcaagttaaacaaggttaactttacttatgtaagacccttgggtggtatacttggtaaattgggtcaaactttatctaagggcagaaggggtgctttgaactacaactattatttaacagtgctataa

SEQ ID NO: 33651 - DNA, 498 bp, Zea mays
  Peptide Sequence Number=SeqID_75430
atgcagtggctttttggggcaacatcatatggcaatattgtagatggcatattgctctacaactttgctgcagagcttgccgataagctcaccgtcgaccgccgcctctcggccgtgtgccgcgtggctcaactctcccaccgtgtcgccgtgacccgctactgctgtcaaatcggcgccgaacgtgaagaagagatagaagtcaccgaagacaggacaccaccaccttcggaatctcaggccgagaatagtttctactttgatatctgcggatccgagcctgactcacccgtgaacgaaggcaagccccggcgtgctgaccgaggaccctttaactggtcacatgcctcgtcatggcatacccttgagagtcttttccttagtcgggtgaggaagcgacaaatttttgttgcttttgctccaaggtggtaccaaatgaagaaaaacaagactgaagtgcgggaggacttggtcctccacataggatctcttgcttaa

SEQ ID NO: 33652 - DNA, 1020 bp, Zea mays
  Peptide Sequence Number=SeqID_75431
atgcaggcggcatgcaactgcaccataggggcgcaccctttcgacttcgatgcatccagcatgaaggctcaggcccacacgtcatgcgggtggaagcagcagtcaaatcgtctgcaggctcacgtcccctcctgggacagcgagagagccctctcccacgacgtgaagatgacgcgctcatgttccattcctcgaacggctcgcgcaacggctgccccgcgaaccactcgtcccgtcgcattaactccgcggcagggcaggcgacacctttggcaggcgaagcgggcgacgcttcacctccgccatgatgaccgcgtcaaaaaaggtgtgccacgtcgttcaattttgtatccttttcctcttcccctttctctctcttgctacagggaccgggaaaggggatactccgaaagggatccttctctgcgaagaaagtgggccccgagccctcctactgatcaggggttcgaaggctggcccctcggaagggttcgacagccaccccagagcactcgggctctgcgcccactactgatcagaggttcgaaggctggcccctcggaagggttcgacagccgcctcagagcactcgggctccgcgcccactactggtcagaggttcgaaggctggcccctcggaagggttcgacagccgcctcaggccactcgggctccgcgcccactactgatcaggggttcgaaggctggccccctgaagggttcgacagccgcctcaaaacacgcagagcgagggatgactctagaccgccagcgcggctgtcttcaccgtcgacgaccggtcttcgccgtgattcacgccaccgccgtgtgattcacgtcgccgatgacccgataaggccgccagccgataagctcaccgtcgaccgccgcctctcggccgtgtgccgcgtggctcaactcttccaccgtgtcgccgtgacccgctactgctgtcaaatcggcgccgccgttgccccgttcggccggtacaggtgctcgccggagcacggccgcgcgtga

SEQ ID NO: 33653 - DNA, 568 bp, Zea mays
  Peptide Sequence Number=SeqID_75432
aaagtatgaagaaatatgcccacctctggtagaagaactctgttatattactgactattcatacaccaaggaagaggttttgcaaatggaagcttctgttctgaataacttgaaatttgagatgacagtacctacagcaaaatgtttcttaaggagatttgtacgtgttgctcaagttcctgacaagggctcatctctgcatcttgagttcttagtcaactacatttgtgagctgtcacttctggagtacagcttactttgctatttaccttcaatgaattcctcactttcttactacacgcggtatacaccatctgagttgcgtggttgtgtaagggtactgcaccggctcttccgtttgggccctggaagcaatcttcctgcaattagagaaaaatacagtcagcataagtcgtccagtcggtcctgggagctcgacttgaggagccggctcgacttttctgttcagtttgaggcttcaaatgaggtaagacttgctgtttatttcagttttgttcaatttcaggcttcaaatgagataattctagtcatcttgtttggagcctaa

SEQ ID NO: 33654 - DNA, 189 bp, Zea mays
  Peptide Sequence Number=SeqID_75433
atgccgcccctctgcaagccctcacagcaagctctggtgagtcctgctccccctctcccgccctcacagcaacatgagccgctcctctgcaagccctcacagcaagctctgtttgaggcttcaaatgaggtaagacttgctgtttatttcagtttcgttcaatttcaggcttcaaatgagttagactga

SEQ ID NO: 33655 - DNA, 339 bp, Zea mays
  Peptide Sequence Number=SeqID_75434
atgaactactacccggtgtccaagtgccacttcgacctcagtgacacggtgttcggcaggctggccaagcccggcctcaacgacaagctccgcccctctggcatcatcgacatcgagttcactaggattcatcgtcgacattgggggaactggggtgtagttcgcttcgccgtcgtgccgttaatggggctcggtgtatgcggctcgctctgccaagagatgttcggattacaggtggtgatgagaatggtgggttttgattatgattatggtaatggtaaagaaggcgatgaggtggatttccatgagttccaggacatcgatgagttcaaggattag

SEQ ID NO: 33656 - DNA, 306 bp, Zea mays
  Peptide Sequence Number=SeqID_75435
atggccagcccaacggtgtcggccccgactacaacaaagacagtgatcatcaccgacatgaactattacccggtgtccaagtgccacttcgacctcagtgacacggtgttcggcaggctggccaagcctggcctcaacgacaagctccgcccctctggcatcatcgacattgagttcactaggattcattgtccacattgggggttcgagtctagtttggttgcgtggaggcatgttatatggtgttgggggccttcgtcctccgaaggtcctcaaaaacatgatttgacaatatcttccaagtga

SEQ ID NO: 33657 - DNA, 234 bp, Zea mays
  Peptide Sequence Number=SeqID_75436
atgaactattacccggtgtccaagtgccacttcgacctcagtgacacggtgttcggcaggctggccaagcccggcctcaacaacaagctccgcccctctggcatcatcgacattgagttcaccaggattcatcgtcgacattgggggttcgagtctagtttggttgcgcggaggcatgttatatggcgacctccagatttatgttgccgatgtggtgctccatctcggcaatag

SEQ ID NO: 33658 - DNA, 330 bp, Zea mays
  Peptide Sequence Number=SeqID_75437
atgagcaagaacacaagagacacaagatttatcccgaggttcggtcacaccaccaaggtgccctacttcctcattgaggcgcccacaaagagccgggtctctttcaaccctaatcctccctttgccgaccacaaagacaaaaaccggttgagtgtccggttgagtgtccggctgaaccaatattttaaaaaaggtgaacagtgcaaaaaccggttgaacctgtttttccaaaaagcaattttggccaagatagacttaaaaaggttgtactacatactttcactaaggattaacaagggtaaattggaagttttagatcaaggattttga

SEQ ID NO: 33659 - DNA, 228 bp, Zea mays
  Peptide Sequence Number=SeqID_75438
atgagcaagatcacaagagacacaagatttatcccgaggttcggtcacaccaccaaggtgccctacttcctcgttgaggcgcccacaaagagccgggtctctttcaaccctaatcctccctttgccgaccacaaagacaaaaaccggttgagtgtccggttgagtgtccggctgaaccagtattttcaaaaaggtgaacagtgcaaaaaccggttgaacctgttttaa

SEQ ID NO: 33660 - DNA, 228 bp, Zea mays
  Peptide Sequence Number=SeqID_75439
atgaacaagaacacaagagacacaagatttatcccgaggttcggtcacaccaccaaggtgccctacttcctcgttgaggcgcccacaaagagccgggtctctttcaaccctaatcctccctttgccgaccacaaagacaaaaaccggttgagtgtccggttgagtgtccggctgaaccagtattttcaaaaaggtgaacagtgcaaaaaccggttgaacctgttttaa

SEQ ID NO: 33661 - DNA, 198 bp, Zea mays
  Peptide Sequence Number=SeqID_75440
atgaacaagaacacaagagacacaagatttatcccgaggttcggtcacaccaccaaggtgccctacttcctcgttgaggcgcccacaaagagccgggtctctttcaaccctaatcctccctttgccgaccacaaagacaaaaaccggttgagtgtccggttgagtgtccggctgaaccagtattttgaaaaagggtga

SEQ ID NO: 33662 - DNA, 198 bp, Zea mays
  Peptide Sequence Number=SeqID_75441
atgagcaagaacacaagagacacaaaatttatcccgaggttcggtcacaccaccaaggtgccctacttcctcgttgaggcgcccacaaagagccgggtctctttcaaccctaatcctccctttgccgaccacaaagacaaaaaccggttgagtgtccggttgagtgtccggctgaaccagtattttgaaaaaaggtga

SEQ ID NO: 33663 - DNA, 285 bp, Zea mays
  Peptide Sequence Number=SeqID_75442
atggtgagagaacgaagaacacaaacaaacacaatgagcaagaacacaagagacacaagatttatcccgaggttcggtcacaccaccaaggtgccctacttccttgttgaggcgcccacaaagagtcgggtctctttcaaccctaatcctccctttgccgaccacaaagacaaaaaccggttgagtgtccggttgagtgtccggctgaaccagtattttccagagagcaattttggccaagatagacttaaaaaggttgtactacatactttcactaaggattaa

SEQ ID NO: 33664 - DNA, 261 bp, Zea mays
  Peptide Sequence Number=SeqID_75443
atggtgagagaacgaagaacacgaataagcacaatgaacaagaacacaagagacacaagatttatcccgaggttcggtcacaccaccaaggtgccctacttcctcgttgaggcgcccacaaagagccgggtctctttcaaccctaatcctccctttgccgaccacaaagacaaaaaccggttgagtgtccggttgagtgtccggctgaaccagtattttcaaaaaggtgaacagtgcaaaaaccggttgaacctgttttaa

SEQ ID NO: 33665 - DNA, 1452 bp, Zea mays
  Peptide Sequence Number=SeqID_75444
atggctcttgaatcgggctccaatgttcggagactgaaggagcgcagctggattggagcggcggaaatcgcctggcaagtcgcctcggccgcaaggaaagtcgcctcggtcgttagggacatggtagggaagctgccacagcaccgccatcaccatggctcctcctcactcggggcagaggagctcaacctcttacacatggccagggggggctccccgccggacggtggcggtggaggcggcgagagccggggcgcgctgggccagtggaagtgcaggctgctgggctccctccgtccgtgccgcgcgcgctgcgtggtgtgcctgcaggtgcagcacgtcaccggcctgcccccggccgcggagggccacgggctggtggtgggctggcggagcaagggcggcgagggggagcacacggcgcctgcccgggttgcgcggggcgccgccgcgttcgacgaggtgttcctgcagcacttcaccgccggcagcgccacgctgcggggcttcaccgtgtgggcggcgctcctggacgcgcctgccgataatggggatctcggcgcgttccccgtcgacctcgccgaggtcgccgcggccgcggcggagacctccaactccaacgccagcaagttcggaggcaaggcgctcagcttcccgctgggcggggcggcggccggtgcggtgctcagcgtcagcgtctactgcagagtgatggatcagcacgaggacagccatggggctgctaacaataatgcagcaggtcaagcaagagagaagaaaaagaacaagggcaaagcaggctcctacgcctcctgcctgccggacctgagctgcctccgcaaccggcaggtggcggcggcgtccggcgggtcggcgcgccgcgccccgtccatccgctccgatcgcggcggcttcatcaccatcgagaactccatgtccgagataattggcggcggcggggcggccttcggcgtggcggaggacgtggacgagggggcggaaggcgcggggttcatcacgatggaggagggcagggtgtcgtcgaggcggccgctgacgccggacacggtggcgtcggaggaggaggacgagaagccgtgcctgttgatggagctgtcgtcggaggaggcggcggtggacgtggagaaggtggaggacgagttcctggcgatgctggaggacaggtacttggcgaggagcaaggagatcgagaaggggctgggcgtgagcctggacatcgggctggacctgggcctggacctggactcgctcatcaaggacgccgagatggagctcgccaaggcggagcaggcgtggaagagcaaggtcggcgccgccatcgtggaggaggaagagtacagggagctagtccggaggtggagcgccagggagaccgccagccaccactctgcgggctgctcctggggctttggattcgggagcccgatctga

SEQ ID NO: 33666 - DNA, 207 bp, Zea mays
  Peptide Sequence Number=SeqID_75445
atgggccggccagggggagtttggcccattcagctagggtggatgccgagggggagttgggccgagctcgaagtggggctagctcttgcaaattacaaattgggtattacacccttgcttaattttgatcagaagtttgcagatgaagatatgatggcgaacttgatggatgctagtctagtgatacccccggtcatcttcctgtag

SEQ ID NO: 33667 - DNA, 510 bp, Zea mays
  Peptide Sequence Number=SeqID_75446
atggaagaaacacacctccacgtgttcgacgcttcctgcccacgccagagcacgctcacgcgcgcccccgcatgcccagcgccgcgcccgagccaagccagcgccgtggcccgcgcccgcgcctataaagccctcccaggcttcgactgcactcttccgcgcaccctcaaacctcaccggagtttagctcgccgccgtttgcccgtgcgcagcgtgtccgcggccgcccaatccctctgtcaccgtagaccggccaatagagccattcccaaccccgtccagccctcggagaagactgtgcacatctccgtgaagctccccgagcgaggaatcggagtttgcttcgccggagaggccagtccacactcgccggagctctcaaccccgccggaatacgtggaccggcgaacatggacatccatccacaggaagatgaccgggggtatcactagactagcatccatggagttcagcatcatatcttcatctgcaacttctgatcaaaattaa

SEQ ID NO: 33668 - DNA, 330 bp, Zea mays
  Peptide Sequence Number=SeqID_75447
atggagcaggtgacacgaggtagcatgggcgacaggggggaaaggggggacggtgttgctggcggtaatggtggtgggtgcgctgcaaagggggcgtgggtggcggtagtgcgctgcaaagggggcatgggcggcggttctagtgcacatggaggcgggcacgcgtgcgggggcacggcttattccaggcttcaaggaggactgggcataactaacttcagaccaggcaacttctcttctggcaaggctggcgcacaacttcaatctgagacatctcctggatgggtcaagagggagctgatgttgatgacttcttctggcggcgactga

SEQ ID NO: 33669 - DNA, 231 bp, Zea mays
  Peptide Sequence Number=SeqID_75448
atgaccctgatgtttgtggtctctggttccaagaatctttgcctctctgtatgggctctgactaaagcgaagaaaaacttcactacccaatgcatgcagaggactgggcatactaacttcagaccaggcagcttctcttctggcaaggctggcgcacaacttcaatctgagacatctcctggatgggtcaagagggagctgatgttgatgacttcttctggcggcgactaa

SEQ ID NO: 33670 - DNA, 630 bp, Zea mays
  Peptide Sequence Number=SeqID_75449
atgactgacacagggttgattctgggagaaccttcttcttatcttctcttcactatcttcttttcactgaccctttctttctctttgctcttcccactggaggattctatcaaagagtattaccatcatacagacgaggaaaccgaagactatgaaccatgtacaacagtcttcaacccaagaatcacgaagcatcgtgatcttaggagcaagggattggaaaatggagttgcttgctatttggcagggggattttatctggtgtgtttttgctttggatggaaactgagggagctggtgggggaatttatatgcgagtgggggttgctcgggtgcggagtggcagtgatggagcaggtgacacgaggcaacaaacccgacaaggggagggggctggtgttgtcggcggtgggtgcgctgcaaagggaaagtggggcggtgatggtgcgcatggaggcgggcacgcgtgcggggggcacgggtgagtggtgggggtcaatgaccctgatgtttgtggtctctggttccaagaatctttgcctctctgtatgcttcttccatgcttcaaggggctctagccaaagtgaagaaaaacttcactacccaatgcatgcagaggactgggcataa

SEQ ID NO: 33671 - DNA, 270 bp, Zea mays
  Peptide Sequence Number=SeqID_75450
atgacctcagggcagacgctgctgcgacaaggccctcgctcgcgtccccactcgaggggcgaggacaagcagaaggccctagagttggagccgtcacggactgagtcttcaccaacacgctccaagatcctccccctgcaacacgggggctgggtcccacgcgtcatgcaagctggcccaggacagaaggagccaaaccgccgcgcgcggagcgcacgactgcccagcggttacaagcactcctccactttcgcccagaccagcgggtga

SEQ ID NO: 33672 - DNA, 294 bp, Zea mays
  Peptide Sequence Number=SeqID_75451
atggacgagtctggtatgcctcctgggactagtaattgtatcacatttgagtcacagaggattggggacgcttcacagttacatgacttgtgggcctgggcctccacgttggatgcgtcgaagtcgaaagggtgcatctctgtggtgcagttgcatgccgcctgcatggcggtccgccctttcacccgctggtttaggcgaagatggaggagtgcttgtgactgcggggcggtttggcttcttctgtcctgggccagctcgcatgacgcgtgggacctagcccccgtatcgtag

SEQ ID NO: 33673 - DNA, 399 bp, Zea mays
  Peptide Sequence Number=SeqID_75452
atgggtgagtggtggtctgacagcagaggagaaggttatgtcacacgtgttggacctgactgcctcactacacgggaaataaaaaaagagcacgccggacctaacgactttgttgtgcggaaaagggaaaaattaacacatgacaactcaattaaaggactaacaagtatgctaagtgttgaacatgtgctcaatgcaaagctaacagagttcaacacaagtgaacaaagacaaccgatcaagccaaggatggaggcaagaagagcttcgaggtaccgagtgcacgggagaaggtcaaggagaccaggaacccaaaagccaggggtgaagaagaagacttgcaaagtcaaggttaatcgagttaagaagagttatggcgtatcaaggatcactacataa

SEQ ID NO: 33674 - DNA, 669 bp, Zea mays
  Peptide Sequence Number=SeqID_75453
atgacgaaggtgatgccttccgaaggtgtcgaaaaagctcaagaaatggaatccttggaccatcacacttgttcacttgtgttgaactctgttagctttacactaagcacctgttcaatacttagcacacttgttagtcctttaattgagttgtcatccaaacaccaaaatctacaagagagctttcacgtgttcctgccctactacgcggctcttgacgcactgccgtacgtgatcgatctggccctgcttgacgaatccacgaggcacggtgtggcgctggcggagttcctgtcgccggacaaggcgcatatcctgtctcgccggcacgggcatgaccatttcctggtggtcgcggggtccgcgtgggactacgcgcagtcgctgggcgtggagccgaggctatggggctcgacgtcgctgctgcgactgccggggctggccaacttcacatccctgactctcgagtcctgcacgtggccatggcaggagcacgcgatcccgcacccgacgtccttccacccatcgtttctcggccacctccgcgtgtggctcgcccgcgcgcgtcgttcgcgttgtgccacgcttatgctcttcgcgggcggcgcctcccacccgtgccggccattgctaggacaaacggtgctgggatatagatggacggtctag

SEQ ID NO: 33675 - DNA, 381 bp, Zea mays
  Peptide Sequence Number=SeqID_75454
atggctgaacttcagaagaaaaacgaagatggtacaactacactgttttatctccagaagatttacccagttaccagtgctgatttcaaaagtcaacaatgtcatatatctaagaatggagttttgtttcttctgaaaaatggatacagatgtggaacctatgccaaaataatgacccgtgcaactgtatatgttcagtctttcgtcattaccttctcgtttggtatgggtgccattccatggctcatgatgtctgagttttgttttaccagtggagacacggagattggaggacagaagggcgcagcacaggactacagcgaggatgtgataaatggtgatctctgcgagcagtatccctccctcccagctgatatgtag

SEQ ID NO: 33676 - DNA, 1032 bp, Zea mays
  Peptide Sequence Number=SeqID_75455
atggacgctgacgctcgatggcttgttggcaatggtgcaggctgtcctctccaacgatcccaccgtacagctgatgccttgcatcgtctgatccctaggttgtgtcgtccatttgactttgcagataacatgccactggcactgaacatcaacccagtgttgccttttggtttatctcaatgtcacttattttgcattctctgtgacactgttctctgcatgccaatatatctagctgatgaagcatcctcattaccaaggtggaaagaatttatggtggtatccgagacagcatttcgaagcggaccattcaaagtgatcttcaattcaaaaaaactgcttaatgttattgccaagcttgttgttgtattgggaatactgcgaggtacgacggagtccagtgatttgaaaaaaggtttggttaatgctattcaagacctatatgatgttgttcatcatgaagcgttttcggttgatatgagtgtgtttactccatattactctgagattgtactctacaacatggctgaacttcagaagaaaaacgaagatggtataactacactgttttatctccagaagatttacccagttaccagtgctgatttcaaaagtcaacgatgtcatatatctaagaacggaggtccttgctactggagttacaacatggctatttctacctctggcatgactctatgccttcttgccatttctgtggtattttttctcaagtctttcgtcattaccttctcgtttggtatgggtgccattccatggctcatgatgtctgagttttgttttaccagtggagacacggagattggaggacagaagggcgcagcacaggactacagcgaggatgtgatagatggtgatctctgcgagcagtatccctccctcctagctgatatgcagaggaagattgctaatgagctggacagaactccgacgcctgcagcactgcttggtgaggattgccaaggaggaagactagaacaggcaagagcagcgctaatcagtgacagagcatga

SEQ ID NO: 33677 - DNA, 237 bp, Zea mays
  Peptide Sequence Number=SeqID_75456
atggcgcggtggaggaggatgtcgcaggggatccaggatctcatcgcggcgtgtgcggcgggcgtggtggggacgcgcgacgcgagatcaggtggcggccgcgggatggagaggcagaacatagccgcatgtggacgccgcgcagaaatcggaggccgccccgtcgccgccatcatcggtcccaacctcacgaacgaacacggcgcagggagcagagatcggctgcgtgaaatgtag

SEQ ID NO: 33678 - DNA, 399 bp, Zea mays
  Peptide Sequence Number=SeqID_75457
atcaccgtctctttcactgtcgtcgtcctgaatgccgccttccgctcctccatccagtctaccagctcctggaaccgcgccgcccgtcgtgacccccgcgatggccgcgcgcaccatgcccgccacctcggggagcggcacgcgaggacgtcgggggcggccatggcgcggtggaggaggatgtcgcaggggatccaggatctcatcgcggcgtgtgcggcgggcgtggtggggacgcgcgacgcgagatcaggtggcggccgcgggatggagaggcagaacatagccgcatgtggacgccgcgcagaaatcggaggccgccccgtcgccgccatcatcggtcccaacctcacgaacgaacacggcgcagggagcagagatcggctgcgtgaaatgtag

SEQ ID NO: 33679 - DNA, 216 bp, Zea mays
  Peptide Sequence Number=SeqID_75458
atggtgcgcgcggccatcgcgggggtcacgacggcggcgcggttccaggagctggtagactggatggaggagcggaaggcggcgttcagggacgacgataagtggacagagatggtccaagtcaacaagagtgactatgacaatgtgaaggttgtcctctacctcaaagtgaataggaaagaaatctgggatctttgtggtcttaaaaaacattaa

SEQ ID NO: 33680 - DNA, 219 bp, Zea mays
  Peptide Sequence Number=SeqID_75459
atggcgggcggaaaagagctcgccggagctaaggaggggtggctggccggtgatgagatatggagcccggaaatccggtctatctccctgatcatacccgaggagcccggaaatccggtctatctccctgatcatacccgaggcaaatccagggttttgtcgtgtctagggctcacgtcccaatgccatcttctggcatgcgacaaaggggttagttag

SEQ ID NO: 33681 - DNA, 207 bp, Zea mays
  Peptide Sequence Number=SeqID_75460
atggccgaagctctggtggcaatggcgggcggaaaagagctcgctggagctaaggaggggtggctggccggtgatggtgagcgtgggagatatggagcccggaaatccggtctgtctccctgctcaaacccgaggcaaatccagggttttgtcgtgtctagggctcgcgtcccaatgccatcttctggcatgcgacagaggggttag

SEQ ID NO: 33682 - DNA, 1068 bp, Zea mays
  Peptide Sequence Number=SeqID_75461
atgacttctcacggatcctcggacggagggaacgcacagtcccacacggacggacttgcacgagagggttttccccgtatcttgtgggaggtgcttcagggagccggttacacgacgcctccccagtacgcggtgcagctgtttgagaagcaccgagtgccccgctgtagggtgaggatgaccctggagcctcatcccctacagccaggctggcgttcgttggactccgagtctttcggataccgggctgaggatactatcgaggcgattgctctccacgggctgaccaccttctgtggttttcaccccttggagctgtctactcaccccattggcttgttccctgctaaaaaggaggacgacccaatgtggaaagaccgagtggagcatgccaaggatatatgggctctttacccagggcagactgcgcacttgacggtgcgatgcatggatgctctgtatcgtctgcaggtgaggcgaggagaggcaatgtctcatctgatggcattattggaggctaccaagattaccttggacaacagagaggaacttgtggtagacctgtccactaagatggtggaaaaggacctacaggtggaacagatgtccaacgagatccagaagcttgaggagctagtgggaaccagggagaacaccattgagatgtcgtcggggactagcgccgccgcccactctatctctcccttccctctcaccacctcctcgtcatcttcagcgtgcacgctgcgcgtggccgtagtggggggtggccccgcgggcgcatcggctgccgaggcgctggcctcgtcgagggcccggatgcgggtgttcctcttgctgctcgctcgtgccatgggttccaaagcgtccttctgcgtcacgttcctcttgctgctcctcatcgccgccgccgcctggggacctgctgcacaggccgacgacgctgctcttcaaatgtctgtccaggatgcaaacatgtccagtgacactgatatgagtaaggaagagaagaaggaagacaagtcagacaaaacagaagacgagaagaactgcttcaagctagagtga

SEQ ID NO: 33683 - DNA, 249 bp, Zea mays
  Peptide Sequence Number=SeqID_75462
atgtcaatggagggtggtgctttaggatctacagctgtgactgactctgctatggcaaaagctggtgcagttgaccctgacttagcgttagctcttcaaatgtctgtccaggatgcaaacatgtccagtgacactgatatgagtaaggtgtttgaagacataacgtttgtgtcatctatccttaattcacttcctggtgttgatccgaatgatccatctgttaaaggtctctgtattgtgatgcaatga

SEQ ID NO: 33684 - DNA, 441 bp, Zea mays
  Peptide Sequence Number=SeqID_75463
atggcatcgctcaccaacgtcgcctacgtcgatggcctcttccgctgccagtccccgccgtcgaatccaggcgacgaggacaatttgggagcctccacgttcggtcgctacccggagaccctggagcgcatggcccgagcgctgcgggagatcaacaactcaccgctcgccaagcagacaagattgtatcatccaacatcacatcttcacatactctgtttatatgcagctcttcaaatgtctgtccaggatgcaaacatgtccagtgacactgatatgagtaaggtgtttgaagacagaacgtttgtgtcatctattcttaattcgcttcctggtgttgatcccaatgatccatctgttaaaggtttctttatttatcttcttaaacaacaagagaagaaggaagacaagtcagacaaaacagaagacaagaagaactga

SEQ ID NO: 33685 - DNA, 117 bp, Zea mays
  Peptide Sequence Number=SeqID_75464
atggaggttaaggacatgcgccattggaaaatgagaacgatccagttgaagagcccgaggaactcgcaggagaagcccctgagcagcagtcggttggtgaaggcaagtgtcccttga

SEQ ID NO: 33686 - DNA, 829 bp, Zea mays
  Peptide Sequence Number=SeqID_75465
agaacgatccagttgaagagcccgaggaactcgcaggagaagcccctgagcagcagtcagttggtgaaggcaagtggttatgagattgatgattttggttatgactatggtgctgctagtccactacagccaaacaggatacttgctgagtatgttgatgcgaagatgaagctgtggaaggagacttccaggagttccaagattacgacgagttctaggtgtgggttagcggcaacccccagtcggctgcctgtgaaggccgcgatggctcgacttagacacactgcacgaaagtcagtcatccccttcttaccctcccgccttgctgagcgtccgcttcgccgtcccgtggtcggacagtccagccacttggagagactacaccaccgcctgcgtgaggagcaggagcgtcgacgacaggagcagcagggctcttctttctcgctccaacaggagatagagtccgtgaggagctgctcccctgtgcttcctctggaggcgccccctgcaccaccactgggcgccccagcttctggagtagctgctggaggagacccagatgacggaggtggcgacgacagctcgagccacgacaccgacttctctgctaaccctgagccggaaggatgggttgctcgacccatcactcgcgacgctgctcgcgggtgtcacttccacgatgcgctcgacaccctgctacgtcgggcatttaaccggcatacttggtccgtcgagtatcgctgtgtggtctaccagcatagtcgcggggtctacccggaccgctgggagacaacctgcttggtgcgctgtccggagaacagtctccagg

SEQ ID NO: 33687 - DNA, 1095 bp, Zea mays
  Peptide Sequence Number=SeqID_75466
atgggacaggttggtgatgatcacatcgagggaaacaccgtactgaagttggacgaaatgatgataattcaacccacaggtggtactcctgattcagcacttcccataacagattcagatgtgaaggatggttatgccttcatagaggtcgtgcaagtgcaggagactgttgtatctatggacaacatcaaaatacccaagaaggttacagctgaattgcaggagtgtgccggtgcacctttgattaatggctccaggcagaggcaagtaggcaaccatcaagcaatcagtcaccacacatccgactccaccgctctgcccgtcaaccaggttaccagtaccaatgtccagaactctagtgaagtgcccgtccgtcgccgccccgcctgctggcactcgccatcgtcgactgtggctcgtcgcccacccctccaccgaccactagcacaacgacagaccaacagcctcccacatctccatgactctggcgccgccagcccgccaacgcaccacgccttctcagagttcggcttccaccaggacaagtgggcagcgccgcaacaacagacgcctaccacggtgcctctgccagtctgccaccgctctctggaccgcgtcggcaccggcagccgcctgcagtttgccacctcttacaactccacaagtccaatacagagtccctacaatcttgtaatatctagaagcgaacggatcaaggggctcaacggttggtcagcgtctcttgtgctactggatgaacttggagttcttgaggtcctcctcgatgaagttggtcgtcatcttggtgacgatgaagccggtgatggcgaaccccgtgatgaagggccggtgatgtcgaacgtcttcatcctctcttcccggagcgcgcagcgcaagggtggtggttcgacgaggtgctgctcagctcgtcctcggcgaggtggcattgttgttgctgctggtcgatcgtcatgggggtgggacgacgcgcgctcggcggtgccagcccaagctccagctccatgccgcaacagtcttcttgcttgctggcaaagctgcgagctttgggactcggatgctctctgtttcctgtag

SEQ ID NO: 33688 - DNA, 750 bp, Zea mays
  Peptide Sequence Number=SeqID_75467
atggcgcctgaggccggtcttggcggctgtcagcctcaccctgacgggtggcacagcagtcgaagcagcgcaggcgacgctgttttcctgtctggtcagccagtggagcggcaaagtgactgcggtcactttggccctgtcgaccgaggagcgtgcgtcaggataaggtgtcagacgatccttgcattaaatgctcctgcgatacggtttcctatatgcgtggtttttgttatgatctttgaaacattgcaacatgacttatcacttatcagtcctcacagtgttgctatttgtattttgtttctgaaaatttttacaggttgcttgcctaagatggtcattcggatatgtgacaaccagcatagttccagttacattgaggtgattaggtggtgctgcaagagaaacttatcacttgtctgttctcatagtgttgctatttgtattttatttctgaaaaattttacgggttgcttgcctaactgtttacgtgcatctgttcgatccgtggcttctcggcgctctcccaggcacctaggcaccagcccgaggatgacgagccacgcggacgacagcacgacgcgcccaacagccggagccgaaggccgagaggatgaagacgttcaacatcaccggcccttcatcacagggttcgccatcaccggcttcatcgtcatcaagataacgaccaacttcaccgaggaggacctcaagaactccaagttcatccaggagcacaagagacgctga

SEQ ID NO: 33689 - DNA, 1284 bp, Zea mays
  Peptide Sequence Number=SeqID_75468
atggagcaccgtcccgggttggagaggttgttggagactacccatctagagcttgatgggaagccgttcgtcaacacgcagcaggcccctacctggcgcgccaactgtcggcgtttcgaccccggggggtccctggaccgacgacctcaccctgacgggtggcacagtagtcggagcagcgcaggcggcactgttttcctgtcagcgatccggccaagtttgcttctccgcgaagcctgcccgagctgggcctcgggcgagtcgaaggtgcgtccgttgcttgaggagacccttgggcgaggcgtgaatctgacttggtctacagttcctgcccgaggctgggctcaggcgagacgagatcgtgacccgcgagtggacggagccttgaccggaatcacgcccatcaggcctttgcagctttgcgctgatgggggttaccagctgagattaggagtcttagggccaactcccccaccaaaccctaatcactccggcgccgcgccgcgcggacttgcctcgatccgctccagcggccgcctgccgaggcggctgtgcggtggatccaacctgccgtcttgttgcgcctcgtgcatcaacgcgaggctggtcgagtaccacacgaggctgcgcatgatgaggagcctccgcgactccctccacggccgaatcgctgcacgcctcgaagccaagagaaaaacagatgagcagcggatctggagaacaagcaaagaacaggatatcatggagttgaggaatcggctcactgaattgaagagaaaaactgccgtagacaagacagaggtcgagcaggcatcgagtgatcttaaggcaaaaactgtgccattgaatttggctcttgtcacgctaaaaaagagacgagctgatgcagtggccatgcacaccaatgccatgaaggttgctcagatgaatctcccaactcccccaccaaaccctaatcactccggcgccgcgccgcaccgcgcagacctgcctcgatccgctccagcggccgcccgccgaggcgactgtgtggtggttgcgcttgcgctttcacgcgcaggtccccgtgggtctctgcgcgcagcgggacccgtccacggcggtgaggcgcgggcttcaaggcgggcgcaggcggaggggcagaattgctcgggcgatgacacggaggctcgcggccgcggcttcgcatccgaggccgtgaatgggagtggcggagcgctgcgggcggcggctgcgtacatggaggctggggcaccgcccctgatttggatgattttggatctg

SEQ ID NO: 33690 - DNA, 519 bp, Zea mays
  Peptide Sequence Number=SeqID_75469
atgaggagcctccgcgactccctccacggccgaatcgctgcacgcctcgaagccaagagaaaaacagatgagcagcggatctggagaacaagcaaagaacaggatatcatggagttgaggaatcggctcactgaattgaagagaaaaactgccgtagacaagacagaggtcgagcaggcatcgagtgatcttaaggcaaaaactgtgccattgaatttggctcttgtcacgctaaaaaagagacgagctgatgcagtggccatgcacaccaatgccatgaaggttgctcagatgaatctcatggcaaccacctcagattgtatgaaaatgcaatcaaaatctgtaaagcaactttgcagattgttcccaatgcgacgagtccccgtgggtctctgcgcgcagcgggacccgtccacggcggtgaggcgcgggcttcaaggcgggcgcaggcggaggggcagaattgctcgggcgatgacacggaggctcgcggccgcggcttcgcatccgaggccgtga

SEQ ID NO: 33691 - DNA, 432 bp, Zea mays
  Peptide Sequence Number=SeqID_75470
atgacatactcctcggtgcctaagatgagacccaactcagatgtcgagctactggacatcatcgactcagagatcaagtacgcccgaggactcaggactgcgatgaccacgataggagtgatctggatcatgctagcaaagtcttatgactatcatgttgcgcttgggcaaacatattggaagaagccgaggggagactacgggacgacaagcgcagaaggtgggctagacgatggtgctgccatcacgggcctgtacctgttccgatccaacctatttgggatgcagtactcgcgcaagcgctacttcgtgctcgaggacgtcgcgctccgctgcttcaagttcgcgacgttctccaagcgcgagtatctgatggcgaaacctcgaaacaatcttagaacacctttggacacattgctagcagcactttga

SEQ ID NO: 33692 - DNA, 574 bp, Zea mays
  Peptide Sequence Number=SeqID_75471
aggccgcgcggcccagaggccttacgtcaggctccgcctgctggctcacgtcacgggcagtaggccacgtggcagcatcgggtgtccgcctgagcggggagctgaagcgtacacggtatggtccggacacgtgtcggctccggacccccgcctggccttggttaaggcctgggtattcttcatcccaaaatctcgggaccctgctgtgagtggcccagaccccacacagaggggtccggaacccatcctaggggtccggtttgcgcccgtggaggtcccggacctctcccgaaggtccggtctacatatacaggggcccgggaagaagccgaggggagactacgggacgacgagcgcagaaggtgggcaagacgatggtgctgccatcacgggcctgtacctgttccgatccaacctatttgggatgcagtactcgcgcaagcgctacttcgtgctcgaggacgtcgcgctccgctgcttcaagttcgcgtcgttctccaagcacgagtatctgatggcgaaacctcgaaacaatcttaggacacctttggacacattgctagtagcactttga

SEQ ID NO: 33693 - DNA, 942 bp, Zea mays
  Peptide Sequence Number=SeqID_75472
atgggaactctgtggccgctcctctacctgctcgactcgctctcctcgcagtaccgcgccgccgtcgtggcttcgtgcctcccaaatcttcccatcgccgccccaccgtggaatgccacctcggggacggtgccgggcgccggtggcaggccgggctcacgggtgcacggggcgccgctgggcggcctggtgctggtctccaaggatccggacaacatccgcgacatcgccactggaatggttgtcaatccacgcccatttattgaagtccagtctgctgctcctaaccatatagagaatgctttgagagatgtacacaagagagccacccaaatgcttgcccaacaagcagtgggaaatcagctccagcttttaattgtaattcttcctgaagttagtgggcgtaatacggtggtggcatcaatggactggcctgaaatcaccaagtacagaggtctggtttctgctcaaccacaccaagagataatagaagatttatttactgtcagtaaagatccacagatggggaacaacgttaatggtggcatgatcagggacggtgtaagtgaaggtcaattcaaccatgttctccttcatgaaatggatgccatcagaaagaaaaggcatcacacaaggcttttccctgaggttcacggaaggcgtgatatgactgataaaagtggaaacattcttcttggaactgtggttgaccaaaagatttgccaccctaccgagtttgatttctacttgtgtagtcatgctggcattcagggaacaagtcgcccgacccattaccatgtgctctatgatgagaacgaattaactgctgatgcactgcagtcactgaccaacaatctttgctacacgaaaccatgctcagctcccaagtggaaggaaatgacaggaagtggcatatttgctgctaggggcgagactgaatga

SEQ ID NO: 33694 - DNA, 456 bp, Zea mays
  Peptide Sequence Number=SeqID_75473
atgcagggaactactgattgctttccgcaaagaaagacaaacagaaagcttgagaggataatattctatagggcatgtgttcccagattcctgtttttggttcatttattgtatgctgttgagagaaaaaagaaaaggcatcacacaaggcttttccctgaggttcacggaaggcgtgatatgactgataaaagtggaaacattcttcttggaactgtggttgaccaaaagatttgccaccctaccgagtttgatttctacttgtgtagtcatgctggcattcagggaacaagtcgcccgacccattaccatgtgctctatgatgagaacgaattaactgctgatgcactgcagtcactgaccaacaatctttgctacacgaaaccatgctcagctcccaagtggaaggaaatgacaggaagtggcatatttgctgctaggggcgagactgaatga

SEQ ID NO: 33695 - DNA, 336 bp, Zea mays
  Peptide Sequence Number=SeqID_75474
atgcacaaatgctgtcggtactgccgattcaaggaaagcagtgagatgggtggagtactgaacacttatgggctcattgaaccggactttgaagagcgtcgagccaaaagaattggaatgatggatgccatatctgcccttatccagcaacagatggctattgactccatgtcgattgggtacaataccaccatatcagtgccacaaatgcatgcagtttgcccggagctcctcgagaagaatcttcagccgggaatgcgagctctcaacgttggttcatggattggtgtggctgctggccttgttccttctggtctagctaggtgctgttactag

SEQ ID NO: 33696 - DNA, 3396 bp, Zea mays
  Peptide Sequence Number=SeqID_75475
atgcaggatattctagacgcactgacgcgcatggaggcacgcttgaccgatgcgctggtgggtcgctgcggcgagccgtacgcacgcgagcacacttcccccttcgatggatgcgcgcctccttcttccatcgtcaacacacagtaccgcgacgaggcaatccttccgcctctcgtccacgacgacgctgcgaaggtggcgtccttggattcgggaaacgactttggcctgcagcagaccgccacggtgcttgcgtccctggggtccgacgagatgtcttcgtcgaccacgctcctcgccggctccatatccgaccgctacattccgccgttctacgacgacgactgctacaccatgccacagccgtttgtcgatactctcgccaaccccgacgatgacctcctccaggagctcgacgtgttggacgaggatgccgcgagcgccaacgcggctgacgacgattcaggcgctgtcctcgtctatgcgccgctcgactcgaacatcgacagcagcggatcaccgcgctacccgtgcctccccgagggtgcggtgttgttccatcgggacccggacgagaaggtcctcatcggcgggacggagttgtccggcgaagtccgccgcctccgtttctccttgccgtcaccagaccaggcgatgaaccccgcgctcgtccccaacaccgacgcagaggaggaggaggttctcaccatcacgcccaccaagtgtttgatgagagtcctcaaccggcgcacctactccgtccccaacctcccggaggaaaaggtgcagaacttgatccgcgtcggcggcgacaagctcaggtttcccgatgacaggaccatgtttcccaacagcgccaacgcctacaccgacgacattggcaggcttgtcctgtcccacggctccatccacatcgcgctcgacatcgaatgcgggatgacgagctgggccgcctacctgttgtcatgggacatcctagccatgtcgttcgcgctgcgggactctcacgaggcgcggatgcagttcacgctggtgcgcggtgtgccagtcatgattggtgtgctcgcgtccaaatgcttcgcctacccgacccgtgccttacatatggcgcactgcttctgctgctacagccctttgcaactctacgatggactgtacttgatcgaggatgatcgtgtactgcatcccagagggtactggatcctgtccggcccgccaatcaactggaagaagtactggaaggggtgggagcggacgaaggaggatgcagctaacaactgtgcccatggctactacactgctggaaagggaactgtgctggtagctaacaattttggtgatgacctctttgctggcagcaatgagatcaaacaaccatggcctccacctctggagttagcgtgcttggattggaacatcatggtcttctttgtgtttcgtgtttccacgaccctcttcatcgacattgactcagctggctttggcactggtctcgagctgtggtctagcagggccagcgacaaaaacaagttcatgcttgaacaactgcataggaacaagatgtccaatagggccacccatgggtgttatgcctgtcgacggccaatccaccttcgtggacaggataccatttgttccggctgcaatgatggttttatccaggaaagcagtgagatgggtggcgtactgaacacttatgggctccttgaaccagactttgaagagcgtcgagccaaaagaattggaatgatggacgccatatctgcccttatccagcaacagatggcagaaataggaagagatagtttgtttgatatacatggtcgacaagggacttgtactgaacatagaaggagatcaactgctattcatactctcataattgggtgcatcccttctcctgcagttggtagtagtgaatctagtgatgtcaatattatcatgaggggaggctctcgagttcgcgctgtccatccaaattttagtagtctagttgttggttcaagtctggaagctctatttgagcatctactactccaaaacaatcgtcaagccacacctcctgctccacagtcagctattgactccatgtcgattgggtacaataccaccatatcagtgccacaaatgcatgcagtttgcctgaagctcctcgagaagaatcttcagccgggaatgcgagctctcgacgttggttcagggattggtttggccgctggccttgttccttctggtctgagtgctgtcagcagtggccaaggtaatttttcagtatttgtttgggatcctggtgatagcggcttggttacctctagtctgagtgccgtcagcagtgaccaaggcaatttttcagtctttgtttgggatcctggtgatcgtggcttggttacctatggtctgagagttgtcagtattgcaagagttactgctattatgtcaggcacatatgcaagagctgctgctacaacttcctctccgaagatgcgccagacccagttcagatggcgggccgaagagaggcgtgatgcattcaacaatgatgctaatccacagatgaagttgattctacaccgtcagcgtcttgggggcaagccgcgtttcaaggagtggggaatgttaggagtggctgccatgtggggccattgccagggggcaagtgttgctaacaatttcgcccaagtttttatagagaaaccaaatgttgttccttgtgaagtttgttatgaaacatatgcttgtgggttcaattcaatcagcaggggggaggaagtacaatttgccgggcgtggttgttgcagtcgtgctgactacagtaacagccttgaacctcgtagtttgcctctgtttctggaggcggcggcggcggcggcgtggaccaacagcacaggcgaagcagccatcgttaaacctcgaagaattgaccgcacagatcccacgtactccgtcgaagcagaggacacagaaatggtggactccatgatgatcgacgtcgctaccctacgagctgcaacgggtgattttgacgagagcaacaagctcggcgaaggcggtttcggtgctgtgtacaagggcgtcctcccggacggcgacgagatagctgtgaaacggttgtggcagtgctcgactcagggactggatgagctgaagaacgagctcgcgctggtagccaagctgaagcacaaaaacctcgtcaggctcgtcggcatctgcttggagcagcaggagcggctgcttgtctacgagttcctccccaaccgtagcctagacctgatccttttcgatgccgagaaacgtgagcagcttagctgggagcagaggtacaggatcataaacgggcatcgcccgaggcctgcagtacctccacgaggactcccagcttcgagtagtccaccgtga

SEQ ID NO: 33697 - DNA, 2841 bp, Zea mays
  Peptide Sequence Number=SeqID_75476
atgcaggatattctagacgcactggcgcgcatggaggcacgcttgaccgatgcgctggtgggtcgctgcggcgagccgtacgcacgcgagcacacttcccccttcgatggatccgcgcctccttcttccatcgtcaacacacagtaccgcgacgaggcaatccttccgcctctcgtccacgacgacgctgcgaaggtggcgtccttggattcgggaaacgactttggcctgcagcagaccgccacggtgcttgcgtccctggggtccgacgagatgtcttcgtcgaccacgctcctcgccggctccatatccgaccgctacattccgccgttctacgacgacgactgctacaccatgccacagccgtttgtcgatactctcgccaaccccgacgatgacctcctccaggagctcgacgtgttggacgaggatgccgcgagcgccaacgcggctgacgacgattcaggcgctgtcctcgtctatgcgccgctcgactcgaacatcgacagcagcggatcaccgcgctacccgtgcctccccgagggtgcggtgttgttccatcgggacccggacgagaaggtcctcatcggcgggacggagttgtccggcgaagtccgccgcctccgtttctccttgccgtcaccagaccaggcgatgaaccccgcgctcgtccccaacaccgacgcagaggaggaggaggttctcaccatcacgcccaccaagtgtttgatgagagtcctcaaccggcgcacctactccgtccccaacctcccggaggaaaaggtgcagaacttgatccgcgtcggcggcgacaagctcaggtttcccgatgacaggaccatgtttcccaacagcgccaacgcctacaccgacgacattggcaggcttgtcctgtcccacggctccatccacatcgcgctcgacatcgaatgcggggtgacgagctgggccgcctacctgttgtcatgggacatcctagccatgtcgttcgcgctgcgggactctcacgaggcgcggatgcagttcacgctggtgcgcggtgtgccagtcatgattggtgtgctcgcgtccaaatgcttcgcctacccgacccgtgccttacatatggcgcactgcttctgctgctacagccctttgcaactctacgatggactgtacttgatcgaggatgatcgtgtactgcatcccagagggtactggatcctgtccggcccgccaatcaactggaagaagtactggaaggggtgggagcggacgaaggaggatgcagctaacaactgtgcccatggctactacactgctggaaagggaactgtgctggtagctaacaattttggtgatgacctctttgctggcagcaatgagatcaaacaaccatggcctccacctctggagttagcgtgcttggattggaacatcatggtcttctttgtgtttcgtgtttccacgaccctcttcatcgacattgactcagctggctttggcactggtctcgagctgtggtctagcagggccagcgacaaaaacaagttcatgcttgaacaactgcataggaacaagatgtccaatagggccacccatgggtgttatgcctgtcgacggccaatccaccttcgtggacaggataccatttgttccggctgcaatgatggttttatccaggaaagcagtgagatgggtggcgtactgaacacttatgggctccttgaaccagactttgaagagcgtcgagccaaaagaattggaatgatggacgccatatctgcccttatccagcaacagatggcagaaataggaagagatagtttgtttgatatacatggtcgacaagggacttgtactgaacatagaaggagatcaactgctattcatactctcataattgggtgcatcccttctcctgcagttggtagtagtgaatctagtgatgtcaatattatcatgaggggaggctctggagttcgcgctgtccatccaaatttcagtagtctagttgttggttcaagtctggaagctctatttgagcatctactactccaaaacaatcgtcaagccacacctcctgctccacagtcagctattgactccatgtcgattgggtacaataccaccatatcagtgccacaaatgcatgcagtttgcctgaagctcctcgagaagaatcttcagccgggaatgcgagctctcgacgttggttcagggattggtttggccgctggccttgttccttctggtctgagtgctgtcagcagtggccaaggtaatttttcagtatttgtttgggatcctggtgatagcggcttggttacctctagtctgagtgccgtcagcagtgaccaaggcaatttttcagtctttgtttgggatcctggtgatcgtggcttggttacctatggtctgagagttgtcagtattgcaagagttactgctattatgtcaggcacatatgcaagagctgctgctacaacttcctctccgaagatgcgccagacccagttcagatggcgggccgaagagaggcgtgatgcattcaacaatgatgctaatccacagatgaagttgattctacaccgtcagcgtcttgggggcaagccgcgtttcaaggagtggggaatgttaggagtggctgccatgtggggccattgccagggggcaagtgttgctaacagagctctttgggtggagcagaggaaggagccgaggaaggtggctggagggagatggagcagaggacgccgagtggagttaaggaagcaggtgcgcgctcgtggggaagaagctagagtcttcagcggcaaagatttttacagtgagcggcggatgagggagagagtagcgtga

SEQ ID NO: 33698 - DNA, 480 bp, Zea mays
  Peptide Sequence Number=SeqID_75477
atggcccttcggaagggttcgacagccgccccagagcactcgggcttcaggctcattactgatcaggggttcgaaggctggcccttcggaagggttcaacagccgccccagagcattcgggcttcaggctcattactgatcaagggtttgaaggctggcccctcggaagggttcgacagccgccccagagcacgaagagcgagggatgactctgggtacgtccgttacatggccgaggctcgggctacgctcccgagaaaggcgacaaaggggcgtatgataaaagtcgagacagtccttgatcgtcctctcgctccgtgcagaggctcgggggctgctctcgcaaacccagctacggccaaaccgttgacagcgtcaataaaccagcctgaaaacttggaacctgaccatgcacccgggctaaaatcagatcgcatgagggaacaaccagaccggccgaggcatcatgaaaggcattaa

SEQ ID NO: 33699 - DNA, 294 bp, Zea mays
  Peptide Sequence Number=SeqID_75478
atggcgggcggaaatgagctcgccggagctaaggaacggtggctggccggtgaggccttgcccgggtggttggcacagcagtcggagcggggcgagcggcgctgttttcctgtcaggtcgtttggccgtagccgggttgcgagagcagcccccgagcctctgcatggagcgagaggacgatcaaggactgtctcgactttcattatacgccccttcgtcgcctttccgcaaggacaaatgggggaaagcgccatgttgccctcggagggcaccgaacatggttgtttccagtga

SEQ ID NO: 33700 - DNA, 333 bp, Zea mays
  Peptide Sequence Number=SeqID_75479
atggccgtgatgggttcaacgtcggaaaagatgtacctctgccaggtaccaaactttgggtttgaaatgattaagctgagaccgggcgggggacttgcacgagaaaggagtctcggtgtagtgtctccgtctgagtcgattaaggaccgtctcgatgtaggcttgatgaccgaggaccctttaactggtcacatgcctcgtcatggtaagaatttctacaaaacagagtctttgattattgagaagccttaccttgactcccttataaccagcatacccttgagagtcttttctttagtcggggtggtaccaaaggaggaacgccaggaatga

SEQ ID NO: 33701 - DNA, 456 bp, Zea mays
  Peptide Sequence Number=SeqID_75480
atggcattcattcttatatatatacctatatggttatatttagaaaacgaggaagaggttgaggtagaagaagagaagactgcaccaccaccacctgtggaacatcaggcagggaattgtttttactttgacatctgcggatccaagcctgactcacctataaacgaaaggtcttgttttacaaaagatgatgtggcaaaagtgggtgggatgttttcgaaaataaaacttgatggtggatccatcatgaccgtgatgggttcaacatcggaaaagatgtacctctgccaggtaccaaactttgggtttgaaatgattaagctgagaccgagcgagttacttgcacgagaaaggagtctcggtgtagtgtctccgtctgagtcgattaaggaccgtctcgatgtaggcttgatgaccgaggaccctttaactggtcacatgcctcgtcatgggtaa

SEQ ID NO: 33702 - DNA, 228 bp, Zea mays
  Peptide Sequence Number=SeqID_75481
atggcgccttcaagccccccctggtggatgcgcgacgcaacgcagaggtcttgcaacgagccagcgtgttcgttcaaggacgagagggagaacaacggattcatccccaccaggcttcaggtcagatgtggttctaaagctatgtatgcttatttggttcttgctattcttatggagcttgcagcccttggtcttgtgcttttctcttatttactccaggaattatga

SEQ ID NO: 33703 - DNA, 1185 bp, Zea mays
  Peptide Sequence Number=SeqID_75482
atggcgccttcaagcccccccatggtggatgcgcgacgcaacacggaggtcttgcaacgagccagtgtgttcgttcaaggacgagagggagaacagcggattcatccccgccaggcttcaggtcagattctaatggccctctctgaagaaatgagcttttctcatgatgacaggatgattgcaattcatggtcactggtggaaccaacggcatcggtgcaatgggagtgtcatctggcactcgactccctccccgaaatggcgacgccttaggccgtcggcgccgcgtgcctcctcctcgcgccgcctcctcgtggtggcaccagcgcgtgttgcgccaacggagatactgttctgcacgactcagaaggctgtacaagtctctcaagtttttgcatggcggagaaagcagttaaatgggcgtcacttttcacaattatattctgtaataggagattctaggacatctctagaagcttatgcatatgcttcatatatgaaaggtgctttattttctgagcaagacaagaatatagatgccacaataataaatttcaagaatacaagggctatatatgaggagtctgggaagtctggcagtatagaaaatgaacttttatgctatcagtgcattgaagaagtggatcctatgattgatttatgttcacataaactaggtggatcatatttacaagcacatgaactcctggatactgctaatgatcttctcaacgaagatgaatgtatttattttcttactgcacctctgacttaccttgatttccttttaagagcccacaacctcattgggtgttgccttcagctatatatgaaccagaaagaagtggtggacaccctatctctccaggcaaaaaaatgcagatcaacaaaaaaactcactatgaaccaagttatgtggcgccagacactaagagatatagaaaaaggaggagctcgcggatgcgcttgggccgtccccaagttctacatcatcagcatctcccttggctgccatgccgtctggggcgccctcaagtacatccccgacagcaagatcaagaagtgtgtcaagaagaccaaggatgagaagaaagcgacgaaggcaaaggtgaccaattccttgaagacgcaaacaaatggcacaatccagaagggttccaaggccccaagtcgggtgatggcgtag

SEQ ID NO: 33704 - DNA, 1827 bp, Zea mays
  Peptide Sequence Number=SeqID_75483
atggatatagtggtggagaaaggaaatgtcgatgttggcaatactgctgaaccatcgtatgaggttgtggctagaagtggttgttcagcacaattgtcaactaatgacaccgatgaacatgaattggatgtgatacacctgacatctttggatgttccaaatgaatcaagtcaaataagttctgatgcggatatggtaaagcagaaccaacaagatgctttggacacacttattagaatatcacaacataagaaaccaaagaaattgaatgtagctcgagttgtctctgaagattataagtgcaccccagaagatgttcagcttattgaatacattaaaacattaccggggaaacaagttgtggtgaacatcgacagcgcatggttaaatagaaatgatatggaatgtctttttcatggtgacatgcaattgtctgacaaagccctcaatgcatatatacactgtattaggggtgaagagcatttacttcatagagaaggtggaaaggtcttcttggagaacacagtcatttccagtctgcttaagcgtgatggcgaccctaaggtgctcttaaattgtgttccttccaatgaatatagaagattttcactggtacctggcaattctgaatgcaaaaaaagtgagttaaaaggtctagaaagacagattaaacttgcagcaaaacataaagagctttaccaaggcaagtggtcgaaccttgatgttgcatcatggccagttatagagaagatcacaacacaaatgcaaaccgatggggtatcttgcgggctatggatgataaactatatggaatactggacaggatcctccctatctgataacgtaactcaggatgatataacaatgtttaggtttaagctacctgcaatattatgggactcgagattaaacacaaagaaaggacatcaaaatcttgaccacaatgtggatgaagatggagagagttcaagtgatgttcaaataatcgatactccattaacatcaacaaacacgcaagaactgatgtttgtattatgcacatatatcatggggatagacaacgacaaatatttaaagaaacattggattcagagcactaaaccttatccaatttctttaagtcttcaaaaacttaaagatatattggatgtaaataagccgatggatacagattgttttaacatggctgttcggatgatcgcatgcaatgattccttgttcttgttggaagacaaataccactacatggatctacagttctgttccataactaaatttggtcgagaccctcgccttcatgcaaagccagatatcaacatgttggcaaaattattagaatgttggcctgacatggagtacgatgtttcagattgcaaacaaattctattgcccttttctttcttgggtcacttcaccttatatgtacttaacatggacactagaagcatctatataatggaatccatgcctataccatcatggtttaagggtgatcatcctagcatgcattatattcataatatacattatattgccaataatatgaatgctgccatggaattggccaatcctacatggaaagacgatatttatatgtggcgtcgtatagtaccaacatgggttccaagaacattaaactgggatttatctggctttcttgttatcaactttatgcacgattggaatggtataaggttaccctgcatttgcactaatgggaatgacctgaggaccaaattcttagtagaattattgaagtacaaggacaatgaatccaaagacaatattccagaagaaatacaagaaattattaggcacatcagatag

SEQ ID NO: 33705 - DNA, 477 bp, Zea mays
  Peptide Sequence Number=SeqID_75484
atggagtacgatgtttcagattgcaaacaaattctattgcccttttctttcatgggtcactttaccttatatgtacttaacatggacactagaagcatctatataatggactccatgcctataccatcatggtttaagggtgatcatcctagcatgcattatatccataatatacattatattgccaataatatgaatgctgccatggaattggccaatcctacatggaaagacgatatttatatgtggcgtcgtatagtaccaacatgggttccaagaacattaaactgggatttatctggctttcttgttatcaactttatgcacgattggaatggtataaggttaccctgcatttgcactaatgggaatgacctgaggaccaaattcttagtagaattattgaagtacaaggacaatgaatccaaagacaatattccagaagaaatacaagaaattattaggcacatcagatag

SEQ ID NO: 33706 - DNA, 477 bp, Zea mays
  Peptide Sequence Number=SeqID_75485
atggagtacgatgtttcagattgcaaacaaattctattgcccttttctttcttgggtcacttcaccttatatgtacttaacatggacactagaagcatctatataatggactccatgcctataccatcatggtttaagggtgatcatcctagcatgcattatattcataatatacattatattgccaataatatgaatgctgccatggaattggtcaatcctacatggaaagacgatatttatatgtggcgtcgtatagtaccaacatgggttccaagaacattaaactgggatttatctggctttcttgttatcaactttatgcacgattggaatggtataaggttaccctgcatttgcactaatgggaatgacctgaggaccaaattcttagtagaattattgaagtacaaggacaatgaatccaaagacaatattccagaagaaatacaagaaattattaggcacatcagatag

SEQ ID NO: 33707 - DNA, 1941 bp, Zea mays
  Peptide Sequence Number=SeqID_75486
atgaagcgaagggtgtccctgcccgttttgtctttcagaccagcgactgcggcgaagggcgacgagcgaagggtggcgtctttgccttcgccccaacaatcactcacggccagcggagtggcggaggcttcgaaggcggcccgagcgctgccgctggcgggcaaacgtgttgccgacttcggcaccgacattactgtggacgactatcttggtgggtcggacgagggccagcttgctatggttgcgcctggcgcggagatcgcgacggcggccatagtgccgaaggcgaggggcgaggcccttgacgccggaggcgaggtgtcggccctcgccgtggtcaggggcgaggcgggcgcagcgacccgccggctgaagggagtgacggaggcgctgagtcaggcgacggaggcgctgagtcaggtggctgacttcgccagccgtactacgtcgggggccctcacggcggctgtgtctgccgaagtcgagagactttggacacaacatgctgacactgtccgtgagaagtcggcctccgacagcaagtgccgtaagctgacggacagggtggccgccctggagagggagaaggctgacctccggcgccaactggcgacggagaggagggaagctaacgaggccgtcgccaaggggctggctgcgcaggcggaggccaagctggcgcgggcggagggcaatcttgccaaggagctcgccaaacatctgcaagagcggctcaccgccctggagagccgcgctaaggaggccgaggccgcagtgcatgcggaggccgaacggacgcgcacgcagcttatggatacatatcgtgagctgggtgcgcggaccgatgacttcgaagtgccggaccgagagcccggccttcgctgtctgcattgggtgcaggaggagctgctggaacttccagccgtcgtgggggggttgatgtcgtacgcctccctggtcacctgcgagggggcgatgaacgcgctctctcgcgaagggtgccggcactttgaggccctcgaccaggtagatgaagattttgggcgagatatctatgaggtcgaagaccccgtggtgaaggaatccgccggggccctctatgaccgaatgtggggtctgtacggtcgtgaggtggtcagggaacgggccgaggctgcgagggctcaggcggagcgtggcgagcgggtggacgacttcggggcactgaacagcgcgctgcctggcccggagccgacccctgcggaggccgcgactggagtcgccctggaaacaaccccggagcctgtggaagacgcgccgagcgtgcccacctctgctgtggccggcgaagacctgcccccaaaggtggccgaaggcgcgcctgacgcccccgcagctgctgcgccgagcgctgaagattccgcggcggtggtggcggaaacagcggcggaggagacagcggaggctcccgcagcggcagggccttcgcaggttcaagattttgggcctgcgcacgcaaccgctactactgggtttttggcggcttcgaccgcggaagatggaaatgaatatggtgggtctgtgtctgagttttttgattttactgactctgggagctcggttgagtggactgaggagtcgtcggaggaggacttggattattttgcggccttggacgtggctgcggcggaggcttcgccacacgccgcggacgcgccagacgtgctgggtcctagcaccgggcgccgacgacgaagggcggttgcaaagcgtagggttagtgcggaggaaggggctcggcttcgcgtgagtaggggtggtcggcaggaactgttgtctttgccggccgccacgagcacaggggaaggggaactgcgaagtctttttgcgggtgaggagcttaggataatgttatttaattatagggagatggggattattcctaaggtggagccgatgtag

SEQ ID NO: 33708 - DNA, 426 bp, Zea mays
  Peptide Sequence Number=SeqID_75487
atgggtaagaacaacaagcgcaagcgtgagccaactcctccatcggaggattttggtgactcagagtactcagaggaggagttctcctctgagtctgaggggtctccggctcccatccccctgcgtgagtcgtctgacgactcagacgactcccaggggttcgcggcggaggtctggacgtacatccgggccgtcgagcgctccgggctcgagggctcggatgagtcggagtactcctcggatgaggaggactcgtccgaggaggacggtggcggcgacggcgaggacgacgacgacgacgacgaaggcggtggcggcggtgacggtgacggcagaggcaggggcggcagcagcggcagcaaggatggcgacggtggcagcagcaggggcggcagcggcagaggcagcaacagggccagtggctag

SEQ ID NO: 33709 - DNA, 426 bp, Zea mays
  Peptide Sequence Number=SeqID_75488
atgggtaagaacaacaagcgcaagcgtgagccaactcctccatcggaggattttggtgactcagagtactcagaggaggagttctcctctgagtctgaggggtctccggctcccatccccctgcgtgagtcgtctgacgactcagacgactcccaggggttcgcggcggaggtctggacgtacatccgggccgtcaagcgctccgggctcgagggctcggatgagtcggagtactcctcggatgaggaggactcgtccgaggaggacggtggcggcgacggcgaggacgacgacgacgacgacgaaggcggtggcggcggtgacggtgacggcagaggcaggggcggcagcagcggcagcaaggatggcgacggtggcagcagcaggggcggcagcggcagaggcagcaacagggccagtggctag

SEQ ID NO: 33710 - DNA, 474 bp, Zea mays
  Peptide Sequence Number=SeqID_75489
atggagacaccaaatagcaagactggaaaaggacaagatcaacctcgtcaagctcctgatcctcaaaacaactcgtccgccgcgcaaatcccctccgcgatcttcgccggctgggtaatgggatcctccgcctcaaaccgacagaagacgtcgtgggctggtggagattcctcatcggtgttgggggacgccatcgatccgctgagcgtcgtgatggagagagataagtgcgctcttgtgtggatcctcaacgagcgcgagatggttggcctcgattcgttgatcgacgggggaagactttgtcgtggagtcaacgatcggctgggagctctggcgctgggaggggatcaccggtgctgctcagactcctcgccggtggacaccgccgcgggctggaaacagccacaactcaatttgcctcgcgtgaagaagatggtggaggaccgttggatgcgcgatgaagaattgaggtaa

SEQ ID NO: 33711 - DNA, 273 bp, Zea mays
  Peptide Sequence Number=SeqID_75490
atggagagagataagtgcgctcttgtgtggatcctcaacgagcgcgagatggttggcctcgattcgttgatcgacgggggaagactttgccgtggagtcaacgatcggctgggagctctggcgctgggaggggatcaccggtgctgctcggactcctcgccggtggacaccgccgcgggctggaaacaaccacaactcagtttgcctcgcgtgaagaagatggtggaggaccgttggatgcgcaatgaagaattgaggattaatctattctaa

SEQ ID NO: 33712 - DNA, 456 bp, Zea mays
  Peptide Sequence Number=SeqID_75491
atgcaggtggcgtgcaaccgcaccgcagtggcgcaccccttcggctttgtcgcatccggcatggaggcccaagcccacacgtcatgtaaccggcgtgccggttactacatgcaagaaactacaccgccacttgcgccaatgccgcgccttctcgaccgcggaaccggtgccgcgactcgaggcagccctgcgcgcgacccaacggtgccaattgagtgcaaagatcacggggaccgggaaaggggatatttcgaaagggatccttctcagcgaaggaagcgggctccgagccctcctactgatcaggggttcgaaggctggcccctcagaagggttcgacagccgccccagagcactcgggctccaagcccattactgatcaggggttcgaaggctggcccctcggaagggttcgacagtcgccccagagcgcccgggctccacgcccactactga

SEQ ID NO: 33713 - DNA, 1368 bp, Zea mays
  Peptide Sequence Number=SeqID_75492
atgctggatgcgacgaagccacaggggtgcgccactgtggtgcggttgcacgccacctgcttcgcgcgcagtggtttggcttcttccgtttctgcttcaaggatcttcatcattcttgctggggaggagggcaggcaggtcggggcctgcccccgcgtgggccggcgacccgcttcttcctctagcatccgtgggatgaagacatcctccagctctgcggaggaggcgtcctccagccatgcgggggaaggcaaactgctgctgcctggccagggtgcagcattttgtcctctgtccgggcgactgtgggcggctgcaccgggggtcgcacaacacgtcgtacgccgcgagggcggtactcgtgttctgggacgatcccgttctcgttctcgtggcgagaacgggagtgaggacctgtcggtgcgctttggggcggccgccgctcgccggtgcggtgttggtgggcaggtggttgccgtcgttagtgctgaggtggtggtcaccagaggaggtttctccgccgacggcaccgtcagtgccacctgcgctcctggcctccagctctttggctttaatggctggttctcgtcccccgcgaggggacatgaacgagggccttccagcggtagcgttcgcactagggccatcgctgttgctgtcctaccgtccgagacggaggtcgttgccgcgctgttgtttgagaaccttcggccgctctgcgatgagctggagccggaggctgtggtgtcggcatggacagaggcggagtcggctcaaaaagaggcttcgtcggccaaggagcgggtggcttcccagggcgaggaggtgcagcagcggcggctggagcctggccaggtcatccgtgagtgggaccaaccacagagtcacgctgccgaggccgtgagccgggctgatgtcctcgggggacagctgggggaggctatggagcggctagccgaggtggagatccttccgcccgtgtcgccgtccgaggccaggccaaatctcgccgaaggcggaaacgacgccaagggtgctgctgctccctctgtcgatgatttgttcgtcggtagcagaatcgcttatccgagcgagagttacttttcacggaaggtgatgagtgaggaccccgctatcgaagcagtcgaaaagcgcgaaaggcgttctagcaaaagacctttttcgaggaaaattttgatgcagagggggttccccccttctagcccccgagggagggtcgggctttgccgaggcaaggctgacccttccttgacgccgaagtaccaaatctcccacctagaagcctcagggccgaacccctcgggcgtggtagcgtcgcatggactgctgataccgcgccgagtgtag

SEQ ID NO: 33714 - DNA, 216 bp, Zea mays
  Peptide Sequence Number=SeqID_75493
atgaggaaggaaatggttgctgcccttactgcagcacaacaggccaaccgagaaagcatcactccagtcgatcctcctttagtgatcccaactgaaacttttgaactcatcccagctgatcctcttgcaccaacaccaagaagtgaaaacaataaggcgggatatggttcaaagaccgactgtgtgttcccgacatcaagtccattcaggagctaa

SEQ ID NO: 33715 - DNA, 669 bp, Zea mays
  Peptide Sequence Number=SeqID_75494
atggagttgcggccaccggcctgggatccgtcgtcgccgcacaagggcgctgccaccgctcgccctctggattgggggccgccaccgccggcctgggaaccgttgccaccgcatgtcgaggtcggggagccacggccaccgcaggcactggccgggcttctgcgtaaagcaaggaaagggcgccttgttccatgttcttatggcaacgttaccaagccctcacctcaggtgaaagcagaatgcttcaaccgcagatataccaagctgcctcccttcgtctccgcacagctccatacggagcagcacatttcttctcttctttcacggcaactttcgcaaccagtacacagtataagtaacttggccgcagccacatacgacacaaagaaagctctgcagctccctacatcaagcagatcagcaccagccgcggcaatggcgtccacgacggcagctactgatgacgcgaagccggcgccagccgctggcggtccgcagctgaagctgctggtgggcaggcgttcgcagcgcgcttgcgtagagcgagcccagggagccaggcgcgggctcgccgtgcttggccagtgcgcgcgccgccaggcccgcgggcacgcgcagcagtccggtcaggaagtccaccgtgtccttgcgggcctccgcgtgttttag

SEQ ID NO: 33716 - DNA, 405 bp, Zea mays
  Peptide Sequence Number=SeqID_75495
atgaggttcccctgtttgacgatggacagcgcagtgcagccgctctggactgcgtccaagtggcggctgcgctggagtttgccgccgacggtggcggcccccgatccagagggcgagcggcggcaacgcccttgtgcggcgacgatggatcccaggccggtggccgcaactccattacctcgacgcgcggtggcggaggttcctcgatccgcagcgaggcccttgtgcgggcaagcggcggcgtccccgaagccccgaggaggcggcacttccaaggccgacgagcaagcgacacctgtcgacgtgcgagtagcgacggcgacgcatgaggcgcgatgttcgagcgagcgacgtcacggaaggggcgagatgcgcgcagcgatgatcgcgcgtgacatcctctaa

SEQ ID NO: 33717 - DNA, 438 bp, Zea mays
  Peptide Sequence Number=SeqID_75496
atggatcctatgggtgtgctactaacgcttcctagtcgaagctgtgttcaggtccaggtctcagttgaggctgtctcctgggggccgcagccaactcttttaggtatgctggtatccagcctcgacacgtcgagcctacatcccaggggggccaggtatgacctactcgacatcagtagggtcgcgctggaagcgcgcggccgccatctccgcgacctcttgtacgacctcccgggcggcgtcttcagcagccaggccagcgatcaccattggaggcggcaccgaagccatcaaagccaaagagatggaggtgcgaaagatggaaccgcagctcagctcgcttcccgccttcacaaggctggtgaacatcctttcctccgaatgctggaggaagaagcgggaaggagcgtcgcccccacggacatcttgcagaggtag

SEQ ID NO: 33718 - DNA, 369 bp, Zea mays
  Peptide Sequence Number=SeqID_75497
atggccttgctagatcctcccgagcgcctccagcccaaggttgcactaaacttggtgcgcaacctgctcggatggggtatgtcagcgttcgccggaaagatccgtgtcggtgcctctcttcacggcgatctcgccgccggagagtttgtgttcttcgtctccaacctccccagcgggttagcgttgtcgatcccatctttcttcgtgctgctgctggaggggcttggcctccaacctcaacactttatgccctgcttcatccttcaggcggccatcgtcgcctacctctgcaagatgtccgtgggggcgacgcttcttcccacttcttcctctagcattcggaggataggatgttcaccagccttgtga

SEQ ID NO: 33719 - DNA, 801 bp, Zea mays
  Peptide Sequence Number=SeqID_75498
atgacctacaggctccgtgacgttggacaccaggatgatggcccccatgagcatgagagcatctgcttccgtgccaaagcaaggtatggcgagagcgctccgcctctggaggtattgactgtgagcccagagttgtatccagacatcaccgatcactacgggaagcagacgagatcggatcatccgaggccatcgggaacgggagctccagacccgccgagatcgggcccactgcgaaaaaatccccactccactcgacaggaaccgcgcccgcgccgccgcccaggaaccgcgccgccgcccaggaaccgcgccgccacgcgaagcccaggaaccgcgccgccgcccaggaaccgcgcccgccacgcgaagcccattttcctggtgccggtgtcctctgctcggccggagctcgcctccgtgctcggttctctctctttcccagctccgacctctcttctctgcccctgcacgcgcgccttccctgctccaatctccaacgccggcgctcagctcctctgctcggccggagctcgcctccgtgctcagttctctctctttcccagctccgacctctcttctctgcccctgcacgcgtgtcctctgctcgcctccgcgctcgagctccggccgccgctagcctacttcgtccctgcacatctggccaccggggacggcaacgctccggcgccggcggcggaggccagttgctcctggtccgggggcctgctgcgcagcggcgtcgacgtcaacagtattaacctcgacagcgacaccgccctgcacatcgccgcgtgctag

SEQ ID NO: 33720 - DNA, 387 bp, Zea mays
  Peptide Sequence Number=SeqID_75499
atggagggcagcaccaaagcaaggtcggagggctctatcatagcaacagaggagggcacgatagaagcagcagaggagggcacgatagaagcagcagaggaaggcacaacagaggcagcagaggaaggcatgacagaggaggggcatgagctgagagaaatggcaatggcgtgcgggcggctcaccgtgcttccccagcggtcgcgcgcgtcgatgttggccttccagctgagcagcaccaattcttcaaaaaaagctgagcagcaccctgacgacgtcgcggtggctctagcacgtggcgatgtgcagggcggtgtcgctgtcgaggttaatgctgttgacgtcgacgccgctgcgcagcaggccctcgattcaataagacaataa

SEQ ID NO: 33721 - DNA, 3405 bp, Zea mays
  Peptide Sequence Number=SeqID_75500
atgtcgctagccaagaaagaagaggtttgcagtcaccgacttgtaccgcgcttggacgagcctgcggttggtgtgcctattaagaagaggccatttttcttgtctgaccgatcggttgcatctgccataccgctctcgacaaagcccccatctccaacgaatacaatgcctgttgctgctacagggtcaggctgccgcgaggaacccttcttcaacatcgctaactcagacagaaaagtcatcaccaaaggtaagggaatccctgacactcagatccaagaccatgtcaacacgtcgcttactgcgctatccatgaccaacggcaacggggtgctatttaatgcatcaagtgagatcccttctattgcagacagtgctacaaggacgtctgcacccgatgatgaattgcaacttcaaaattttttggctctggatttacagttaccatctcgtcaaagtggcaaaaataataactatagctctcttaggaaggatgagaaactgggccagagtcgttcggaacactacaataacgttcctgttgcaaatgaaatcaatgcttctgggaatagtattgttgggagattgcctaacttggatctgaatatacctccggacccagctgattcacttgaaggtttgcctaaaatgcatgaaagtgggagtgggttctatcatcatagaacaattcaacatcagaaagctcaggtgaccccagccgcagccatttctacgataaacagtgggataggtcgaaatatgtgcagtactctgaacatgtctaattcatatgggctttctcataagtctggaccagctgatgttaccttagatttacaacttaaaccaccaactagacctgagctagggataaactggaaaggacttgctcctgctccagaactgagtctctctctatttggtaagcctatggacgagcctgagtttcctagcacccccaatgccttatttcattctggaactgctggaagttccaaaaaggtcagtggggaggctgctgctacacttgggtcagataaggcaccagttgagaagattgtaacacctgttccctgcaatgtaaatcctctgaatactacatcagcaactgtttctggaattgatcagctgccatctaataatttggtgaagaaagaacctgaagaaatatcccagcagcatattattgacggcgctaaaaagccaaatccattagaacgacaaagtgttggacaagttatcggttgtgctgaatctgaaaagacggacagtgcaccccaaggtgctcgtaaaattgggtttgatttgaattctgacatctttgcaaatagtagtatccataatgagtctgatgtagcagcagttgatgccccaataccagctaaaactttacctgatacttgccatgatacgagcatgcctgctgttcctgaagtagacaaatttgtgaagcatgaagaatccacaagtgccaccctcagtcctgttgtggaaacaggaaatggtcatactacactgttggtggaagcaaaatcacagcgttcgcaaggaagtgctgaaatggactgttcagatgatgatgttaatactgtttcacgaattccaactacaaataagcctcatgatgagtcattggggaatgtcccaatcagcaaggatggtatcaatactaataataacttaagcatagagctaaagaaagaacacgacagtgatatgcatcaagattgttcatctatgacaaataaggttactattgatgctattgatggtgacaagtgtattaaaacaaaagttggtgttttcagccatgcaggtcagcaggggttccgaaatgaggtttctgctagcgaaaactctaaagacaaacgctctttgaattctgagaagaatactccagtaaataatactgaccatagcatgcaagatgctaagactgctgcaggctccagtaccacagatctccagaagtcatcagctttgccaaaatctgcttctcctaaaatgcaacctactaagcaacctcctaagactttagatagccgtcttgggaagactagaagcccagatataaagtcagagatgtctcaaaatggtatgcaagctgggagctgtagtgagaaccatgcaaaacttgctgctttgaagacagagcatcagaatgaaagtgaagaggtcggtagacactctgatttgcacccaagagactctgtcctgggtgaagactcagaacttgatggtgcttcaagcagtcaacagcatagtgaatatagcaagaagacagcttctgaaaagtcagaacgtgacaaatccaaacctgactcttgtaacatatctgttcagaatgaaaaagatggacaacttggggcaaatttgagagaactggggtatgcttatgtgaacaggaatgaaagatgggagaggttcatggagtctgagagagaaaagagcaatggagaatgccatggtggcagacatgcatctgacgttatgaacaaacgaatgacaaaccaccgtggtggttggcggggtgctggatcccgtggccatctgaggaacttccgaggtccaagaatgcgcaatgagtttgctgatgaatctattggtggcaacaggcactcatttgaagatgaacctgggcacacccgaggtccacataggaggcggcattcaccaccacatggctgcctcatgagagatacggacattgacgaattctacggaagagagattccagagtataggctgccggcccgtggacaaatagaagatctcccagatagcatgatggacgacaggttttttatgccgtattcccatagacaccgtggtcaaggtgatcatgggttcatccacagagacagagacaggagtcattcgcctgctgcacagagaagggttggccatgtgcatttccatcgtggacgatcacctgaagcgatgcgcagatcaccaccgccggtaatgcgaactgacagaacatacatgcctcaccgccatcacaacggaagccatgacgagaggggtgccatgcaaagaaatgacaggaggtgcgccatggaaggtgatgcctcaggcttcgagccaccgctacatccctcccacctagctgagttccatacagtagaggaacttgtgggcagaaggaagtatagggagcggagaccatatcttcattcaacggtgagtgacgaagacgagatgctcccctaccgcacggaggatgacatggagtttgctgaaggaggtgctggtccacgagagcacaacggcggcttcaggaacaggatggggcacgacagggcacgaggggaacaagaggacgggtacaggcaccgccgtggcggtcatcaagggtggcgagacagtgacacaaatgacagaccaaagaggaggaggtactga

SEQ ID NO: 33722 - DNA, 1485 bp, Zea mays
  Peptide Sequence Number=SeqID_75501
atgcaagatgctaagactgctgcaggctccagtaccacagatctccagaagtcatcagctttgccaaaatctgcttctcctaaaatgcaacctactaagcaacctcctaagactttagatagccgtcttgggaagactagaagcccagatataaagtcagagatgtctcaaaatggtatgcaagctgggagctgtagtgagaaccatgcaaaacttgctgctttgaagacagagcatcagaatgaaagtgaagaggtcggtagacactctgatttgcacccaagagactctgtcctgggtgaagactcagaacttgatggtgcttcaagcagtcaacagcatagtgaatatagcaagaagacagcttctgaaaagtcagaacgtgacaaatccaaacctgactcttgtaacatatctgttcagaatgaaaaagatggacaacttggggcaaatttgagagaactggggtatgcttatgtgaacaggaatgaaagatgggagaggttcatggagtctgagagagaaaagagcaatggagaatgccatggtggcagacatgcatctgacgttatgaacaaacgaatgacaaaccaccgtggtggttggcggggtgctggatcccgtggccatctgaggaacttccgaggtccaagaatgcgcaatgagtttgctgatgaatctattggtggcaacaggcactcatttgaagatgaacctgggcacacccgaggtccacataggaggcggcattcaccaccacatggctgcctcatgagagatacggacattgacgaattctacggaagagagattccagagtataggctgccggcccgtggacaaatagaagatctcccagatagcatgatggacgacaggttttttatgccgtattcccatagacaccgtggtcaaggtgatcatgggttcatccacagagacagagacaggagtcattcgcctgctgcacagagaagggttggccatgtgcatttccatcgtggacgatcacctgaagcgatgcgcagatcaccaccgccggtaatgcgaactgacagaacatacatgcctcaccgccatcacaacggaagccatgacgagaggggtgccatgcaaagaaatgacaggaggtgcgccatggaaggtgatgcctcaggcttcgagccaccgctacatccctcccacctagctgagttccatacagtagaggaacttgtgggcagaaggaagtatagggagcggagaccatatcttcattcaacggtgagtgacgaagacgagatgctcccctaccgcacggaggatgacatggagtttgctgaaggaggtgctggtccacgagagcacaacggcggcttcaggaacaggatggggcacgacagggcacgaggggaacaagaggacgggtacaggcaccgccgtggcggtcatcaagggtggcgagacagtgacacaaatgacagaccaaagaggaggaggtactga

SEQ ID NO: 33723 - DNA, 672 bp, Zea mays
  Peptide Sequence Number=SeqID_75502
atgaagtctgttgatcgcccgcccagtaatccaaaaagattaaccattgaatccagtcaggaggttttttcaattgacatttccagacgtacaagatccagcagctcagctcaccaagatgatattccccaaaatcaggagcagaatgagccacagccagccccaatccatcgttttcgcagaaaggcgttagcttgtcgtttaaaaagaaaaccttctgctccatccacactgtccgacgacgatttcatggatgctccatcattgaagcgccaattcagatctgcctcaccttctccttcagaacaaatcagtgcaaagaagttaaaaaaactgaatatccgctgcattccctatgatgttattgtatcatcttggataatgagcgatcggcagcgcgatgctgtcgctaggttgggattttcaagcatatttgatttgcgaactgatgccttagagagcagatcactcaacaggtggttgatggataaattggatccacatgacatgaccatacgcccaggggctggcaaggaactgaagataacaaaagatacggttcatctgattttgggtttgccatgtgctggaggaggcagggagtttactgattggtatggtgaagtggatgctgctgcaaaactgagacgtgatctcaatgttggtaaataa

SEQ ID NO: 33724 - DNA, 1392 bp, Zea mays
  Peptide Sequence Number=SeqID_75503
atgaaattgaatatccgctgcattccctatgatgttattgtatcatcttggataatgagcgatcggcagcgcgatgctgtcgctaggttgggattttctagcatatttgatttgcgaactgatgccttagagagcagatcactcatcaggtggttgatggataaattggatccacatgacatgaccatacgcccaggggctggcaaggaactgaagataacaaaagatacggttcatctgattttgggtttgccatgtgctggaggaggcagggagtttactgattggtatggtgaagtggatgctgctgcaaaactgagacgtgatctcaatgttggtaaagaagaatttgatgttgtcaagcttcaagacaagatagtgcttggcaacgatgatgagctatcaattagatgcttttttctgattctattcaatcggcttctttttccttctgcttcttggggcattacaaacaatgaggtactcatgacttcaaacatggcccgaatgtctgatattgactggtgtcaactagtttacacggatttgtgtgatgctgccgcacgttggcataaaaggaacaaaacaaacatcacagcaacaatatatggatgctcactcattgttctaatttactatcttgatcacctacatcaccctgcatctcctgttaacaaatatggtactccacgcattaagttttttgataatgagaccataagagagttggctcggggtgacagacgtccccccgtaaaactgtttcgtagccgttcagaaacgtgttacgtcattgctccagaacggtctgtttctgccgttttcaacatatatgtgccacgtatcaagaatttgattggcaacaagttgcaatgcttgccctcccagcagcggccaatgtttcaatcattgtttgatgctcgtgacaaagaggtggataaatactgtgattccattcagctgagccatcagatgattgtttcgaagcagattgaactctctgaaacatttggtgaaatgatcgatgaagtactgagagctgcaacgcagcgcgattcacagccagaagataacccccccactacctcaatgcctccaacaaatgctccagtatcctcaccaactgttccaactcctgataaacagcaacatgatcaggaaagccatgttcctattgatcatatcaaagtatcagatgatgaaggacaaaaatctgttacacatgatactcctgtatctggtgcacctcagttcgataaaaccccactgacagatggatttatcgactgtattcgtgaggatgatgttctatacaatccagattctgtaatcaacactctaatactgaatgtcaatgttgggaccgttttgaatatcgaggagtttgaatag

SEQ ID NO: 33725 - DNA, 633 bp, Zea mays
  Peptide Sequence Number=SeqID_75504
atggccaccgccaccgccgctccagcatctgtggcgcgacgacggatctggggacccgctcgcgacggcggatccctgaggcgcgacggcggatctggggacacgctcgcgatggcggattcctgtggcgcgacggcgaatctagggacacgctgcggcatcggatcccgagggcacgcacgcggcggcggccccatgagattgtatattaggagctctgagcttccattagttattggaagcccaggccagacagtgcaatccggtcgagccagaccaggtccagacgtctataaaagaaaatccgtagtgctagggatccgtttttacgccccatctcgattcattagcgacggttgccaggccggcggtggcggcggtttccaggccggcggtggcggcccccgatccagagggcgagcggcggcagcgtccttgtgcggtggcggcgattcccaggccggtggccgcaactccattacctcgacgcgcgatggcggaggttcctcgatccacagcgaggcccttgtgcaggcaagcggcggcgtccccgaagccccgaggaggcggcacttccaaggccggcgagcaagcgacgcccgtcgacgtgcgagtagcgacggcgacgcatga

SEQ ID NO: 33726 - DNA, 774 bp, Zea mays
  Peptide Sequence Number=SeqID_75505
atgccgtcgtcgctagcgcctagggaaatccgccgtctcgaccgctggcacatcgccgtcatccgtcgtcgcgccacagatgctggagcggcggtggcggtggccatcgcagagacggacgggacaaccgccgttgtcaccgggcctagggaagttatgttttttaatttttacctccctcaaccttatctcttctccctcttctctcacctttcacaaaatctctctgtctcacgcctctcccgcgcgcccttctcccacgcacgaccggctccaccgccgcccccgccgcccccgaccgcgtcgccccgaccacaccccgcccccgaggagcccgccccggccgccgcccgccccagccgccaccgcggccgcctctcccgcccccgaccgcgccccgtccctgtggagcccgccgcggccgcctctcccgccctcggcagcacccgcccccgaggagcccgccccagccgctgccatgaactaacaaatacctatgcttgcgctcagaagtacaagaaggaggagacggccatgtttgcgctctatggtgacggtgcggctaaccagggacagctctttgaggctctcaacatttcggccctctggaagctgctcgccatattggtttgcgagaacaaccattattgtatgggaacagcggaatggagggcagcgaagagtcctgcttactacaagcgtggcgactatgtgcatggattgaaggttctctgcgttgcaacttttagttactcaatagggcttgttcattga

SEQ ID NO: 33727 - DNA, 1920 bp, Zea mays
  Peptide Sequence Number=SeqID_75506
atggcgatcacagcgccaactcccgacatcctcggcgagcgccagtccggccaggacgtccgcacgcagaacgtgatggcttgcggggcggtggccaacatcgtcaaatcctcgctcggccccgttggtctcgacaagatgctagtggacgatattggtgatgttacaatcactaatgatggagcaaccatacttaagatgttggaagttgagcatccagccgccaaggttcttgttgagttggctgagctccaagatcgtgaggtaggagatggaactacttccgttgtcatcatagcggcagagttactcaagagaggcaatgatcttgtgaagaataagatccatccaacctctataatcagtggctacaggcttgctatgcgtgaagcctgcaaatatgttgaggaaaagttagcagtcaaggttgacaaacttggaaaagaatcccttatcaactctgcaaaaactagcatgtcttcgaaattgattaatagtgacagtgatttctttgcaactttggttgttgaggcagttcaagccgtgaagactacaaatgccaagggagacgtgaaatatccaatcaagagcatcaatattttgaaagctcatggtaaaagcgccaaggatagttatctgttgaatggctatgcactaaacacaggccgtgcagctcaaggaatgcctacgagagtaactcctgctagaattgcttgtcttgattttaaccttcagaagacaaaaatgcaacttggtgtccaagttcttgtaactgatccaagggaacttgagaagattcgtcagagagaatctgacataacaaaggagcgaattgagaaaattctcaaggctggagctaatgttgtgttgaccaccaagggaattgacgatatgtccttgaagtactttgttgaggctggtgcgattgcagtaaggcgtgtgcgcaaggaagatttgcgacatgttgccaaagccactggtgcaactatggtgtctacttttgcggacatggaaggtgaagaaacattcgattcatcattccttggccatgctgatgaagttgtggaggaaagaattgctgacgatgatgttattctggtgaaaggcacaaagaacaccagcgcggtctctataatacttaggggcgcaaatgactacatgcttgatgagattgaacggtccttgcatgatgccctgtgcattgtgaagagaaccctggaatcaaatatggttgttgctgggggtggtgcagttgaagctgcgctgtcagtttatctggagaaccttgcaacaaccctgggttctcgggaacaattggcaattgctgaatttgctgagtctttgttaatcataccaaaggtactatctgttaatgctgcaaaagatgcaactgagcttgtagcaaagcttagggcatatcatcatactgctcaaacaaaggccgacaagcaacattattcaagtatgggccttgacctctctaagggtatcattcgcaacaaccttgagtatggcgtgatagagccatcgatgagcaaagtaaagatcattcagtttgccacggaggctgccattactatcctgaggattgacgacatgatcaagcttaccaaggaagaagagggtaacgaagacttagaagcaaagcatagtagcaccatcgaagcaaccttgagaatcccaagtgacctgaagattcatttacttgcggagaggaagaagagggcgccaagatacgtgatgactttggtccaacgaaggcctcaacggccattgaaggcgatgtcgtggtggccgaggtcgtgcagcagcagcagcatgacacaccagttgcggctgttgcttctcgacccgctcgccttacaaggaaccatgtggaggaacgatggcttccaggaaggatggtggggccgctgttga

SEQ ID NO: 33728 - DNA, 671 bp, Zea mays
  Peptide Sequence Number=SeqID_75507
atgcgcgaccagaagcacgccgtcttggttcagcgctgaggaatcagcaggacgactccagcgaagaggacggaaacggatgccccctcctctccagcagcagcttcagcaatgcagcgaacgacgacgagccgtctgatgagcagtgctccctctcgctgtcccttggcctggacacaaaaggcgcccgtgccatggcaacctcctcgccgagcggcgagagcagctgcatcctcacggcggcctcgcctgcgaggaggagctctagcgactgctgctgctccggccattcaggctgcttcgtcggcccgggcgttagcctggaactctccctgtccatctctggatcctacctagatcactccgattctccgtggtggccaaggaacccaagctcattggacaggagtttgacttcgcctgtctccgaacaagcggtcgacgaggcggaggtctcgcgtcctgcgtgcgtcaccgttgtctggctccgtcctcaccgttcctccgtcacagccaccgtccttttgccaagagtcgtcgaattgatggcgtgcggggcggtggccaacatcgtcaaatcctcgctcggccccgttggtctcgacaaggaagaaggttatgttgtcttgttcattggaagcactcttccacattacttggttccttgctga

SEQ ID NO: 33729 - DNA, 477 bp, Zea mays
  Peptide Sequence Number=SeqID_75508
atgtcgacccacctcattggcttgttccccgctgagaaggaggacgacccgatgtggaaggacagggttgagcacaccaaggatgtgtgggctctctaccccagacacaccgctcacctgacgattcgatgcatgagtgccctatatcgtctgcaggccttacaaggtgaggcgatgtcccagcttacgggcctgatggccaaccacataacaagagctcgaggatcaggggaagctagggagaacactattaaggttctggaagaccagctccagaacacccagcagcagctcgagggagccaaccagcacttagacatgcaccatcaagagatcgaggacatggaggcagaaggggccaatgaggacatagatatcgagggaggggaggagccggagcccgcatctagcttggacactgctggctcaagaggaccaccttcccccgagtctagcgttgcctcgtttgctcgttag

SEQ ID NO: 33730 - DNA, 702 bp, Zea mays
  Peptide Sequence Number=SeqID_75509
atggcagtcggggtcagtgaggtattgtacgccaaggcgggaccgggttacgctacgcctccccagtacgcggtgcagctgttcgaggagcaccgggtacctcgctgtagggtgaggatgactttggagcctcatcccctacagccaggatggcgttcactggacttggagtctttcggttttagggtcgatgacactatagaggccacagctccgcacgtgctcacaaccttctatggatttcaccccttggagatgtcgacccaccccatcggcttgttccctactgagaaggaagatgacccgatgtggaaggatctgtcacaccctgttttggaaggcaaaccgaatgcgaaccatgatcgggttgaccatgccaaggatgtgtgggctctctaccctagacacaccgctcacttgacggttcggtgcatgagtgccatgtatcgtctgcaggccttacgaggtgaggcgatgtcccagcttatgggcctagtggagtctaccaagatcaccctggataacagggaggaccttgtcgtagacttgtccaccgagctagtggagaaggatctccaggttgagcagatggccaaccacatacaagagctcgaggatcaggtggaagctagggagaacaccattgaggttctggaagaccagctccagaacacccagcagcagctcgaggaggcaaactag

SEQ ID NO: 33731 - DNA, 507 bp, Zea mays
  Peptide Sequence Number=SeqID_75510
atgggaactggcagcggagctgctccaggcgctcctccccgcgtcgtcggagggcctggcggcgacgacgactccgacgtcatcgcgctcaagaactacatgaacgcgcaatactttggggagatcggcatcggctcgccgcagcagaagttcaccgtcatcttcgacaccggcagttccaacctctgggtgccgtcctccaagtgctacttctcggtgcgtcctggttcctcccctagcctggccgaggttttcctttttcaggacttggatgtgttttgtgctaagactagagtgtgcttttgtgctgatgtgatgcagatcgcttgctacttccactcgcgctacaagtcagggcagtcaagcacttacaagaagaacggcttgactcttcctttcttgtcttgggacctcatggtcgtcgccaacgccgccgactcccgggttgttctggacaccgcatccgacgacggcgccgtcacgccgtctagctcatcatcgccctga

SEQ ID NO: 33732 - DNA, 609 bp, Zea mays
  Peptide Sequence Number=SeqID_75511
atgggaacccgcggcgtcgccctgctgctcctcgcggcggtgctgctcctccaggcgctcctcctcgcgtcgtcggagggcctggtgcgggtcgcgctgaagaagctgcccgtcgaccagaacggccgcgtcgccgcgcgcctctccgccgaggagaggcagcgcctcctcctccgcggcgccaacgccctgggctcaggcggcgacgacgactccgacgtcatcgcgctcaagaactacatgaacgcgcagtactttggggagatcggcgtcggctcgccgcagcagaagttcaccgtcatcttcgacaccggcagttccaacctctgggtgccgtcctccaagtgctacttctcgatcgcttgctacttccactcgcgctacaagtcagggcagtcaagcacttacaagaagaacggaaaacctgctgccatacgctatggaactggttccattgctggttttttcagtgaggatagcgttacattaggtgatctggttgtgaaggatcagtgttattatgtatgttatggtcgctacatcggtgagggattggagaaggggatcggtgagggattggagagaggccgactgcccgcccctgtctag

SEQ ID NO: 33733 - DNA, 675 bp, Zea mays
  Peptide Sequence Number=SeqID_75512
atggcggcggcgagggcgaaggtcgcggcgcgggagagacagcgcggctcctcgagcagcctccccgacggcgagctcctgggcggatgtggtggcgggacgggagcaggcgacggcggcgcagagcgaagaaaattggaagcatgccccctcgatagtttcgcggtgccagcagactgcccccgcctctacgcccgcctacctacgcccgcccgccatcctgcccgcatgccgcaatcctgccgccgccgccgccgcgaaccgcccgcccgcatgccatacgcccatccgccgcccgcctacctacgcccacccgccatccagcccgcatgccgcaatcccgctgtggccgctgcgaaccgcccgcacgccctacgcccatccgcctgcccgcacgacgcaaaccccgccgcgaccatggcgaaccgccctatagctcgccctaccgcccggttgggccagtcggcgtgtcaatcttcgagatccacagggacgcaggacgctgccgatggcgaagccgaggaaaacctgcacctcggctccagatccgcccgtagccgacgttcggcttccggggacggtggtacagacggggtggacatcggcggcgggcttctcttcttgtggacttaccgccgccttgaccgcgacttgaattgctggttcggtgtctga

SEQ ID NO: 33734 - DNA, 330 bp, Zea mays
  Peptide Sequence Number=SeqID_75513
atggcggcggcgagggcgaaggtcgcggcacgggagagacagcgcggctcctcgagcagcctccccgacggcgagttcctgggtggatgtggtggcgggacgggagcaggcgacggcggcgcagagcgaagccctcttcaagtcttcattggcgctggtgcttcgatggcggtctcgacttgcagaaaattggaagcatgccccctcgagagtttcgccgtgccaggaggaccatttgtgtctatgatttgtgggtctggtggtaaaatagagaagtccacaactgagagtgataaaatagcaaattccccgcttggagatgagctgtaa

SEQ ID NO: 33735 - DNA, 480 bp, Zea mays
  Peptide Sequence Number=SeqID_75514
atgacctcctccttgctctgcaggaagtcatacctcgcgctcctccacatggtcccctgtgtcccgctcagccgcctcctcgacaacatccaggaggttttggtcgccaccaggctcaccctcctcttccccgtcgtcctactcgcgtttgccgcctaccttgtggattcacaggatgttgcaactgggggtatcgatacaaatgcagtaatctttgatcggtcatctggtcaaatcttgtgcacgcttactggtcactcaaagaaggatcttggaaatcagaaagtcttgctctcaggcatcaatctcgatgaggatgcaaaaccaagaggggacaactgtgaacagtggtcattgttcgtcggcactgctcaagcatcattgacgttggcgctggcctcctctgtacaaggccaggggtgtactgaccccaaggccggtgctgttgaccccaaggccgagaacaaggtgctagattga

SEQ ID NO: 33736 - DNA, 1404 bp, Zea mays
  Peptide Sequence Number=SeqID_75515
atggtagaggaggcgggcatgttgagcggtggcggagaagcagggacaacatgcggatgtgttgggacttcaggcgatggtagaggaggcgggcatgttgagcggcggcggagaagcagggacaacaggcggatgaggcagggacggggggctgtgggcggtgtggaggagacagggactgggggcagtggcagaggtggtgggcatgacgctgcctgccgtgttatagccaggttgaagaaggaaagagatgaggctagagcacttttggctcaagctgagagacagattccagcatcagttgcaggagctgctcctgcagctgttgtttccaatggaaaaagagcaatggaagatgaaattggccctgacggaaagaagattcgtcctggtatcaaccctgtcatgattgatgaacttacagagtgtaataccatgctttcagcacagcgtaagaaaagacaggttcctccaactctggcaccattagatgcactcgagagatacactcaaatctccagccatccccttcataagacaaacaaaccaggcattttgtccatggatgttcatccttcaaaggatgttgttgcaactgggggtatcgatacaaatgcagtaatctttgatcggtcatctggtcaaatcttgtgcacgcttactggtcactcaaagaagactgttcgcatttggcaagagaacgagaatggaaactataactgcgtccatacattgaaagatcatactgctgaggttgaagctgttacagtacatgcgactcagaagtattttgtgagtgcttccaaggataattcgtggtgcttctatgatatttcaacaggatcttgcctgacacaggttggcgaggcttcaggacaagagggatatacatccgcgtctttccatccagatggtcttatccttggaacaggaactactgatgctgttgttaaaatttgggatgtgaagactcagtcgaatgtcgcgaagtttgaggggcatgtaggaccagtcactgctatgtccttctctgaaaatggttacttcctagcgactgctgctcatgatggtgtcaagctttgggatcttcggaaattaagaaattttaggaccttctctccctatgattcagatacgccaacaaatactgtggaatttgattttagtggaaactatcttgccattggtggttcagatataagggtctaccaagtagctaatgttaaggccgaatggaatctcatcaagacattaccagatttatctggaacagggaaagtaacttcggtaaagttcggagcagatgctaagtacatagccgtaggttctatggaccgcaatctacggatatttggcctccctggagacgaccaaatggaggaatcaaccacagcggcagagtga

SEQ ID NO: 33737 - DNA, 462 bp, Zea mays
  Peptide Sequence Number=SeqID_75516
atgcacacccctcacctcatttcacgcagcttcaccatctctcgtgctctgccctcgcggccagacgccgtgggagacccgctcccacgttcccgtccatccagctcgtcgaagattgccccaaacctccccgagctccgcccccgaggtgagacacctgtcctcgtgcccaatttcctctatcatgctctatgcttggtcaatttcaccgttgccggtgctcggccgcggcggttcgacgtgctcgcgcagtggccggtcgatttagcccggtttagttccccggagttagtccctaaggtgcatctgtctctgctgaagttagccaaggacttaccgcgccttaagtcccctccccaaggccgaaatggctcaccggagtttctcctgcccgcccgagaccttctcaccgccgttctcccctctctgcccgtggattcatggcctcttccccgccattga

SEQ ID NO: 33738 - DNA, 1311 bp, Zea mays
  Peptide Sequence Number=SeqID_75517
atggctcaccggagtttctccggcccgcccgagatcttctcaccgccgttctcccctctctgcctgtggattcatggcctcttcctcgccattgagttcgtcgtggtgccctctccttctatgcccaactctgacgaccctggagccaccctagctcgcgccaacctcaactccggtgacctcactgccgtggagaggagcggcaccgctcgcagccgtctgatttccccgggtccgatcccctacatccgattcagatcgaacgacacggacccccacaaccgcctgtttcccccgggtccgatcctctccgtccgattcagatcgaacggctcggaccctcgtagccgcttgtttccccaggtcccgatcctctccgttcgattcagatcaaacgactcggacccccgcagccgtctgtttcccccggacaacgagcagtccgaggttcctgagtgtgttgttggagacctccctgagcaacaacctgccaattggagagactgcatcgtcgcctgcacgaggagcaggagcgccgacgccaggagcaggagcaggagcagcaggactcttccccctcgcctcagagggaggtggagtctgagaggtcgccttcccctgcacctcagccagagatgcccccctgcaccaccacatggcatccccgctgctggaggagaccctaatggagacggagacgacgacgccggtggtagttcgagccacgacacggagcgctcagaggagccggagccgaagggatggatcgcgagacccatcactcgtgatgctgctcacgggtgtcacttccatgacgctctcgataccctgttgcgtcgggccttcgaccgacacacctggtctatcgaaggcttctcagagcactattctattactgagagggatactgccgaggcagccatgcaagatgcagcacgacgggcactttctcagtattgctcgttgttcagcggggtagctgatggccttgacccgaagtactatcctcgtcgttcgaccggcagtgctagagttgtgattgtctcgccagtgggtgagggcaatcctaggctgaacaacatggtcaatctggtcgtcgtgctcaacatagagttggaccatgccattgacgagttgggcaaggttcaggcggaggttgtggaattgcgtgctgaatgcgcggcacgccactatctggatggtggttctctcgcccctgtcgggattcagcacccttaccgttcaccgccccatggtcgcttcgactatggtaccccagactgcaggacccgcataaatttggattcttag

SEQ ID NO: 33739 - DNA, 708 bp, Zea mays
  Peptide Sequence Number=SeqID_75518
atgaggaggacgcgggcgaggagtacggcggccccgtcgttcacgccaagcggacgaggatgggcggggacggggataaggtctggcgacggcgacggagacgaagccgaggatgagaaggccttcctggtgccgagcgtcgtggccttcccccacggcatgtccaccatcgtcgcgggcctgtcgctggccgaggccaagaaagaggagttcagcaagtcgtcgtccaccttcgcgacaacgtctccagcaccgggtccagtatcggctccagtgccggccaccccaccaccgaagtccacgctgcaggcgcggcaatcaagcggctcctcgcctccattacgacgcgccagcgagactgcaagagcgggcgggcgaggaggcttccacatctatctccaaggacttcgagcacaaggattgcagcggtttggtggagtcgtggagatgctcggctgctccagcagttgtgcccaggaagaatctataaaatttggatcatattcaagaactagaagcacatgtgtctatggtggtgcacctaagggtccacaaatacgggaccttagaggaggagttgaaattgtcattgcaactcctggccggttgattgatatgctggaagctggtcacacaaacctacgtaaagtgacataccttgtgttggatgaggcggaccggatgctagatatggggtttgagccctaa

SEQ ID NO: 33740 - DNA, 540 bp, Zea mays
  Peptide Sequence Number=SeqID_75519
atgacaacgaggaggaggacagatccgcgagcacccccgagatctgctgctgccactcccacacaactcttgctcgcgagatctatgtgcaggtctggcgacggcgacggagacgaagccgaggatgagaaggccttcctggtgccgagcgtcgtggccttcccccacggcatgtccaccatcgtcgcgggcctgtcgctggccgaggccaagaaagaggagttcagcaagtcgtcgtccaccttcgcgacaacgtctccagcaccgggtccagtatcggctccagtgccggccaccccaccaccgaagtccacgctgcaggcgcggcaatcaagcggctcctcgcctccattacgacgcgccagcgagactgcaagagcgggcgggcgaggaggcttccacgtcaagcactacctgcagctcacgctcaacatgcccaacggcgagacctcgctcaccttcgatgatcacgtcctgcagaacgacctctccttcatacgctcgaactcaccgccactgctcaccccaaccggagtctaa

SEQ ID NO: 33741 - DNA, 231 bp, Zea mays
  Peptide Sequence Number=SeqID_75520
atgcccggattcgcgccctgctcacccagatccgaccgcgactttgatttcccaaccgacgcaggagcggctaagcccacaaagagtgcgaatgggcaggtctgccagatttgtggtgactctataggggactacaaggacaaggatggtgtcaagggcctatgtgtcgtgggcgccattaacaactgtacctcccagctccccacctatgggagatcttatcccccataa

SEQ ID NO: 33742 - DNA, 231 bp, Zea mays
  Peptide Sequence Number=SeqID_75521
atgtccagattcgcgccctgctcgcctagatccgaccgcgactttgatttcccaaccgacgcaggagcggctaagcccacaaagagtgcgaatgggcaggtctgccagatttgtggtgactctataggggactacaaggacaaggatggtgtcaagggcctgtgcgtcgtgggcgccatcaacaactgtacctcccagctccccacctatgggagatcttctcccccataa

SEQ ID NO: 33743 - DNA, 792 bp, Zea mays
  Peptide Sequence Number=SeqID_75522
atgccaaggagcccaaacgctattaggagaaccaacgagaacgcgctttgctgtttcctggcttcgcaccttacaagttcctgcgtcataaccacaaaagcaaccatctttgatcgcaacgggggcaccacacacgatgagactggagtagaggccgaaggtaggagccgacgggttgaaatccccccgcagtcgcagcgtcatgatggtgcgaatgttgtggctggagtagagaacggtgtgtgctccaagaagacgatagcccctagatgccgaggtagccgaagtcgaggtggtcgcggtcggaagacgcgcagcaaaagcctgatcttcgggaggggtcgacgttcgagcgtcaacgatcgacagggcgacacagcaaaaaggcaccagcagaccgaccttcctgcttcttcgatcgtccgggcgtcaagaagtcccgccagggaggccgacggcagcgcacgcgtctgcgccagtcatggtgtccgcgcccgcggcagaatagaaggggaaacgacagatccggccgggaaggccacggcagcgacggatccagtcgggaagacacgatccagccaaagggacggcagatcgagccggaaaggtcgcagcaacgtggatccggccgggaaggccgcggcagcgacggatccaacgaaggcgaagaaaggggtgggcggcggggcgtgtccagccgggcaggggcctgcgccggacctggcagagggtgttgacggcaccggcgacgggagaagctcgaagtgggaggcgctgctgctggggcgttag

SEQ ID NO: 33744 - DNA, 661 bp, Zea mays
  Peptide Sequence Number=SeqID_75523
atggcgaagactggtgagccagggctggagcaccacggatcactctaccacctgacacatcgcaacgggggcaccacacacgatgagactggagtagaggccgaaggtaggagccgacgggttgaaatccccccgcagtcgcagcgtcatgatgccgaagtcgaggtggtcgcgggtcggaagacgcgcagcaaaagcctgatcttcgggaggggtcgacgttcgagcgtcaacgatcgacagggcgacacagcaaaaaggcaccagcagaccgaccttcctgcttcttcgatcgtccgggcgtcaagaagtcccgccagggaggccgacggcagcgcacgcgtctgcgccagtcatggtgtccgcgcccgcggcagaatagaaggggaaacgacagatccggccgggaaggccacggcagcgacggatccagtcgggaagacacgatccagccaaagggacggcagatcgagccggaaaggtcgcagcaacgtggatccggccgggaaggccgcggcagcgacggatccaacgaaggcgaagaaaggggtgggcggcggggcgtgtccagccgggcaggggcctgcgccggacctggcagagggtgttgacggcaccggcgacgggagaagctcgaagtgggaggcgctgctgctggggc

SEQ ID NO: 33745 - DNA, 402 bp, Zea mays
  Peptide Sequence Number=SeqID_75524
atggcgcactgggagtggagagatggcgagagtggcacgtactctcctggcaaaggaccgcctaaaaggggtgaaattccactgcaaaaatgttggtgtgatttgtgtttacttaatcttgtgatcctggttacagtgtcacacccggatttcggggcaccaagacccgggcgcgaacataatcaccagtttataggaagctccaatgcaggaatcccttgcaggaccgccatcgcagcaaaatcctcccgagggcctccgtacactgaccactcccctactgcccttgcccctttcggtttaaataagctctggactgggcgcactatttccagagaactcaaggggctcggggtaagaatccagagacacagagaacaggccctgtggatggcgggttga

SEQ ID NO: 33746 - DNA, 351 bp, Zea mays
  Peptide Sequence Number=SeqID_75525
atggcgagagtggcacgtactctcctggcaaaggaccgcctaaaaggggtgtggtttatctggggtccttgggacactcagacagtgtcacacccggatttcggggcaccaagacccgggcgcgaacataatcaccagtttataggaagctccaatgcaggaatcccttgcaggaccgccatcgcagcaaaatcctcccgagggcctccgtacactgaccactcccctactgcccttgcccctttcggtttaaataagctctggactgggcgcactatttccagagaactcaaggggctcggggtaagaatccagagacacagagaacaggccctgtggatggcgggttga

SEQ ID NO: 33747 - DNA, 303 bp, Zea mays
  Peptide Sequence Number=SeqID_75526
atgtacaaggggtcaagcagtctcattagctgcaagaagcagacgattcgaatcaagtttttaaaccttgcaagggctcaccgtcttggcatacaatgctccactgaccccggctgccgccgtgcagtgaccgcacttgtacccaccatagctagcatgggagacccagtctcaggacaagtgaggaggaaagtccgcgcccggcttcactcagaaaaccaggcttgcgttcaaatgctggggctgcggggagatcctctgtggcaggctcgggagctgtctcctgatattcctcgtggatag

SEQ ID NO: 33748 - DNA, 678 bp, Zea mays
  Peptide Sequence Number=SeqID_75527
atggcatgtcatggcatacatatatctcactcattgcatttattagactacaacctcgctggcggagagtacgtgttcattccggagcaaagagctgtccacgaggaaaatcaggagccagctcccgagcctgccacagaggatctccccacagccccagcatttgaagacaagccccgctatggttggtacaagtgcggtcactccacggcgggagccggggtcagtggagcattgtatgccaaggcggtacacttcaggatatggttgatgatgacttcacccacccccgccaatggaggtgacactcgtttcagttccgatttcctttctcacgagggtttcccttccatcttgtgggaggtgctcaactccgccggttaccctacgccccctttgtacacggtgcagctgtacgaggagcatcaggtgccacgttgccgagtctggctaactctggaggctcacccccttcagctgggttggcgttcccttgactccaagactgttggattcagatcggaaaacaccaccgaggggacagctttgaagactctgacgactttctgtggctaccatcccctagaaatggtgatgcacccattggaattcttccccgctgagaagagggatgaccccgtgtggtgcaaccatgtgagccatgtgaaggacgtgtga

SEQ ID NO: 33749 - DNA, 381 bp, Zea mays
  Peptide Sequence Number=SeqID_75528
atggatgggatccgtgaccacgcccagggtgtgcggtcaacggggaggagcgtcgagtgccgaggggaaaaggggcgcccggcaaccagccatggtatgggcaaggcgaccgtggagcttaggtcaggcgcccgcgatattcacgtagagatcacggctattgcgagcgatttggggaaggaatttctgacaagtcggccccacaagtcgtttttttacacagattttgggctttacaaatcctacccccttaacagaaatctcgtcctcgagatttgtgtatatgtagatgcaattgtggacattactccacaactcatcacactcaatcaaagatccaaatcagacaagtatcataagaacaaacattcaagttcatag

SEQ ID NO: 33750 - DNA, 312 bp, Zea mays
  Peptide Sequence Number=SeqID_75529
atggcgaagctacccaggggcttaccaaagaccaaggcgaaggttggagagccggccacgacgaacagcggcacgcggcggagcacaatctccggtgagcgaatcgagcgctccgcacgtggtgggcagggacggagcagacgcggaggagaaggtttcttccagaagagggtttacaagttctacccccttaacagaaatctcgtcctcgagatttgtgtatatacagatgcaattgtggacattactccacaactcatcacactcaatcaaagatccaactcagacaagtatcataagaacaaacattga

SEQ ID NO: 33751 - DNA, 183 bp, Zea mays
  Peptide Sequence Number=SeqID_75530
atggcgaagctacccaggggcttaccaaagaccaaggcgaaggttggagagccggccacgacgaacagcggcacgcggcggagcacaatctccggtgagcgaatcgagcgctccgcacgtggtgggcagggacggagcagacgcggaggagaaggtttcttccagaagaggcttgctacgtga

SEQ ID NO: 33752 - DNA, 654 bp, Zea mays
  Peptide Sequence Number=SeqID_75531
atgtacacagtgcagttgtacgaggagcatcgggtgccacgttgtagggtttggctgaccctggagtctcaccctctgcagcgtgagtggtgttcccttgattccgagactatccggttcagggcggacggcaccaccgaggccacagcactcaaagccttgacgaccttctgcggatatcaccccctggagatgatgatgcacccacttggactattccccgccgagaagagggacgacccaatgtgctgcaacagagtgagtcatgcgaaggatgtgtgggccatgcatcccgaccaggttgggaggatcaccgtccagtgcatgagtgcactgtaccgcctgcaggccttgcaaggcgatgccatgacacacctcactgggctcgctcaggctacaaagatcacctttgacaatcgggaggacttcgtagtcgacttgtcttcgaaattggtggagaaagatctacaggaagagcttgcggaggccaacgctcacctagaaatgcaccaccaagacatggaagctaatgaggcaggcaacgagggagaggaggatcccgaggaaatagagctagcttccggtctgaacgtggctccctccagagtgccccctactcctgcatccagtgttgcccttaccaatcatggttag

SEQ ID NO: 33753 - DNA, 417 bp, Zea mays
  Peptide Sequence Number=SeqID_75532
atgaaccaatgccgaagctactcgtggaaaagcttcggctcggcagtgcatttgagaacgagtccccaacattgggtctcccatgctagctatggtgggtacaagtgcggtcactgcaaggcggcagccggggccagtggagcattgtatgccaaggcgatgacttcatccacccccatcaatggaggagacactcgtttcaatttcgactacctttctcacgagggttttccctccatcttgtgggaggtgctctgctccgccggttaccctacacccctctctgtacacggtgcagttgtacgaggagcatcgggtgccacgttgcagggtttggctgaccctggagtcggcgttcccttgactccgagactgtcgggttcagggtggatgacaccactaaggccgcagcgctga

SEQ ID NO: 33754 - DNA, 366 bp, Zea mays
  Peptide Sequence Number=SeqID_75533
atggcaagattagcgtgtaccctccgtggcaagaggttggacggtggtgtatctgtgctctcggttagcgtgaacctgatttggtttaagaaccccggtggcaatgagactgatggttttggttatgactatggtgctggtaagtggtattctttccgtttggaaagggttgtcagcattgcaaccactactcaagagaagatgaagctgtggaaggagacttccaggagttccaagactacgacgagttctaggtgtgggttagcggcaacccccagtcggctgcctgtgaaggccgcgtttatctacgtttcttttccgcactttgatcattgtaaagactatgtggatgtctcagacacatga

SEQ ID NO: 33755 - DNA, 177 bp, Zea mays
  Peptide Sequence Number=SeqID_75534
atggagagagtagcgtgtaccctctgtgggaagaggttggacggtcgtgtatctgtgctctcggttggttatagttttgtgctgctgatgatggtgttaagtgccggtgggctcggccttcttataagcctaagtaacccttctatacttcttaatgaggatggtcacttgagctag

SEQ ID NO: 33756 - DNA, 126 bp, Zea mays
  Peptide Sequence Number=SeqID_75535
atggcgcaatgctcagtttcaaccatcctctttggtaagccttacacttcacgtgagctctcacctttggtcaagaacaggtaccgcaggatgaggcgcatggaggatgctgtgacgagttcatga

SEQ ID NO: 33757 - DNA, 126 bp, Zea mays
  Peptide Sequence Number=SeqID_75536
atggcgcaatgctcagcttcaaccatcctctttggtaagccttacacttcacgtgagctcccacctttggtcaagaacaggtaccacaggatgaggcgcatggaggatgctgcgatgtgttcgtga

SEQ ID NO: 33758 - DNA, 126 bp, Zea mays
  Peptide Sequence Number=SeqID_75537
atggcgcaatgctcagctctaaccatcctctttggtaagccttacacttcacgtgagctcccacctttggtcaagaacaggtaccgcaggatgaggcgcatggaggatgctgtgatgagttcgtga

SEQ ID NO: 33759 - DNA, 303 bp, Zea mays
  Peptide Sequence Number=SeqID_75538
atgaggggtacccccaagactcctaaatctcagctggtaacccccatcagcactaagctacaaaagcctgatgggcgcgatcctggtcaaggctccgtccactcaagggacacgatcccgcctcgcccgagcctagcctcgggcaaaggcagccgacccaggaggattcacgcctcgcccgaagatctcctcaagcaacggacgcaccttcgactcgcccgaggcccagctcgggcaggcttcgtggagaagcaaccttggccggatcgctacgccaaccgaccgtatcgcaggagcatttaa

SEQ ID NO: 33760 - DNA, 813 bp, Zea mays
  Peptide Sequence Number=SeqID_75539
atgaagttactgaagaagtacgtcaccttgctcaagacgagcaagaccgaaggtcccagcacagggagcttcatcaagagggcttgttcaacgacgatggatgaactcaagactcccgaaacggagtatcgtcccgggttgaagaggttgctggagactacccatctggagcttgacgggaagctgttcgtcaacacgcagcaggcccctacctggcgcgccaactgtcggcgtttcgacaccggggggtccctggaccgacgaggcagatgcgcttgcagtagggggttacaagcgttcgcgagggagagagagagactgtctgccagcccgttctcccgcgcggccaccttctcgtacgagagccctggtccttccttttatagacgtaaggagagggcccaggtgtacaatggggagtccgagccctggggtcgggtgaggcggagtccatcatccggcgccgaggttgagcccgagccctggggtcgggcgaggcggagcttcctatggcgcccgaggctggacttagctgctgtcagcctcactctgtcgagtggcacagcagtcggagcagggcaggcggcgctgttttcctgtcaggtcggtctgtggagcggcaaagtgactgcggtcacttcggccctgttgactgaggagcgcgcgttaggacaagcgatccggctaaggttgcttctcggcgaagcctgcccgagctgggcctcgggcgagtcgaagcttagtgctgatgggggttaccagctgagatttaggagtcttgtgggtacccctaattatggtccccgacagtag

SEQ ID NO: 33761 - DNA, 198 bp, Zea mays
  Peptide Sequence Number=SeqID_75540
atgtcgcggacggcgggtttattctggaaaaagacaggggctcttatgcaaaattgccacggcgaaaggccagccgtacagcggcggtgcggtgacgaccgcggttcagataaagtccggcgagcaatcacccgcacgctggcgaactacgagctacaacgattggtaccataccaccctcaagctatggcgacttaa

SEQ ID NO: 33762 - DNA, 447 bp, Zea mays
  Peptide Sequence Number=SeqID_75541
atgtcgcggacggagggtttattctggaaaaagacaggggctcttatgcaaaattgccacggcgaaaggccgtacaacccgagatcaacgaccccagcactctcctctaaccaggcggccaacccggcggcgccgccccatcaaacgacgacgaagctcaccggcaatgccccaaatccgatctccagtgcccaaaccacaaattgcgactacctacgcgatgcggacaagaaggcgaaacggacaatggataacttactcccgtcacggcaaggtcatggtttggcggcggcaatggcggacgcggcttccgctgatcaacaccaacgtgaaattggtgaagctccacttgagcaccacggtgtaacaggttgcaatccccgtcgcaagcaccaggcggcaatccccattccaccagaggatcccgagcgaccaccagagcgctaa

SEQ ID NO: 33763 - DNA, 321 bp, Zea mays
  Peptide Sequence Number=SeqID_75542
atggggcatggcgcttcgcaggagcacggtggaccttcgtggcgcctcgtcaagtgcagtgatggctcggtgctgcggcaattgctcgctgtggcggatctgccatcgcggggccgcatggtgccatggcgggaagggtgcgctgctgattcggtgttcggtacacggcgcttcctccctgtacgtgtggatacctcggaggtgctgcatctggagcacttggacgaaccgtgcgaggacgtgaaggacgccggcgactgcacggcactgctcgacgcgttcgtctacatcgagacgtcttccgctgctctgcgcgtctag

SEQ ID NO: 33764 - DNA, 2961 bp, Zea mays
  Peptide Sequence Number=SeqID_75543
atgaaatgcaagttggtggtgcagataggtccgcaatctgttgtggtcgctagagggcaagcttaccctccgaaggatgttgtaacagtccatgggattgagcggcgagatgaccacacaaaagtgcaggttgattttgtgtttgacaacttcttggaatttccactccctattcctatcgctggtggtgatatgttcactcttggcgaagccaaaaattcatttgtgttatggcctaagtcaggcatacaactagcagaggaaacaacagttcatgcaaagcctcaacaagtcccagacacatcgcctcaggtactccatcacacacctgaaaaggataaaatgccaacaccaacaatggataccgagaatatagatgtcacacatagtgcctccaatgtcagcaagaagaggaaacataagcataaaaaacatagcaaaagcaaagagaaggagcaaaaaacttcacaacagaaaaacatagaagatgatggtcttgatcccctttggactcccccctttcatcaacgatctccaccaccagttccaaataataaacaatttgtgctagggcagcctttagtatctagtgcattgcttaagaggatgggtaaacagagccaatgtttccacaaatggtattttgctatgaccacaccaatatctcgaaggcaaagtgccacacacttcatggtacgatacgaagaacatgattttcttgaaaaatcttgggtctatgcagtagaattcagtgatgtatttcacatctacaatgatcttgcccttgacatatccttacatcggagttggatgctatgcatgaggaagatagacaaatacagaggcatagttggctttttagatccagagatgatcattttaaagagaatcaatgaagaggctgatgaagtcgaagcatacattgtgaaagcattgcttgctcagcaggacaaggagtgcatatttgttgtttgccaggaaggggcttttggtgcttatgccgacaaaaaaggtcgccataacaagaattttggtcgcacagttatatggaaacattttcagggtcatgctggttttgcaacatgtccattattgcctgatgagatagcaaatgtccgagaacggttgctcgacttcttcatgaatgaggtgatagacattggtggatcatgcagggttgaggtctccggcgaggtgccggacgagccggtggtgtcgaagaagtcggggcttctcttcgagcggcggctcatcgagcgctacattgaggaccatggcaagtgccccatcaccaaggaggagcttactatggatgatatcgtgtcggtcaagaccaacaagacaactgctacaccgttgttactagcttcacctcatcagtctactagtgtgtcaacgagtttgcatactggatttctgcgttctcgaagtacctcaggattgcctaggcaaccttcatatactactggatttgggattgctttaaatatagagacacttgttgccgtcacggaacaaagagatacaccaattgagacacctccacctgaagttcaggacaagattctttttatgatcaacaatatatccatctccaatatggaagttaaggcaaaggaatttaacgaggtcatacaggaacagtattatccttggtttgcacaatacatggtcatgaaaagggcaagcattgaaccaaatttccatgatctgtatctgaagttctttgataaagtaaactcaaaatccttgaacaaggaaatactgaaagccacatatgagaattgcaaggtcttgttaagatcagaccttatcaaatctagttccgaggagcgctccttgctaaaaaaacctaggcagttggttgggaaagttcaccattggtgtacaattcacttcaatgttaataatcagatgacaaacactgtgacaaacatgaaccggtatattctttcattatcagatgacaaacaattggtccccgggcttatttctctaatagaacagggaactgatgttctgcgtgtgaaggcccttttgtttgttgctctgctttgcaagaatagtcgaaggtggcttcctcatttcttttgcaatgcaaaattaatatcagctgttgatagactgggaaaggagaaggagggttttattcatcattgtacagaagcatttgtgcagttggttgcttccttggtccctggtattcttgacactgtctccagcgatatacagcaggttatggttggcaaacgtcatggacctgttactgctttagctgggcgagctcatccaaagagcacaattcatctgttccctgttattcttcatcttctaggaagtgcatccttcaagcatagagttgtgacaggccatgtattgcttcagttggcaaatcttattaagattttggaggcaccatttcaggtgctatttaagaaccttactgttgacataaaggatgtgaaaccaacttccctgctcaaagatcgtctgcgtgaagtcgagggaaatccagatttttcaaataaagatgttactgcatctcaaacccctgtggttgcagaagtcccttcagggaccatcccttcactaactcatatggaacaacaacctgagatcaatatcacatcccgagctatgagccttccaaatatacttaatcagtatgctgctcctgtccgtctacctacaaacaacacggtagaagatgacaaagttgctctgatgatgcctgagcaagtgccctcgttgacccaggtttcgccagcacaaacacaatcaacatcaccatctccattttcggttaaccaggcaaggatcatcaagtttgacgtcggcaacgtggtcatggtgactggcgggaggaacaccgagcgtgtaggagtcatcaagaacagggagaagcacaagggcagctttgagaccatccacgtgttgcttggagctttttgctatgtctag

SEQ ID NO: 33765 - DNA, 258 bp, Zea mays
  Peptide Sequence Number=SeqID_75544
atggtacagtgcctgctgaagatcagaccgacagcgcggctgacttaccgccagcgaccgattgccgtcgtgattcgtgcgacagccggcccaacttgtgctcgggaacgcgaagaagaagtggaagtcactgaagaaaggacaccaccaccctcggattctcaggcaggcaactgcttctactttgatatttgtggatccgagccagactcacctgtgaacgaaggcaagccccggtgcatttgccacctcccttga

SEQ ID NO: 33766 - DNA, 279 bp, Zea mays
  Peptide Sequence Number=SeqID_75545
atggtacagtactcggttgtggatcagatcgaccgcggcagaaaaatcttcaccgccgacgaccctcgccgtgattcacgccacctctgtcggattcgcgtcgccgatgacctgataaggccgccagaacgcgaagaagaagtggaagtcactgaagaaaggacaccaccaccctcggattctcaagcaggcaactgcttctactttgatatttgtggatccgagccagactcacctgtgaacgaaggcaagccccggtgcatttgccacctcccttga

SEQ ID NO: 33767 - DNA, 324 bp, Zea mays
  Peptide Sequence Number=SeqID_75546
atggtacactgcatgctgaagatcagatcgacagcgcggctgacttaccgccggcgaccgattgccgccgtgattcgtgcgacagccggcccaacttgtgctcgggaacgcgaagaagaagtggaagtcactgaagaaaggacaccaccaccctcggattctcaggcaggaaactgcttctactttgatatttgtggatccgagccagactcacctgtgaacgaaggcaagccccggatccactttagtaagcatttctgcaaaacagagtctttgattattgaaaagccttaccttgactcccttaagccagcatacccttga

SEQ ID NO: 33768 - DNA, 114 bp, Zea mays
  Peptide Sequence Number=SeqID_75547
atggtggaggccccctgggtgaggtaccttagccaagaatacgtccccatgttaacgtgggctgccaacaccactgctccccctcttgcccatatttcaggaaaagctaagtga

SEQ ID NO: 33769 - DNA, 672 bp, Zea mays
  Peptide Sequence Number=SeqID_75548
atggtggaggccccctgggtgaggtaccttagccaagaatacgtccccatgttaacgtgggctgccaacacctaccgctccccctcttgcccatatttcagggatgaactcgacgagggggagtggttcggcgggcagggaacgagcgcgatcgtctggccgggctgcgtggacggcgaagctccggcggggaacgcggatggggagcacgaactccggcgaggctccacggactccaagacggacagcgatggcgtggatgaactccagcgacggcatggcaagcaagagagtgaggaacgcgtgagagagagggagctcagggaggaaaagagctctgttgtggaagggagaagagatccgtctccaatttatagagggagaggagagggagagagagggtcggctggcgtcatgccattgatggcattcaaagagcttgaaaggagggagggattaacgaacgcagtgaaggttcataacgaaggagaaacagacacggctactcggcttcgggggcagggtcctcggcgcggcgcggaatcggggtcacgggcacaggcggcttcgcagtcggagtcggggcttcttgcttcgggcgcagtgctgcgtagcgtcctaggcgcgggcgggcatggtggcttagggcggggcaccgaggccgggtcctag

SEQ ID NO: 33770 - DNA, 501 bp, Zea mays
  Peptide Sequence Number=SeqID_75549
atggcggtccgccctttcacccgctggtttgggcgaaggtggaggagtgcttgtaaccgctgggcggttacacgctccgcgcgcggcggagcgcaacttcgcggaggttggcacctttcagccattgctcggcttcaaggattttcatcaggcagcctagctgcatcccctcaccaatggtcacccaagacggtgaccaccagttcgatggtggggagaagcaagccgggctgcggcctctgccctgccctcggcttcaaggatcttcatcatccttgctggggcagggggcgagctgagctggagctctacctcccgtacaagccggcgggccacctcttccttcagcattcaggggagagggcgctcaccggcctagcggagggagcggactccgacaacgaggggccgatcggccgccagcgtcgtcagctccagcatgcctggtttgctggctcagctggctctggcgcagcttccggtgccacctcccaccgctag

SEQ ID NO: 33771 - DNA, 708 bp, Zea mays
  Peptide Sequence Number=SeqID_75550
atgcctggtttgctggctcagctggctctggcgcagcttccggatccacctcccaccgctgggcagagtgtggctatctacccgccgtacgggcagctgttgcgccgcgtgcaccgggggaccgcccaagacgtcgcgcgttgccggggtggcgttcgtgttcttgggatgtcctgccctcgctccggcacgatgcctccacgcggaggtcggtgctcgcccgtccgggaggacttgagtggggatctgccggtgggcaggtggctgctgccgtcggtgctgaggtggtggccgccggagaaggcttctccgccgacgagatcgtcggcgccatctacgctccgggcctccggctctttggctttgatagcttgtcctcgcccctcgtgtggggacgcgggcgagggccttgtcgcagcagcgtctgtcctgaggcataggagtccctcggctcggtcggccttgccactcaaggcttctctcgctcagttaaggaaccctcggctgctctgcgatgagccggagccggaggcagcggtgtcagcatgtacagaggcggagttggctcgaaaagggggcttcgtcggcccaggagcaggggacttcccaggtcgaggaggcgtagcagcggcagatggaacctggccgggtcgtccactggcgggaccgaccccggagtcgggctgccgaggccatgagccgggctga

SEQ ID NO: 33772 - DNA, 375 bp, Zea mays
  Peptide Sequence Number=SeqID_75551
atgggcacggcggcgcactcggcgctcgggctcggcggcgctcgggctcgaggatggggacggcggcgcttggcctcggagacggtggcacttgggctcggggacggggaaggggacggtggcgcactcggagatgggcacggcggcgcgctcggcgctcgggctcggcggcgctcgggctcggggacggggacgacgacgcttggcctcggagacggtggcgctcggggacggggacgggcgcccagctcggagacggtggcggttgggctcgggctcggcgacgtcgtggcgggcgctcacggctcggagacggggacgggaacggcggcgcagcagcctggcggcgtagtatcagctccgggcgaaaactaa

SEQ ID NO: 33773 - DNA, 375 bp, Zea mays
  Peptide Sequence Number=SeqID_75552
atgggcacggcggcgcactcggcgctcgggctcggcggcgctcgggctcgaggacggggacggcggcgcttggcctcggagacggtggcgcttgggctcggggacggggaaggggacggtggcgcactcgaagatgggcacggcggcgcgctcggcgctcgggctcggcggcgctcgggctcggggacggggacggcggcgcttggcctcggagacggtggcgctcggggacggggacgggcgcccagctcggagacggtggcggttgggctcgggctcggcgacggcgtggcgggcgctcacggctcggagacggggacgggaacggcggcgcagcagcctggcggcgtagtatcagctccgggcgaaaactaa

SEQ ID NO: 33774 - DNA, 375 bp, Zea mays
  Peptide Sequence Number=SeqID_75553
atgggcacggcggcgcactcggcgctcgggctcggcggcgctcgggctcgaggacggggacggcggcgcttggcctcggagacggtggcgcttgggctcggggacggggaaggggacggtggcgcactcggagatgggcacggcggcgcgctcggcgctcgggctcggcggcgctcgggctcggggacggggacagcggcgcttggcctcggagacggtggcgctcggggacggggacgggcgcccagctcggagacggtggcggttgggctcgggctcggcgacggcgtggcgggcgctcacggctcggagacggggacgggaacggcggcgcagcagcctggcggcgtagtatcagctccgggcgaaaactaa

SEQ ID NO: 33775 - DNA, 420 bp, Zea mays
  Peptide Sequence Number=SeqID_75554
atgcattgcgcccttccaccttccgagcccccggatggggagcgcccatgttgctttcgtcttactggtgttggaggagcgcaacttcgcggaagttggtaccttttagccatcgctcggcttcaaggattttcatcaggcagcccggctgcatccccttgccgatggtcacccaagacggtgaccaccagtttgatggtggggagaagcaagccgggctgtggcctctgctctgccctcagcttcaaggatcttcatcatccttgctggggcggagggcaagctgagccggagctctacctcccgcacgggttcgtgggccaccttctccttcagcattcaggggagaaggcgctcaccggcctagcggaaggggcggacttcgacaacgaggggccgagcggccacaagcgtcattag

SEQ ID NO: 33776 - DNA, 804 bp, Zea mays
  Peptide Sequence Number=SeqID_75555
atggggagcgcccgtgttgctttcgtcttgctattgttggaggagcgcaacttcacggaagttggtacctttcagccatcgctcggcttcaaggattttcatcaggcagcccggctgcatccccttgccgatggggagaaggtgctcaccggcctagcggaaggggcggacttcgacaacgcggggccgagcggtcgcaagtgtcctggctctggcacggcttccggtgccacctcccaccgctgggcggagtgtggctatctgcccgccatacaggcggctgttgcgctacgcgcaccaggggaccgcccaagacgtcgcgcgctgctggggcggcgttcgtgttcttgggctgtcctgcctttgcttcagcatgacgccttcgcgtggaggtcggtgctcgcccgtccgggagtacccgagtggggatctgtcggtgggcagatggctgccgtcgtcggtgccgaggtgctggcggctgaagaagtcctcgtcaccgacaagatcgccgctgctatccgcgctccgggcctcggctctttggctttgatagcttgtcctagcccctcgagtggggacgcgggcgagggccttatcacagcagcgtctgcactgaggtcatcactgctactgtttggccgcccagagcggaggtcgttgtcgctcctgccggagaaccctcggctgctctgcgatgagccgaagccggaggcagcggtgtcagcatggacaaaggcagagttggccggagaagaaacttcatcggcccaggagcaggtgacttcccaggccaaggaggcgtag

SEQ ID NO: 33777 - DNA, 360 bp, Zea mays
  Peptide Sequence Number=SeqID_75556
atggtcgatgttgagtccgagccctggggtcgggcgaggcagagcttcctatggcgcccgaggctggacttggctgctgtcagcctcaccctggtgggtggcacagcagtcggagcagggcaggcggcgctgttttcctgtcaggaccgggggcacctggcaagcgcttatagtaccggctcaggtagattggatacaggcataggtcccaaagctttaccctgtggactggactataagttggttacgaagtttgcagatgaagttatgattgtgagatccatggatgctagtctagtgatacccccggtcatcttcctgtggatggatgtccttgtttcgctgtactttgatgaataa

SEQ ID NO: 33778 - DNA, 222 bp, Zea mays
  Peptide Sequence Number=SeqID_75557
atggggaacaaggccattgggcaaatcattgcccaaagaaagcagctcccaatgcccctgccaggtagaatgtgttgcaacaaggaggctacaaccgtgggtagcctcgtgcctagtacggaaagcgaagcatggacatccatccacgggaagatgaccgggggtatcactagactagcatccatggagctcaacatcataacttcatctgcaaacttctga

SEQ ID NO: 33779 - DNA, 2172 bp, Zea mays
  Peptide Sequence Number=SeqID_75558
atgccctccctgggcgagcagctagtgcgaagtcctgccttcgcgttggatctgcgtggccgggatcccgccgcattcgtgcgtgaagtggaagagggggttgtgcggattgtggggcgttatgtgtcgaggacggaggctctgcggagttgggatatctgtggatccaacgttcgcctgaatagggtcttcgggctgaattgcttgccatatggcggctatcccgaggatgacgctgtcgtggccgtcgaccgccgcgggaaaggaccagtggtcgtgactgaggaaggcccttctcaggaggctgccccagccgcgaagaagagaaaaatagccctcgggggagggatgtcttcgcccgaactccgggagtcttcggcgcgaatgctgaaggttaccgggggtcgatggccaaagaatgttctgatcccccgcacggctggcaaggacttttttacgtctcgtatggctcacgacttgaaggtttttccttacgggcaaaatattgttgttgttgtatcggtagtgatggagaaggatcgtcaagacgctgctcagaagcaccgggcggtcattaggatcggggatccttttcgtgaggcgaagaaggcgcggggagccacgaaatctgctaccccgggcagtagtaagccattgccagttgcgaaaccgaccgcccccgggcccagcaaggcttcaactggtgcgaaggctgctgcttctggcgcgggcaagccaccctcaggcgggcccgcgaaggggcgaagactgccttcgctggcgcgtacggacgaggcggcggcgcgtgttgctgacttcaacacggacatctgtgttggggattattttgttgggtcggatgtggggcaactggctgttgtcccgcctccggtggcggccacttcgccaacagcagtgattggggcgaagggtgccacgcgggactcgtgggctgcgttctgcgcgagcggcgagattctgtcggccgctgccgctaaggacgtggcgggctccatgtcccagcaactgaggcaagcgtcgcagcagccgaagcatgcggccgacttcgccgaccacgtcacgtcgggtgccttgactgcggagtttgctgccgaggtcgagagtctccgggcacagcatgcggatgctgtgcgggagaagtcggctgtgaaaagcaaaagccgcaggctgtcggagaaggtggccaccatggaggccgagaaggcggatctctggcgccagctggcggaggagaggagggaggcgaaccaggccatttctgatgcgcaagctgcgcaagccgaggccaagcttacgcgggcggagggcagtctagcccaccaactcgccgaggagctggaggcgaggctcgacgtcctgcgcaaccgcgtggacaaaggcgaggcctcgacgcgcgcggaggttgagcggacgcatgcgcagttcgtggactcgtaccgggagctgggtgcgcggaccgctgccttcgaggcgcttggccaagaagcgggcctcctcttccttgaatggatgcaggaggagctgggggtgctcccaacgatcatgacgggtcttatgtcctttgcctccctcgtcacctacgagggggccgtgaatgatttgtctcgcgaggagtgcaggcatttcgaggtcttcgaccaatcggacgaaaactttgaacgcgaaatcttcaaggtcgaggaccctgtgctgaagcagtcggcgagggcgctcttcgataggatgtggggcccgcacggccgagaaacggtccgggagcggtccgatcgggcaatagatcagatggcgcatgccgaaggggtcgaggaccttggtggtctagacggcgcgctgcctgaggccgcgggtgtggatccggcgccgccatctgatgccggcgagggcccctcgtcgaccccctcgccgactggagccggcgaagaccccgcaccagcccctgctgtaacacccggttttaaagaacaaagccgggtgcatctcatacatgcgccaaagaagacaacatatataataacagagtgtatagagataaatgtcataaaacatcagagtatttattacatagcggaagacttattacaaaataaaagtataaccataaaacgaactaaggatcgtcggcgccaatgtcgaccgagaaacgccacctag

SEQ ID NO: 33780 - DNA, 717 bp, Zea mays
  Peptide Sequence Number=SeqID_75559
atggcacgctaccccgaggtcacgggtgtggatccggcgcagccatctgatgccggcgagggcccctcgtcgacccccacgctgaccggagccggcgaagaccccgcaccagcccctgcgccgacatgtgaggacgcctcgaaggcggtggtcgaaccagctaccgaagaccccccggcggcggacgagccttcgcaggttccggcgtttgggcctgcgcaagcaaccactactgacaatactgattttgcggtggagacttcaattgtagtgcccgccgatgatagtgtgcttggctctatgtctgaatgttttgagtccaacggtgagtctgggagtttgtttccttggacggaggagtcctcggatgaaggcttggattattttgttgcgttagatgtggctgcggtggagatttcgccgcgtgttgagggtgctgaggatcttcctggtatgagtactgggtgtaggcggcgaagggtgttgggaaaacagtgtgtgggtgaattttcgcggagcggcaggcgccgtcgcatggggatggagcgtggccgacttcgagtaggcgggattggtaagcgagaattgttgtcctcaccgattggggcgggcataggcgagggggatctttgggagctttttgagggtgaggaattgaggataatgttgtttaattataggaagatgggtattattccgaaggttgagccgatgtga

SEQ ID NO: 33781 - DNA, 465 bp, Zea mays
  Peptide Sequence Number=SeqID_75560
atggactacaaccccacggtatggtgctgtcgcttccctctcgccttttctactttctgtgagagacttatcctggattccctgatgctttgtttggtggtgaggaagattcctgatgagctggtggagcactaccttggccaccgcagcgggtttcactgccccgaccttcgttttcactcttacatgtggatgaaaggaatagagcttcaatttcgatgggaccaggtcgcaacatccattaagctgccatatggctcccctgttcagctagagaggacggtattgctgcttccgctactgatatatgacattctcgtgctcatgtggtattttaagccctgcctctacatggaagtcggcctcgcttccgcggtcatcgcgctccggacctgcaccgatgtcgcgcacctcgcgcacgtgctcctgcagttacgcctcgcctggtacggcaagctcgtctag

SEQ ID NO: 33782 - DNA, 624 bp, Zea mays
  Peptide Sequence Number=SeqID_75561
atgcaatgccctcgcctgcccccgcccgcgtcgtgcccccgcctcgcttttgtcaccttctccgcccccacgccgctgctctgcctccgcctgacctctcccaggtcagtcctcctcctgaagcccgcgccgcctgcgccgaagttctttgatctagacggcgggggtgtttgggtccgcctcaccaatgtcggcgcagttgtcacctcgtctccacctccgaacgaagtgaagaaacatggccaacataatggctccaatagcaaaaaacatgtgcatcctcttgtgagatgcaatgtaccaaaagccaagagtacgcagcagagcatgcctaatggtggacatggatacattgtgaaatggacggagtatgttataagaggtaatgttagagctattgacaaggctaatgaaactgcgctcaccaggttcctatcatccctcatggactacaaccccacggtatggtgccgtcgcttccctctcgccttttctactttctgtgagagacttatcctggattccctgatgctttgtttggtggtgaggaagattcctgatgagctggtggagcactaccttggccaccgcagcgggtttcactgcccctaccttcgtttgtga

SEQ ID NO: 33783 - DNA, 387 bp, Zea mays
  Peptide Sequence Number=SeqID_75562
atgcagcggcagcaggcgccgcgggtggaggcattgccgcggctggggcagcagccttcatgctgccgcagccgccgccgcctctatctctcccttccctcttctctctgccctcacctatctcctcccttcccccacaaccgccttctcgtcttcatcccagaagctgctgccaggtcggccggggtcagccgacgcctggtggtgcgggcagacgtcaaggtcatatcaatgggcgaggcctgccgccgcgggctcgccgccggcatcgacaagctcgccgacgccgtcagcgtcacccttggccccaaagctgttgcgtcaatatcatctggcaatgatgaacatgttggtaatctcattgctgatgcattgaagattttttaa

SEQ ID NO: 33784 - DNA, 747 bp, Zea mays
  Peptide Sequence Number=SeqID_75563
atggcggttaatcagttccaacagcacggtgggagagctactcctcaaggaccgcatgaaacaacatatttggaattctctgagactcgacccccgctcttcattaaagcagaagaacctttagaagctgatgaatggtatgccattgaccaagtgaatacagatctgaagaaaaagaattgttttatgaggggactcaatgacaggcttcagcggaaaatggcaacatgcttggaccttacctacagtagggctgtcagtacggcactggcagtggaagctaaaactgcagggcatggaaaatcaaaggggtttggaggtttcccggcggcgcagcggacgcacaccatatcgacgggcgaggcctgccgccgcgggctcgccgcccgcatcgacaagctcgccgacgccgtcagcgtcaccctcggccccaaagacccatttggacctaaaatgttcgagctaacggtacactacgattcacctgttgctgctggtgttatgagggcaaaattggcagagtcatggagtttaccttacctggatgctttcggtgctgccaagaacatgcatgtttatgaggtctcatttatagattcttgggtattatcattgagtcctatgagacgagcatttctcaaggcgatgaggaaatctaacaatccacggagacatgttgtctatgctttcggggaccattatgacttccggaagaaacttcaaattataaaccttctcactaggtaa

SEQ ID NO: 33785 - DNA, 189 bp, Zea mays
  Peptide Sequence Number=SeqID_75564
atgaagcacaaaaccgcagctctcaagctcactcaaagatgtctctccaaagatttgaaatgggagaggcaagagatgagagaaaaccccagctcaactgcccggaggcaagttcagctggtgtatggtcaaagaggttcacagctgaagttgagttcagctgaagttgagaaagctcaactcagctga

SEQ ID NO: 33786 - DNA, 183 bp, Zea mays
  Peptide Sequence Number=SeqID_75565
atgaagcacaaaaccgcagctctcaagctcactcaaagatttctctccaaagatttgaaatgggagaggcaagagatgagagaaaaccccagctcaactgcccagaggcaagttcagctggtgtatggtcaaagaggttcacagctgaagttcagcccagctgaaaagctcagctgcagctga

SEQ ID NO: 33787 - DNA, 201 bp, Zea mays
  Peptide Sequence Number=SeqID_75566
atgatgaagaccatttgtgtcactgaatatctaaattacgaaggagactatatgccgctgcaacctcttgaagacgagaatgacactgttatcagtttcttatatcctctagaacccccggtgaagcagggtagaacaagaagaggcaggtttcaatctcaaagtggacagctcttcgctgtggcactttttgattcgtga

SEQ ID NO: 33788 - DNA, 825 bp, Zea mays
  Peptide Sequence Number=SeqID_75567
atggcgtcgagcgccggcggcgtgttgtcgtcgttggggaagaacgagtcctacctgtgtgctaacaaggtcagcatggacgacgcgccctacctcaagatggtggacatcaagatgtactccagctatgaggacctctccatggcgcttgagaagatgttcaactgcttcatcacttgtgagtactgttcggttctatgcttctgtctaatgcatttccctcttgtaagtactgtgtcgtccaatgccatttctgttagagaattgtcaagctacaggtgctttcagatcatgtttccttcaacactacaaggaaccggtgaaaattggacaatgatgaagaccatttgtgtcactgaatatctaaattacgaatatctaaattacgaagaagactatatgccgctgcaacctcttgaagacgagaatgacactgttatcagtttcttatatcctctagaacgcccgataagattccttatttattccaattgttatcattatagattctttgatgggcacggtgaagcagggcagaacaagaagaggcagagaattggagacactttagactttgaaattaagaggtggtctactggaaaacagggcaacttgcgcgctttgttatcaactttacaatgtattcgtccgagtgacaagaaggtagattaccaaatccagaagctcaccaatgcggctgacaatgccactgctcgagagaaatcaggaaatgcagaggcgaatgggaaggatgggcattcgaatgaggaagacctcctgaagtataggccaaacccagatatgatggacacagactggtcctga

SEQ ID NO: 33789 - DNA, 213 bp, Zea mays
  Peptide Sequence Number=SeqID_75568
atggggcaccgcctcgtagcttcggtcgcggctctggtgctcccctcgccaggatctagccccaagctaccagcggcctctcgcgttgctcatcgctccgagtgcgctgcctcgcgccctcgcccggttctgctctcccttcgttgctttgcggctctgcctgcgtctgggcatagcggcgctgccgtcctcggatcagaaggtgctaaatga

SEQ ID NO: 33790 - DNA, 162 bp, Zea mays
  Peptide Sequence Number=SeqID_75569
atgggccaccacacggcaccaccggtgataccagcaccaggaggagcttatgcaggagagggagctactccagtagagaatccaaacccgttacatgacttcgtcaacgagtttttcgcttctagaggtagtggtcacaactccaacgaccccgatatgtga

SEQ ID NO: 33791 - DNA, 576 bp, Zea mays
  Peptide Sequence Number=SeqID_75570
atggtcacgggccaatcagccgtgggaataggcatagcagttggcatgaccatagacgggccggcagtaattgcatcaacaggcacgcaggagcagcagtccaaccgccaatcagactctggtcatacggagagcggcacccgaccccaccacatgggcagaactaggggcaccacgtggcaaggaaagataatacgtcccgtggtgcatcgatggatccggacctccgagggataccagacccctatgcgaacggttccggagctcccaagaaggcatgccgggtccctcgaatattctagttttaccggtgtgatcgattcgacggagttgcgttctcatggaggctcttcgtcgcaggcgggttgtggtagcagccgtagtcggcactctgtatctagcatggaggacgctatgaggaagttgcaagaaaggtttcgtgaagagctgcggcaacaacaaatgggcattcctccaacagcaatcagaggatccagggtcatgggccacaacacggcaccaccggtgataccagcactaggaggagcttatgcaggggagggagctactacatga

SEQ ID NO: 33792 - DNA, 933 bp, Zea mays
  Peptide Sequence Number=SeqID_75571
atggctcgacttagacacactgcacgaaagtccgtcatccccttcttaccctcccgccttgctgagcgtccgcttcgccgtcccgtggccggacagtccagccacttggagagactgcaccaccgcctgcatgaggagcaggaacgtcgacgacaggcgcagcagggctcttctttctcgctccaccaggagatagagtctgtgaggagctgctcccctgtgcttcctctggaggcgcgccctgcaccaccactgggcgccccagcttctggagtagctgctggaggagacccagacgacggaggtggcgacgacagctcgagccacgacatcgacttctctgctaaccatgagccggaaggatgggttgctcgacccatcactcgcgacgctgctcgcgggtgtcacttccacgatgcgctcgacaccctgctacgtcgggcatttaaccggcatacttggtccgtcgagtatcgctgtgtgggtgcagaggcctgctcagagcactattctatctctgagcgggactcagctgaggcagccatgcaagatgctgcacggcgtgcgctttcgcactactgctcggtcttcggtggggcagctgacggtcttgacctgaagtattacccccgccgtccatctggcagcacaggaggcgtgattgtctcacctgttggtgagggcaatcctaggttgagcagcacagtcaacctagccgccgtgctaaacacggagctggaccatgcattagacgagctgagtagggctcgtgctgagatcgccctgctgcgggctgagcgcgcggaatgtcgtcacttggatggtggttcccccgctcccgtcgggactcagcacccgtaccgctcacctcagcgtggacaccagtcttatggcaatcctgactgcaagaccaagataactctagaaccatag

SEQ ID NO: 33793 - DNA, 390 bp, Zea mays
  Peptide Sequence Number=SeqID_75572
atgggtcaaacaacccatccttccggctcctggtcagcagaaaagtcagtgtcgtggctcgagttgtcgtcgccacctccgtcgtctgggtctcctccagcagctactccagaggctggggcgcccagtggtggcggtggtgcagcctctccaagtggctggactgtccggccatgggacggcgaagcggacgctcagcaaggcgggaggctttatcttctcctgagcagtggttgcaatgctgacaacctggggagggggggtttggtgtgtagagcaaggctaagggcacccaattccaccctcatggttgcactgttttcccaggcggtcatccaaagaataggtccttatggagaggcactcgagaaaccgctcgagcccccttaa

SEQ ID NO: 33794 - DNA, 354 bp, Zea mays
  Peptide Sequence Number=SeqID_75573
atgggtcagaggacacttgccttcaccaaactgctgatcagggacttcctctgcaacttcctcgggaaacacagactgcccgttgtctacgtaaaggccatccgatctgagatggatggcggggatggggcggctggcttctgtccccttctccagccagctgaggcggcggcggccgcacccgcggcggagaagctcaccggaggcgagggcgcgggggctctgcgggtccttagggcgaccggagtggcctgggaggttggggaaggcgcggggaatcctctggcgggggctaggtcgggacaggggcaccggaggggggcggtccacggcgaagtggctcggcggcgctaa

SEQ ID NO: 33795 - DNA, 663 bp, Zea mays
  Peptide Sequence Number=SeqID_75574
atgggccgttggatctccggggcaccggaggggggcggtccacggcgaagtggctcggcggcggcgctaagggactccggcgagcaattaagcgcagcagagagccatagaggggaagggagagggcagaggaggttccttacctcaaggcgaaccccagggactcctcggaggcggcgaattcgcggcgacggctccggtcggcggtggtggaccactgcggctgcacgaaggacggcgggtgagagcgggcagagggaattagagagggggaggggaaattggagcgcgtcccgggttgcggacgtcggggcggagctcaccgtggcagagggcacggcggagctccaacggcgacgaggaaacgtgctcgggcggcggcggtttaatggcggcggcgctctggcgtgtgcgcagcgtggggaggtgggagaggggtctgcaagtgcacaaatgagggagggggagagggcgtgcgaggctctgggctcaagtgaccgaggcgaggtggttgcgagctccacgcgcgacgtgggcgcggagtccgcggcatgcgaagaccggggcggcggttacgcgaagacggaggagctgacagctcgggcccgtgagcagagagagagaagaaagcgggcgcgggcgcggagaaggcggccgcgctga

SEQ ID NO: 33796 - DNA, 396 bp, Zea mays
  Peptide Sequence Number=SeqID_75575
atgttggccgctggcgccaatccacatgttcactgccgtcggggtctcaacacagggcttgggggattgctggggcatcccaatagtaccggtgaccttgctaccctcagagctagagctgtcgcgccgcaatttctcgccggcgccagatctccatctcagaccggcataccaccgtggcgggtgtctacgcagcataaaatccgcgtcggggtaagctgctccggcatgggcgccactggacctggtgctcgtcatcgtttgtggaaggcaggggtagaagaagagattggatcacagtcgttcaaaatccaaaccattgatcccagatctaacggctctgatcgcatcacgatccgatccgaggtggtcctgatcatggccgtggacttctaa

SEQ ID NO: 33797 - DNA, 447 bp, Zea mays
  Peptide Sequence Number=SeqID_75576
atgggcgagatctcaccggattttatgctgcgtagacacccgccacggtggtatgccggtctgagatggagatctggcgccggcgagaaattgcggcgcgacagctctagctctgagggtagcaaggtcaccggtactattgggatgccccagcaatcccccaagccctgtgttgagaccccgacggcagtgaacatgtggattggcgccagcggccaacatcccactctctgttctctctccctacgtgatttctgtaaacacggcgccgattcttcagctctctggtatggtggcgccggagtagttcatgagctctggctggagaggcaaggggtcacggggttcagcgaaacatggacatccatccacaggaagatgaccgggggtatcactagactagcatccatcgagttcaccatcaaaatcttcatctgcaacttctga

SEQ ID NO: 33798 - DNA, 873 bp, Zea mays
  Peptide Sequence Number=SeqID_75577
atggaccacgccgcacaccatgcctctgtggctgcaccgtgggccccatctgtcataagcaacctctacgaaaccacctctccgttggatccaatttcattctccctgtgcatgcctaggaactggagcctcccagccccattcaaccccctagcttccttcctctacctcaaaaaccgtcgaatgcccctcccctcaaccagcgtcttggtcagcaccgacgagccgctggcgaagctgcccctccaccggtcggagctctcctgccccgcgcattcctccatggctgagggcacccctgcgcatagacctcgtgcgctcctcggcctgtgccccactcctcgcctggctcggcggcccccggccagcgcggcccgcggcgtacagccggcgcggccagcgcggctcgcctgcacggcggccagccgacgcagctcgccagcgcggatgcctcaccgtgcacacgtccaacagccgcacgcgggctcgtcgtctgcacgcccggcacgcttcgtcgtccgccgtcgtcgcaaggtgagatctcatccacccacccctttcttcctcgtcgtctgccgtgtacccgccccgctgtgcacgataccgttcgtcgcgcgccgtcgatcgctcgcgcgcccaaaccagagtcgccctcgccactgtgtcgtcgtgcccgatcgcccacgctcgagccgcgccttgtgcacgttgctgttgtctgcacttgtctctgttgggtgtcgtcgccgaggtgagaacgctgtctaccccggtgttgacgaggatgatgtttatgactatggtaatggtaaagaagaaggtgtcgaggcggatctccaggagttccaggacttcgacgagttcgaggattag

SEQ ID NO: 33799 - DNA, 291 bp, Zea mays
  Peptide Sequence Number=SeqID_75578
atggaggaatgcgcggggcaggagagctccgaccggtggaggggcagcttcgccagcgactcgtcggggctgaccaagacactggttgcggggtgcggcggggtaggggtgaccggaacctcgccggtgtcgagcagggagagagagagagtcgagggccggaacagcgcggcggggctgctgtttgccgaagccagtgcgggtcgtggcgaggcgaattcgcggtcggaatggatagagagaaagaggtccctgcgggggaaggaaagaggaagaatgggctcaccttag

SEQ ID NO: 33800 - DNA, 255 bp, Zea mays
  Peptide Sequence Number=SeqID_75579
atgttcggattaccggtggcaatgagattgttggttttggtattgactctggtaatggttgtcagcattacaaccactgctcaggagaagatgaagccgtggaaggagacttccaggagttccaagactacgatgagttctagatgtgggttagcggtaacccctagtcggctgcctgtgaaggccgcgtgtatctacgtttcttttccgcactttgattattgtaaaaactatgtggatgtctcagacatatga

SEQ ID NO: 33801 - DNA, 811 bp, Zea mays
  Peptide Sequence Number=SeqID_75580
tgatgccctgctggaccacctaggcaatggtcaatggggagtagctctctccgggcagaaagggaatcacggcttgtgggtaaaagatgttcggattacaggtggcaatgagattgttggttttggtattgactctggtaatgcaggagatagagtctgtgaggagctgctcccccgtgcttcccatagaggcgcccctgcaccaccactggacgccctagcccctggagtagctgctggaggagacccagacgacggaggaggcgacagcagctcgagccacgacaccgacttttctgctgaccaggagccggaaggatgggttgctcgacccatcactcgcgacgctgctcgcgggtgtcacttccacgatgcgcttgacaccctgctacgtcgggcacttgaccgacctgaggcggccatgcaatatgccgcacggcgtgcgctttcgcactactgctcagttttcggtggggtagccgacggtctcaacctaaagtattacccccgccgcccatttgacagcacaggaggcgtgattgtctcacctgttggtgaggacaatcctaggttgagcagcacagtcaacctagccgccgtgctaaacacggagctggaccatgcgctagacgagttgagtagggctcatgctgagatcgcccagttgcgggctgagcgcgtggaacgtcgtcacctggacgatggttcccccgctcccgtcaggactcagcacccgtaccgctcacctcggcgtggacaccagtcttatggcaatcctgactgcaagaccaagatagacttatacccatag

SEQ ID NO: 33802 - DNA, 306 bp, Zea mays
  Peptide Sequence Number=SeqID_75581
atggccgcgctgctgtgctgcgcgggggcgggagcgcgagcggggggtcgccgtcttggaggccatgcaggggaggtgccgcacgagcagggggtcgccgtcttggggtccgcaggggcgcgcgtccaatggctgccgcggggccgcgttcgtgccgtgcctggtgaagaccacggccgccggtggccagggctaggggctgggcgatgcttgagactgattgatgcaattcttgaggatcccttggacttgtgggttaggacccacacacgctttccgctgcttcactttgatcttgttggttga

SEQ ID NO: 33803 - DNA, 330 bp, Zea mays
  Peptide Sequence Number=SeqID_75582
atgacgcacggcgaggagaaacgtggacagcaggtccacgaagctccggtggagaaggtgctaggcgtcggagtttcttcaaccgctcgccagggcctgcccgtcgcgctgggcatgcgcaggctgccatgcttgagaccaattgatgcaattcttgaggatctcttggacctatgggttaggacccacacacgctttcgctgcaccactctgatcttgttggttgatgttgatcgcattgtcttcattggggttcgtggcaaaccccttaacaggagctttgatatgcacttggtgaagatgctgccgattttgatcttgactgattaa

SEQ ID NO: 33804 - DNA, 783 bp, Zea mays
  Peptide Sequence Number=SeqID_75583
atgaagacaatgcgatcaacatcaaccaacaagatcagagtggcgcagcggaagcgtgtctgggtcctaacccacaggtccaagggatcctcaagaattgcatcaattggtttcgagtatctgaaggtcaaagcaaccacccagcgcgccatgcctgcccagccctcgtcgtgccccaagcaaccatgccacgcgcgccctggcgaggaacgccacgcgccctgctccctcgcgcgggcgagccccaccccaaacccatggccgggcgagctcccccctctccccgcgcgcgagtctcggccgagcagccgcaacctcggtcgtgatcccccaccgctgtcgccgtgtgctgaggcccctggcagagggcccgagccacctggtatggccagcccaatggcaccggccccgacaataacaaagacgatgatcatcaccgacatgaactactacccggtgtccaagtgccacttcgacctgagtgacacggtgttcggcaagctggccaagcccgacctcaacgacaagctccgcccctctggcatcatcgacatcgagttcaccaggattcatcgtcgacattggggttcgagtctagtttggttgcgcggaggcatgttatatggtgacctccagatttatgttgccgatgtggtgctccatctcggcaataggaaagtggtgatgagaatggtgggttttgattatgattatggtaatggtaaagaaggcgttgaggcggatttccatgagttccaggacatcgacgagttcaaggattag

SEQ ID NO: 33805 - DNA, 1179 bp, Zea mays
  Peptide Sequence Number=SeqID_75584
atgtatcgcgtccttccaccttccgagcccccggatggggagcactcgcgttgctttcgtcttgtcgtcgttggaggaacgcaacttcgcggaagttggtacctttcagccatcgctcggcttcaaggattttcatcaggcagcccgactacatcccctcgccggtggtcacccaagacggtgaccaccagtttgatggtggggagaagcaagccgggctgtgacctctgccccaccctcagcttcaaggatcttcatcatcctggctggggcggaggctggactgagccagagctctacctctcgcgcgggttcgtgggtcaccttctccctcagcattcaggggagagggcgctcaccggcctagcgggagggtcgaacttcgactacgcggggctggtcggcggcgagcgtcgtcagcttcagcgcgttgggctcgctggctcagctggctctggctcggctcccagtgcccactcccgccgcgagagcagttgtcgcgccgcgtgcaccggagggccacccaagacgtcgcgcgctgctagggcggcgttcgtgttcttgggttgtcctgcctttgctccggtacgacgcctctacgcggaggtcggtgctcgcccgcccgggaggatccgagtggggatctgccggtgggcagatggcttccgtcgttggcgcggaggtggtgcgttcgccctgaggccatcgctgctgttgtttggccacctggagcggaggtcgttgtcgctgctgccggagcgggcggcggagtccctcggctcggtcggccttgccgcccgaggcttctcttgcttagttaaaggaaccctcggccgctctgcgatgagccggagccggaggcagcagtgtaagcatggacagaggcagagttggctcgaaaagaggcttcgtcggccggagcctggccgggctgtccactggcgggaccagcgccagagtcgagttgccgaggccatgagccgggctggtgtcctcgggggacagctggctgaggcttcggggcggccggccgagccgtctgctcggaccgggttcctggaggagaccctggcggcgatggctcggtcggacttcgccgaaggtggagttgacgccgaggccggtgctgctgctccccctccatcgacgtctgagcctgcaggatcggttcgcctgtag

SEQ ID NO: 33806 - DNA, 1128 bp, Zea mays
  Peptide Sequence Number=SeqID_75585
atggctgaaaggtaccaacttccgcgaagttgctttcctccaacgacaacaagacgaaagcgacgcgagcgctccccatctgggggctcggaaagtggaaggacgcgatacatggagcgcgaagacatggttgccatccaagggggtcaccctccttttaaaggcgactctccccacttgcgccctcagccggcacggactgagtcttctccaacatgctccaaggtcctccctctacgacacgggggctgggtcccacgcgtcatgcaagctggcccaggacagaaggagccaaaaccgccacgcgcggtgcgcgcaactgcccagcggttacaagcattcctccactatcgtccggaccagcgggtgagagggcgaaccgccatgcaggcggcatgcaaccgcaccaagggggcgcaccctttcgacttcgacgcgtccagcatggaggcccaggcccacacgtcatgtaaccggcgcgccggttactacgtgcgagaaactgcaccgccactcgcgccagtaccgcgcctcctcgactgcggaacaggtgggcggaagcagcagtcaagtcgtcagcaagctcacgccccctcatgggacagcgagagaaccctctcccacggtgacaggcggcacctttggcaggcgaagcaggcgacgcttcacctccgccataatgaccgcgtcaaaaaagggaccgggaaaggggatactccgaaagggatccttctctgcgaaggaagcgggccccgagcccccctactgatcagaggttcgaaggctggcccctcggaagggttcaacagccgcctcagagcactcgggctccgcgcccactactggtcagaggttcgaaggctggcccctcggaagggttcaacggccgcctcaggccactcgggctccgcgcccactactgatcaggggttcgtaggctggcccccaaagggttcgacagccgcctcagagcacgcagagcgagggataaccctgggctcgggggctgctctcgcaaacccggctccggccaaaccgttgacagcgtcaacataccagcccgagaacttgggactcgactatgcacccgggctacggccaattcgcatgagggaacaaccagactag

SEQ ID NO: 33807 - DNA, 750 bp, Zea mays
  Peptide Sequence Number=SeqID_75586
atggcagaggagcttttcaatcagccttttgattatgagaactgtttgagagataataggtattgttctcttagcccatttggttttctcccaagtctaaggcatgcccacgaaggaatttattctcaatttcgtcacttcacaatcatgcacaggttttgtggtgttttgaattcttttgtcaagcgaacatccaatggaaagcatgagcagtttgttactgctcggcggcaagatttgcctgtaagttcaaagcagggagcagacactaagtccgagaaggataattccacaatattagataaggctggcaatggtcctgttgacaaagaacaatcagttgatgcctatgcaagcaaaagtaaagctcaaaatggaaaggccatgcctagtaatggtggatcgctggctaacatgtggggtcgtgcatcagcaaaacctatgcctccaagtaccactaattctacagctgtagcaagtgttgcagctactgctgatgcacaaatttgtgcgaaggaagaagcagatggaaatagcagcgatgatgaacatgggataaactacaagaggggatccactaatgcaaataacagaaagagaacagtggtatttgattattcggatgatgaggaagatgacaatattgtaagcattgcatctcctgagctaccaaaacagcataccccagaccttgttgttggaattgttactatatcggtaaccaaaagcccaatgatcgaagttgtttag

SEQ ID NO: 33808 - DNA, 861 bp, Zea mays
  Peptide Sequence Number=SeqID_75587
atggcagaggagcttttcaatcagccttttgattatgagaactgtttgagagataataggtattgttctcttagcccatttggttttctcccaagtctaaggcatgcccacgaaggaatttattctcaatttcgtcacttcacaatcatgcacaggttttgtggtgttttgaattcttttgtcaagcgaacatccaatggaaagcatgagcagtttgttactgctcggcggcaagatttgcctgtaagttcaaagcagggagcagacactaagtccgagaaggataattccacaatattagataaggctggcaatggtcctgttgacaaagaacaatcagttgatgcctatgcaagcaaaagtaaagctcaaaatggaaaggccatgcctagtaatggtggatcgctggctaacatgtggggtcgtgcatcagcaaaacctatgcctccaagtaccactaattctacagctgtagcaagtgttgcagctactgctgatgcacaaatttgtgcgaaggaagaagcagatggaaatagcagcgatgatgaacatgggataaactacaagaggggatccactaatgcaaataacagaaagagaacagtggtatttgattattcggatgatgaggaagatgacaatattgtaagcattgcatctcctgagctaccaaaacagcataccccagaccttgttgttggaattgttactatatcggtaaccaaaagcccaatgatcgaagttgttagcttgctgttcgtaatctaccattacgcaacagtagaggaaattggatcaataccattcagtgagccactaacacacatcataatagcattcaaatgtgtatacaaactttag

SEQ ID NO: 33809 - DNA, 612 bp, Zea mays
  Peptide Sequence Number=SeqID_75588
atggtagccagtcgacgctggcggcaaagtcggccgccctgggtccagcaaggtgccggaggtcgtgaaggcagccggagccggcggaaccaagtctgcctggctggagccgcgaaggcccgagaattgccttcgccggggaagcgcgttgccgacttcggcaccgatattagagtggacgattatctcgttggatcgggcgaggggcaacttgttgttgttccgcctgcggtggcgaccgtggtgtctgccgcggtgcctggggcaaagggtagcgctctcagcgctggtggtgagattccggcgctcactgccgtcaaggacgaggcgggcgttgtgtcccgccggctgaaggaggcgtcgcagcagctaagtcaggcggctgacttcgctgaccgtgtggcgtcgggggcccttacggtagttgtgtctgccaaagtcgagagacttcgggcgcagcatgctgacgccgtccgggaaaagtcggccgtcgatagcaagtgccgcaagctggcggagaaggtggtcgcgctggagggcgagaggactgacctccggcgccagctggcggaggagaggagggaggctaatcaggccctcgccaaggcgtag

SEQ ID NO: 33810 - DNA, 312 bp, Zea mays
  Peptide Sequence Number=SeqID_75589
atggaggcccaggcccacgcgtcatgcaaccggcgcgccggttgctacgtgcgagcaactgcaccgccactcgcaccactaccacgcctcctcgactgcggaaccagtaccgtgactcgaggcaaccctgcgtatgacccagcagtgccagccagaggctcgggggctgctctcgcaaacccggctccggccaaaccgttgacagcgtcaacataccagcccgagaacttgagacccgaccgtgcacccgggctacggccagctcgcatgagggaacaaccaaaccagccgaagtgttgcgaaacgcactaa

SEQ ID NO: 33811 - DNA, 303 bp, Zea mays
  Peptide Sequence Number=SeqID_75590
atggctgaaaggtaccaactcccacggagttgcgttcctccaacgatgaggcgaaaagacggcgggtatcccccatccgggggcttggaaggtggaaagacacgatgcataagggagcgcgaagacatggtcgccttccgaaggggaggctcgggggctgctctcgcaaacccggctctggccgaaccgttgacagcgtcaacataccagcccgagaacttgggacccgaccgtacacccgggctacggccagctcgcatgagggaacaaccagaccagccgaagcattacacgaggcattaa

SEQ ID NO: 33812 - DNA, 1197 bp, Zea mays
  Peptide Sequence Number=SeqID_75591
atggaggcccagacccacgcgtcatgcaaccggcgcgccgaatgcttcgtgcaggcaactgcaccgccacctgcgccaccaccacgcctcctcgactgcggaatcaataccgtgactcgaggcgacccagcgcacgacccagcggctccagcctggcgcgacgacaacgcgcccgtgttccgttcctcgaacggctcgcgcacgcgcaacggctgccctgcgaaccactcgccccgtcacattaactccgcggcaggacaggcgggaccgggaaagggggataccccgaaaaggacccttccccgtgaaggaaccaggctccgagcctccctactgatcagaggttcgaaggctggcccctcggaagggttcaatagccgcctcagagcacgtgggctccacacccactactggtcagaggttcgaaggccagcccctcggaagggttcaacggccgcctcaggctactcgggctccgcgcccactactgatcagggcgggaacgatcttgtaatggaatcccatcagagggaggcatcgagccctcggaccccgtcgccaggggaccgggtccggcagatcacccgcagctcaccggagacaccatgttcggcgcccaccgagggcaacatggcgctctcccccctcctccttgcggaaaggcgacgcaggggcgtatgtaaaaaagtcgagtatgtccgtgatcgccctctcgccctacgcagaggctcgggggctgctctcgagtatgtccgtgatcgccctctcgccctacccaaaccgttgacagcgtcaacataccagcccgagaacttgggacccgaccggatcagtccattcgagggactcgatcacgcctcgcccgagcctagcctcggacaagggcagccgaccccggaggatctccgcctcgcccgaggcccccctccagcggcgaacacgttcccggctcgcccgaggccctgtcttcgccaagaagcaaccccgaccaaatcgcaggggcatttaatgcaaaggtggcctgacacctttatcctgacgcgcgcccctcagctgacagagtcgaaggctcggactcgggctaagccccggaagacggcgaactccgctccgcccgacccagggctcggactcgggctaagccccggaagacggcgaactccgctccgcccgacccagggctcggactcgggctaa

SEQ ID NO: 33813 - DNA, 366 bp, Zea mays
  Peptide Sequence Number=SeqID_75592
atggcgcacgtggggcaccatcattactcgtcgccggggcgattcgtgtggcgcccgttgcgcgtgcgagccgttcgaggaacggggcacgggcgcgtcgtcttcacgccgtgggagagggctctcccgttgcttcaggaggggacacgagcctgcaggcgacttgaccgctgcctccgctcgtctgccgctgcacttactaccggcccgcttttgaccatgccaaccatcgtgcctaccccacggctgaccggcccgtggccgtcacctttaactgcactgttgggtcctgcgcagggctacctcgagtcgcggtaccggttccgcagtcgaggaggcgcagcattggcgcgagtggcggtgtaa

SEQ ID NO: 33814 - DNA, 690 bp, Zea mays
  Peptide Sequence Number=SeqID_75593
atgttgccctcggagggcgccgaacatggtgtttccagtgagctgctaacggaccccttcgacagggtccgagggctcgatgcctccctccggcgattcgtgtggcgcccgttgcgcgtgcgagccgttcgaggaacggggcacgggcgcgtcgtcttcacgccgtgggagagggctctcccgttgcttcaggaggggacacgagcctgcaggcgacttgaccgctgcctccgctcgtctgccgctgcacttactaccggcccgcttttgaccatgccaaccatcgtgcctaccccacggctgaccggcccgtggccgtcacctttaactgcactgttgggtcctgcgcagggctacctcgagtcgcggtaccggttccgcagtcgaggaggcgcagcattggcgcgagtggcggtggggagaaccctggaggatgtcagtggggatttcgcctgtgacgctaaggggtgcaacgccgccttgctcttgctgtcgttggaggagcgcgacctcgtggagatcggcacctttcagccatcgctcggcttcaaggatttttgtcgtgcagcccggctgcattccctcaccaatgggcagtttggtggggagaagcaagccgggctacggcctccgctccgccctcagcttcaaggatcttcgtcatccttgctgaggcggagggagagctga

SEQ ID NO: 33815 - DNA, 873 bp, Zea mays
  Peptide Sequence Number=SeqID_75594
atggaaacgaggttcggcggcctgcgcgaccgcctggacaaagcggaggcctctacgcgcgcggaggtcgaccggacgcatgcacagctcgtggatgtgtatcgggagcttggtgcgcggactgctccctttgaagcgtccagtcaagaggtgggcctccgcttccttgggtggctgctggaggtgctcccgacgattgtgacgggcctcatgtccttcgcctccctcatcacctgcgaaggggccgtgaatgccctttcccgcgagggatgcgagcactttgaagtcttcgaccaatcggacgaagattttgagcgcagaatcttgcaggttgaggacccggtgctgaagcggtcggctggggcgctttacgataggatgtggggccctcacggccgtgagaccgttcgagagaggtccgaccgggcgatggagcatcgcactgcccgaggcatcgaggtggagctggcgccgccatccgatgctggcgagggccccttggtgacccccgcgctgaccggtgctggcgaggaccctgtgccggccgctgcgccgactggtgaggacacttcgatggtggcgggcgaaccagctgctgaagaccctgtggtgtcggccaacccttcgcaggttgctacgcaagtttcgacgtatgggcctacacaagcaaccgctgctgacaatactatatttgtggcggccgcaaccgttgtgcctgccaatgataatttatctggttctggatctgagtgttttgagtctaatggtgagtctgggagtttgttttcctggactgaagagtcctcggatgaaggcttggattattttgctgcattagatgtggccgcaggtggaggttggcgaggtggctga

SEQ ID NO: 33816 - DNA, 741 bp, Zea mays
  Peptide Sequence Number=SeqID_75595
atggcccgcgcccgcgcttataaaaccctcccagacttagattgtacccttccgcgcaccctcaaacctcaccggagtctagctcgtcgccgtttgcccgtgcgcagcgagtccgcggccgcccaatccctcggccaccgtagaccggccagtggagccattcccaactccgtccagccctcggagaagactgtgcacaccccggtgaagctccccgagcgaggaattgaagtttgcttcgccggagaggccggcccacgctcgccggagctctcaaccccgccagagtacgtggaccgggtaatccactcaaccatccttcgattccttgtgcatacagtcgctacgttaccccgtaaagctcaccatgccctcggattgaaccagttcgccgtagtttggccggtacactcgccgccgacgagaacacccgcctgcacgcgtggaccggacgattccggccatccccgacgtcaagccgtacctcgacgtgaccgccagagtctccccgagccaaccccacccttcgccagacctccctcgccgctgacaataccaatccactatgttaccctaaaggaaaacctaaacctaaaagactgtaatcttgctgacggagagtacatcctcgtgccggagcaaggagctgctcaggaggtagccccagatccagcacccgagcctgcaccagaggacctgccagccactgctttggaaggcaagccccggttttatgcataa

SEQ ID NO: 33817 - DNA, 204 bp, Zea mays
  Peptide Sequence Number=SeqID_75596
atgggagttaaaacaataccaatccactatgttaccctaaaggaaaacctaaacctaaaagactgtaatcttgctgacggagagtacatcctcgtgccggagcaaggagctgctcaggaggtagccccagatccagcacccgagcctgcaccagaggacctgccagccactgctttggaaggcaagccccggttttatgcataa

SEQ ID NO: 33818 - DNA, 444 bp, Zea mays
  Peptide Sequence Number=SeqID_75597
atgaccgttcgaattggaggctcgcttactaccctacggaggtcggggaggggtcaatttatagtgctagcgggcggtggccgcgaatttcgagcaagacgcgcggcggtcggagatggagaagagcactggcgcacgcgaattagtgtcctacgccgtggcaacctcaccggcgttgatttgacagcagtagcaagttacagcgacgcggtggaagggttgagccacgcggcggacggccgggaggcggcggtcgacggtgagcttatcggcttctaccgtggtgacaccgtacggtggccggagttctttatcggtggaagcttatccacggcggcgtacaccggtgttacccacttacctgagaacaacgtggaccggctgccgcacgaatcacggcggcaatcggtcgccggcggtgaagttgccgcgctggcggcctga

SEQ ID NO: 33819 - DNA, 213 bp, Zea mays
  Peptide Sequence Number=SeqID_75598
atgacgaggcatgtgaccagtaaaagggtcctcggtcagcaggcctacatcgacaagattacagaaaggcccttccccttctatttcttctcccgatacgtcctcgacgacggcagcgcatggaggagctccggcgagccactgcaccggccgattgaggcgatgaccggcgcacccgagtggcggacaccaaatccaagctaccccgagtaa

SEQ ID NO: 33820 - DNA, 1005 bp, Zea mays
  Peptide Sequence Number=SeqID_75599
atgcctcataatatctgcgaagaagggctacgctccgataccagctgtgatggaacctcccaaggcagtgaccaagtcttcataaccgcgaagggtttcaaggagggtaatcaagatcaaggaagcaagcaagtgagaaagattttaaaaacatcaagggaggtggcaaatgcaccggggcttgccttcgttaacagcccagtggcccaacacaaagggagaaagcgcccgcgcgcacgctggcgatcttgtggaaagattacagaaaggcccttccccttctatttcttctcccgatacgtcctcgacgacggcagtgcacggaggagctccggcgagccactgcaccggccgattggaggcgatgaccggcggcacccgagcggcggacaccaaatccaagctaccccgagtaattcccccaagttaattgcacaaatcgtgaactactgtggtctggccacggtgaagcgcgcggatgaaccaaggatcccatgcgttcccgacggtcagtggacctttagttcaattgggcgggtcaacaagcatcgtagacatgtgagaatgcttaaacgagggagagggagggttggactgaccggaaagggggctggcctcggcgagcgcccaacggtggtgaccgtgaattttgggcgctaccgcgcggcggtcggaagtgaagaagaacacgggtgcagtgaatacgtgttccacgacgtggcagtaactccggtgatcgacgggaagctagagggagtcacggcgatgcggtggcgaggttgggacacgcggcgcaaggccggacgacggctatcaccggcgttcttatcggcttctaccgtggtgacacagtacggtggccggagttctttaacggttgaagcttatccacggcggcgtacaccggtgttacccacttaccccgagaacaacgtggaccggctgccgcacgaatcacggcggcaatcggtcgccggcggtgaagttgccgcgctggtggcctga

SEQ ID NO: 33821 - DNA, 384 bp, Zea mays
  Peptide Sequence Number=SeqID_75600
atgcccctgcaccaccacatggcatcccggctgctggaggagaccctgacagagacagagacaacgacgacggtggcagttcgagccacaccacagagctcttggaggagcaggagccggagggatggatcgcccgacccatcactcgtgacaccgctcgcggctgtcatttccatgacgctctcgacaccttactgtgtcgggccttcgactaacacacttagtccattgagtatcgttgtgtggtctactagcatcttcgtgggtcatacccggactaatgggagactacttgcttggtgcggcgtccgaacgatgatctccgaggtgcagaggccttctcagagcattattctatcactgagagggatactgccgaggtag

SEQ ID NO: 33822 - DNA, 405 bp, Zea mays
  Peptide Sequence Number=SeqID_75601
atgatctccggggtacagaggccttctcagagcattactctatcactgagagggatactgccgagcggggtagctggcgacctcgacctgaagtactacactcgccgttcgaccggaagtgctagaggtgtgattgtctcgcccattggtgagggcaatcctaggctgaacaacatggtcaacatggtcgccgtgctcaacaccgagctggatcacgtccttgacgagttgggcaaggttcgggtggaggttgtgaaattgcgtgctgagcgcgcagtgcgccactatcaagatgctggttctcccgctcctgtcggtattaagcacccttactgttcgccaccttgtggccactttgattatggcacccctgactgtaggacccagatagatttggagtcatag

SEQ ID NO: 33823 - DNA, 195 bp, Zea mays
  Peptide Sequence Number=SeqID_75602
atggcgagcgcgatgtggccaggggtgtatttggagaagaagcaaagttctgaggacctcgaaaacgaagaagagatcgaagtgactaaagagaagacaccaccaccttcggaatctcaggccgggaattgtttctactttgatatctgcgggtccgagcctgactcacctactaacgaaggcaagccccggtga

SEQ ID NO: 33824 - DNA, 213 bp, Zea mays
  Peptide Sequence Number=SeqID_75603
atggcgagcgcgatgtggccaggggtgtatttggagaagaagcaaagttctgaggacctcgaaaacgaagaagagatcaaagtgactgaagagaagacaccaccaccttcggaatctcaggccgggaattgtttctactttgatatctgcgggtccgagcctgactcacctactaacgaaggcgagccctggtgcatttgccaccttccttga

SEQ ID NO: 33825 - DNA, 585 bp, Zea mays
  Peptide Sequence Number=SeqID_75604
atggcggacctagaggtgggctcaatttggtcagaggaggtcgggagggggctgcccgcggggaggtggcggagcttcgcggcggggttgccgccggtgagctctgggcgagccgtcgaggtgggggggaggggtgtattgtgttcgcggcaaggtgaggaagctgctaggctaactcaattgcttgccgggctaaccgagagggagggagaagagggggagggactcaccggagagggggaagacggcggcgcttcgcgacttgggctcgggcgaggggaggagggtggtggtcgaggctggtgcgaggaagaaggggctcgaggcgagctttttataggcgcgcgggggcgaggggagcggtggagctccctgactccggcgagcttcccggtgccgccattaatggcgcacagcgccgccgaggggacgctacggcggggcagtactggcgaggacgctggtcaaggggaggaggacggagcggtgccaaactttcctgtgcggcgaggagacggcgatgaagagacggcggtgaaggacggcggtgaagggacggcggggcgtcgtatgcggggaggatga

SEQ ID NO: 33826 - DNA, 624 bp, Zea mays
  Peptide Sequence Number=SeqID_75605
atggcggacctagaggtgggctcaatttggtcagaggaggtcgggagggggctgcccgcggggaggtggcggagcttcgcggcggggttgccaccggtgagctctgggcgagccgtcgaggtgggggggaggggtgtattgtgttcgcggcaaggtgaggaagctgctaggctaactcaattgcttgccgggctaaccgagagggagggagaagagggggagggactcaccggagagggggaagacggcggcgcttcgcgacttgggctcgggcgaggggaggagggtggtggtcgaggctggtgcgaggaagaaggggctcgaggcgagctttttataggcgcgcgggggcgaggggagcggtggagctccctgactccggcgagcttcccggtgccgccattaatggcgcacagcgccgccgaggggacgctacggcggggcagtactggcgaggacgctggtcaaggggaggaggacggagcggtgccaaactttcctgtgcggcgaggagacggcgatgaagagacggcggtgaaggacggcggtgaagggacggcggggcgtcgcctcaccgccttggcatacaatgctccagtgaccccggctgccaccgtgcagtga

SEQ ID NO: 33827 - DNA, 261 bp, Zea mays
  Peptide Sequence Number=SeqID_75606
atggccgagctcgcccaggcctccatcgccgtcggcctcttggcacccgaggagaggcaccccgtgttttacgtggagaagaaggcaagccgctcgacgctcgtcgatgttcggagcgatgcacaaatcggaatcgccatcgtccttacaaacgccgattgggatcgtgtttgcgattggagaacaaaaggttatgtgatgtatgcgatttgtagtttgtctaattacgttttggtcgatgtggtgtatagtggtgtttga

SEQ ID NO: 33828 - DNA, 513 bp, Zea mays
  Peptide Sequence Number=SeqID_75607
atggcaccgggatctctccttccggcggccgtgctcctcaagcgcgctctgctcgagctctgccggacctgctacttccctgcgcgcggccgcggcacatggccctgctcctcctatcttcaccaccaaaacaacaagcccccaccacgtccaggtgttctcgctgctcagcttggccgcgcgagctcgctgcgggacgccctagccgctgctcgcctcaaccacatctccatggccgagctcaccccttcgctgcttcagccccttcttttgctccttttcgccgtgcgtagggtgttcgacacaatgcctgcgaggaagatatgttgtcacagcaccatcgacgctcatcgggtattttgctgtttttgcgcagccccgtcgttgtcgtcgttcaccccggagagaaaccccgtgttttgcgtggagaagaaggcaagccgctcgacgctcgtcgatgttcggagcgatgcacaaatcggaatcgccatcgtccttacaaacaccgattag

SEQ ID NO: 33829 - DNA, 567 bp, Zea mays
  Peptide Sequence Number=SeqID_75608
atgcaagccacgctccagaaggttgagcaagagttgttgcaaatcaaggcagcagtgcaacatgagcagcaccagctggcgttgttcgcacgactccagacgttggcggctgtgtgcatacaagctgctgcttgtggcttccttgcacgacggagagtgcgggagatgcgtcggcagatgcttgaggtagccttggtgacggttgacctcggcacacgggggcgcaacctcaccctgtcggatggccatcagcagcggcaccgggccgctatctccaagtgcgagcatgatggcgtccatgggatccaggtggctgcacacatgcaagtccaatgcgcggagggtgtccgccttatcttatcttatgggaggccccggtcgacgttcctgcccatcgatactccactccaatcccttaccgatctagcggccataacagccacactccggacatcgcgggtgtggcggccgattcactccactccaattcctcaccgatctagcggccataacagccacattccgaacaccgcaggtgtggcacccgaatcggccgccgtaccttaa

SEQ ID NO: 33830 - DNA, 609 bp, Zea mays
  Peptide Sequence Number=SeqID_75609
atgggggacttgtggaccaacataagggctgatctcgcaaaaatgcaagccacgctccagaaggttgagcaagagttgttgcaaatcaaggcagcagtgcaacatgagcagcaccagctggcgttgttcgcacgactccagacgttggcggctgtgtgcatacaagctgctgcttgtggcttccttgcacgacggagagtgcgggagatgcgtcggcagatgcttgaggtagccttggtgacggttgacctcggcacacgggggcgcaacctcaccctgtcggatggccatcagcagcggcaccgggccgctatctccaagtgcgagcatgatggcgtccatgggatccaggtggctgcacacatgcaagtccaatgcgcggagggtgtccgccttatcttatcttatgggaggccccggtcgacgttcctgcccatcgatactccactccaatcccttaccgatctagcggccataacagccacactccggacatcgcgggtgtggcggccgattcactccactccaattcctcaccgatctagcggccataacagccacattccgaacaccgcaggtgtggcacccgaatcggccgccgtaccttaa

SEQ ID NO: 33831 - DNA, 372 bp, Zea mays
  Peptide Sequence Number=SeqID_75610
atggtgaccaccaattcggtggtggggagaagcgagccgggctgcaatcttggtcccgccctcagcttcaaggatcttcatcatcctggctggggcggaggccgggctgagccggagctctgcctcctgcacgggtcggcgggtcaccttctccctcaggattcaagggagagggcgctcaccggcctagcgggagggccggacttcgacaacgaggggctgctggcctggttcggctccggtgtctcctcccgccgtgagagcggttgtcgcgccgcgcgcaccgggggaccgcccaagacgtcgcgcgctgctagggcggcgttcgtgttctggggctatcctgcctttgccccggtacgacgcctctga

SEQ ID NO: 33832 - DNA, 768 bp, Zea mays
  Peptide Sequence Number=SeqID_75611
atggggagcactcgcgttgctttcgtcttgcttttgttggaggaacgcaacttcgcggaagttggtaccttccagccatcgctcggcttcaaggattttcatcaggcagcccggctgcatcccctcgccggtggggagagggcgctcaccggcctagcgggagggtcggacttcgacaacgcggggctggaggaccgcccaagacgtcgcgcgctgctagggcagtgttcttgttcttgggctgtcctgcctttgctccggtacggcgcctctatgcggaggtcggtgctcacccgtccgggaggatccgagtggggatctgccggtgggcagatggcttccgtcgtcggcgcggaggtggtggcggctaaagaagtcctcgtcaccgacgggatcaccgccaccatccgtgctccaggcctccggctctttggctttgatagcttgtcctcgcccctcgagtggggacatgggcgaggaccttgttgcagcagcgtccgccctgaggccatcgctgctgctatttggccagctggagcggaggtcgttgtcgctgctgccagagcgggcggcggtgagccacctggggtttcgtcgccccgcaggccctccaatgtggggggttattcatacctgcgggggtggaaccagagttctgtttgtaatggcaccttgggtgctggtgtctgttcattgtggctatcggggcctgaacatgtaggtatttttgggtgtaataccctgttttttcctcatttcgagcactag

SEQ ID NO: 33833 - DNA, 723 bp, Zea mays
  Peptide Sequence Number=SeqID_75612
atggcccgcgctcgagcctataaagccctcccaggcttcgactgcactcttccgcgcaccctcaaaccacaccggagtttagctcgccgccgtttgcccgtgcgcagcgtgtccgcggccgcccaatccctctgccaccgtagaccggccaatagagccattcccaaccccgtccagccctcggagaagactgtgcacacctccgtgaagctccccgagcgaggaatcggagtttgcttcgccggagaggccagtccacgctcgccggagctctcaaccccgctggagtacgtggaccgggtaatccactcaaccatccttcgattccttgtgcacacggtcactacgttaccccgtgaagctcaccgtgcccttggattgaaccagttcgccgtggtttggccggataacttagaaaaaccctacaaaaataaccccaaggatacaagagcaatacaaattccctatgtttatcctcaacaaaaacctaagcctaaagactgtaaccttgctgacggagagtacatcctcatgccggagcaaggagctgctcaggaggtagccccggatccagcacccgagcctgcaccagaggacctgcctgccactgctttggaaggcaagccccggtttatgcataaccattatatatgctattttactgcacttaatgattgtaggattgattgtgcacttaagtgtaggaattgtttgaaaccctag

SEQ ID NO: 33834 - DNA, 285 bp, Zea mays
  Peptide Sequence Number=SeqID_75613
atgcaggggcactccgtccccacacacatcaaccgtccccatcgattccctggcaacagatcagggctcaccgccttggcgtacaatgccccactgaccccgactggccgtcgtgcagtgaccgcacttgtacccaccataaccggaatgggagaccacgtctcaggtcgcgtgaggggtaaagtctgcgggcaggttcactcaggaaatcctgagatcatgcaactagggtttcaaccaattcctacacttaagtgcacaatcaatcctacaatcattaagtga

SEQ ID NO: 33835 - DNA, 786 bp, Zea mays
  Peptide Sequence Number=SeqID_75614
atggggtgcacctgtgttgccttcttcttgctgctgttggaggagcgcgacctcgtgggggttggcgctcttcagtcatcgctcggcttcaaggattttcatcatgcagcctggctgcagtccccgtcggcggtcacccaggatgatgaccgtaggcctcgtggtggggaagagcgagccgggccgtggcctccccctgccctcagcttcaaggatctgccgcgtgtctggctccccggcctgagcggctctagtgctgcttccggtccttcctgtgctgccggctgcaccggggggtcgcacaacacgtcgtacgccgcgaggggcggtgttcgtgttctgggacagtcttgtcctcgctcctgtggcgaggacgggagtgaggacctgcttgtgcgggctggggcggccaccgttcgccggtgcggtgttggtgggcaggtggccgctgttgtcggtgctgaggtggtggtcgccataggtgaggcttcccctgcagaagcggttgcctccgccgacgagaccgtcagtgccacctacgctccggacctccggctctttggctttaatggctgcccctctggtgtggaggtagttcattcctgcgggaatggagctggagtcccgtttgtaatggaccttcgggcgctctgtgatgagctgaagccggaggcagcggtggcgcggacagaggcggtgtcggctcgaacagaggcttcgtcggcccgggagcaggtggcttcccaggccgaggagatgcagcagcggcagctggagcttggctag

SEQ ID NO: 33836 - DNA, 792 bp, Zea mays
  Peptide Sequence Number=SeqID_75615
atgactgaagagcaccaacccccacgaggtcgcgctcctccaacaacagcaagaaaaaggcagcacatgtgcaccccatctgggggctcgaaagggatcgagaaaaggggatatttcgaaaggatccttctcagtgaaggaagcgggccccgagccctcctactgatcagaggttcgaaggttgtgccctgcgaggttcggcaaccaccccagagcactcgggctcctagccctttactgatcaggggttcgaaggctggcccctcggaagggttcgacagccgccctagagcacgcagagttagggatgaccctggttacgtccgttacatgaccaaggctcgggctatgctcccgagagggaggcaccgagccctcggaccctatcaaatgggtctgggtccagcaaatcacctgcaagtacttttggagcgcgcctctgggccactagccgacccttatcgaatggggctcgggcgtccacttagatcacccgatagcaactcactggaaacaccatgttcggcgtccaccgagggtaacatggcgtgttccccctcctccttgcggaaaggcgacgaaggggcgtacaataaaaagccgagacagtcctcgatcgtcctctcgctccgtgcagaggctcgaaggctgctctcgcaccaggctacggccaaattgtcaaccacattgacaaaacagcttgaaaactcggagcctgaccatgcacccgggctgcggccaggccgcatgagggaacaacaaggccgaccgaggcatcacaaaaagaattaa

SEQ ID NO: 33837 - DNA, 1182 bp, Zea mays
  Peptide Sequence Number=SeqID_75616
atgcatcgcacccttccaccttccgagcccccggatggggagcgcccgcggttcttccgtcttgtcgtcgttggaggaacgcaacttcgcggaagttggtaccttttagccatcgttcggcttcaaggattttcatcaggcagcccggccgcatcccctcgccggtggtcacccaagacggtgaccaccagttcgatggtggggagaagcaaaccgggctgcgacctctgccccgccctcagcttcaaggatcttcatcatcctggctggggcggaggccgggctgagccggagctctacctccagcacgggttcgtgggtcaccttctccctcagcattcaggggagagggcactcaccagcctagctgaaagggcagactccgacaatgcggggctggtcggccgcgagcgtcgtcagcttcagcgcgttgggctcgctggctcagctggccctggctcggctcccggtgccccctcccgccgtatgagcggtcgtcgcgccgcgcgcaccggaggaccgcccaagacgtcacacgctgctagggcggcgttcgtgttcttgggctgtcctgcctttgctccggtacgacgcttctgcgcggaggtcggtgctcacccgtccgggaggatccaagtggggatctgccgcacggacagagacagagttggctcgaaaagaagcttcgtcggccggagcctggccgggccgtccactggcgggaccgacgccggagtcgggttgtcgaggccacgagccgggctgatgtcctcgggagacagctggctgaggctacagagcgaccggtcgagccatctgctcgggccgggttcccggaggagaccccggcgacgatggcctaggcgtggtgccgacaggttccttcgaggtggagatcctccgaccgtgttgccgttcgaggccgggtcggattccgccgaaggtggagtcgacgccgagggtgctgctgctcccccaatgatgtccgaccctgcaggaacagtttatcttgtagtaattgtttgtccgagcgagagttacttttcacggaaggtgatgagtgagccgacgatttcgaccatctccggcggcttcttcttctccggccggcggctggacgcaggtgctagaccaggcgatggccagtttctgcttccacacgatgttgttcttgctgcctag

SEQ ID NO: 33838 - DNA, 1617 bp, Zea mays
  Peptide Sequence Number=SeqID_75617
atgacaagaaagaagaaccgcgggcgctccccatccgggggctcggaaggtggaaggccgtcgcgggctgagtcttcaccaacacgctccaaggtcctccccctacgacacgggggttgggtcccacgcgtcatgcaagctggctcaggacagaaggagccaaaccgccgcgcgtggagtgtacaactgcccaacggttacaagcactcctccactttcgcccagaccagcgggcgaaaaggcggaccgccatgcaggcggcatgcaaccacaccaagggggcgcaccctttcgactccgacgcatccagcatggaggcccaggcccacacgtcatgtaaccggcgcgccggttactacgtgcgagaaactgcaccgccacttgcgccagtgccacgccttctcgactgcgaaaccagtgccgcgactcgaggcaaccctgcgcatggcccaacagtgccaaccaggcgcgtcgatcacgggtcagtcagccgtgggagaaggcgtgacgatcgatatggccaaaagtgagccgacattaactctgcggcgggacaggcggcacctttggcaggcgaagcaggcgacgcttcacctccgccataatgaccgcgtcaaaaaaggtgcgccacgtcgttcgatttcgtatccttttcctcttcctctttctctctcttgctacagggaccgggaaaggggatactccgaaaaggatccttctcccgaaggaagcgggccccgagcccccctactgatcagaggttcgaaggctggcccctcggaagggttcgacagccgcctcagagcactcgggctccgcgcccaccactggtcagaggttcgaaggctggcccctcggatgggttcgacagccgcctcaagccactcgggctccgcgcccactactgatcaggggttcgtaggctggcccccaaggggttcgacagccgcctcagagcacgcagagcgagggatgactctgggtacgttcgatacacaaccaaggctcgggctacgctcccgaggctcgggggctgctctcgcaaacccggctccagccaaaccgttgacagcgtcaacgtaccagcccgagaacttggaactcgactatgcacccaggctacggccagaaaacagcgctgcctgccccgctccgactgttgtgccactcgacagagtgaggctgacagcagctaagtccagcctcgggcgccatgggaagctctgcctcgcccgacccagggctcggactcagcctcgaccccggaagacggactccgcctcgcccgaccccagggctcggactcagcctcggcctcggaagacggtctccgcctcgcccgacccagggctcggactcagcctcggcctgagaagacggtctctgcctcgcccgacccagggctcggactcagccttgaccccgaaagacgaactccgcctctcccgacccaggacttggactcaacctcgacatcggaggagccttcgcctcgcccgacctcaggctcggacccgccacgtcacagggaaggccattattaccctacccctagctagctcaggctacggggaacaagaccggtgtcccatctggctcgccccggtaaacaagtaa

SEQ ID NO: 33839 - DNA, 162 bp, Zea mays
  Peptide Sequence Number=SeqID_75618
atggagcgcaatggcgggccgcagcacgccatgggcgggatcctctgctacgaaatcgccaataatacctggcccactgagttcgcccccgcccttacttcgcatagcatcaatggtagggtgtctggtgttcgtattcatcggatggcaatgtgccggtga

SEQ ID NO: 33840 - DNA, 213 bp, Zea mays
  Peptide Sequence Number=SeqID_75619
atggagcgcaatggcgggccgcagcacgccatgggcaggatcctctgctacgaaatcgccaataatacctggcccactgagttcgcccccgcccttacttcgcataacatcaatggtccctcagttttcaggaaaccaacccgccgtcccggggcgctattcaccgagtctgtggagtcttgcaccgtagcccctgcactttctggaaattga

SEQ ID NO: 33841 - DNA, 171 bp, Zea mays
  Peptide Sequence Number=SeqID_75620
atggagcgcaatggcgggccgcaacacgccatgggcgggatcctctgctacgaaatcgccaataatacctggcccactgagttcgcccccgcccttacttcgcatagcatcaatggtagggtgtctggtgttcgtattcatcggatggcaatgtgccgaaaattcatatga

SEQ ID NO: 33842 - DNA, 267 bp, Zea mays
  Peptide Sequence Number=SeqID_75621
atggcctatgaccctttaagaactcatctagagcgaagagcagctgagcagttggatatattcaaggaaatggtatctttgcgtgtatttgagaggatttttagtgaactcctatactgtgagcactggactacacattatgtttttttgcaggattacaagttcattctgtttttcagatgttctaagctctccatgattaggaaatatctattgtttctgtgcaccaaatccaagttgcagctacaagttgatgtgaacctatga

SEQ ID NO: 33843 - DNA, 750 bp, Zea mays
  Peptide Sequence Number=SeqID_75622
atgcctggcgcggacgtcggcgccgacgagcagcaggagccggccgccgcgagggccgaggagatgcccgagcctaccccagcccccgccgcggcgccgccgctcaccatcttctacggtggcacggtggtggtgttcgaggacttcccggcggagaagacggccgaggtcatgcgccccgcggccggcgacgacctgcccatcgcccggaaggcgtcgctgccgtggttcctggccaagcgcaaggaccgcctcgtcgagcgcgcgccctacgcccgcccgtcgtcccccgcgaagggagccggagaagaagacgggatagcctatgaccctttaagaactcatctagagcgaagagcagctgagcagttggatatattcaaggaaatggtatctttgcgtgtatttgagaggatttttagtgaactcctatactgtgagcattggactacacattatgtttttttgcaggattacaagttcattctgtttttcagatgttctaagctctccatgattaggaaatatctattgtttctgtgcaccaaatccaagttgcagtttgagatgatgatgtgcttatgtgaagttaatgctgacaacaatactattggatgcttgagaaggccgaggtccaaatggagctccaccagttccactgagattctgggcgcctccacgacgccggtaaacatagataagtggataaaacaacaagctatttggataaaaagcaggggacagagttag

SEQ ID NO: 33844 - DNA, 1635 bp, Zea mays
  Peptide Sequence Number=SeqID_75623
atgcttggaggtcttggcatatctagttttccagaattatgttgggcccttcgaatgcgttggctctggctgcagaagactgatcctactcgcccttggtctgatctccacataaaagttcctggaaaagctagtgctttcttcatggaggtgatcattactgaggtgggagatgacacaaacacaaagttttggaaggataagtggttatatgtttggcagctgcagcctgaggttgaggataaacatgttttcagtattgctcctaatggcatctattcagcaaagattgcttacgagggcttatttttgggggaattctggtacctgttgttaaggaatttcggtctgcattctttggcacctcaacctgatgttggctcatatctaggctgttatctaagggatgatgatgagtcgcgagcagctgccgagctgcggtgtccgctcagccagtggcgccgtggcagagtcaatcccatgactcccgttgcccatcgcattgtcgcctgtgaggtgggtgctgtgggctattgggttttctttgcgtgggctgaagaagtgaagaatacccgggaatttcgtttcgttttgggcaaggagaggggggtggggacagtttcgcctccactggactccgcccctgcccacagtgaagattctctttacagtaaatactcgcgtgttagtaaaaagactcttggattacaaggtggaggagaacaaattgctataatcagagcatctggaagtataacacggactcgtagcccattgagtgctcctagttcaggcattgtcgctgagcagttaattgagaagatacgaactgttagagaatcagaaaagtacaaagctgttatcctacgtatagacagccctggtggtgatgctcttgcttctgatctgatgtggagagaaatccgacttctagccaactctaaacctgtagttgcttcgatgtctgatgttgctgcaagtgggggctactacatggcaatggctgcaccagtaattgttgctgagaaactgactctcacagggtcaattggagttgttacagggaagttctgccttcaaaagttatatgagaggattgatttcaataaagaaattatatccaagggtcgatatgctgagcttaatgttaatgatcaacgacctttaagaccagacgaggcagagctttttgaaaagtcagcacaaaatgcttatgcattgtttcgtgataaagcagccatgtcgcgatcaatgagtgttgatcagatggagagtgttgctcaaggtcgagtgtggagcggccatgatgcgttttcaagagggttggttgattcagtaggtggactctcacaagctcttgctattgcaaaacagaaagctaatatacccaaggataagaagatccagctagttgaagtttcaaagccctctccatcattaccggagatcttatccggcattggaggttcgttgcttggagttgacagggcagtgaagggagtgctccaggacatgacctccctaagtggagtccaagctaggatggatggaattctgtttgaaagtttaggagacatgtcaggagaaaaccagttattgttgcttgtaaaagatatcatgaactattttgattaa

SEQ ID NO: 33845 - DNA, 1278 bp, Zea mays
  Peptide Sequence Number=SeqID_75624
atgggggcgcagttctcctgcgctttcgagaaaaaaaattatctaagggatgatgatgagtcgcgagcagctgccgagctgcggtgtccgctcagccagtggcgccgtggcagagtcaatcccatgactcccgttgcccatcgcattgtcgcctgtgaggtgggtgctgtgggctattgggttttctttgcgtgggctgaagaagtgaagaatacccgggaatttcgtttcgttttgggcaaggagaggggggtggggacagtttcgcctccactggactccgcccctgcccacagtgaagattctctttacagtaaatactcgcgtgttagtaaaaagactcttggattacaaggtggaggagaacaaattgctataatcagagcatctggaagtataacacggactcgtagcccattgagtgctcctagttcaggcattgtcgctgagcagttaattgagaagatacgaactgttagagaatcagaaaagtacaaagctgttatcctacgtatagacagccctggtggtgatgctcttgcttctgatctgatgtggagagaaatccgacttctagccaactctaaacctgtagttgcttcgatgtctgatgttgctgcaagtgggggctactacatggcaatggctgcaccagtaattgttgctgagaaactgactctcacagggtcaattggagttgttacagggaagttctgccttcaaaagttatatgagaggattgatttcaataaagaaattatatccaagggtcgatatgctgagcttaatgttaatgatcaacgacctttaagaccagacgaggcagagctttttgaaaagtcagcacaaaatgcttatgcattgtttcgtgataaagcagccatgtcgcgatcaatgagtgttgatcagatggagagtgttgctcaaggtcgagtgtggagcggccatgatgcgttttcaagagggttggttgattcagtaggtggactctcacaagctcttgctattgcaaaacagaaagctaatatacccaaggataagaagatccagctagttgaagtttcaaagccctctccatcattaccggagatcttatccggcattggaggttcgttgcttggagttgacagggcagtgaagggagtgctccaggacatgacctccctaagtggagtccaagctaggatggatggaattctgtttgaaagtttaggagacatgtcaggagaaaaccagttattgttgcttgtaaaagatatcatgaactattttgattaa

SEQ ID NO: 33846 - DNA, 276 bp, Zea mays
  Peptide Sequence Number=SeqID_75625
atggtggagtgccgcatttgccaggaagaggacctcaggaagaacctcgagagcccctgcgcttgcaacgacagtctcaagctcccccaagttctgccaaaatatccggcatcccgcatccgagtgccatcctcccgcaaatttaggtttgtagcacgcgaagtcgacaaggtatactggccacaggcgcttgagaaaatacgagagagatacgagcactcgagcagtagcagcagcagcaccgcggcgagccgcacgatgccggtgagcggttga

SEQ ID NO: 33847 - DNA, 198 bp, Zea mays
  Peptide Sequence Number=SeqID_75626
atggtggagtgccgcatttgccaggaagaggacctcaggaagaacctcgagagcccctgcgcttgcaacgacaggctcaaggtcaatcttcttagagatgctttgaaaggacaatttattactatactctcaaatctcagttgggggcgggttggtctacactatcatctccacggtgtaaatagactcgactactga

SEQ ID NO: 33848 - DNA, 1458 bp, Zea mays
  Peptide Sequence Number=SeqID_75627
atggaccgtttgaactattttgatgatattgctcgcccatttggatggccaatacgtgtcgtgatcgattctggagtttcatttttttgttacaagctgcttccacatttcatttggaaacttgacagtacagagttcactaatgaggaaaggttccaagtcatgcaaagtgttgctgaagaattatcagtcagttttgatgccaaggaattggaactcaagttatgggcctcactacaaacagaacatgatatgcttgagaagggttcaaggaagccagcagaactagcaatgccttcatcgagcaagcagatatgcgtcgagaatgcttcatgtgaagaacaagaggatatccttgagaagagtttgacaaagccaacagaaccagcaatgtctttatttgacaagacaaagtacaatggggatgctccatgtgaaagaaaaaataaggatatgcttgagaattactcaaccaagctcatagaactagcaactgattcatccaacaatcagaaggttactgagaatgttccatgtaaaagaaactatgatgctgaacctgcacaccataccgagaaagtggagatacagttgatccaaaaaaatattcagtctgttgctgatgcacaccatacaattgatgagaattcgaggaagcagcaaccttatgtgtctgatgagaaggaacatttgcagaaaccaatgtctcctgtggacactaacaggacccaaaaagatgttcagaagcttaacagaagagctgtccgccatttggaaaaggagctgatggaggcagtggaacttgatctcaatggcctaacaaaaaatggatttggcgcagtcagatttcccgaagcagaaggcaacaaaacagttcaactaaatgtcaagccaaatgaggtcgcgagagatttccatattgaaaaagagaatgatgaagtccttcattgttcacgtttgcatggtggttctgaacacaatgagggacatgcagattcagggctaagagctcagcgcctagagaatcaaggacatccagtgagtcctcttagtggtaacactagaaaaaaggctccttatactaagccgaatgttgtaaacataaagaatcctactaagaaacaagcaaacaatggtttcttgcatgataaaccgcaacatttagctgatctgggatacccggtgcagaaaggacaaggagacccagagagggcacttactatgttgtctccttatgttgaaccaaagtctaacatgcaacctgtgaatgatgatcctgaaaagcaaacttcaaatggttacagaaagtccaacatccctggacaaactgatcacttggagaacaaaaatgtgcttcgacctgtttctgtcagaaggagaactgcaaagctgccagcacctgttgatgcttatgttgagtgccgaacaatgcgaaggtcacaacccaaacacccataa

SEQ ID NO: 33849 - DNA, 1671 bp, Zea mays
  Peptide Sequence Number=SeqID_75628
atggaccgtttgaactattttgatgatattgctcgcccatttggatggccaatacgtgtcgtgatcgattctggagtttcatttttttgttacaagctgctttcacatttcatttggaaacttgacagtacagagttcactaatgaggaaaggttccaagtcatgcgaagtgttgctgaagaattatcagtcagttttgatgccaaggaattggaactcaagttatgggcctcactacaaacagaacatgatatgcttgagaagggttcaaggaagccagcagaactagcaatgccttcatcgagcaagcagatatgcgtcgagaatgcttcatgtgaagaacaagaggatatccttgagaagagtttgacaaagccaacagaaccagcaatgtctttatttgacaagacaaagtacaatggggatgctccatgtgaaagaaaaaataaggatatgcttgagaattactcaaccaagctcatagaactagcaactgattcatccaacaatcagaaggttactgagaatgttccatgtaaaagaaactatgatgctgaacctgcacaccataccgagaaagtggagatacagttgatccaaaaaaatattcagtctgttgctgatgcacaccatacaattgatgagaattcgaggaagcagcaaccttatgtgtctgatgagaaggaacatttgcagaaaccaatgtctcctgtggacactaacaggacccaaaaagatgttcagaagcttaacagaagagttgtccgccatttggaaaaggagctgatggaggcagtggaacttgatctcaatggcctaacaaaaaatggatttggcgcagtcagatttcccgaagcagaaggcaacaaaacagttcaactaaatgtcaagccaaatgaggccgcgagagatttccatattgaaaaagagaatgatgaagtccttcattgttcacgtttgcatggtggttctgaacacaatgagggacatgcagattcagggctaagagctcagcgcctagagaatcaaggacatccagtgagtcctcttagtggtaacactagaaaaaaggctccttatactaagccgaatgttgtaaacataaagaatcctactaagaaacaagcaaacaatggtttcttgcatgataaaccgcaacatttagctgatctgggatacccggtgcagaaaggacaaggagacccagagagggcacttactatgttgtctccttatgttgaaccaaagtctaacatgcaacctgtgaatgatgatcctgaaaagcaaacttcaaatggttacagaaagtccaacatccctggacaaactgatcacttggagaacaaaaatgtgcttcgacctgtttctgtcagaaggagaactgcaaagctgccagcacctgttgatgcttatgttgagtgcctaacaatgcgaagaagccactcaagcaggaggaatggtgctaaagatgaccagaaccggaaatgtaatgggactgatgatgttggtagcaagacgaatgctcagataactccaagtagccaatcaaagcacataggcagaaggaatggagctttaaaccacaagaacaactctggcaggttgatgcagcgtatgcaacctgaagcagctgagactgcaattgattgtggtaatctcttgcttacctaa

SEQ ID NO: 33850 - DNA, 288 bp, Zea mays
  Peptide Sequence Number=SeqID_75629
atggagagtcatgatctccgggcagaacgggaatcacggcttgtgggtggttatgagatcgatgattctggttatggctatggtgctggtaagtggtattctttccgtttggaaagggttgtcagcattgcaaccactgctcaggcgaagatgaagctgtggaaggagacttccaggagttccaagactacgacgagttctaggtgtgggttagcggcaacccccagtcggctgcttgtgaaggccgcggttatctacgtttcttttccgcactttgatttattgtaa

SEQ ID NO: 33851 - DNA, 315 bp, Zea mays
  Peptide Sequence Number=SeqID_75630
atggagagtcatgatctccaggcagaatgggaatcacggcttgtgggtggttatgagatcgatgattctggttatggctatggtgttgactccaggggcggtggctctcaatttgatcacgacgtgctggcggctggagatagggaagaacacggtggctataaccgtggcgttcactggtgcaacggcgcaaggataatactcctaagggtgccacaattactaccgcacggtaccaagctagggcttggcgtaaccgaggtcaccgacgcttccacgacgacaccggtagtccggccacgttgccatggctaa

SEQ ID NO: 33852 - DNA, 753 bp, Zea mays
  Peptide Sequence Number=SeqID_75631
atggcccgcgcccgcgcctataaagccctcctaggcttcgactgcactcttctgcgcaccctcaaacctcaccggagtttagctcgccgccgtttgcccgtgcgcagcgtgtccgcggccgcccaatccctctgccaccgtagaccggccaatagagccattcccaaccccgttcagccctcagagaagactgtgcacacctccgtgaagctccccgagcgaggaatcggagtttgcttcgccggagaggccagtccacactcgccggagctctcaaccccaccggagtacgtggaccgggtaatccactcaaccatccctcgattccttgtgcacacggtcactacgttaccccgtgaagctcaccgtgcccttggattgaaccagttcgccgtggtttggccgggtacaagagcaatacaaattccctatgtttatcctcaacaaaaacctaagcctaaagactgtaaccttgctgacggagagtacgtcctcgtgccggagcaaggagctgctcaggaggtagccccggatccagcacaagagtctgcaccagaggacctgcctgccactgctttggaaggcaagccccggtgtaggaatcctagttgcatgatctcaggaatcctttttgagatgaatactagttctttggaggaaatggttgctggagtgacttggccgtccatcttgccaccgggttggactgtcgagtgggaccctgcctcggctgaggaggagcatgaggagtga

SEQ ID NO: 33853 - DNA, 540 bp, Zea mays
  Peptide Sequence Number=SeqID_75632
atgtccgcggccgcccaatccctctgccaccgtagaccggccaataaagccattcccaaccccgtccagccctcggagaagactgtgcacacctccgtgaagctccccgagcgaggaatcggagtttgcttcgccggagaggccagtccacactcgccggagctctcaaccccgccggagtacgtggaccggggtacaagagcaatacaaattccctatgtttatcctcaacaaaaacctaagcctaaagactgtaaccttgctgacggagagtacgtcctcgtgccggagcaaggagctgctcaggaggtagccccggatccagcacaagagtctgcaccagaggacctgcctgccactgctttggaaggcaagccccggtgtaggaatcctagttgcatgatctcaggaatcctttttgagatgaatactagttctttggaggaaatggttgctggagtgacttggccgtccatcttgccaccgggttggactgtcgagtgggaccctgcctcggctgaggaggagcatgaggagtga

SEQ ID NO: 33854 - DNA, 171 bp, Zea mays
  Peptide Sequence Number=SeqID_75633
atgtcctcggactcaaccacctattgcaaggatggcgcccttgggtctgtcgctgtgtcgacgacatacacacggcctgacctgcaaatagccattgaagcggcaccacatattctcagtcctgagtactcacaacaacgaaggcaggatcaggaagcggcgctgttctga

SEQ ID NO: 33855 - DNA, 1008 bp, Zea mays
  Peptide Sequence Number=SeqID_75634
atggagacggcggcggcggcggcagcggccaacggaaaggcgtgctgccacgccgccaaggggcccgggtacgccacgccgctagaggccatggagaagggccccagggagaagctcgtctacgtcacctgcgtctacaacggcaccggaattaacaaaccggattaccttgtgacggtggatttggatcccagctctcctacatactccaaggtgatccacaggctcccggtcatccacatcggtgatgagctgcatcactcgggctggaactcctgcagctccagccatggcgacccatcggccaagcgccgcttcctgatcctgccttcgttgctgtcaggccgtgtgtatgtcgtcgacacagcgacagacccaagggcgccatccttgcataaggtggttgagtccgaggacattgctgagaatactgggcttgggttccctcacacgtctcattgccttgcgtctggcgacattatgatttcttgccttggggacaaggaggggaatgcagctggcaatggcttcctgctattggattcagagtttaatgtcaaaggacgagggtcaaatagactttttccaatatctaaggagcgcacacatttatatgagaattacgcatggggcttattttggtcatggatccaatgctgctctttgttttatactactggagcagagctcatgtgccttaccgcaagtggggttcatgtcatcagttgcttggacaattatatcatgagagtgattgatgcgtctttgcccttgcaaggagcaaataatccaatattatgtttgagatcaattcattggaaaaacataaaccaagattatgacgtggtggaggtgagctttagcggcagaggcggcagcgaccccgacgcgtacgctgtggtgctcaagaggaagctcgacctgtactatgccgtcatcgccaaattcggtgtggtttctctttccaatgaattcccaccagcttggattttttctcagatcttctaa

SEQ ID NO: 33856 - DNA, 495 bp, Zea mays
  Peptide Sequence Number=SeqID_75635
atgactaccagccttgtggtggggagaagcaaaccgggctgcggcctccctcctgccctcagcttcaaggatgggagaagggtgttcgccgtctatggcgctatcagctgccgcgtgtctggcttcctggcctgggcggctccggtgccgcctcctaccgctagggcagagcgtggctgtccgtccaccgcacgggcgatggtcacgccatgcgctggttggccacacccacggcttctcctgcggcaccagtcgtactgggaggtcgtacaagacgtcgtacgccgtgcgggtgggggcggcgttcttggatggtcttgtcctcactcccgtagtgaggacgggaacgaagacctcttcgtgcgcgctggtgcggccgccgttcgctggtacggcactggtgtgcaggcggttgctgtcgttggtgctgaggtggtcgccgccgctggtgaggctccccactgcagaggtggttgcctccgtcggcgagactga

SEQ ID NO: 33857 - DNA, 552 bp, Zea mays
  Peptide Sequence Number=SeqID_75636
atggcccaagggcacatttccctttcagtctcgccgacggaggcaaccacctctgcagtggggagcctcaccagcggcggcgaccacctcagcaccaacgacagcaaccgcctgcacaccagtgccgtaccagcgaacggcggccgcaccagcgcgcacgaagaggtcttcgttcccgtcctcactacgggagtgaggacaagaccatccaagaacgccgcccccacccgcacggcgtacgacgtcttgtacgacctcccagtacgactggtgccgcaggagaagccgtgggtgtggccaaccagcgcatggcgtgaccatcgcccgtgcggtggacggacagccacgctctgccctagcgcggtcaaagaggcgacccgccgtgcaagaggcgtgcaaccgtcccacggctgtgcgcctcctcagctccgccacaactggcagtccaactcaggtgaccaggcccacacgtcatgtaaccagcacgccggttaccgtgtgcaaagaaacctgttgggggccttcgtcttccgaaggtcctcaaaaacatga

SEQ ID NO: 33858 - DNA, 765 bp, Zea mays
  Peptide Sequence Number=SeqID_75637
atgcgccattccgagcagccggtcgacatcgtcgcgccactgcttcatggccctcggcgatgccgtggagctagggggtggcgcaacaattccgtggccgcagacagcgccgtaggcgctaccctcgacggagtccgggacgcctgcgctggcgtgtgctgctgcatggcatgcacggcagcagtcccagagtcggggcggttaggcgctcatggcgcggaggatgcaacttcttgctccatcatgaaatcctccgaggtttcagcgtggtgctcgatgatccgcaccatcatgctgagcgagaaaacaagcaaaaacttgaagccttgtcccctacctggagcgccaaatgtcggagaggaaatctccccggccgggtggcagattgcacccgccctaaatcctgaagagaggaggggcttaagcgttttgctttctacgaggctggtggatcaacacacgagagcacacgagggtttagagtggttcgggccgccggagcgtaataccctactccactctgaaaggggcatgcacaaaaagaactgggccccgacatgtgggcccagggacataaagaatatagagcttggatcctctaatgtctgttgccgaggcaatcttcctgtgccctgtcgctcgaggttggtcagccaagaattcatgggagaggcaggagtaaatgagagagagagtgtgaggggttatataaaggatccccaaaagctggcagccgttgggagaaaagaagtaaagatcggttga

SEQ ID NO: 33859 - DNA, 537 bp, Zea mays
  Peptide Sequence Number=SeqID_75638
atgggtcagtcagccgtgggaataggcacggcagttggcatggtcataggcgggccggcagtaattgcagcaataggcgcacggaagcagcggtccaaccgccaatcagactctggtcccacctgcaggctcacatcctcccctgagacgggaacggggttcactgtcggtacccaaaatcaggggtaccctatcctacaacatgaaggcaccgcacccatgcgacgtcccctagccacgcggaggaccgcgcctgaccccaccggatgggatggccaaagggcgccacgtggcatggaaagacaccacaccccagtaaggccggaccctcacagagggacaccggacccctatatacatacaagtctggagcctccgggcggcgcacctgctgggtctgctggcaaaacagtgtgcccgtgccgggcggcacactatactcatcttctcttccgcaagaagcttcccctgcacgccaaggatacgcagacctcgagcgacagggcacaagaagattgcctcggcaacagacattag

SEQ ID NO: 33860 - DNA, 654 bp, Zea mays
  Peptide Sequence Number=SeqID_75639
atgtcgatcttccgaacgagtgattatctgtcagaattgtacattgaataccaaaaggagcgggttcacatggtggatgacgcgatactagcgtttgaactaagcacagttctctctaaggaggggattgaagtctgcatggtaccttctgctgataggccagatgacgccacatttgttgtaccacttctggagtctgattttgactttgccaaactggtgcccggatgtccttggagattacctcaaaagatccatctccagaaaaaatctggttcagcaggaaagcaattgaaagaagcgcaaagtataaataaatctctttctgctttggctaatgttattggtgctttatcttctgatggacaacatataccttaccggaaccataagttaacaatgcttacgagtgattatctaatgtgggttgtctgcaaaaaaagactgaaatgttcgatgacatttacagagaagatggttttggcagtcttcagggatctcactatcctatggatgaccaagagcctgatggacgacatccatgggtggggaattctcttcgatggcagagttggtgacagaaccatcactgggggaaactggaagccatttgaatcgaatacgattccaccacctctaactctgggtgattaa

SEQ ID NO: 33861 - DNA, 186 bp, Zea mays
  Peptide Sequence Number=SeqID_75640
atggcccgccccaaacgtctctctagctgcaaatcctgtgtgcggaaaagggagaggaagaacctcctgacgatgttcgagcaactagggccaggagattgttactcgccaaaaatagaattgtacattgaataccaaaaggagcgggttcacatggtggatgacgcgatactagcgttgaactaa

SEQ ID NO: 33862 - DNA, 627 bp, Zea mays
  Peptide Sequence Number=SeqID_75641
atggcgcccgatttggctatggcgttcatgatttggaaaccgcacaatctacattgccgatttggaaagcacgatctcggtactgcaatcacaacaactatcccccaaatgtcgcgcccaccaacgaccaggacccccagatttggcaatgcaccattcggaacaatcgcactcgatctggcaattgtgtgcatgatcttcgtcgccgatttggaaagcgcacgatctacgacgctgatttggaaagtgccttgccaaacgattccagcacaaatcccccaaatcgtgcacccaccatcgttaaaaaggtcacaattgccatcctgctccaaccttcctacaacgacggaaatcctgcgctcacactcctccagcagttcatgtgtttctggtacccgtctcttggatatattgagttcacttttgagaatttctttgcgtggtgagactgaggacactttcgtcgttgatctggcagttggtttgtccacgggtcagattaagactggagcacaccctgccgatcagagcgtcttgccaaatacaaccaggcaactgaagtgccacaataataactatgaatgccaagtactcgatgaagtgcaacaacaacacatgttggtgtaa

SEQ ID NO: 33863 - DNA, 894 bp, Zea mays
  Peptide Sequence Number=SeqID_75642
atgcctccgcctcgcaagatccgccatgccagcgtctcggcttcccctccgtgcagccgcctgacccgccgcccgacccgccgcaaaacagccatgcccccgcctcggctagcccttcgcgcagatccgcagccgcccgacccgccaggacccgcctctccttcccctcggcgctcaaacaaccaagccgaggaaatgcacccacaaatgtggaagctccgcgcagccacacgaactgccatgcaaccacctcgcacgatctgccatgcccccgcctcgcacgatccaccatgccttcgcctcggcttctcctccgtgcaaccgcctgacccgtcaggaccccgcctctccttcccctccgcgctcaagcaaccaatccgagaaaatgcacccacaaatttggaagccgcggcaatggcgcccgatttggctatggcgttcatgatttggaaaccgcacaatctacgttgccgatttggaaagcacgatcttggtactgcaatcacaacaactatcccccaaatgtcgcgcccaccaacgaccaggacccccagatttggcaatgcaacattcggaacaatcgcgctcgatctggcaattgtgtgcatgatcttcgtcgccgatttggaaagcgcacgatctacgacgctgatttggaaagtgccttgccaaacgattccagcacaaatcccccaaatcgtgcacccaccatcgttaaaaaggtcacaattgccatcctgctccaaccttcctacaacgacggaaatcctgcgctcacactcctccagcagttcatgtgtttctggtacccgtctcttggatatattgagttcacttttgagaatttctttgcgaaatgctctaaaaatcattgttttcaatgattccatttaa

SEQ ID NO: 33864 - DNA, 552 bp, Zea mays
  Peptide Sequence Number=SeqID_75643
atgaactgcgctgcaccagtagtagtcacgctggaagctggctctgggcagcctcaccggcgacagcaaccacctctgcaccagcagcgacaaccacctccggttcgagcgacttgccagcggcggcgaccacctcagggtgtgcgccattgcgaggaggtcctcgcccccgtgctcctacggggggcgacaacgaggccattaaagccaaagagtcggggactcggcgaaaaatcgcaccgtcgctcgcgccaatgccatgcctcctcgggaccgtcgcggaagactgaaaagataagttttcagaaccattgtggtgactcgaggcaccccgcgcatgacccaacagtgacattaagtacgaaggtcatgggtcagtcaaccgtgggaataggcgtagcagacgacatgaccataggcgggccagcagtaagcgcatcgacagacgtgcaggagcagcaggccaaccgccaatcagactctggccccacctgcaggctcgcatcctcccttgaggcgggcccgggggccactgttggtaccccgaattag

SEQ ID NO: 33865 - DNA, 1404 bp, Zea mays
  Peptide Sequence Number=SeqID_75644
atggcgtcccgtggcagcatgacctgtagtcttcagctcgccgtcctcgtttccgccgccatcgcgctcgggttcggcgtccgggccggcgaggcgcagctgtccagcgagtactacggccagacgtgccccgtcgtgcaccgggtcgcgcggcgggtgctgaagaaggcgcacgaggccgacgtccgcatctacgccagcctcacccgcctccatttccacgactgcttcgtgcaaggctgcgacggctccatcctgctggacaacagctcgagcatcgtgtcggagaagttcgccacgcccaacaacaactcggcgcgcgggtaccccgtggtcgacgccgtcaaggcggcgctggaggaggcttgcccaggcgttgtctcctgcgctgacatactggccatcgccgccaagatctcggtcgaactgtccggcgggccaaggtggcgcgtgcctctcggccggcgcgacggcaccacggccaacatcaccgccgccaacaacctcccgagccccttcgacaacctcactacgctccagcagaagttcggcgccgtcggcctcgacgacaccgacctcgtcgcgctctcaggtaaaaaaaaaagggggggagagaaaaccggcgatgcatgcctcgtgattcttgcacctgcacagcacgacacatggcgtcacaacgacggcggatgcattgcaggggcgcacacgttcgggcgcgtgcagtgccagttcgtgacggcgcggctgtacaacttcagcgggacgaaccggccggacccgacgctggacagggggtaccgggcgttcctctccctgcggtgcccgagggccggcaacgcgtcggcgctcaacgacctcgacccgaccacgccggacaccttcgacaacaattactacaccaacatcgaggcgcgccgtgggacgctgcagtccgaccaggagctgctgtcgacgcccggcgcgcccacggcgccgatcgtcggacggttcgccgccagccagaaggagttcttcaggagcttcgccaggtccatggtcaacatggggaacatccaggtgctgacggggagtcagggtgagatcaggaagaactgtaggatgcttgccgcatctggcgagaggcccgatggtgaagatgctggtgctggcaggtgggaccttgagacgtgggtgccgacggcgttggtgcacgtgtacgacttcctgtttggcatggggccttacgtcagcctcggcccgttggcttatgtcacgggccacaagccacgcggcaacagcgggggtccggtgtccctctgtggaggtccggacccaatgatgcatcctggggtggtaccgatagtggcccccgggcccgcctcaggggaggatgcgagcctgcaggtggggccagagtctgattag

SEQ ID NO: 33866 - DNA, 366 bp, Zea mays
  Peptide Sequence Number=SeqID_75645
atggtgagagaacgaagaacacaaacaaacacaatgagcaagaacacaagagacacaagatttatcccgaggtttggtcacaccaccaaggtgccctacttcctcgttgaggcgcccacaaagagccgggtctctttcaaccctaatcctccctttgccgaccacaaagactacagatcagaggtcagaggggtcagagaccagctgaactgcccctcaggaccagttcaaccggtcttgaccaatgagtttaggagagaaaaccccagctcaactgcccggaggcaagttcagctggtgtatggtcaaagaggttcacagctgaagttgagttcagctgaagttgagaaagctcaactcagctga

SEQ ID NO: 33867 - DNA, 366 bp, Zea mays
  Peptide Sequence Number=SeqID_75646
atggtgagagaacgaagaacacaaacaaacacaatgagcaagaacacaagagacacaagatttatcccgaggttcggtcacaccaccaaggtgccctacttcctcgttgaggcgcccacaaagagccgggtctctttcaaccctaatcctccctttgcctaccacaaagactgtagatcagaggtcagaggggtcagagaccagctgaactgcccctcaggaccaggtcaaccggtcttgaccagtgagtttaggagagaaaaccccagctcaactgcccggaggcaagttcagctggtgtatggtcaaagaggttcacagctgaagttgagttcagctgaagttgagaaagctcaactcagctga

SEQ ID NO: 33868 - DNA, 366 bp, Zea mays
  Peptide Sequence Number=SeqID_75647
atggtgagagaacgaagaacacaaacaaacacaatcagcaagaacacaagagacacgagatttatcccgaggttcggtcacaccactaaggtgccctacttcctcgttgaggcgcccacaaagagccgggtctctttcaaccctaatcctccctttgccgaccacaaagactgcagatcagaggtcagaggggtcagagaccagctgaactgcccctcaggaccagttcaaccggtcttgaccagtgagtttaggagagaaaaccccagctcaactgcccggaggcaagttcagctggtgtatggtcaaagaggttcacagctgaagttgagttcagctgaagttgagaaagctcaactcagctga

SEQ ID NO: 33869 - DNA, 408 bp, Zea mays
  Peptide Sequence Number=SeqID_75648
atggactacgctgcaccaagaagagtcgcgctggaagctggctccgggctgcctcaccagcggcagcgaccacctctgcatcaacggatcgccggcgacagcaaccacctctgcaccagcagcgacaacgacctccgcctcgggcggctagacagcagcagcgatcgcctcagggcaagcgctgctacgaattgggcctcgcccccgtcctcctacggagggggagcagtgaggccattaaagccaaagagccgagggactcagcggcaggtggccctgatggtcctggcagcggaggcaaccacctctgcaaggggcagcctcaccagcagcagccaccaccgcagcaccgacaaccgcagccacctccgcataagaggtcctcgctcctgtcctcccacggagtga

SEQ ID NO: 33870 - DNA, 930 bp, Zea mays
  Peptide Sequence Number=SeqID_75649
atgggtgtcctagtatttaaaactatagtcctgtgcgtccaacgaactggaggtccggttttgaagaacagacacttgtctcctggggggtccggaagccatgtagccactcagcctagtcccgtgtcgaatggactacgctgcaccaagaagagtcgcgctggaagctggctccgggctgcctcaccagcggcagcgaccacctctgcatcaacggatcgccggcgacagcaaccacctctgcaccagcagcgacaacgacctccgcctcgggcggctagacagcagcagcgatcgcctcagggcaagcgctgctacgaattgggcctcgcccccgtcctcctacggagggggagcagtgaggccattaaagccaaagagccgagggactcagcggcaggtggccctgatggtcctggcagcggaggcaaccacctctgcaaggggcagcctcaccagcagcagccaccaccgcagcaccgacaaccgcagccacctccgcataagaggtcctcgctcctgtcctcccacggagtgaggacaagaccatccaagaacgccgctgccactcccgcagcgtacgacgtcttggacagtccccccgtacggccggtggcgcaggagaagccgtggatgtggcggacccgcgcatggcgcgaccttcgctcgtatggtggacggacagtcacgccccgaccaaacggcaggaggcagcgtcggaggcggcggcggggccacccaggccaagagccaggcacgcggcagctgtcagcgcctgcacctggccggccccgcatagccgaagttcgcctccttcgcgtcgctggtgaacccctctcctcccccgaatgctggaggaagaagcgggccgctggcccacgcgggaggcagaaccccggctcgacgcaccttccgccccagcgaggatga

SEQ ID NO: 33871 - DNA, 225 bp, Zea mays
  Peptide Sequence Number=SeqID_75650
atggcttatgtcatgggccacaagcagcgggccttctcctgcgcagggagcggagatcaaagcctgcacacgtgtcagcaccggacccctgcacaccccaaggtccttgttttgggaccctgccggggttcggacctaccctggggctccggacctgaggcactcgcgttggggtcgctcatcgacgacaagaagaaacttggcgactgccagttcgacctctag

SEQ ID NO: 33872 - DNA, 609 bp, Zea mays
  Peptide Sequence Number=SeqID_75651
atgcaggggctacacggctttacgtcaggctcggcccgatggcttacgtcatgggccacaagcagcgggccttctcctacgcagggagcggagatcaaagcctgcacacgtgtcagcaccggacctctgcacaccccaaggtccttgtttcgggaccctgccggggttcagacctaccccggggctccggacctgtatgtatacaggggccctgtgaccttccgtggaggtccggtcttactgagacatggtgcatttcctcgccacgtgacgccctttggcctgcccatcaggtggagttgggcgcggtcctccgcgcggccagaaggcgtcgcatgggtgcgatgcctttatgctgtaggagagggtacccctgatttagggtaccgacagtggccccggtcctacctcaggggaggatgcgagcctgcaggcctccagatggggtgtgccggtggtggtgtcgccgatcttgtcttcttcctgccgccattggaggagtgcaaccccataggggttggtatcctttcgccgcccttcggcttcaaggattttcatcatgcagcccggctgcagcccctcgccggcggccacccaggacttggatga

SEQ ID NO: 33873 - DNA, 189 bp, Zea mays
  Peptide Sequence Number=SeqID_75652
atggcggcggtgggtgcgctgcaaaggggggtgggtggcggtagtgcgctgcaaagggggcgtggggcggtggtagtgcgcatggaggcgggcacgcgtgcgggggcatggcttgttccaggcttcaagggtaagcttcccagtatcttcttgggtaaggcacttttctcttcagatgggttaagatga

SEQ ID NO: 33874 - DNA, 189 bp, Zea mays
  Peptide Sequence Number=SeqID_75653
atggcggcggtgggtgcgctgcaaaggggggtgggtggcggtaatgcgctgcaaagggggcgtggggcggtggtagtgcgcatggaggcaggcacgcgtgcgggggcacggcttgttccaggcttcaagggtaagcttcccagtatcttcttgggtaaggcacttttctcttcagatgggttaagatga

SEQ ID NO: 33875 - DNA, 219 bp, Zea mays
  Peptide Sequence Number=SeqID_75654
atgacgaatgaggagaaggaggtagcaacagaaagacggatggactcaccgcctcgatgcgattgtggagaccgtgctgtcatcgacgaagactatgacaagcagttctgttgtccgaacattgattatccatacgggtggcgtaagtgtcgtttcagagagtggttgtatggtcctttgtcccattggccagagccagagagattggaagcggcgtaa

SEQ ID NO: 33876 - DNA, 816 bp, Zea mays
  Peptide Sequence Number=SeqID_75655
atgtcgtcctcgggaattaatatccggacgtatctagtaaggatgctcctgttcctcctgaacttcatgtgcctaactgtgactgtggcagactggcttgggtatatcaatccaaacatccagacacggctgctcgctgcttctacctttgtggcggttttaacccatacgggtggcttaagtgtcatttcagagagtggttgtatggtcctttgtcccattagccagaggcagagcccgaagcgtgcaaagcaaaggaggttgaaggcggcaaatgagaagagagcacaggatgcaagggaatgggaagcgactagagccgagaaacagatgttggataatcttgctgatcgtctcaagggaaagattggatgtggcgtaaactatatggcagatgaggcacatgcaagatatgttcaggaaaaaatggcaacggtggagctgatggaggaggaggacgacgacacatctagattgagtgagcttatcgctctcgcagaggcaggattacatggggaagaggaggacgacacatcaaggttgagtgagctcatcgcactaactgaggcaggattacgtgctcaagaggaggaggacgagtttatgtctcaggccgccgaagaggtagaggcggcttattacaagcagaagtctgatgaggctgaggatgagctattctcccaagctgcagatgaacagaagccaattattacaagagaactgctgacaagtgtgatgcgggacaatgcaacaagtggaacgaggttgtcgttgaggattgcgcgacggatggctccgaagatgagttacttatag

SEQ ID NO: 33877 - DNA, 1179 bp, Zea mays
  Peptide Sequence Number=SeqID_75656
atggtagacgtggatagcccaactagcctatccacgtccacgttcgatcctccatctacggcttcgatcgctccagcgcagcaagtctctgatatttctgacggacgtttcgtctttcctctgttgccttcgttttgggaggacttttcttccttcgcctctacaggtttggaatcggcgctgtccgtcttcgctcttctcgcctgtaggtatgggcgtatggctgttggcctgttgcttcccatgtccatgtttgctggttttcagttttacttagatgctgaaagcatgaaaccttccagtgattatttgcttcatgttgtaccagggcaaattaaagctacaatgcaggctgcctactatgcaaaggtcttgtttattttctactattttccttcaagcacgtggaatagtacgtttgacaaacaatttgctgacgaggtgtatactgaaagatcaatatataatggatcgagttcgtcaaaatgctacaatttccgttctaatattaatccgaagggggaggaggagaacaagaggatggtgaaggcaaggcccaagccaacgccggtcaaggcggccccagaagtgatcttcgacccaatggcctctggtgcccggaagccccgccgcccaggggcgccgtcagccagcaaagaatggcacagcttcatgggatcgagtctgtcggatatgtatcggaagccagttttggagaaatctgctgacacatctgatgaggagcctgacattgatatcatgaagctgctgaaagatgttgagatcattggtgcccctacatttaaggggcgaaagcaaatcgagaaccgcagagtagttgagttgggtggaaagtccgttaagaagcaccgcacaccattaagtgttgcgaagccagctctgaagaatcagaagaaacgagaacagaagaaaatggaagaggaaaaactacttgggatctttaggaagagggacaaggacaccaaacctcacaagacaaggccagaggaccgagtgcttagggccacagaagggcgctttaggaacggtatactgaacgtcaagcatcttctggcgccaccgaaaccatcaggcaaggacatgtcggaaccgaagatgaggaaggacaagcacaaggggaagggtaagcagaaggggggcagaaggaagagacgttga

SEQ ID NO: 33878 - DNA, 453 bp, Zea mays
  Peptide Sequence Number=SeqID_75657
atggactatgacccttcatatgattctgaaattgggacagggtttggtgcccctacatttaaggggcgaaagcaaatcgagaaccgcagagtagttgagttgggtggaaagtctgttaagaagcatcgcacaccattaagtgttgcgaagccagctctgaagaatcagaagaaacgagaacagaagaaaatggaagaggaaaaactacttgggatctttaggaagagggacaaggacaccaaacctcacaagacaaggccagaggatcgagtgcttagggccacagaagggcactttaggaacggtatactgaacgtcaagcatcttctggcgccaccgaaaccatcaggcaaggacatgtcggaaccgaagatgaggaaggacaagcacaaggggaagggtaagcagaagggggcagaagaaagagacgttgaagaaagcacacttctgtaa

SEQ ID NO: 33879 - DNA, 216 bp, Zea mays
  Peptide Sequence Number=SeqID_75658
atggagttgcggccaccagctgggggtccaccgtcgcgcacgctctgggggcaaccgccgtcgtcgcacgcggaggcgctcgcgttagcgtcgctcatcgacgacgaaaagaagcttggcgactgccagttcgacctttggaagcagtactacgtgaccgcatgcgtcgctgtgttcggcaagttccggcgcagccgccgcttggacgcggtctag

SEQ ID NO: 33880 - DNA, 213 bp, Zea mays
  Peptide Sequence Number=SeqID_75659
atggttgcccagagcgtgcgcggcggtggacccccagccggtggccgcaactccatgacttcgacgcgcggtggcggaggttcctcgatccagagtagtggcggcggttcccaggtcggtggcggcggcttcccgatccagagggtgagcgacccttgtgcgggcaagcgacggcgtccccgaggccccgaggaggcggcacttccaaggccg

SEQ ID NO: 33881 - DNA, 180 bp, Zea mays
  Peptide Sequence Number=SeqID_75660
atggctcgacggagcaattggcgccgctgtggatcgctccgcgccgtggccgagggccaccccaactccaaccactgccgccgtcaacctgggcgccgccgcggttgggcaaggcaccgcccagctcgggctgagaaagtagataagcgccttgccgttggattgatcgccagcggctag

SEQ ID NO: 33882 - DNA, 201 bp, Zea mays
  Peptide Sequence Number=SeqID_75661
atgggggaaaagttagagcttgcgcagagaatggaggaaggatgtgacgagctaggccaatggctcgacggagcaattggcgccgctgtggatcgctccgcgccgtggccgagggccacaccaactccaaccactgccgccgtcaacctgggcgccgccgcggttgggcaaggcaccgcccagctcgggctgagaaagtag

SEQ ID NO: 33883 - DNA, 150 bp, Zea mays
  Peptide Sequence Number=SeqID_75662
ctaggccaatggctcgacggagcaattggcgccgctgtggatcgctccgcgccgtggccgagggccacaccaactccaaccactgccgccgtcaacctgggcgccgccgcggttgggcaaggcaccgcccagctcgggctgagaaagtag

SEQ ID NO: 33884 - DNA, 261 bp, Zea mays
  Peptide Sequence Number=SeqID_75663
atggagggagagaatgcaaccaaggtcaggataggtaaaacaccattctcaaatcgagatggaaaagatgatattttaaaaggtaggcataagataacatcatggaaagatctagagattacaaaggtgcaagataagcatcatggtaaagatcaagggatgacaagggttaaggtgataacagacaaacacaaccaaggatgtattttagacaaaacttgtgaggcatcaaagaaggggaagcaatcaatggtgaagtag

SEQ ID NO: 33885 - DNA, 618 bp, Zea mays
  Peptide Sequence Number=SeqID_75664
atggatggtaggggcatgagcataataaaggatggagataaagtaatgattgtaaccgacaagggagagaatgcaaccaaggtcaggataggtaaaacaccattctcaaatcgagatggaaaagatgatatttcaaaaggtaggcataagataacatcatggaaagatctagagattacaaaggtgcaagataagcgtcatggtaaagatcaagggatgacaagggttaaggtgataacagacaaacacaaccaaggatgtattttagacaaaacttgtgaggcatcaaagaaggggaagcaatcaatggtgaaagtaggtgaggcattatcctcaaacaacgatgaaaaagaggtggctttaaagggtaggttcaaagtaggcatgtggcaagggcataggtatcacgagggtttaaaggtgataacggacaaggatgtaggagaggaggatggagttaagacaagacctgcaattggaaaaggagggggtacgtccaagggcctgttggggtcgtgcttcggtgcgccgaaggtctcacacgaagaagcagcttcggctgaagtcgtctccaagagatggccgaaggtcccttttcatggagcttcggcgttttaa

SEQ ID NO: 33886 - DNA, 444 bp, Zea mays
  Peptide Sequence Number=SeqID_75665
atgcaacttcctggaacactaaaaataaaagcagcatatccagatttccagttgattcaccaagttgaacatgaccaacgaagatggttgcgagtaatacagtcggcacaatgtgcgtatccctacctgattagagattcacagatgcaaaccagaccatttttcagcacgggcaaaggatggtggagtaaagaaaaagaagaaaaagtaccagagtcgtctcagactgaatctgataagaatggagacgaaaggaacccacattctgactatgaccatctcacaccagcagagcgccgctacatggaacagaagcagaagatcggcatgaagaagatgggcaaggtcgcaaacaagtcgtacaaggaccgcatgcaggacttcaaccagtacctggctaaccttagcgagcactatgacatccccaaagttggtcctggctaa

SEQ ID NO: 33887 - DNA, 474 bp, Zea mays
  Peptide Sequence Number=SeqID_75666
atggccggaggcggagggagcagatgggtgaggggcgagacgagctcggactcggacacgaacacggacaccgcgtggaacaggagatcgggctcggacacggacactctgaacgatgcaatcccgtttgccttgatgttggaataccaaaacgttgttgggggacgactgaagctgaagggtaaagcgctggacgtgaagtatggtggtgtaatgaaaaagaagaagaagtaccagcgtgaggagtcatctcagactgaatctgataagaatggagacgaaaggaacccacattctgactatgaccatctcacaccagcagagcgccgctacatggaacagaagcagaagatcgacatgaagaagatgaccaaagtcgcaaacaagtcgtacaaggaccgcatgcaggacttcaaccagtacctggctaacctcagcgagcactatgacatccccaaagttggtcctggctaa

SEQ ID NO: 33888 - DNA, 498 bp, Zea mays
  Peptide Sequence Number=SeqID_75667
atgacagcggccacctctgcaccggtgggtggtggctgcctcagcacacgcgaagaggtcctcgctcccgtcctcactacgggagtgaggacaagaccaaccaagaacgcggccgccgcccccgcgacgtacgatgtcttgtacgcccccccccccggtgcggccgccggcgtgggagaagccgtggatgcggcggacctgcgcacggtgcgaccgtcgcccgtgcggtggacgagcagccacggccccaaccaaacggcaggaggcagcgtcggaggcggcaccgaggccatccaagccggggaaccgggcacgtggcggccggcggcgcctgcagtcggccggtcccgcgtacccaaagttcgcctcctccgcaaggctggtgaacgcccttctcccccgaatgctggaggaagaagcgggccgctagcccatgcggaaggcgggaccccaactcggctcgccctcctccccagcgcggatgatgaacatccttga

SEQ ID NO: 33889 - DNA, 282 bp, Zea mays
  Peptide Sequence Number=SeqID_75668
atggcgatcacctcaacacgtgcgccattgcgaaaaggtcctcgcccccgtcttcctacggggggcgacaacgaggccattaaagccaaagagtcgaaaggctcggcgacaggtggcactgatggtctcgccagcggaggcaaccacctctgcaatgggcagcctcaccagcggtggcgaccacctcagcaccgacgacagcggccacctctacaccggtgggcggtggctgcctcaacacacgcgaagaggtcctcgctcccgtcctcactgcgggagtga

SEQ ID NO: 33890 - DNA, 348 bp, Zea mays
  Peptide Sequence Number=SeqID_75669
atgacggggagcgtccgagaggagccggaagtggagcaccacttgcatgtggagaaggcccgcgactctctacggagttactcgaccgaggtgcttggccctcgcgtggacttccatttgcgtaggggcaccaatgaggattactcgggaccttacatggttccggatacctcgagaaactggggtgtagttcgcttcgccgtcgtgccgttaatggggctcggtgtatgcggctcgctctgccaaggtggtgacgaggatgatggttatgattatgactatggtaatggtgaagatgaagtcgtggaggaggacttccaggagttccaagagtacgatgagttctag

SEQ ID NO: 33891 - DNA, 405 bp, Zea mays
  Peptide Sequence Number=SeqID_75670
atggcgccccgcatactctatgacgacggcggctctcagcccccttacgaatgcaagaggacaagctcgatagtggagacggcggggagcgtccgagagcagctggaagtggagcaccacttgcacgtggagaaggcccgcggctctctacagagttactcgaccgaggaacacatggcgctcgtcggcgatggaggtggtgctggtcgtacatggggaacacgagtggtgccggtcgaggaggtggtggcacctgttgctgtgccagcggtgctcggcatcgtcatcggaggcgaaggagcagaaggaggaaacgatagattgattggagctgcggtgggagggggagggagaggtcgggctgagggcgggcaccgtgagcggcgacggtcgtgggcagagtga

SEQ ID NO: 33892 - DNA, 411 bp, Zea mays
  Peptide Sequence Number=SeqID_75671
ggaggtccacgggatgccagagaagacatgagcgaaaggaattgggcggagactcactggatagctcggtccacgcgcggcggcggaagaccgaagtccggtgaggtcgatctcgggcctccggtgaagtctggtcgggtccgagggcttggcaagctttacgggctactggcggagctagccgaagcactggctcgcccggaagatggctggggtgggctgtccacggtggccgaagctctggcggcaatggcgggcggaaataagctcgccggagctaaggggaagtggctggccggtgagggtgatatgccggacccggacccgttcgatagggtccgagggctcgatgcctccctctggtgggattccattacaaaatcgctcctgctggtctcggaaatgtcctag

SEQ ID NO: 33893 - DNA, 192 bp, Zea mays
  Peptide Sequence Number=SeqID_75672
atggcgggcggaaataagcttgccggagctaaggggaagtggctggccggtgaggaaaccctaggtgacactggggtgtcacagccttccccccttaaaggaatctcgtcccgagattcaggccagagtcctcccggggtgaagcgaagggtgagacttgataggaaaaagggtggtgattgttattattag

SEQ ID NO: 33894 - DNA, 1074 bp, Zea mays
  Peptide Sequence Number=SeqID_75673
aaatctgttgcttcccctgggcgtggtattctggcaattgatgagtcaaatgcaacatgtggaaagaggttatcatctattggtttggacaacacagaagtgaaccgccaggcttacaggcagcttttgctgacaactgttggtcttggcgaatatatttctggtgctattcttttcgaggagaccctttataaatcaactacagatggcaagaagtttgttgactgcttgaaggatcagaatatcatgtctggcatcaaggttgacaagggtttggttccattgcctggatccaacaatgaatcatggtgccaaggtcttgatggtttggcttcaagctgggttgatgtcgtttgtgaggatggtgtgtcagtgttagctctgccggcgttccgccccgctgtgccgctcgatcgcttcatgcccctggccgaccggatccgggacctcgaggtcggcgtcgcattctcgaagccgacactactccccagcccctccgggagtggtttattcgctgataggcttctcaacgacggcttctcgacgaacatcactatgcccgagtgccaggtggcagagcctgcacttaatcagaaggaggaagttatgaaagaatgtcgaccaccagcacctgcagttcattctaggcctgcaccctactggatatgcccagtgtcttttatagagttcagtaaaactaccttcccttcccctctcatagtctcatctatggatgtcttcaaaacctttcttctcttcggtgaagtggaggtgacatttttccaacagggtactattccatgtgtatgtcatgatggaagatttattatggagacaccatataaggtccgtgttgcagatccaacattcctaggatacttcattgacagaggtgtatctgctgttgctaaggttgtcaggaaggcatatccacaagagaaagttggagtatttgttcagcgtggaaagggtggacccctctctgtagttgaatacagtgaaatggatgcagctatgacaactgaaatcaatcaaactactggccgccttcgttattgctggagcaatgtataa

SEQ ID NO: 33895 - DNA, 939 bp, Zea mays
  Peptide Sequence Number=SeqID_75674
atggagcagcacctgaacacattcgcgctggtggctggcatgggcgtcgctatggcgatggacgtggacaggaggaagggacacccaatgcttgctagggtagcagaggcgcggttgggtttgctaatcgctattctgatgctgattccaggatacaaatggattaaggcagaaattggttatcctgattatgtgcttaaagagggtgaaggaggcacaattataagtgatgaagtgtttggcatgtcatccatcctcatattttcacctcaagaacttgactatctaatatgtggccaacaagaaatttgggaggagtatgttgtctggcacaccgatgggaagaaggggtcaccctcaccgaccaaggctaaatggcaggcttcccaaacagaggagaagaatcgggctacttcacccaagaagaaatctgttgcttcccctgggcgtggtattctggcaattgatgagtcaaatgcaacatgtggaaagaggttatcatctattggtttggacaacacagaagtgaaccgccaggcttacaggcagcttttgctgacaactgttggtcttggcgaatatatttctggtgctattcttttcgaggagaccctttataaatcaactacagatggcaagaagtttgttgactgcttgaaggatcagaatatcatgcctggcatcaaggttgacaagggtttggttccattgcctggatccaacaatgaatcatggtgccaaggtcttgatggtttggcttcaagttgctatgattatcgacttagtacagctgggttgatgtcgtttgtgaggatgaaaatttctacatactatatatatgactatgtcactggtgagtctgcttttatctatgtgcatgacaaggcttcccctactgtacaagttattttggttcttaactggaagtcaagaaattag

SEQ ID NO: 33896 - DNA, 219 bp, Zea mays
  Peptide Sequence Number=SeqID_75675
atggtgggtacaagtgcggtcactgcacgacggccagtcggggtcagtgaggcattgtacgccaaggcggtactccttagggtgattggttgctggtgtgacttggccttcatccctgccaccgggatagatggtcgagtgggttactgcttccgcaggaggggaccaggaggagtagcgtggccaggcttcgccatgttactcggttttcttcgttag

SEQ ID NO: 33897 - DNA, 219 bp, Zea mays
  Peptide Sequence Number=SeqID_75676
atggtgggtacaagtgcggtcactgcacgacggccagtcggggtcagtgaggcattgtacgccaaggcggtactccttaggatgattggttgctggtgtgacttggccttcatccccgccaccgggatagatggtcgagtgggttactgcttccgcaggagaggaccaggaggagtagcgtggccaggcttcgccatgttactcggttttctccgttag

SEQ ID NO: 33898 - DNA, 462 bp, Zea mays
  Peptide Sequence Number=SeqID_75677
atggctactgcccgggagatcgacccctttttaaaggcggctctccccactcgtatccccaagcgccacgggcaaagtctccaccgatgtgtttcagggccctccccctatgacacgggggctgggtcccgcacgtcaggcgggctgacccaaaacagaaggagccaaatcgtcgctcgcgaagcctgtatccgccccgcggttataagcgttcccccatcctcgccgaaaccagcgggcaaaaaggcggaccgccacgcaggaggcatgcaaccgcaccacggttgcgcatcctttcggcttcatcgcatccggagggccagcgtgaaggtctgggcccacatgtcatgcaaccggcgtgacggttactgcgcgcaaggaaaccgcaccgccactctcgccaatgtcgcgtctcctcgactgcagaaccagtgccgcgactcgaggcagccctgcgcgtga

SEQ ID NO: 33899 - DNA, 585 bp, Zea mays
  Peptide Sequence Number=SeqID_75678
atgccgcgtctcctcgactgcaaaaccagtgccgcgactcgaggcagccctgcgcgtgacccaacagtgctaattaagtgcaaagatcacgggggttcgaagcctagcccctcggaagggttcaacagccgccccagagcatgcagtgtcagggatgaccctgggtacgtccgttacatggccgaggcttgggctacgctcctgaggtaccctaggacatttccgagaccaacgggaacgatttgtaacggaatcccaacggagggaggcatcgagccctcggaccctatcgaatgggtccgggtccggcaaatcacctgcagggtaaaactgagtcacgatctcccacgagttcggcctcgggcgcaacagggagctccgcctcgcccgacctcaggcctcgacctcagcgtcggcctcgggagaaggtctccgccttgcccgaccccaggcctcagcctcggcctcgggaggagtcacatcctcgcccgacctcggcctcggcctctggagaagtctccgctcgcccgacctcagcctcggaccgactacgccacaggggatgcatcattaccctactcctag

SEQ ID NO: 33900 - DNA, 396 bp, Zea mays
  Peptide Sequence Number=SeqID_75679
atgtacgacaagctccggcgcagccgccgcttggacgcggtgcagagcggctgctcggcgttgtcaatcgtcaagcagggggacctcatggtcatcgccaacgtcggcgactctcggctcatcgtccacctgaagcccaacctgccacaggagtaccgcatccggtggtgcaacggccaggggtactaccttgctgatgagcctggggtgcacttcgttttacagcctaaccaagagtcatcagtactcgatatgtcgcgcgcgttcgacgactactatatcgaggactgtggcgtcatcttggcgccagaggtgacgcaggggaggactgacaacaatgaccagttcgtcatcctcgccaccgttgaggtagcttttgtgccgacttgcctttaa

SEQ ID NO: 33901 - DNA, 435 bp, Zea mays
  Peptide Sequence Number=SeqID_75680
atgaattcatgtttcttacttgaaaaccccgaacaaacaccattagcaggaggcactcgcgttggggtcgctcatcgacgacaagaagaaacttggcgactgccagttcgacctctagaaacagtcctacgtggctgcatgtgccgctatgtacgacaagctccggcgcagccgccacttggacgcggtgcagagcggctgctccgcgctgtccatcgtcaagcagggggacctcatggtcgtcaccaatgtcggcgactctcgggttgttctgggcaccgcattcgacgacgacaccatcacgttgtccagctcatcgtccacctgaagcccaacctgccacaggaatatcgcatccagtggtgcaacgaccaggggtactaccttgctgatgagtccggggtgcactttgatagtcgcctagagggggggtga

SEQ ID NO: 33902 - DNA, 147 bp, Zea mays
  Peptide Sequence Number=SeqID_75681
atggcgcgcgcgcggcaaaggcggccagatgtaattgtggatattactccacaacttatcacactcaatcaaagatccaaatcagacatgtatcaaacattcaagcatacaaatatttacaaaaatacttttgattttgttccttag

SEQ ID NO: 33903 - DNA, 477 bp, Zea mays
  Peptide Sequence Number=SeqID_75682
atggctcatgcagaccccgaggtagtgctccttgagcgagaagaggaggagggaggtcacggtagaggaggtcgtcgcggtgcggagaaagggtggcgtggcccgagaagtcgactggagaggacgccctatgccttgggtcttatgggggagggcgacctcgggtcagttagagtggccacagacgacacgcggaagaagctccggcggattcggctgggtggttgcggcgcttggccaccgggccccaccggatacggacgcgcggagagggagaatggagatgggttggcacagaaaggaattcgcgaggtgggccaaggcgtagggaaagcaggtagtgggcgattaggagagtataggtacccagctactatctatgtgggatataaactgaacaggttgagatgtaattgtggacattactccacaactcatcacactaaatcaaagatccaaatcaggcagatatcataa

SEQ ID NO: 33904 - DNA, 1239 bp, Zea mays
  Peptide Sequence Number=SeqID_75683
atgtcaggcacgtcttcgttcacaaccggggagtcgtctcgagccggcgagcaaccggagcgcgacgaggtggttgagttcaaggcccgcacgtgggtggcactctcctccatcatcgtcgtccacagcgccaacgacgaggggagacggatgctcgcgctccgtgcctccgacatctttctcgacctccagcccccgcaggtcggcgcctcctacctagtcctgcccgatcgcatcgtcaagcaccccaggtatgcagaccaccccgtcgtcttgtccgcctgctccgaccacttcctcttccgggctaccccggccgagggcccctcgaacctcatctgcttcttcgttggcgacgtcaacgcccgcaccgtcgtccgcctccccgaggtccccttccacatggccgtcaacaccatcccgcatccgcaatacagcattggcctcatcgccgacccgcgatcgcgacacggtggtcattacatggtggcccagctccacccgacctttacgacccaccacacgaccctgctatgctactccagcgtcaccgaccagtggaccgccaggccgctggcctccaccgagagcgaggagcaccatcgctggggcgcccacggcgtccttgcccatggcggcctcctctggtggatcgacctcttctacggcatgctcgtctgcgaccctttcgccgcagacgacaacctgcacctgcgcttcgtcccgctcccggtcggctccatccgcacgggcaggcgcgtccccggcccagagaacataggccgggaacgcttcatcaggccgagccagggcaagctgcgatacgtggagatccaaggagcccccagcggtatgcgtactagcaactaccagcccccgtcgaacccccaggtccgcatgttcacgctcgtcagccaagagggccagcatcactgggtacacgagtacacggcgaccttcctcgacatttggagccaccgcagctacgccgaggccggtctgccccagggcgtggtgccttggctcgccctcatcgaccccaacaacgccaacactctctacttcttccggggcacgacgctcttcgcagtggacggacaaaccagacaggtcttgttccgcgtgcgatgcttggtactagaatccgcacgcgggggccacaggttccagaactcccgcttcattggtgcgtgggagctgccaccagcgctagagccagacgattgtacatgccaataa

SEQ ID NO: 33905 - DNA, 1808 bp, Zea mays
  Peptide Sequence Number=SeqID_75684
cccgcgccaatggcgactgtatgacgtgcctgggcagtggcgacaaacgcatcaggtggtgctgtggtgcatcggtgcgggcgtgcggccatgtcgttgacgccgatggcattgatgctctcctcggtggggatagggaggtccgtcgcgaggagcctggggcggagagatccagcgtgaggagcgtgggacgaggagacgctgcggcgtgggtcggagaggcaggagaggagcgcaccgaggaggcgtacggagatgggtcagtgcatgctgctgcttgcaggcagagcgtgccacgcgccatgtcaggcacgtcttcgttcacaaccggggagtcgtctcgagccggcgagcaaccggagcgcgacgaggtggttgagttcaaggcccgcacgtgggtggcactctcctccatcatcgtcgtccacagcgccaacgacgaggggagacggatgctcgcgctccgtgcctccgacatctttctcgacctccagcccccgcaggtcggcgcctcctacctagtcctgcccgatcgcatcgtcaagcaccccaggtatgcagaccaccccgtcgtcttgtccgcctgctccgaccacttcctcttccgggctaccccggccgagggcccctcgaacctcatctgcttcttcgttggcgacgtcaacgcccgcaccgtcgtccgcctccccgaggtccccttccacatggccgtcaacaccatcccgcatccgcaatacagcattggcctcatcgccgacccgcgatcgcgacacggtggtcattacatggtggcccagctccacccgacctttacgacccaccacacgaccctgctatgctactccagcgtcaccgaccagtggaccgccaggccgctggcctccaccgagagcgaggagcaccatcgctggggcgcccacggcgtccttgcccatggcggcctcctctggtggatcgacctcttctacggcatgctcgtctgcgaccctttcgccgcagacgacaacctgcacctgcgcttcgtcccgctcccggtcggctccatccgcacgggcaggcgcgtccccggcccagagaacataggccgggaacgcttcatcaggccgagccagggcaagctgcgatacgtggagatccaaggagcccccagcggtatgcgtactagcaactaccagcccccgtcgaacccccaggtccgcatgttcacgctcgtcagccaagagggccagcatcactgggtacacgagtacacggcgaccttcctcgacatttggagccaccgcagctacgccgaggccggtctgccccagggcgtggtgccttggctcgccctcatcgaccccaacaacgccaacactctctacttcttccggggcacgacgctcttcgcagtggacggacaaaccagacaggtcttgttccgcgtgcgatgcttggtactagaatccgcacgcgggggccacaggttccagaactcccgcttcattggtgcgtgggagctgccaccagcgctagagccagacggtggtgggagctcgatttgggggtctgatagcgaaggaacggatggatcagacagggagcaggctatcagtgaccaagctaccaactctgacatctgtcctcttggaaaccttagacccgtgttaggaacagagcctgtggccaattccgtgcggcgctacgactttgtcactattcaccaaaccctcttcgggttcaccggcaccctctccgaccttggcttcgcctccttcctcgtgctcgccgcaatagctcacgccggcatcatccaaggaagcttctga

SEQ ID NO: 33906 - DNA, 303 bp, Zea mays
  Peptide Sequence Number=SeqID_75685
atgtggcaaggaaagataatacatcccaggatgcatcattgggttcggacctccatagagggacaccagacccctgtacgtacaagtccggagctcccaagaaggcatgccgggtccctcggacggcgtcagggtcatccaccagacggcgcgcctgaccagtctgttgacaaacagtgcgcccgccgtgcggtgtactgtgctcaccaccccttctacaagaagcttcccttgcacgccgaggataagcagatctcggatgtcagggcacgagaagattgccccagcagcgaacatttgtag

SEQ ID NO: 33907 - DNA, 534 bp, Zea mays
  Peptide Sequence Number=SeqID_75686
atggaggaacaccggacccctgtacgcacaacccgaacctttgattacagtctgggactcccaagaaggtggagacccgctgctgccgcgtggcttgtggcccgtgacataagccaacgggcgaagcctgacgcaaggcccctaaagtcgcacagtctctgcatttattacggagaggacacgccgcctgccaccacgctgacagacgatgtgccctctcagcatttaatgcgtcctgtccactccgttggcagacggcgtcagggtaaccttgcaggtggcacgcctgtcagaagcttccccagcacgccgaggatacgcagatcttgggtgtcagggcacgagaagattgccccagcagcgaacattagtagctccaagcgccatatacattttgtccctgggcccacatgtcggggctcagtacctttgtacatgcccccttcagctataaaaggggaggcatgcgacgttacaacacatgttcactcagactctcaagcttccacagcaatccaacacacagtggagtag

SEQ ID NO: 33908 - DNA, 363 bp, Zea mays
  Peptide Sequence Number=SeqID_75687
atggacgcccaggccccgacgccctgcctgcgttcctccacgacaccatttctcccagccggctccctcttcctcctcccctatttcttcctcaagtccataggctgctccctctgctgtccagggcgcaggcgagcttctctcgcccctgctctcccctggccggatcggcccctagctcgagcaggtgaggccgccgtcgcccatggccgatgccctgctcaggggatgaatcctgcgccccctatgctgcatctccagccggttttcgttcccctgctttccgaccagcagccagcaacgcgcagcacaacaccaagcagcggcagcaacctccatggcgcccctgcttccatcccatag

SEQ ID NO: 33909 - DNA, 480 bp, Zea mays
  Peptide Sequence Number=SeqID_75688
atgccggtgcaccggacatcaaacagtacatgtccggtgtgcaccggacacctaggagggcccacaagtcagaagctccaacggtcagaatccaacggcagtgatgacgtggcaggggcaccggactgtccgttccttgaacatcataaacgccgaaaaaacagcgaggacaacggggttctcaccgagggtcgacgacatcacggacggggctgcgcacaacacattatttctcacgggtattccgtcgaacagccaaggggcattgaagagaacaacaagggcgctcagctatgggatggaagcaggggcgccatggaggttgctgccgctgcttggtgttgtgctgcgcgttgctggctgctggtcggaaagcaggggaacgaaaaccggctggagatgcagcatagggggcgcaggattcatcccctgagcagggcatcggccatgggcgacggcggcctcacctgctcgagctag

SEQ ID NO: 33910 - DNA, 258 bp, Zea mays
  Peptide Sequence Number=SeqID_75689
atgggagaccacgtctcaggtcgcgtgaggagggcaatctgcgggcaggttcactcaggtatccgcacgttaatccttattccaatttcatctcgtagaccacgcgtccccatggacccgtgtccacagaccatcaccattatggccctgtttggcacagcttattttcagcttcttcataaatttaagccgaagttctgccaaacagacagcttctccagcagcttatcagttcagctgcttctcagaatgaactaa

SEQ ID NO: 33911 - DNA, 507 bp, Zea mays
  Peptide Sequence Number=SeqID_75690
atggcgaagcctggccacactactcctcctggtcctctcctgcggaagcagcaacccactcgaccgtctatcccggtggcagggacgaaggccaagtcacaccatcaactaaagcaaggaggtacctgcaaaaattatgccacaagcaaggctgagtatactaatactcagctagacttacccggttacaatggatcaagcagtctcattagctgcgagaagcagacgattcgaatcgagtttttatccttgcaagtgaccgcacttgtacccaccataaccggaatgggagaccacgtctcaggtcgcgtgaggagggcaatctacgggcaggttcactcaggtatccgcacgttaatccttattccaatttcatctcgtagaccacgcgtccccatggacccgtgtccacagtccatcaccattctgttatcaaagtggatacaaccaattcctgacctcgcgcgagtgctagaaaaatcactcgacttctaccgagatccctaa

SEQ ID NO: 33912 - DNA, 318 bp, Zea mays
  Peptide Sequence Number=SeqID_75691
atggaggaaaatggagctgcgcagggactgctgctgggaggagatgaacagggcactggaaaaaaaactgggcgttgggagctgctgccgcgcgagagagtaggagcaggggcgccgtggggagcttctacaggggagttcggccatggacagagaggggcgagctgcagagggtggcggtctctgtgcagaggaggccagccatggtcaacgacgagctccctgctcgagctaggggccgatccggccaggggagagcaggggcgagcgaagctcgcctgcgccctggacagcagagggagcggcctgcggacttga

SEQ ID NO: 33913 - DNA, 585 bp, Zea mays
  Peptide Sequence Number=SeqID_75692
atggatggcgcccaagcccttcttccacctctggccggatctctgcccagcgccattcctttctctccatggccggcgcacaggaagccagtagccatggacgcccaggccccgacgccctgcctgtgttcctccacgacaccatttctcccagccggctccctcttcctcctcccctatttcttcctcaagtccataggccgctccctctgctgtccagggcgcaggcgagcttctctcgcccctgctctcccctggccggatcggcccctagctcgagcaggtgaggccgccgtcgcccatggccgatgccctgctcaggggatgaatcctgcgccccctatgccgcatctccagccagtttacgttcccctgctttccgaccagcagccagcaacgcgcagcacaacaccaagcggcggcagcaacctccatggcgcccctgcttccatcccacagctgagcgcccttgctgttctcttcaatgccccttggctgttcaacggaatacccctagtggtcgacgccgcgtttcgcgcttggctcgttcgacgaaacgccaagccttgtggacagcccatgtga

SEQ ID NO: 33914 - DNA, 2487 bp, Zea mays
  Peptide Sequence Number=SeqID_75693
atgacaaagatgagtcatcttccaagagaaaggatttggctctcaaagcaaatcaagaaagaaaaaggaaaagctaaaatacaaattgaggaagaatcctcaagtgatgatgaccttgatgctaacattgccttgatggtgaggaagaccaccaagatgttaaagaagctcaaccgagaaggcatcaaatttaattcaagaaagaagaaattcttttccagcaaaagaaagcccatttctgagatggattgctacacctgtggagagcttggtaatcttgctcatcaatgtaacaagcccaagaagaacaagttcaagggcaagaaagaagatgacaacgatgatgagaagaaggaaaagagattcttcaagaggaaggatgggaagcaaaagaggttccacaaaaagaaaaatggaaaggcatatattgttggtgactggctcactgacattgagtcttcaagtggttcttcttcaagtgaagaagagaatgatgaaaaagttgctgccatcgccggggacttctcttcaccaccaccatcgccatcatcgacttctcacctatgcctcatggctagaggtgaacggaaggtacaaaatgatattgatattactgatgatagtgatagagatagtgatgaggaatttgcttcaccttcatatgatgaactagctgacttgcttaaagaatatactcaaatcattaggaagtcaaaagctaaatgtgataagttgaagaatgaaaatgaatctttaaatgccaaatatgacatagttatgaaagctagtgatgaaatgaaagaagagaacaaaactatgtcatccactgtaaatgagctcacaacctccctaaaagatgctaaggataaatgtgacaagttaaatgaagctaatagggagttgcaagatagactagtaaaaatcaaggaagactatactaagattaaatttgatcatgataatcttcttgttgaaaatgaacttttatcttgcaaaacacatgaggctattaaccctgttgttaagattgatgtagcaacctcatgtgatgatttgagtcaaggagagcaaactagtctacatgatgaactgaccgaaaaagttgatgtcttgactttagacaaccaaaaattaaagagatacttgactgatgcaactactagaggaaaggttgctattgagaacaatgatttcaacaatgagttggcagtggataatgaaaggcttaaaatgaggtcaagaaacttaagagtgaaaatgaacatcttgcaacaagtcaggatgtcgcgcacgaagaatgtgtcggcgccagggggaggcgatgatgaggatcctcgtcgccccttcaggcaggtcaagggaaagaccgtgtacttggagcagcaggaaggccgcaagaagcggcgtatggacagggcagcccgagcagcggcagcagcaacagcagcagccgctgagcaggccgagctaggagatcagcctcagactccttcagatcagattgcataccgagttcgtcgcctcgcctcccagcctcgctcctccactcccaccactacttccactccaccacccactttgcctgctcccatcacccctgctgcgccatccaccacctccactacaccagcttccactgctcctcctcccgctcccgtttccgctccacctatcccacctgctcgcttccgggagcgtgatgagactgaggtgcgacctctggctgcagatcccaggttgtttaaccttcagcgtgctacagcggcacaggtacgtcggttcagatatgtacccgtggagtcttggttaccggctcagagggaccctgctgcagttgacctcttcagcacccgtattcaggagtccttttttagagctcagatgtctgcacagattgctctgcgagttcatcggcttctggaccttcctgcatttctgcttgccgctggtgctgactctgaggacaccgttcgggatggtctgcatgctcgtcgacaactgccttatgctcactatctgtgtcacatttttgctcagctgatttggcctccacagttccagggcacacttgaggcctcacgcctcatctttgggtcctaccgtccagcgcctgaggatcctgtgcgagcacctgctccagtatttgactctcaggccgaggatactactcttcatcagttcgaagctcaggacgcagcagttgatgatgatgatgatgatgatgatgatgattttgggattccacctccgcctccgcctcctatgcctccacgctcacatgatcatgaggctgggagttctcgtgctacccctactgcccctcctgccattgaccctgctcttgcttcaatcctccagacacttactcagcagcaggctcacttggcagccgagcagacccgtcaggcagcagcccaccagcagttgtctgagagaatgctctcgatgtttcagacaattcaggacaggcaggattctctacagtag

SEQ ID NO: 33915 - DNA, 1206 bp, Zea mays
  Peptide Sequence Number=SeqID_75694
atgtcgcgcacgaagaatgtgtcggcgccagggggaggcgatgatgaggatcctcgtcgccccttcaggcaggtcaagggaaagaccgtgtacttggagcagcaggaaggccgcaagaagcggcgtatggacagggcagcccgagcagcggcagcagcaacagcagcagccgctgagcaggccgagctaggagatcagcctcagactccttcagatcagattgcataccgagttcgtcgcctcgcctcccagcctcgctcctccactcccaccactacttccactccaccacccactttgcctgctcccatcacccctgctgcgccatccaccacctccactacaccagcttccactgctcctcctcccgctcccgtttccgctccacctatcccacctgctcgcttccgggagcgtgatgagactgaggtgcgacctctggctgcagatcccaggttgtttaaccttcagcgtgctacagcggcacaggtacgtcggttcagatatgtacccgtggagtcttggttaccggctcagagggaccctgctgcagttgacctcttcagcacccgtattcaggagtccttttttagagctcagatgtctgcacagattgctctgcgagttcatcggcttctggaccttcctgcatttctgcttgccgctggtgctgactctgaggacaccgttcgggatggtctgcatgctcgtcgacaactgccttatgctcactatctgtgtcacatttttgctcagctgatttggcctccacagttccagggcacacttgaggcctcacgcctcatctttgggtcctaccgtccagcgcctgaggatcctgtgcgagcacctgctccagtatttgactctcaggccgaggatactactcttcatcagttcgaagctcaggacgcagcagttgatgatgatgatgatgatgatgatgatgattttgggattccacctccgcctccgcctcctatgcctccacgctcacatgatcatgaggctgggagttctcgtgctacccctactgcccctcctgccattgaccctgctcttgcttcaatcctccagacacttactcagcagcaggctcacttggcagccgagcagacccgtcaggcagcagcccaccagcagttgtctgagagaatgctctcgatgtttcagacaattcaggacaggcaggattctctacagtag

SEQ ID NO: 33916 - DNA, 1077 bp, Zea mays
  Peptide Sequence Number=SeqID_75695
atgcaggtggcgtgcgaccgcaccacagtggcgcaccccttcggcttcgtcgcatccagcatggaggcccagtcccacacgtcatggactgggaaaggggatattttgaaagggatccttctccgcaaaggaagcgggccccgagccctcctactgatcaggggttcgaaggctggccctttgaaagggggttcgaaggctggcccctcgaaagggttcgacagccgccccagagcacgcagagcgagggatgactctgggtacgttcaatacatggccgaggctcaggctacgctcccgagaggctcgggggctgctctcgcaaacccggctacggccaaactgttgacaacgtcaacaaaccagcctaaaaacttggaacctgaccatgcacccgtgctacaatcagagactgatgggcacgattcaggtcaaggcttcgtctactcaagggacgcgatctcgcctcgcccgagcccagcctcgggcggaaacagaagtcccagacgaattcacgcctcgcccgagggcctcctcaagcagcggacgcaccctcgactcgcccgaagcctagctcgggcaggcttcgcagtgaagcaaccttggccagatcacctcaccaaccgaccgtatcgcaggcactttcaatgcgaggatcgcctcacaccttatcctgacacacgtgcctcagtcggcaaggtcgaagaggaggtctccacctcgcccgaccctagggctgggcccccgcctcgacctcaggaggaggtctccaccttgcccgaccctagggctcggcctcgacctcggcctcggaaggaggacgccgcctcgcccgaccccagggttcggcctcaacctcggcctcggaaggtggtctccgcctcgcccgacctagggctcggcctctacctcgacctcgggaagaatcgcgtcctcgctcgaccccggcctcggcctcaggaggagtctccgcctcgcccgatcttgggctcggaccgaccgcaccatgggggatacatcattaccctatccctagctagctcaggctatggggaacaagaccggtgtcccatctag

SEQ ID NO: 33917 - DNA, 1041 bp, Zea mays
  Peptide Sequence Number=SeqID_75696
gcgaagcgggcgtcgcttaacctccgccataatgaccgcgtcaaaaaagggactgggaaaggggatattttgaaagggatccttctccgcaaaggaagcgggccccgagccctcctactgatcaggggttcgaaggctggccctttgaaagggggttcgaaggctggcccctcgaaagggttcgacagccgccccagagcacgcagagcgagggatgactctgggtacgttcaatacatggccgaggctcaggctacgctcccgagaggctcgggggctgctctcgcaaacccggctacggccaaactgttgacaacgtcaacaaaccagcctaaaaacttggaacctgaccatgcacccgtgctacaatcagagactgatgggcacgattcaggtcaaggcttcgtctactcaagggacgcgatctcgcctcgcccgagcccagcctcgggcggaaacagaagtcccagacgaattcacgcctcgcccgagggcctcctcaagcagcggacgcaccctcgactcgcccgaagcctagctcgggcaggcttcgcagtgaagcaaccttggccagatcacctcaccaaccgaccgtatcgcaggcactttcaatgcgaggatcgcctcacaccttatcctgacacacgtgcctcagtcggcaaggtcgaagaggaggtctccacctcgcccgaccctagggctgggcccccgcctcgacctcaggaggaggtctccaccttgcccgaccctagggctcggcctcgacctcggcctcggaaggaggacgccgcctcgcccgaccccagggttcggcctcaacctcggcctcggaaggtggtctccgcctcgcccgacctagggctcggcctctacctcgacctcgggaagaatcgcgtcctcgctcgaccccggcctcggcctcaggaggagtctccgcctcgcccgatcttgggctcggaccgaccgcaccatgggggatacatcattaccctatccctagctagctcaggctatggggaacaagaccggtgtcccatctag

SEQ ID NO: 33918 - DNA, 687 bp, Zea mays
  Peptide Sequence Number=SeqID_75697
atgtcccttggccttggggagagcaccataagcgcttcatcggtgcttgccatgcctatggtctcgtcaagaacaaccggcttcagaggaatcgaaaatgaccgtccaaaaattttaaaaatgatgcacactattgcatctcacacttctgaaaatcgaatgactgcatcggcagttgctacctgtatggcgcctcttctgttgcgtccacttctagctggtgaatctgagatggatgaagtatttgatatggatggtgacgattctgcgcagcttcttgctgcagcaaacgcagcaaacagtgctcaaggaattgtcgcaactctcttggaggaatatgagggcatttttcatgatgaacacctcagatgttccttgtcacctgaatctcaaattgaagatagtggtattgaagcatcaactgttgatggtaatttggaagccaagggcaatggatttcatgatgtagatcaagaattggatgatgacaatggcgtggagcgtatacttagtgggaaattgagtgagagcagtggatatgctggcagtgacctctatgactacaagaatggcaatatcatgattgatgaaaagaccaacgtgctgaccatcattatattcttttggtgtctgaaatatcagttctatgactataatgtggataactgtgaaatgggaatatcttga

SEQ ID NO: 33919 - DNA, 471 bp, Zea mays
  Peptide Sequence Number=SeqID_75698
atgggcagagtatatttgccatgcccaatggtccggcggggaaaaaatatgtggaaagctcttgtggcttccaaactgagggagttccacaatctggacatgcctggtccaaatttgtgctcatttgggggcaaacttagtctcgagaaccagattactacattggagaacaagtgctcatgtgattaccaatggactggtttctgtcacaatgatcttcagaatggcaatatcataattgatgaaaagaccaacgtgctgaccatcattatattcttttggtgtctgaaatatcagttctatgacaataatgtggatagaactgtgaaatgggaatatcttgaacatggagtttttgcttcataccaacctttcataacagtgtcttcttttatgtcactggattacgagtatgcaagcttcaacctagttgcatatgacattgctaacatttctttcagtgctccatag

SEQ ID NO: 33920 - DNA, 1377 bp, Zea mays
  Peptide Sequence Number=SeqID_75699
gcgaccgccgccaccgccgccctactcctggtcccagctctgctgcacccttcgccggcgacgagcgtccaccgcggcaggtacacccacccccctcacttttgcccctccaaccaaaagcgccggcatctcaaaccggacggcgctctcttctctatcctctgtgtcccctccaccaaaaccgacgacgacgtcgctctcctccaccggtgctcggcgctctccctccaccagcggcggtccaccgacgctcggcgagctccaccggcgggcgctggtcagatcctctcggcagtcatccacctggcacgtcggatagctcgcgcctccgttggcagtcccaccgccgcccggccctcccccagcgcccccggtgatccggaccgcacccgcttgctcggcctaacgaccggctcctgccccgccgcagccgaagctcccagcgtcctcctgcaggccgagctgaaggttcagcgcgccggtggagttcgacgacgaaactccgtcacgtcatacctctccgcctcccgtctccaatcggggctcccagcgtctcggagaagaggagcagcacggcacggcggctgtggcgaggaaggctcctgtcccatcccaacccagttagcagccgcccaaggaggaggagatccaatcggcgtgcgggcgtccgcgcgaggaggtcggctacctttctcctccggcgagctccacgagggcgccgacgaggggatggacgcgcagcctaactggagaggtggaccggcggcgactaggatatcgtacaagaacgccaccatcgtcatgtgcgcctttaacctcttcgttgcggccctcctcctccacaactactactcgtcctggacgcgtatcgccggaggcaacaagctcgattctgctcagcttcggtatatatgggaatctgaggagctgcgtcgtgctatggagcctgtggatttgattagaagagtgaaggaaattgagcaagaagcttatggtgagcatggcatggcgacagatgaagatcctaagcaaactgccgctgttgatttatcaaaacggcttaaggatttgagggcaggcaatgatggcagtagccaaaaagctctcgaagaatggcgtaaacggaagatggagcgtgcaaggcagcgagccatcgaaaagaatgggacttctagtgatggccacgctgaggaacctgaaggtcaagacgtcaacgtgcaggccatttcaacgttgcaggctgaggtggaggagtcgaatgagcaagttgctgagattggagaagccgagagtacaatcgcagaggtcgaagcacttgtcaagccaacacaacctctccagttttatcgtgttgagccctcatattgctacttgtag

SEQ ID NO: 33921 - DNA, 5049 bp, Zea mays
  Peptide Sequence Number=SeqID_75700
atgaacgcgcggaggaggcggacgagcgtgcgcggtgccctgccctgtccacgcggagatgtccgtggatgggatcgaggaagagcaagacatacccgcgcgattccgccgagcacaagagggagggagaggccggtgccgcgggccgcggcccataatggtgcctcacgtgacctgccacgcccccaccggcccgccgaactctactcacccagccagccgagctcctccaccaccaccttccccttccgtgtgcgtgcgagtgcgacaccgccactgacccattgcgccccgcctctcgcctccctcccccgccagtcaccaccacacttggtcaagttgccatttgccttcctcctcctcctccccatcggcccaccctccccaccactcacgacggtggtgggttttgccatttttgggttggctgttcatccgggtgctgcctgccgtggtggtggactggtggtggtgccgctgtcgctcctcccaaaagtgccttttcagccgcgcttccggttggggctggggctggggctcggtttggattacggagctcctccttttttaatcctgactctaatccgacctaatcgcagtcacctgctcgcctaccgggatattgttattacttctctcctcctaacctctctctgcctcgccgcattcatggggaccagcgccatcgccagctttccctccgccgcgctcattggctccggtgtcggtgccgttgccgttgctgcgcgcctgcgccctgtcccccgtcctcctccacggtggcgggataaacgatggctgcgtccccgccaaccgccgcttcaccgctgcgtctcgtctgatgagatgagattcggctgggcccttttccctgcgtccgtcaccgtccgttcgggcaggcgagaaaaggaaaaggccggcgcctttcctcctccgctcccccaacctgctgctccggccgtcgcagctttcttggcgcatctgcgggacggtgtgaatgaaaggggctcaggatacaaggcacaggaagaagctggacctccaggttctcgcgcccttcccaggatgcctggggaggatgatcgacatatagatagccagacgagaaggaattcccctactaaaagatcaaactcgcctactaaaaggagcggtgcagcgcctgttaagatgatcatggagcagggcatgtggaaagaagggatgcctgatgaggagccactgaatgttgttgcaagattaatgggactacatgatgctccagttcagcaatctaatttccatttagcgagacaattggataaggaatatcaacgtggtggttttgaagagaactaccggaatctcaagccaaataaggaaagcaaatgccatcaaaaccaaaaggcagggcacacttggaatggttctggtgaccaaccttcaagaatcaatagcagccggagcaagcatcaaggaaatgagccttgctgtgagaagaggatgtcgcttgtccgcgagaagtttgctgaagcgaagcgtctagccacggacgagaagcttcttcattcgaaggagttccaagatgcactacagtttttaagctcaaatagggacctattcttggagttccttgatgagccaaatcctctgttatcaagcaaccgttatgagttccaacctgtcgcgccaccttctcaagcgaagcagataaccatactgaagccatcagaactagcaaagagaaaaggcagcattcttgtggggagacaactgttttcagatggagatgaaaggggacttaacagatacaggcgccatcagagtttagatgtttgcccggcaaattcaaatttgtccgagccaacaaaaattgtgttactgaagccaggacgactgtcaaaacctcatgattccaggattgcaaggtcttcattatcatcagcagaaaacagtgaagatgaaagtatgacgacggttgatgaaaccgtgtgctcaagaaggttggcaaaggaggtcacttggcagacgaggatgcggctaaaagacaagcaagacgaaaagagcacgctctcatgtgaataccttgacttctatatcggagatgactccttcagtaaatcagaagttgagatttcaaaagagatgcctggtgaaacaagtgaggagttggagtttggcactccgacttctggccgttcctgggattttctgagcagaagtggaagtccttactctgcgtcatgctctagccaggcatcccatagaagggaaccgtcggtagttagggaaggcaagaagaagattttggagagatggtctatggtatcgtcaacagtcagtagcgaggaggaaatggaaggtcgcagaagtacaggcacgcttggtgacatactcacaataccgaaagtcaaggaccaggaaggaattggggcggaaacactggggagcccagcacctgagctggaacctgaggagcctttctcatgcttgccaagatctcggtctcttccactttctctgtcctgtggagtcgccgagtctaatggaggagtagcctctggtagtactcaggaagctgaaagggagaggatcaggaagtcatcatcgtttagggaaaaggtttcaagcctgttctctaaaaacaagaaaccagttagggagaaggcagatctatccgtgagcaatagactcgaggtctatggaggggctgaaactactgctgatgtgaagaagggcttgaaccgtcttgcgttagacaatcttcagaaacaaagtactagtcgtgtaaacacagacgggaagaagaacgctgcgcaaggactcgtcactagttcttgtggtactaatgatacagctaataccacccctgccaaggacaacattgcctccattccaagtcttggcgccccaggaatccttggtgaccctcaggaccagcctagtcctgtatctgtgctagatggaccgtttattatacgtgataacagcaggaatgtactgtactcatctccatccccacaggctttgtcgaggtctcccttgatcggatcgtttccacggtccctgccagtgtcgtgggaggaccccccgccggaagccacgtcgccgaattccctgagactctcgaggcttttctccaaggccgacgaggatctagactcgctgacgttcatccagaagctggtccgctcctgtggcatggaccgagcaagctgcgtgttggctggccctctggacccggacctgctcgagaaggtttcagagcacgaagacgacggaaccaggttcgggagaaggcggcttcttttcgacgccgtaaacgaagcgctcgccgagctcgcctggacggcggaactggccgcgtacccctggggcggcggcagatcacgcctggactgcaactgcaagaacggttccggtggtgactcggcggccgaggagatctggcgcgttatcaggaactggtcgacacttgacaagtaccctccctgcgaaactatcgaaggaaacgtcttgctggagatgatactcaggcgggaggcggacagcggcgagacggctcggttggaggtgtttggtctcggcgcctcggtctgcgccgtggtgttggaggagctggttgaagagacggttgtggatctcctgactgactgctaccgtttttcgcatccacgtgggccagccggccaggcgaccgccgccaccgccgccctactcctggtcccagctctgctgcacccttcgccggcgacgagcgtccaccgcggcaggtacacccacccccctcacttttgcccctccaaccaaaagcgccggcatctcaaaccggacggcgctctcttctctatcctctgtgtcccctccaccaaaaccgacgacgacgtcgctctcctccaccggtgctcggcgctctccctccaccagcggcggtccaccgacgctcggcgagctccaccggcgggcgctggtcagatcctctcggcagtcatccacctggcacgtcggatagctcgcgcctccgttggcagtcccaccgccgcccggccctcccccagcgcccccggtgatccggaccgcacccgcttgctcggcctaacgaccggctcctgccccgccgcagccgaagctcccagcgtcctcctgcaggccgagctgaaggttcagcgcgccggtggagttcgacgacgaaactccgtcacgtcatacctctccgcctcccgtctccaatcggggctcccagcgtctcggagaagaggagcagcacggcacggcggctgtggcgaggaaggctcctgtcccatcccaacccagttagcagccgcccaaggaggaggagatccaatcggcgtgcgggcgtccgcgcgaggaggtcggctacctttctcctccggcgagctccacgagggcgccgacgaggggatggacgcgcagcctaactggagaggtggaccggcggcgactaggatatcgtacaagaacgccaccatcgtcatgtgcgcctttaacctcttcgttgcggccctcctcctccacaactactactcgtcctggacgcgtatcgccggaggcaacaagctcgattctgctcagcttcggtatatatgggaatctgaggagctgcgtcgtgctatggagcctgtggatttgattagaagagtgaaggaaattgagcaagaagcttatggtgagcatggcatggcgacagatgaagatcctaagcaaactgccgctgttgatttatcaaaacggcttaaggatttgagggcaggcaatgatggcagtagccaaaaagctctcgaagaatggcgtaaacggaagatggagcgtgcaaggcagcgagccatcgaaaagaatgggacttctagtgatggccacgctgaggaacctgaaggtcaagacgtcaacgtgcaggccatttcaacgttgcaggctgaggtggaggagtcgaatgagcaagttgctgagattggagaagccgagagtacaatcgcagaggtcgaagcacttgtcaagccaacacaacctctccagttttatcgtgttgagccctcatattgctacttgtag

SEQ ID NO: 33922 - DNA, 336 bp, Zea mays
  Peptide Sequence Number=SeqID_75701
gaactactatttcctctgattgaaataggcaaaaggttgctcgctttggctgggtgggaagagccctgcaagtcttatgtcttcttgttatgtttcctctacatggcttacaggtattgttttctgaatttcatattcagcactagggaagagcattctcctatgaagataattgattttggtctctcagattttataagaccagtatttcttgctgctgatcagtgccctataggctatagcttgaagatggttgaactggaactattacgtttcctttgtgagaggattgttaagagagaaaaagtgaaggtatttgaaattgaacttaaatag

SEQ ID NO: 33923 - DNA, 1224 bp, Zea mays
  Peptide Sequence Number=SeqID_75702
atggacgccttgaattttgactaccatgattatgaaaaacttgacaaaggggtcgaaggggtaaaaagaaaaagggttgtcagcattctgagcaggcaagctgccagaatggttaaggaagatgagaaattttctaagaagacaaaatccactcctgagtcaaaggcgacagtttcaaaaaagaggaaggctgaagctctggagccgaaggtaactgaggtaacagaagagactccttcaacacctcctactactgaaatagcagaaattctaaagctcaagcagcactactcgaggttcagaggaggccaggatcttggccagagcagttccgaggaaatgatgcttgatgaccccttcccgctctcggcgtataccatggtgacgatgggtttgctgaagctgaaagaggaggacaacgccgaggagagggatttcgctgtgcgtgacgtgcagattggagggactagctcagttcagatggctctagagcgttcggttgggtattcgggtagagtggaagcggcaagggctacgcttgatcaggtcagagtggaagacatagacactaatgtagttggcctaaaggaactactatttcctctgattgaaataggcaaaaggttgctcgctttggctgggtgggaagagccctgcaagtcttatgtcttcttgttatgtttcctctacatggcttacaggtattgttttctgaatttcatattcagcactagggaagagcattctcctatgaagataattgattttggtctctcagattttataagaccagtatttcttgctgctgatcagtgccctataggctatagcttgaagatggttgaactggaactattacgtttcctttgtgagaggattgttaagagagaaaaagtgaagaaattcctattcagcactagggaagggcattctcctatgaagataattgattttggtctctcagattttataagaccagatgaaaggcttaatgacattgttggaagtgcatactatgttgctccagaagtcttgcataggtcatatagcacagaagcagacatgtggagcattggtgttatcacttatatattgttgtgtggtagcaggccattctgggcacgaactgaatcagtatcgcctcaagctaaagattttgtcaaaagacttcttaacaaagattacagaaaaagaatgactgctgcacaggcactctattcgtga

SEQ ID NO: 33924 - DNA, 162 bp, Zea mays
  Peptide Sequence Number=SeqID_75703
atgtggagcattggtgttatcacttatatattgttgtgtggtagcaggccattctgggcacgaactgaatcagtatcgcctcaagctaaagattttgtcaaaagacttcttaacaaagattacagaaaaagaatgactgctgcacaggcactctattcgtga

SEQ ID NO: 33925 - DNA, 255 bp, Zea mays
  Peptide Sequence Number=SeqID_75704
atggcgacggcgtcgtgcgccagactgcagccggcgcccgcggcgtggcccgtgacggtcgtgaccgttagcacggggagcacgagcaggacgagcgcacccgaggaggcgcggcgggcggaagcggagggcggagagcagggccgggctgaggcggtgctgccctgcgccggtgaggggagggcgtggaggaagaaggggcttgccgcctacggagctcggacctctggttctagagacggagggaggtcgtag

SEQ ID NO: 33926 - DNA, 1203 bp, Zea mays
  Peptide Sequence Number=SeqID_75705
atggacaccttccacacggtcgagagactcttgggtcccacactccaagcacagtcgtcggcaagccggtatcccccctacctacggcggaatcctttcctcccttccgtgggcaatggtggcactggcgagagctgcctccccttgcacggcagtccggagaccgggacggctccgccgtcacagtcagcggtcgagcggaagggtgacgagacccgacgaggctctgtaggtggcaggccccgtcttcctctacgacctccctccgtctctagaaccagaggtccgagctccgtaggcggcaagccccttcttcctccacgccctcccctcaccggcgcagggcagcaccgcctcagcccggccctgctctccgccctccgcttccgcccgccgcgcctcctcgggtgcgctcgtcctggccgccgagggcaagttcttcagcaacggctacgacctcgcgtgggcgcgcgcggggccggccccggcaccggggcaccgcctcttcgcgatgcgcgccgcattctgtggcctcgtcgccgacctgctcgtgctccccgtgctaacggtcacgaccgtcacgggccacgccgcgggcgccggctgcagtctggcgcacgacgccgtcgccatgtgcgcctcccgtgggttctccctgctgacgcgggcggcgacatggccggcgggagaaccggcgcggtgggcgccctgctgcggtggtggcggacccaggacctgttggactggtcggggtccgcgctgcgcgccggggcgtgggcgttctccctgctggccttcctcgtcatggcctgcaacgagcatggggactggaggcagttcgaccgctacgaggagtacaggtacatcgttgccatcggcctgctggccttcgtctacacgacgctgcagctcctccggcacggcgtctgcctcaccggtggccaggacctggagcccaagaccggcctcctcgtcgacttcgccggagaccagtcatcagttctacactcacagccgaaatctacagttggaactcctgcatacattgctcctgaggttcttctgaagaaggaatacgatggaaagaggatcaccatccctgagatagggaaccatccatggttcttgaagaacctgccagctgacctaatggatgacagcacgatgagcaagcagtacaaggagcctgagcaaccgatgtag

SEQ ID NO: 33927 - DNA, 762 bp, Zea mays
  Peptide Sequence Number=SeqID_75706
atgtcaaaaacccccgcggaaccacttcgagcgagggcagcgtctccgccatctagcgacgtcttcggcaccagtcgctggtccgacagagacaaaacgggcagggacacccttcgctcgattcggcaccagacgaaggcctgcgacggcgtcatcccacagtgcggcctcgtccagctcagaggcccacgtgtgatccggcccattgtagctgagggcacatgcgtccttagctcaaggcgctgggcgctcagagtatctgagcccaacgatggttcggcagagcagagactaccggcccacgaggccgccggggtccactggccggcaccgacgtccctgagccaccggagccaatcaccctgccgcctgccggtggttgccgttgccgttcccgctgcatctgcggctgccacacggcggtcgaccatctccgcccgatccagcggcccatccgcctccactgcacgctcctccatccgcgatcgcgacgcgtcgtacgtcgtcgtcgccgtctcgtacgaggatcggatggatcagccatcaagcagccaagctcaatccatcaagccaggtggaacaccggaattcaatggcctccataggaaggtgaagctgcccaggtcatttgtaactgtggggcgcctgcttgtctcctccactccaccttctgctgccctatctcacctgaacctgtactgtgtgccttggctccttggtgcaaaaatgtcgctagaagagtatggcagcaagagtatatga

SEQ ID NO: 33928 - DNA, 282 bp, Zea mays
  Peptide Sequence Number=SeqID_75707
atggcaatgggtcgggttcggatcgggtatggcgtgcagcagtgctgctactgctcaaagcaagggacgtcggacgccgacgaggagcagggtcggcacttcggcagttgtacgccgacgaggagcagggcagtgcggcaggtggctggggcggcagtgcggcagcgacaggtggctggggcggcaggacggcagctcgacgccgtatgccgacgaggagaaggacaggagctttctgctttctggcgaagatgcgtgcggcggctggtgcttctggcttga

SEQ ID NO: 33929 - DNA, 2118 bp, Zea mays
  Peptide Sequence Number=SeqID_75708
atggttgcctttcaagggggtcaccctccttttaaaggcaactctccccacttgcgtcctcagccatcgcgggctgagtcttctccaacacgctccaaggtcctccccctacgacacgggggctgggtcccacgcgtcatgcaagctggcccagggctgaagaagccaaaccgccgcgcgcggtgcgcgcaactgcccagcggttacaagcattcctccactttcgcccagaccagcggggcaacacgtcatgcaaccggcgcaccggttgctacgtgcaagcaactgcaccgccactcgcgccactaccgtgcctcctcgactgcggacccagcgggcggaagcagcggttacgtcgtcagccaagctcacgtcccctcctgggacagcgagagaaccctctcccacggcgtgaagacggcgcgcccgtgttccgttcctcgaacggctcgtgcacgtgcaacggctgccccgcgaaccactcgtctcgtcgcattaactccgcggcaggacaggcggcacctttggcaagagaagcgggcgacgcttcacctctaccataatgaccgcgtcaaaaaggtgtgccacgttattcgatttcgtatccttttcctcttcctctttctctctcttacaacagggaccgggaaaggggataccctgaaagggatccttctccgcgaaggaaacgggccccgagcccccctactgatcagaggttcgaaggctggcccctcggaggggttcaacagccgcctcagagcgctcgggctccgcgcccactactggtcagagattcgaaggccgacccctcggaagggttcaatggacgcctcaggccactcgggctccgcacccactactgatcaggggggctcgggggctgctctcgcgaacccggctccggccaaactgttgacagcgtcaacataccagcccgagaacttgggacccgaccggctcggactcgggctcggccccggaagacgacgaactccacctcgcccgacccagggctcggactcggcctcggccccggaagacgacgaactccgcctcgcccgacccagggctcggaatcggcctcggccccagaagacgacgaactccgcctcgcccgacccagggctcggactcggcctcggccccgaaagacaacgaactcctagggatggaaattttacccgcggcccacctgaaaccggccggcccagcccaatgcgacaatattctttattcaatcaccagcaaggcagcaaccctaccctagtttctctctcacctcaacctcacgcacagcacaaactcaagcggtcaagccaccagccgccggccgccgcacgcatcttcgctagaaagcagaagctcctcgtcggcgtacggcgtcgagcactcagctgccgtcctgccgcactgtcgccccagcaacctatcgctgccacactgccgccccagccacctgccgcactgccgccccagccatctgccgcactgccctgctcctcgtcggcgtacgactgccgaagtcccttcctgccagtccgccaccaccactccgccagcgaggagcgagatccaggcgaccaggtgagagtgcccagcccgcccagcaccacagtccacacgccctacgtccggcgtccctccctgctgcccgtgtggattctgccagggcctctgctgtgtgcacattttatatgcttaagggccaacataagaaggtaccctggtgactggactggaggtggttctcaaatctcaagcccatccatggcgcctacaagtggatccggctccgggacgcaagctaatcgtccaccattgtcttcacgtggtgctgcaacgaggagggggagggtgacctcaaaccggtcaactatcaatcgtgttgatgctgctgcagcacaaccacaatcaggtatagacaatgtcattgtggaagatgatgatactgttattgttgggacgaagaggaagctgaaatctgatgtttggctagagtttgaacaagtaactgttggtgtagcagcactgttgtctgctgcacgcctgagccctgagcagccagccggtgactcagtgagccagcaaccagtagcagcactgctgcacgcctga

SEQ ID NO: 33930 - DNA, 630 bp, Zea mays
  Peptide Sequence Number=SeqID_75709
atgggtaccaaactatgccaactagaccatgcagtgaatcaagcaaaggactttgatgagaatctgcaacatgctctccaaaggacgacactcgtctatgagatgcatgagcaaaaggagccctcaattggtgacaacaggtgctctcactccacactacctaaaagaatggatctcatggcattcagatggaaagtacaccataacatggtaaaggtacaaaaggagggggagaatttgtgcattaaatcttacctcgacctgagaggaaagcttatcttaagggtgaagatatcttcaggatattcatgtggttctggtgctttaaattggtatcttaatgctttaattgtgttgccatcaatcaccaaaaagggggagattgaaagctctcttgtgggttttggtggtttggatgacaacccaattataggactaacaagtgtgctaagtgttgaacagacaaccgatcaagccaaggatggaggcaagaagatcttcgaggtaccgagtgcacgggagaaggtcaaggagaccaggaacccaaagccaggggtgaagaagaagacttgcaaagtcaaggttgatcgagttaagaagagttatggtgcatcaaggatcactacataa

SEQ ID NO: 33931 - DNA, 183 bp, Zea mays
  Peptide Sequence Number=SeqID_75710
atgaggtgcatgagcaaaaggagccctcaattggtgacaacaggtgctctcactccacactacctaaaagaatggatctcatggcattcagtctcaaggtggaaaagggaagatgagcaagaaatggagcaattaggacttgggtacctccacaagtcgagtaattggtatctagagttgtga

SEQ ID NO: 33932 - DNA, 318 bp, Zea mays
  Peptide Sequence Number=SeqID_75711
atgcctgcccccacccccgtccctgcgattcccgcgaccacagcgccccctccccccgacgcgctctgcgcgcaatgcctgctaaccaaggccacaacgcctggagcaagggggaggatgtcggccttgcatggcccaggcgagggcggcccctgcgcggatgcggcccccggcctcagccctagctgtgagaagcaaaagctgctaaccggagttgtacaactaagaataattccaggggtttatgctgatggagatagctcagtgtcgacatatgaaaggcgggcaagccttaggcaattctatggtagtctctag

SEQ ID NO: 33933 - DNA, 603 bp, Zea mays
  Peptide Sequence Number=SeqID_75712
atggtggcttgtagtgaagtgcgagaatttgagtatcgtgattctgaagctcattacatggagacttctcattcccaagccaatggtgtaaatgaaatgcatctacacattcgtcttgagaagctactcactttggggccagatgaccatcaaatgcttgctataaattccttaatgcttgatgggaaatggtcaaatcaagaatcttctgtcaaggaagtagtttccactactagggtccaaagtttaaagaaactggtgcaagagaagctgcatcaatggctcatctgcaaagtaaacgatgatggaaagggtcccaatgttctgtgcaaggaaggacagggtgtgattcatttagtagcagcactgggttatgattgggctataagaccgataataattgctggtgtcaatgtgaacttccgggatgctcatggatggactgcactccactgggctgcgtctttgggaagagagcggacagttagtgttctcatagcaaatggacacaagatcccgatgcggcagtggcggacagcaacgggcgctcaacgccatcgcgcctcctgcgaacccatggtgagatgtgtggtctcgatctag

SEQ ID NO: 33934 - DNA, 1050 bp, Zea mays
  Peptide Sequence Number=SeqID_75713
atgaggctgtcgttcagctccctggctccattgtttttgtacttcatccaatggctggactgcggctgctgttatgcccttcctagctatttaggactatttcacattctcatatgcaaagtaaaattgcagtttatgctgatggagatagctcagtgtcgacatatgaaaggcgggcaagccttaggcaattctatgcagcttgagagtagtttgatcgagagggacctgaaagggaagggccgatgcaaggatatagtttatctcttgcttactgttccctgctttattgagtgccgcccaaatatcacgttactgttagaaatgttatttgatcttactgtgtgggtggcttgtagtgaagtgcgagaatttgagtatcgtgattctgaagctcattacatggagacttctcgttcccaagccaatggtgtaaatgaaatgcatctacacattcgtcttgagaagctactcactttggggccagatggccatcaaatgcttgctataaattccttaatgcttgatgggaaatggtcaaatcaagaatcttctgtcaaggaagtagtttccactgctagggtccaaagtttaaagaaactggtgaaagagaagctgcatcaatggctcatctgcaaagtaaacgatgatggaaagggtcccaatgttctgtgcaaggaaggacagggtgtgattcatttagtagcagcactgggttatgattgggctataagaccgataataattgctggtgtcaatgtgaacttccgggatgctcatggatggactacactccactgggctgcgtctttgggaagagagcggacagttagtgttctcatagcaaatggagctgctgcaggagcactgactgatccaacttctgagttcccttctgaaagaagtccagctgatttagctccagtaaatggacacaaggggatttctggttttcttgcagaatctgctttgacatgccatctgtcagcacttactattagggaatcaaatgatagcactgtagaagtgtgtggcactacaccaaaatag

SEQ ID NO: 33935 - DNA, 240 bp, Zea mays
  Peptide Sequence Number=SeqID_75714
atggagagaggaaggggaggggctcaccatgggcggatggaaacgaacgacatgggcgacatggcctccggcggacggcgtgctaagcgcggcaaggcgccaatggcaagaggagggcgcggaagggaggtgcgaggtggtggctctgagagaggaggcatgagagagggaagttgggcaagggatttgcagctccgcaggtgcacgacgtgggcgccaaaggggcggttgttcctgtga

SEQ ID NO: 33936 - DNA, 345 bp, Zea mays
  Peptide Sequence Number=SeqID_75715
atggccttcggcggacggcgtgctaagcgcggcaaggcgccaatggcaagaggagggcgcggaagggaggtgcgagtggtcttcccttccaaggggaaactactctttaaggttgtcgaagtacaaggagaagatcaagacatgcaggataggggcacgagcataataaaagatgaagctgaagtaaggattgtaatcggcaagggagaggatgcatccaaggccaggataggtaaaacaccattctcaagtcgagatgggaaagatgataattcaaaagaggcggctttaaaatatgggtacatgataagcatgaaggtaaagacaagggataacaagggttaa

SEQ ID NO: 33937 - DNA, 162 bp, Zea mays
  Peptide Sequence Number=SeqID_75716
atggccgccccgcgaaccactcgccccgtcgcattaactccgcggcgggacaggcagcgcctcttgcaggagaagcgagcgacgctacgccttcgccatgatgaccgcgtcaaaaaagggaccgggaaagggggataccccgaaaaggatccttccccgtga

SEQ ID NO: 33938 - DNA, 1338 bp, Zea mays
  Peptide Sequence Number=SeqID_75717
atgggggggcctgcggagcaacggaagaccgatgaacggcgcgccgtcacccgctccggcagcggcgacgacgacgacttctgctctggggggccgaacagcagcggcgatgacctcagggcggatgctgcggccaggaggcccccgcccatgcccaaactcgtgaggcaaggacgggcagaaggccgtagaattggaggtcggtccgtgggcggccctggctatctcgtcagcggaagaacctcttccagctgccgtggcagaagccggcgccgagagcggctccgaagccactcgggtccgagagccaggcacgcggcagctgccagcgccacggacgacaaccgcccttccccccggtcactgagggaaggagcgggccaccacccacgcaggggccgaccccaactcggcacactcccctccccagccctggtgatgaaaatccttaaggctgagggaggggcagaggccgcggcccgcgggcgaaagggcgggcagccgtgcaggcggttttgcaatagcgccaagtgggcgcacttctccgacttccagcacgcccagcatggaagcccaggcccacgtgtcttgcggcgcctctggcaggagaagcaagcgacgctacgccttcgcaataatgaccgcgtcaaaaaaaggctccgagcctccctactgatcagaggttcgaaggctggcccctcggaagggttcaacagccgcctcagagcacgtgggctccacacccactactggtcagaggttcgaaggtcggcccctcggaagggttcaacggtcgcctcaggctactcgggctccgcgcccactactgatcagggaatcccatcagagggaggcatcgagccctcggaccccgtcgacaggggaccgggtccggcagatcacccgcagaggctcgggggctactctcgcaaacccggctccggccaaaccgttgacaacgtcaacataccagcccgagaacttgggacccgaccgtacacccgggctacggccagctcgcatgagggaacgaccagaccagccaaagcattacgcgaggcattaagacctcggaggagtcaaaccactcctccgaggcctcaggggctacacccggcggatgcgctcgcgcgcacccaccggaacaaaacgcaaccgagaaaggctggtccccttgcaaaaaagtgcgacgaaagcctccaagcgagtgctaacactcccttcgaggctcgggggctactgtcggggaccataattaggggtaccctcaaggctcctaattctcagctggtaacccccatcagcataaagctgcaaaggtctgatgggtgcgattaa

SEQ ID NO: 33939 - DNA, 555 bp, Zea mays
  Peptide Sequence Number=SeqID_75718
atgaccgttggtggaggctgtctgttcgatggcgcaccggacagtccggtgcacaccgggacagtccggtgcacaccggacagtccggtgcacaccggacagtccggtgcacaccggacagtccggtgccccctgccacgtcatcactgccgttggattctgaccgttggagcttctgacttgtgggcccgcctgggtgtccggtgcacaccggacaggcgactccgaccccagctccgcctccgggacccacgtccggcggatccggccacgttcacgtccgatcccgaggacgacgaggacttcgccgcgtggagtaaggggtttatcctggatgagaaggaggaggagatcgaggccctatgctacgacagcgacgcgctggaagccatggcggacaggctcgtcccggacgccgtgccccgcgaggtgttctggccgaggctcgtcccggacatcctcgtcccatacgcgcgttcagcaactgccatgttgggccagcgcccacgccgcacactccgctcccctagctcgtcgcgcggggacgcggggtag

SEQ ID NO: 33940 - DNA, 357 bp, Zea mays
  Peptide Sequence Number=SeqID_75719
atgctgcgcgaagatgatccgcgagagcggcacatcccacgccggctaggggggacacctgcctggaaccgggcacccactggggttcgcggtgtttccgcagcgaaatcttggtcgaggttgcgcaccaaacatgaccgttggtggaggccgtctgttcgatggcgcaccggacagtccggtgccccagccacgtcaccagtgccgttggaaattgaccgttggagttctgacttctgggcccgccttgatgtccggtggcgcaccggacatgcactgttcactgtccggtgcgccggcatgggcgtctctgacttctgcgcgcgctgcgcgcgcattaaatgccatcgcaggtag

SEQ ID NO: 33941 - DNA, 996 bp, Zea mays
  Peptide Sequence Number=SeqID_75720
atggcgcagcgcctcattaaaaaaaatgtggacaccctcatctcgactaatccacccggtttcattccaaaagagattacaaatctactggaaaagtctttcgagtggaatgttagcttcaccgaaagcacaattatttatagcaatgtttccttccaagtcaatgctataaacgcagaaatggatggtggcaacatacttccaactacaccgtcctcacagccatcgtcgatcgtgctttctcaaggacaaggatcaggtgtcacacagaacacgggggcttccttcatccgcgagccgtcactgacaccagagagtcacaaagtttcatctatcgccaagtgtgacatacagacagccccacatcagggagacaatctgctccaaggaacagaaattgtcacttctccgcctaacatgcaggcgccatcaggagctgcttacagcgtgctagatgggtctacaaacaaggctcacaaaagtgttactggaaagagtgagtatggttttatgcttgtaagatatgagcagcgctatgctgtgtgcttgactaggctatggtatttttcttatagtacaggaaatacacaacgaagcagctcctatgttccattcaagaaaggaggcaattcaattctgaatgataagaaatataccaaggtggtgagtggaatacagagggggtgtttttggctcttcttcctctggccatgcaaaggctgtgaacctgagtggaacaagaccttcgtgttcacagtctccgatggcgcagcagcactgttcatccaaatcatggacagtgacggtggcactgatgacgattttgttggtgaggcaacgattcctctggaagcagtttacacggaaggaagcatccctccaactgtttacaatgttgtgaaagacgaagaataccgcagaaataataataacggtcaccgaaccccactctttgatgtcctgtactactgcatcaatttggcgtgcttaagttag

SEQ ID NO: 33942 - DNA, 2085 bp, Zea mays
  Peptide Sequence Number=SeqID_75721
atgttaactgaatggtttcaaataaacttgaaatatggtgatgcacatcacctcacttattgtgatttcccaaaagagtggtcgtgggacatttctactaggtgttggcgaagaaggaggttgacgtctgccaagattggtcgcatgtactacgtgcacccaacagctggggagctatactatctacgcatgctcttgatgtttgtttccggtgcaacgagcttcgttgatgtaaggaccttccaggatactgtgtacgagacgttcagagaggcgtgcgaagcacgtggtttgctcgaaggcgacaacgagtggaaccttctatttgatgaggcagtagtgtctgcctcgtcatttcagcttcggcatctgttcgttaccattgtcgttcattgtcctgtttgcaatgttcgtgctttgtttgacaaatattggatctacttcaccgatgacatacaccatggacttagagaagctctcggcaacccgcgctacacagctccacatgaacaactccttacgttgcttttgaggaaactagcagacacgtttgctaacagtggtgccaacatagttgattatgacctgccaatcttatcggcctgtggtgacgaagtgtttggcaaccggctgataaacgacgaactgaggtctgaaccagtgctatggcgtgcccatgccgccgttgctgtctcgcagttgaatgctgaccaacggttcattttcaaaaagctgactgaatctgcgctgtcttgctcgccgggcatatttttcgtatgtgggcatggtgggacgggtaaaactttcttgtggaacgctatactcacacatttgaggtcccggcaaaaaattgtgcttgctgtggcctcctctggcgtggcttcgctgctattaccaaaaggccgtactgctcattcacgtttcaaaataccatttgatctagatgagagaggtgtatgtggtgtcaagagaggtaccatgctgtctgaacttatacaacggacttctcttgtcatatgggatgaggcgccgatgacccataggcattgctttgaggccctagacaggactatgtgtgatattctttcggaacatagagcggaaaatgcgaacatcccatttggtggcaaacctattgtgcttggaggagactttcgccagattctacctgtggtgcgcaaaggctcacggctttgggaattccttgatcctcaggatgacagtaggctcctgcatactgatcttgttttgcttgatgaagagggaaacaacatacatgcccaggtctatcctccgttatgccaacagttcaatgtgctcggtgttgtcagtgtgatctcccatgtttcgtcgctgcgcacaaggggacgacaggctgaggttatgaagagaacagtcactataagcaatgcaagggatactgggccaaccgttgatgttgtgctttggggcgagcgggccacagctttcccagctgaacagatccacagggacagtggatcctcaccacagatcataatatttgttggcactctcgtgaggagttacgctgataatgtgtctttatcgggtggatcgtcatgcaagtggtacataaacgcaccggtcccggaagggaaagcagctgctgagggtgcagtaattgcagtgcctgaacataggaaactcaaggatattaagtacctccatccttttgaaaacaagaagaaggaatggcttgtcatcgtaaagatcctcaagattgatagatcatggtggtacaacgcatgcaaaaaatgccttaggacaaccaaaccacacggtgacacatacaagtgcaccaatagttcctgtgacagcattggatcgcctaccccaaggtacaagatatccctcaccgctgaagacgatactgacaccgccgagtttatcttctttggacgaatggcgcagcggctcattaaaaaaatgtggacaccctcatctcgactaatccacccggtttcattccaaaagagattacaaatctactggaaaagtctttcgagtggaatgttagcttcaccgaaagcacaattatttatagcaatgtttccttccaagtga

SEQ ID NO: 33943 - DNA, 1219 bp, Zea mays
  Peptide Sequence Number=SeqID_75722
tcatcagttcaggatgccgcgcacgaagaatgtgtcggtgcccgggggaggcgatgatgaggatcctcgttgccccttcaggcaggtcaagggcaagacagtttacttggagcagcaggaaggccgcaagaagcggcatacggacagagcagcccgtgcagcagcagcagcagccgctgcacaggccgagcttggagatcagtcgcagactccgtcagatcagattgcataccgtgttcgtcgtctcgcctcccggcctcgctcctccactcacaccactgcttccactccaccacccactctgcctgctcccgtcacccctgttgcgccatccaccaccacaaccatacccgctacctccactatgccaacttccactgctcctcctcccgctcccgcttcagctcctcctgtccctccacctcaattctgggagcacgatgagactgaggtacgaccacttgctgcagatcccagactctttgaccttcagagtgctacagcggcacgggtacgtaggttcggatacgtactcgtggagtcttggttaccagctcagagggaccctgcagcagttgacctattcagcacacgtacacttctgaccctcctcgtcgccctcatggcagtgtggctccggactcttctgccgaggatgggatacagggaggctaccacacatatccagctctggctccttggtgccctggtctctcactctgagtttgacatcatggatttccttatttgtgagatcgaggacaccgttttggatgggattcgtgctcatcgacagttgccatatgcccactacttgtgccacatctttgcacagctgattcagcctcctcggtttcagggcacacttgaggcctcacgcctcgtttttggatcctaccgtcctgcgcctgaggctcctgtgccagcttctgctcctgtctttgactctcaggccaaggacgctgctcttcgtcagttcgacactcaggatacagcagctgttgatgatgatgatgatgatgatgattttggggttcctcctccgcctccgcctcctatgcctccgcgctctcatgatcatgaggctgggagttctagtgctgcccctgctgcccctccggctatggaccctgcttttgcttcgattctcaagtctatcactcagcagcaggctcacctggcagccgagcaggcccggttatccgagaggatgctctga

SEQ ID NO: 33944 - DNA, 1116 bp, Zea mays
  Peptide Sequence Number=SeqID_75723
atgtcccggtgcaccggctgtcgcgtgctggaactccatttttcctgtgcgctgtccggtgggttcaccgggacagctactgtgcgctgtctggtgtgcaccggacaggcactgtacactgtccgtcatcagttcaggatgccgcgcacgaagaatgtgtcggtgcccgggggaggcgatgatgaggatcctcgttgccccttcaggcaggtcaagggcaagacagtttacttggagcagcaggaaggccgcaagaagcggcatacggacagagcagcccgtgcagcagcagcagcagccgctgcacaggccgagcttggagatcagtcgcagactccgtcagatcagattgcataccgtgttcgtcgtctcgcctcccggcctcgctcctccactcacaccactgcttccactccaccacccactctgcctgctcccgtcacccctgttgcgccatccaccaccacaaccatacccgctacctccactatgccaacttccactgctcctcctcccgctcccgcttcagctcctcctgtccctccacctcaattctgggagcacgatgagactgaggtacgaccacttgctgcagatcccagactctttgaccttcagagtgctacagcggcacgggtacgtaggttcggatacgtactcgtggagtcttggttaccagctcagagggaccctgcagcagttgacctattcagcacacgtacacttctgaccctcctcgtcgccctcatggcagtgtggctccgggtacaactcacgtcgcggttctgttccgcccgctcttttcagatgggtcgcgacgttcaccggcagaattactacaacagccaggccaaggacgctgctcttcgtcagttcgacactcaggatacagcagctgttgatgatgatgatgatgatgatgattttggggttcctcctccgcctccgcctcctatgcctccgcgctctcatgatcatgaggctgggagttctagtgctgcccctgctgcccctccggctatggaccctgcttttgcttcgattctcaagtctatcactcagcagcaggctcacctggcagccgagcaggcccggttatccgagaggatgctctga

SEQ ID NO: 33945 - DNA, 2337 bp, Zea mays
  Peptide Sequence Number=SeqID_75724
atggcaaaagctcaccacgagtgctacactggcattcagaagcttatcgctgacgctatcgttgagaagcgagctgccaaagagcgcaggaggaaggtgaagaacgaccctagagcaggagcaggagcaggaactagttcaattgcaccggaggaccaatctagaggaggtgatggtgaagaaattatacggagtcccgttgcaattgaccctagagctggagcaggatcaggaactacttcaaatgtaccggaagaccaacctggaggaggtgatagtgaagaaatacagttagattgcagtggtggagatcttgatgacagcttagattttacgagaactccatcgtgtggtgatgacattgatctggaagagggaaatttgaatagaacacctcctgatttacgtgggtcaatccgaagtattgatgatatattgcaaatgatgtattccccagagcactttgcaagcattgatggcgagtcccctcccaatagccagccgactcgtgcaccacgaattgctgttcgcaagaggaaggcttcctcaaacccccctggcaatgatcaacggcctgtgggaccacctgagacagaagaggagcctctgagcagggacactgggatgcagcatcctactgcccaggatcatataacttactcaaggaggagcgataggtccattcaagttgccaacacacagaaggcagaggctgagaagaagaaggctgagattgagatgaagaatgctaaagctgaggaggctgagaagagaaaggctgaagccgaacaagctgataagaagaaggcagaagaagctgagaataagagaaaggctgaggccgaagtagctgagatcaagagaaaggctgcagctgaagaagctgagaagaagaaggaagtagaagctgagaataagagaaaggctgaggccgaagtagctgagatcaagagaaaggctgcagctgaagaagctgagaagaagaaggaagaagaagctgaggataagagaaaggctgaggccgaagaagctgagattaagagaaaggctgaggccgaagaagctgagattaagagaaaggctgaggctgaagaagctgagattaagagaatggctgcagctgaagaagttgtgaagaagaaggctgatgccgagaagaaggttgatgcggacgagaaaaggatacaggttgcaatccagaaacagctaaaggacaacatcaaagctttgaaaaagccggtgcccgctgccaagttaaagaagatgttccagttacaaatgtcaaaagaatatgctgagcagcgccaacagtacgaggataggttgaacatgcttcgtcaggaggccaaagctgagattgatagtttggagaagagcattgatggccaggcaggacccagctcatcatttgatgatatccagttcccggcggagtctgatgatgatatcaacaatttgacccaaccaatccgactttctcaagacgaagtctcagtaggccaggctgatttcagtgagtttcaaaggatgatattcaagcgcctaggtgatagagtgctgaagaagcctagggagtacatatccccgttcaagatccctcgtaatcgacctgagatacccctggccaaggctgttgcacttaggcggaagatcgcatctgatcctgagctgaaaaggagaattttgttggagtttggccttcttgttggactaactggcgaggaaattttaacatatttttctaatgacacccttggtgagtcaggaatcatagactttttcgtgcactgcatgcgacatgatgatattgtgcacaaggttgattcttgtggatacagagcgtttctgaccactggtttttatgtttttgtccctatcaaagatggtgctcactattttgtatattgcttcaattttatccataagcgtattgatgtgctggactcgaacgactacttcctgaattgttctaatcaggaagaacggcacaaggctgtctttgccaaaatcccaatcattgatgcagccttccagaaagtttccaacctcaagttacccagagttagcaagtggaggcggtcttttattgatgtgccaaagcaagcaggtcaaagcgattgtcttttttttgtatggaagtacatggaatattatgatggggacaaaatgaccaaggaaatcaatccgttcaagggcctgatatacagatgtgagctgttgcattacgagatcttccaccctttgaaccaagctgaaattcctggttcgcttgataagtttagaattggtggtcgtccgttgccaattgaatgggatagtagtcagtcgaacaattag

SEQ ID NO: 33946 - DNA, 1693 bp, Zea mays
  Peptide Sequence Number=SeqID_75725
atggataaagatcagaatgtatcaggccagcaaggcgctcatgctgtccgtcgttctccccgtgttgaaaacaaaagaaagcaattagataaaaatgaattaaaggaaaggaagaagagattaaggttgaaagtccctcctatacaagatgccgaaagtgatgatgaaaaagacacagagtttgttcctggtggcgatgggtctggtgatgacaatgttggtattgttggtggagatgaaaataagggtataactaagacacgagctattcgatgctcacctggaaagtttataaagcttgtgaattctctatctgatgaattgaaaagtgaagtggttgctaaggggtttggcggcctgcttaggttcaagccacatttattgtcgagaaagttgcttagctggctgatgcggaagctcaacccagaaacaatgaaattagagattggtggtgggaaagagattcaaatcaccgaacacagtgtttggtgtgttttggagttaccaaacgttggcagtgatccgcccaccatgtccgatgcagatgctcgtgccctgcgggacgagctgggggtgcaaatttgtgggaaatcttatagacgcatatctggcatcaatatatctgttatcactgatagattgcagaagaggactctcaatggtgagctgggcctgagagcctttttcatggcagcatttcagtgtcttctattctccaatactgacactcggatcagaattgatgatgtgaagtacactcaggacatccagaatattggcaacaagaactggtgcaaagctttagtagacaggctgagcatagctgctcggctttatagaaaggattttgctgagaaaggcattaacgcaccaatcagtggatgcggaatctttgtagctatgttttatgttgacaacctgcaacatggattagacacaagtcctttttcaatccctcgatgtgctttcttggactccaagatgattgatgctatagcaaatatggatctcaggggtgatgttcctcctgggaccactgagtttggacacctcaggttgagaagtatcagtgacacgtgctccggcgtccccataggtgctctagcaatattacatgctccagtaccagcacctgccccagtagcagtccctaatccaacagcagcacctaacccagtagcagcagcatctgtcccagtagcaacagcagcacctactgggacatctgctgatgtgcttggcacatcccatgatcccgttggtcatgcttccttcaatatccaacccccagtcttttaccagtaccctagctttagatcttcttttggtcagagtattactgatttagttggaaggagtaggaagtcagatgcgctgaacatcttgaaggcgtttgatgaaagcactagtgaagcccagtcgtacgcacagaaggctgtgaagtattcaacaatatcccgcgaccttatggcaaaagctcaccacgagtgctacactggcattcagaagcttatcgctgacgctatcgttgagaagcgagctgccaaagagcgcaggaggaaggtgaagaacgaccctagagcaggagcaggagcaggaactagttcaattgcaccggaggaccaatctagaggaggtgatggtgaagaaattatacggagtcccgttgcaattgaccctagagctggagcag

SEQ ID NO: 33947 - DNA, 474 bp, Zea mays
  Peptide Sequence Number=SeqID_75726
atgtatgagatgcacccggctttgttccttaaaaccgggtgttacatgcatcctcagcgggacgcgaataacctagctggactactagctattgctgaggagaccttggcagagttcctgtcgaaagcaacaggaactgttgtcgattgggtgcaaatggttgggatgaagcctggtccggattccattggaatcatcgttgtttcgcacaattgcagtggcgtagtagcccaagcagatcaaggtctggttccagaaccgcagattattccggacaggagaagctttttggaaaaacagactaagcgcggaccgttcgggcccttgcggcggaccgtccgcgacaccaggatgaccctcggacagaaccaatgcaaaaacccaagtctacactacggaccgtccggagggcaagcaagcaccgtccgagaccacgcgcggaccgtctggcctcaggcgcggaccgtccgatag

SEQ ID NO: 33948 - DNA, 717 bp, Zea mays
  Peptide Sequence Number=SeqID_75727
atgagccgtggttctgccctcaccggccacaaggtggaggagctggcggccataggaccctccctgggcgcggaccacgtcaacaccagtgccggtgaagaggacgtggagaatgacctgtcaacccaatatcatccaacctgtcgcgtcgtcgtcctcgctagatctccgctcgctcgtccgtcactcaactttgattcatcttccttccatctgcttctcttcctctcaaaatctcctctgaaattagttttgtcggtgctcctaaataggttcctggatctgaacaagcctggcacaaaaattaggaaaataacaaagcacggtgggttctgctggttgatggtcattggtgaccatatgcttcttctactagctattgctgaggagaccttggcagagtttctgtcgaaagcaacaggaactgctgtcgattgggtgcaaatggttgggatgaagcttggtccggattccattggaatcatcgctgtttcgtacaattgcagtggcgtagcagcccaagcagatcaaggtctggttccagaaccgcaggttgttgcccatttcggagcatcatggtgtgtgatgtccctgtccatgaactacaagtttgaggagctggcgcagacccaccccgaggtcttgttcctctacgtggacgtcgacgatgtccaggtctcatgtcttggtttttcttatgtcctttcggattcttag

SEQ ID NO: 33949 - DNA, 381 bp, Zea mays
  Peptide Sequence Number=SeqID_75728
atggcacgatacctgatgaccggaggttttcctatcctcctcaatattttgaaagaagaccgtgaggatgtagagcttgtgagaggtgccctggagacctttgtgagtgcattgactcctattgagacgtcacaagggccaaatactgaggttcaaccagcgttacaagaagcaattctattgattcctcgtggtataacagttctcatggacatgcttatggaccgtgaggtcataaggaatgaagcactgttacttcttacttatttgactcgggatgcagaggaaattcaaaaaattgttgtatttgagggtgtgtttgagaagatatttagcattattagagaggagggctattccgatggaggtgtagttgttcag

SEQ ID NO: 33950 - DNA, 762 bp, Zea mays
  Peptide Sequence Number=SeqID_75729
atggcacgatatatgaagactggaggttttcctatcctcctcaatattttgaaagaagaccgtgaggatgtagagcttgtgagaggtgccctggagacctttatgagtgcattgactcctattgagacgtcacaagggccaaatactcagcttcagtcagccgaatcctgcaacaaggatgtctccatcgtccacgtcgacatgcacaactatagccttgatgagaagatcaggatgacgcttgaggcgcacattgtcgagaagaccgacgaggaggcaactaatcaacaatgttcaggatgcagggccacaccacacatatggactgcttcagtttgtgtgtcaaatttgttttccacaaagaaattatttaaacaaaaagatcgcatcacagagaaggatgtgacagtgatgaggctttcaggtggtgggcatagctgctttcgggatagtgataaggcaagattaagattcaaacggaagttctgggagaaggttgtggagatagatgatctatgtggaaaggatggtgcatggtggggtattaaaggttacatgcgagacaatttcaaccatagcaataaggtcacctcacaaaaagagcattttcagaacagtaggctcgtgaaatttgtgttggatatgtattgggagcttcgtcctgttactggttcatccttaacacaccaaacaaggtatgacccaacatgtgcagttgacccatcattgaagatggtcactacaccttgtttcgaagcctag

SEQ ID NO: 33951 - DNA, 582 bp, Zea mays
  Peptide Sequence Number=SeqID_75730
atgggctcttcttctaaacagcaggagataaatgctccccttgacaaagatgaggtagacaaggctcctgaaaaagaggaagaaattaacaaggcaggggaaaaagatgaaaactggatttcgatgatagtgaggaagatctccttagttcccaagaacttgagtcttggaagtagtaaagaagaaattaaatcaaatcttaaatctatcaaagaaatggagaaagataggcaaattaataagatcctagaacttgagtctagaatgaaaagagttgatcaggatagtgataaactgttagataatgattgtgaagaaaggatcgaggagatgattcaaagtttgttagaaagtgggactgagaaagaagatgaggggccattggacaaagaaaaaaagatcaaagaagagaaaaattatactctaaggaaaaaagaaaaaaattccaccaatattaggtgtaaacttaataaaggaaccaccttggcacagaagcaacagaaatctgctacttcctcacctaaaaacaacgaagggataaaccctgagtatggaattactcagcaagtcttacccgactaa

SEQ ID NO: 33952 - DNA, 252 bp, Zea mays
  Peptide Sequence Number=SeqID_75731
atggccatgatgggtccaacatcgaaaaagatgtacctctgtcaggtaccaaactttgggtttgaaatgattaagctgagaccgggatccactttagtaagcatttctgcaaaaacagagtctttgaatattgaaaagccttaccttgactcccatataaccagcatacccttgagagtctttttctttagtcgggtaagacttgctgagtattccatactcagggtttatcccttcgttgtttttaggtga

SEQ ID NO: 33953 - DNA, 348 bp, Zea mays
  Peptide Sequence Number=SeqID_75732
atgtgctcgacgtggtaccgtcgaggacctagtgtcgtgaagaaacaaaagtccaggggcctttgcgcaactgttagtgagatagaacacgaggaagaaaccgtggtagaagaagaggttgtctcccaagctgaaaatcctctagcagagaacaacttttacttcaacatctgcgaagtggaccctgaacctcctacaacacaagggcaagccccgcaaaaggtgatgcttcacactggatgggaattttacaaaggaaagaattatgatggtggatccatcatggccatgatgggttcaacatctaaaaagaagtacctctgtcaagtaccaaactttgggttataa

SEQ ID NO: 33954 - DNA, 606 bp, Zea mays
  Peptide Sequence Number=SeqID_75733
atgcataaggggagcgcgaagacatggttgcctttcaagggggtcaccctccttttaaaggcaactctccccacttaccagcgggtgaaagggcagaccgccaagcaggcggcatgcaaccgcaccaagtgggcgcaccctttcaactccaacgcgtccagcatggatgcccaggcccacacgtcatgcgggcggaagcagcggtcacgtcgtcagccaagctcacgtcccctcctgggacagcgagagaaccctctcccacagcgtgaaggcggcgcgcccgtgttccgttcctcgaacggctcgcgcacgcgcaacggctgccccgcgaaccactcgtcccgtcgcattaacttcgcggcgggacaggcggcacctttggcaggagaagcgggcgacgcttcacctccgacgatttcgtatccttttcctcttcctctttctctctcttacaacagggaccgggaaaggggataccccgaaagggatccttatccgcgaaggaaacgggccccgagccccctactgatcagaggttcgaaggctggcccctcggaggggttcaacagctacctcaggccactcgggctccgcgcccactactga

SEQ ID NO: 33955 - DNA, 306 bp, Zea mays
  Peptide Sequence Number=SeqID_75734
atggcatcgccggtcagggcggagctcgcaagcggccagggtgcgcgtgggggcttcgacggggctcgccgggcagaggctgcgcgggtggagcggcggtcgccggagcagggcctgccgggcgaggctgcgctggtggagcggcggttgccggagcagggcctgtcgggcgaggtcatggaattaccactagacgcgcagagcagcggaagacgtctcgatgtagacgaacgcgtcgagcagtgccgtgcagtcgccggcgtccttcacgtcctcgcgcggttcgtccaagtgctccagatgtag

SEQ ID NO: 33956 - DNA, 369 bp, Zea mays
  Peptide Sequence Number=SeqID_75735
atgggatttggtgtgaggggagaggaaacagttcctctttcttctccccctggaatcacgttctcacgcatggtggcagatccagatgccgctcgtcctcaccattggagcacaccgcagggaggaggagaaatggcatcgccggtcagggcggagctcgcaagcggccagggtgcgcgtgggggcttcgacggggctcgccgggcagaggctgcgctggtggagcggcggtcgctggagcagggcctgccgggcgaggctgcgctggtggagcggcggtcgccggagcagggcctgtcgggcgaggtggcgcgacggctgcgttcggcaatggccggcagatgcatgaacgatgctggcgcggcgtga

SEQ ID NO: 33957 - DNA, 261 bp, Zea mays
  Peptide Sequence Number=SeqID_75736
atggcgcgactggggttagcttcaggtggccagggtgattctctcagccgcaacgaaccccggagactaggagcgaacgaggtggggagggccttataccccgcggctagacctaatcttctcctggtgccgcggatccgaccaagaatcacggcagccatacctgcggagtccgtgctttgcggcatggtgaagacgacgtaccggccgcgataccccacccagcgcttggtggagctggtggtggtggtgaagatataa

SEQ ID NO: 33958 - DNA, 924 bp, Zea mays
  Peptide Sequence Number=SeqID_75737
atgccgcaaagcacggactccgcaggtatggctgccgtgattcttggtcggatccgcggcaccaggagaagattaggtctagccgcggggtataaggccctccccacctcgttcgctcctagtctccggggttcgttgcggctgagagaatcaccctggccacctgaagctaaccccagtcgcgccatcgactgtgcgtctaccgtcgacctgccctcacacctccgttcggtgccggttggatggcacgggataaccaccacgaggcgggggcaccgtgttcttcctcagctcgcgcggatttggcccacggtgggcacaattccttaccaaagtcgaggttctgccattgatttgggtgcggccgcctccatcgttgagagattatgtgcctccatctcggaagacggcgaactctgctccgcccgacccagggctcggacttgggctcagccccagaagacgacgaactccgcttcgcccgacccccggggctcagactccgccctggcctcagccgtcggtctccgcctcgcccgacccaggggctcggactcgacctcggccatggaagacagactcgacctcggcttcggaggagcttacacatcacccaacctagggcgcagaccagccacgtcaacaagaggcgccatcatcaccctaccccgagctgactcgggccacgggaacaagaccggcgtcccatctggctcgctccgccagataggcaataatggcgccccgcatactctgcgacgacggcggctctcggcccccttacggaagcaagaggacgtcagcaaggactcaacagctccgacagctgtccctccgccaggctccggcactcctccgacggccacaacatcacaccagctgggtgccaaaatctctccggctgccacaacggcatgtacttag

SEQ ID NO: 33959 - DNA, 375 bp, Zea mays
  Peptide Sequence Number=SeqID_75738
atgggtagaagaccattcatttttggcagaagtgcggaggagcattattgggatgatggatatttcggctatgtgaagcagaaggatgacagtgggatgccgtggaacctacgtggcacgtacctcggcgccaagatctatggcgcctacctcggcgccatagttcttggcgccgagatcttatcgaaatttaggaagggtcctttgaccggaactgccttcgacccgctgcatttgccaactggtgttccagtgcctatgtgtttttgtggtgatccttgtaaggttgataagtctgaggatcatgacacctatcgacagagactcctccaccgctatgtgattttaagtagtggattgaaagtgggatgctga

SEQ ID NO: 33960 - DNA, 507 bp, Zea mays
  Peptide Sequence Number=SeqID_75739
atgaggctccaggaaataggggcaatggtgcttccaatgtggacccaaaggatgtctagacgtggtaaatctgctaaacaaaggaagggtcctttgaccggaactgccttcgacccgctgcctttgccaactggtgttccagtgcctatgtgtttttgtggtgatccttgtaaggttgataagtctgaggatcatgacacctatcgacagagactcctccacccgctatatgattttaagcagtggattgacacagaaatatcacagaaatacaagaagtggttggagaatcttaaaaagtgggatgcggaggacaaagagaggatggagaaaagacaagaggagcttgctgccgagcaacaacgtgaagacgagcaggaaatgaggcgtgttgctgaatgcagggaagagaaggagaagaagcttgagcatgcacgtcgtgcaaaggaagcaatggagaaccctgatgcatttcgcaagggtaaatggccccgttgcactcagtag

SEQ ID NO: 33961 - DNA, 492 bp, Zea mays
  Peptide Sequence Number=SeqID_75740
atggttgtcgccaacgtcgacgacgccatcacgccgtccagctcatcgtccaccttaagcccaacctgccaccccaaccaagagtcatcagtactcgtcatgtcgtgcgcattcgacgactactatatcgagaattgtggcatcatcttggcgccagaggcaacacagaggaggatcgacaacagtgaccagttcgtcatcctcgccacccacgaggcgctcgcgttggcgtcgctcatcgacgacgagaagaagcttgtcgactgccagttcgacctctggaagcagtcctacgtggccgcatgcgccgctatgtacggaaagctccggcgcagccgccgcttggacgcggtccaaagcggctgcaccacgctgtccatcgtcaaacagggggacctcatggtcgttgccaatgccgacgactctcgggttgttttgggcatcgcaaccgacgacggcgccatcacgccgtccagctcatcatccacttga

SEQ ID NO: 33962 - DNA, 228 bp, Zea mays
  Peptide Sequence Number=SeqID_75741
atggcgacgactctcgggttgttctgggcaccacaaccgacgacggcgccatcacgccgttcagctcatcatccacctgaagcccaacctgccatccaagagtcatcggtactcaccatgtcgcgcatgttcgacgactactatatcaaggattgtggcgtcatctcggcgctggaggtgacgcagaggaggaccgacaacaatgaccactcgccatcgtcgaggtag

SEQ ID NO: 33963 - DNA, 855 bp, Zea mays
  Peptide Sequence Number=SeqID_75742
atggcccccggtgaggccgtggagctaggagggtggcgcaaccactctcgggccgcggacagtgcccctggcgctgccctagacgccctggacgcgagcacaggtcgcgggcgccgggcggccgggcgtgcaatcagcactcagcagtcgtgcaccgtgctctgggatgtggacgcgggcgtcggccggccaagcacaggtcgcgccgtcgcgggcagccgggcgcttgatgcggcggtagcggctgctgggatgtggacgacgacgacagctaggttagacggcagtcggcagcgaccagcgggcagcggctgctgggagcctgagcctgggatgtggacggctggagacgtgctggacgcgccgtgcgctgctgctggcctggcaggcctgctggatggagaatttgagatggagggagcaaccgcaggccacagcccaccagacctaaatcacctaatgggccttctatttaattcgggtaccgggttcgggcttatcgggttcgggttcgggtttttcgggttcgggattcggaatctcgagaccccgtcgttagtggcccggaccccacacagaggggtccgagacccataccaggggtccggttcgtacccgtggaggttctggaccttacccgaaggtccggtccgtatatacgggggtccgacactttccatggggtccggacctactgttgataccttggaggatatcgtcttctccggtcacgtggcggccctggagctgtccacgtggtgggatcgggtgttgttcaccacgcgactagagatagccgcgtggacaccgcgtcttcatgctgtagtaaggggtacccctgtttcagggtactga

SEQ ID NO: 33964 - DNA, 177 bp, Zea mays
  Peptide Sequence Number=SeqID_75743
atggccacgtcagcgctcggcgccatagcctacgtcgtcgagctgtgttatgtcggcgccatagcctatggcaccgacctagaggaatcatgtttgaatttgaattctgtcggtaccctgaaacaggggtacccctactacagcatgaagacgcggtgtccacgcggctatctctag

SEQ ID NO: 33965 - DNA, 330 bp, Zea mays
  Peptide Sequence Number=SeqID_75744
atggtcctctacacctacaactacgacggggactacaaggacaaggacggtgtcaagggcctgtgcgtcgtgggcgccatcaacaactatacctcccaactccccacctacgagagatcttctcccccagaatgtaatgttgctacccagctactcccacttcacgtgggatttacctccgacaaaggagggaacaccgtcgacttccactggtacgcaaggaagactgttctacaccatgtttgggacgccagcatcatccagccaactgaagacgacttctacggagatagagtagccggttacatcgacaccctaaagaaaacataa

SEQ ID NO: 33966 - DNA, 528 bp, Zea mays
  Peptide Sequence Number=SeqID_75745
atgcccggattcgcgccctactcgcgcagatccgaccgcgtctctgatttcccaaccgacgtaggagcggtgggtctgaccgggcgcgacccgtcttcttatgggcgcttgctggtgtggtttgctgatcaaaatggggatggtggcgggctcacacaaccgcaacgagttcgtcatgatccgccacgacggcgatgcgccgggcctgcgatgcttccgttgcgccgtgctaagcccacaaagagtgcgaatgggcaggtctgccagatttgtggtgactctgtaggtgtttcagccactggtgatgtctttattgcctgcaatgagtgtgccttccctgtttgccgcccatgctatgagtatgagcgcaaggaggggaacttatgctgcccccagtgcaagactagatacaagagacataaagggcactacaaggacaaggatggtgtcaagggcctgtgcgtcgtgggcgccatcaacaactgtacctcccagctccccacctatgggagatcttctcccccataa

SEQ ID NO: 33967 - DNA, 1212 bp, Zea mays
  Peptide Sequence Number=SeqID_75746
atgacttcaccggaagcccgagatcgacttcaccggacttcggtcgcccgcctgcgcgcgtggaccaagctctccggaaaaatcagaaaggtatttgaaagtcatgaacaaacatcatacaccgacggagagtacgtgctcatccccgagcaaggatctgtccaagaagaggaccaggagcaagcttccgaggatactgttgaggatctccccgcagccccagcaattgaaggcaagccccgctatggtgggtacaagtgcggtcactgcacggcggcagctggggtcagtggagcattgtatgccaaggcggtaccattcaagaaatggttgatgatgaattcacccacccccgccagtggaggagacactcgtttcagttccgacttcctttctcgcgatggctttccttccatcttgtgggaagtgcttaacttcgccggttaccctacgccccctttgtacacggtgcagttgtatgaggagcatcgggtacctcgttgtcgggtctggctgactttggaggctcatccccttcagccgggttggcgttctcttgattccgagacaattggactcaggacggacgacaccgttgaagcagcagccatgaagactctgacgactttctgtggctaccatcccctggagatggtgatgcaccccttggaactcttccctgctgagaagaaggatgatcccatgtggtgtaactacgtgagccatgtgaaggatgtgtgggcaatgtatcctgacttggttgggagggtcaccgttcagtgcatgagtgcgctgtaccgccttcaggcccttcagagcgatgctatggcactccttgctaacaccgctcaaactgccaagctcactctcgacagtcgagaagattttgtggtcgatctatccaccgagttggtagagaaggatctgcaggtggagaggctgagccagcgcatcaccaccttggagcagcaggtggagatccgagacaacactattgatgtcttggagaaccagcttcacaatgtgcagagggaactcgaggaagcgaatgaccacttggacatgcaccacctggagatggaggccaatgaagccggaagcgagggagaagaggctcccgaggagctaggaccagcccctggtgcccatgggactacctccgcgatgcctccttcacccgtatccagtgtcgcttccatcgctcagggttag

SEQ ID NO: 33968 - DNA, 330 bp, Zea mays
  Peptide Sequence Number=SeqID_75747
atggctcaccggagagcttggtccacgcgcgcaggcgggcgaccgaagtccggtgaagtcgatcccgggcttccggtgaagtcctgccgggtccgagagcttggaaagcttcacgggccactggcggagctagccgaagcactggctcgacttaggggtggctggagcgggctggccacggtggccgaagctctggcggtagtggcgggcggaaaagagctcgccggagctaaggaggggtggctggccggtgatgagatatggagcccggaaatccggtctgtctccctgctcaaacccgaggcaaatccagggttttgtcgtgtctag

SEQ ID NO: 33969 - DNA, 174 bp, Zea mays
  Peptide Sequence Number=SeqID_75748
atggcgggcgaaaaagagctcgccggagctaaggaggggtggctggccggtgatgagatatggagccggaaacccggtctgtctccctgctcaaacccgaggcaaatccagggttttgtcgtgtctagggctcgcgtcccaatgccatcttctggcacacgacagaggggttag

SEQ ID NO: 33970 - DNA, 1104 bp, Zea mays
  Peptide Sequence Number=SeqID_75749
atgcggaagacgatccaagtcgaccccaagcgtgggctaatccgcaagatgaagctgatggaccaacctgaagatgccgccctcgccggatttttctcagccgagctcgtcttctacgcgccgtccctgggagtcttcaaatatcagcgctcggcctcaattccattcaatggagcacaccgcaatcttcccagccgctccagatcgtgcccctcttcttcaacctcgccgggctgcatcttcctcatgaccctgctccactgtgtccctcccaggcgttcggcagctcggtcgcttgctcctctccgccgctcgccggttccctttccccaagctcgtgttcctctgctcctcttcccctaccgcgcagctccctggctcgcggagttcccctgcgcgctgtggtcttccccgctccaagctcccatggcgcccagctcgcccagctccgatgatgcccaactcccagctttccccctcagttcgctcttccctggccacgcgagctcagagccctccctgctcccgatctccatagccgcgcccctcaagctcggcagggagctttcttcctccctcgtccgcggctctctcctggcgcctggggccgcgcgagcagccctccgctcggctctgctcctccctgctcgcgtcaaccagctcggaccgagcgctctgacgttcgcttgccgtagtgcttcttccccagcgcgtcctctgccgcccgccaaggtggtggcgcccatctccctggccctggctcggatcccgctcggcgccctgactcctgctccccgcgccgcatcgtccctgcccatttccctcctcggcaaactcccctgcgagctccagctcggtttcttctcccttgccgctcggttcttgcgtctttcccctgtgcgctcgacctccggctccggcgtcgagctctgctttggtgtattgggaggttcaagtggcgctgatgggttctctgctgtcacacctggtggtggtaccttgctgctaggaggtagcgacagctttggcaacagtaacgttggtgctcgccaagcgctcaacaaacgacctgaaaccaaagttcgtcgtcatcgttctcgctga

SEQ ID NO: 33971 - DNA, 276 bp, Zea mays
  Peptide Sequence Number=SeqID_75750
atgcgtgtcacttgtgttgagctccaaagcccctgtcgagctcttcccctgaaagccgccttcgagcacaatccctgtcatgtgttcgatgggaagtctgaaccaatgctcatcgtcgatctacgattatcaaatcattctggtcatggtacgttaattaatcacgtgatacggaagacgatccaagtcgaccccaagcgcgggataatccgcaggataaagctgatggaccaacctgaagatggacaatggagcgagtatcagaataaaggctga

SEQ ID NO: 33972 - DNA, 585 bp, Zea mays
  Peptide Sequence Number=SeqID_75751
atggtggtggaaggatgccaatccccattaggttgcacccctccaacggcagcaggaagaagacaggatcagcgacaccaccacgagcgcacgttctccgacggtgaagtcgccggaagagacgaccttgacgcggatccctctagagaacacaggcgcaccccatctggaggcccggaaggcgaaagggcacggtggtcgcaagaggagcgaggcatgtctactgccctggggatcgacccctttttaaaggcagatcccccactcgcgcccctgaagtgtcacagaaccagtgcagcgactcgaggcagccccgcgcatggcccaacagtgccgttaagaacgacggtcacgggtcagtcagccgtgggaataggcacggcagctggcatgatcattggcgggccgacagtaattgcaacaacgggcacacgaaagcagcggtccaaccaccaatcagactctggtcccacctacaagctcgcatcctcccctgatgcaggaccggggccactatcggtacccagaatcagaggtaccctctcctacagcatgaagacaccgcacccatgcgacgtcccttag

SEQ ID NO: 33973 - DNA, 489 bp, Zea mays
  Peptide Sequence Number=SeqID_75752
atggcccctaccatcggtgtcgaagcggaggcggctcgagaagtccccgtcaccgacgggatcaccaccaccatccgcgcttcgggcctccggttcttcgtacttgtcctcgcccctcgagcgtcggtgggggcgagggcaaactcgcctgttgattatctgaaccgcttcaccaagcatgagtcgccctgtgtcaaggtgatgagtgagcacgaacagaggcggagttggcttgaaaatgaaaacctggttggccggagcctaaccgggttgtccgtcagcggggccgatgccggagtcgatcagccgaggcctcggatcgggctggcgcccttggaagatggttggccgaggccccagggaagtccctggaccgcgtcaccgtccgaggctgggtcggacctcgctgaaggtgtcgtcgatgccgagggtgctacagcccccttccagcgtgaagacccgagcctgcaggatcagattgtcttgtag

SEQ ID NO: 33974 - DNA, 720 bp, Zea mays
  Peptide Sequence Number=SeqID_75753
atggcagattctggaacttccttgcttgctggccccacagccataattactgaaatcaatgaaaagattggtgttgctggtgtagtcagccaggagtgcaagactgttgtttctcaatatggacaacagatcctagatcttttgctagctgagctctgcggtaactcaacttgctattgggttattttgcagacacaaccagcgaagatctgttctcaggttggtctgtgcacttttgatggcactcatggtgtcagtgctggaattcggagcgtagtggatgatgaagctgggaaatcaaatggtggtctcaagagtgatccaatgtgcaatgcctgtgagatggctgtgctttgcgagcgtcttccgagtccgatgggagaatcagccgtggactgtggcagtcttgcgtccatgcctgacattgcgttcaccattggaggcaagaagttcaagctgaaaccagagcagtacattctgaaggttggtgaaggacaggctgcccagtgcatcagcggattcaaagctatggatatcccaccaccccgtggccctctctggtattttcggattcagaattatggatatgaagcacgaccaggacgaaggctgagccagacgaaggtcgggggcagccgaagctgtacgcagggaagcttcggcgcgatggcacaagggggaaccgaccttaagatgaaaagacttcggggtcctcaatag

SEQ ID NO: 33975 - DNA, 873 bp, Zea mays
  Peptide Sequence Number=SeqID_75754
atggtgaaacaaggtctcatcagcgaccctgttttctctttctggtttaaccgacatgctgatgaaggagaaggtggtgaaattgtatttggtggaatggattctagccactacaagggtgatcacacgtttgtcccagtcactcggaagggatactggcagttcaacatgggtgatgtactggttgatggaaagtccactgggttttgtgccggcggctgtgcagccatcgcagattctggaacttccttgcttgctggccccatagccataattactgaaatcaatgaaaagattggtgctgctggtgtagtcagccaggagtgcaagactgttgtttctcaatatggacagcagatcctagatcttttgctagctgagctctgcggtaactcaacttgctattgggttattttgcagacacaaccagcgaagatctgttctcaggttggtctgtgcacttttgatggcactcatggtgtcagtgctggaattcggagcgtagtggatgatgaagctgggaaatcaaatggtggtctcaagagtgatccaatgtgcaatgcctgtgagatggctgtgctttgcgagcgtcttccgagtccgatgggagaatcagccgtggactgtggcagtcttgcgtccatgcctgacattgcgttcaccattggaggcaagaagttcaagctgaaaccagagcagtacattctgaaggttggtgaaggacaggctgcccagtgcatcagcggattcacagctatggatatcccaccaccccgtggccctctctggatcttgggtgatgttttcatgggagtctaccacaccgtcttcgattatggcaagctgagggttggcttcgcagagtcggcctag

SEQ ID NO: 33976 - DNA, 2208 bp, Zea mays
  Peptide Sequence Number=SeqID_75755
atggttaaaaattttggcagcaaaacagtgcaaatagcagtaaatgctgtggtaacttcacacctactcgtctgtttatatagtgctgcagagagcgaggatagtaaggtcagtgttggtaatgctgcaaaacaatcacacgatgttgtgggagtaggcattgactgtattttcaatcatgtaaaagtgtcaactgaagccgatcttgggccacaaccggatgtgatacacctgacatctttggatgttccaaatgaatcaagtcaaataagttctgatgcggatatgtgcaccccagaagatgttcagcttattgaatacattaaaacattaccggggaaacaagttgtggtgaacatcgacagcgcatggttaaatagaaatgatatggaatgtctttttcatggtgacatgcaattgtctgacaaagccctcaatgcatatatacactgtattaggggtgaagagcatttacttcatagagaaggtggaaaggtcttcttggagaacacattcatttccagtctgcttaagcgtgatggcgaccctaaggtgttccttccaatgaatatagaagattttcactggtacctggcagttctgaatgcaaaaaaaagtgagttaaaaggtctagaaagacagattaaacttgcagcaaaacataaagagctttaccaaggcaagtggtcgaaccttgatgttgcatcatggccagttatagagaagatcacaacacaaatgcaaaccgatggggtatcttgcgggctatggatgataaactatatggaatactggacaggatcctccctatctgataacgtaactcaggatgatataacaatgtttaggtttaagctacctgcaatattatgggactcgagattaaacacaaagaaaggacatcaaaatcttgaccacaatatggatgaagatggagagagttcaagtgatgttcaaataatcgatactccattaacatcaacaaacacgcaagaactgatgtttgtattatgcacatatatcatggggatagacaacgacaaatatttaaagaaacattggattcagagcactaaaccttatccaatttctttaagtcttcaaaaacttaaagatatattggatgtaaataagccgatggataccgattgttttaacatggttgttcggatgatcgcatgcaatgatgtcttgttcttgttggaagacaaattccactacatggatctacagttttgttccataactaaatttggtcgagaccctcgccttcgtgcaaagccagatatcaacatgttggcaaaattattagaatgttggcctgacatggagtacgatgtttcagattgcaaacaaattctattgcccttttctttcatgggtcacttcaccttatatgtacttaacatggacactagaagcatctatataatggactcaatgcctataccatcatggtttaagggtgatcatcctagcatgcattatatccataatatacattatattgccaacaatatgaatgctgccatggaattggccaatcctacatggaaagacgatatttatatgtggcgtcgtttagtaccaacatgggttccaagaatattaaactgggatttatctggctttcttgttatcaactttatgcacgattggaatggtataaggttaccctgcatttgcactcactgtagtctgtcaccactgccagcatatgagcctgcatttgattgggagaatgagaggtctttgatatttggccaaagggtgccagaaagtataccagcaataagcaacagtggcttgaagataactgtcaagagtgtttgcgtgaaaatgattgctgccggtgccgaacatactgctgcagtaactgaagacggtgacctctacggatggggttggggtcgatatggaaacttaggtcttggtgaccgtaatgacggtttgcttcctgaaaaagtatcttctgtggaggaggaaggcaagatcatgaatactactcaatgcttcagcgaccctgttttctctttctggtttaaccgacatgctgatgaaggagaaggtggtgaaattgtatttggtggaatggattctagccactacaagggtgatcacacgtttgtcccagtcactcggaagggatactggcagttcaacatgggtgatgtactggttgatggaaagtccactggtactgtgtaa

SEQ ID NO: 33977 - DNA, 402 bp, Zea mays
  Peptide Sequence Number=SeqID_75756
atgggaaaaagtaagaaaggtagtggttcttctcctcgctctggtgacaagcgcaaacgtgagccgactcctccttcggaggacttcggcgactcggagtactcggaggaggagttctcctccgagtctgagggatatccggctcccgtctctcccccggcgtcgtctgatgattcagacgactcccaggggattgccgcggaggtctggacctacatccgggccgctgagcgctccgggctcgagggctcggatgagtcggagtactcctcggacgaggaggactcctcggactcgtccgaggaggacagcgacaacgatggtggtgatggcggcggcgacagtggcagcaatggcggccatggcagcggcaacaagggcagcaacaaggccagtggctag

SEQ ID NO: 33978 - DNA, 417 bp, Zea mays
  Peptide Sequence Number=SeqID_75757
atgggcaagagcaagaagggtggtagttcttcgcatcactccgacgacaaacggaagcgtgagccgactcctccctcggaggacttcggcgactcggagtactcggaggaggagttctcctccgagtccgagggctcaccggggttcgccgctgagcgcaccgggctcgagggctcggatgagttggagtactcctcgaacgaggagaactcctcggactcgttcgaggagggcgtcggcggtgatggcagtgatggcgacgacgacggaggcgatggtgacggcggcgaaggcgacggcaacggcggtgacggtggcggcaaaggtggcagcggcgacggcggcaatggcagcaagggcagcaacaggggcagcaacaagggcagcagcaagggcagcaacagggccagtggctag

SEQ ID NO: 33979 - DNA, 978 bp, Zea mays
  Peptide Sequence Number=SeqID_75758
atgcgtggcccccgggggaaggatgtcttcgcccgagctccgggagtcttcggcacggatgctggagggtcgggcgaggggcaactggttgttgtcccgcctgcgttggcaaccacggcgtcaaccgcggtgcaaggggtgaagggtggcgctttcaacgctggcggcgagatttcggcggccactgctgtcaaggacgaagcgggcaccatgtcccgccggctgagggaggcgtcgcagcagctgtcgcagcagctaagtcaagcggccgacttcgccgaccatgtggcgtcgggtgcccttactgcagatgtgtctaccgaagtcgagagacttcgggcgcagcacgcggacgccgtccgggagaagtcggctgcggagagcaagagccgcaggctggaagagaaggtggccgccctggagggcgagaggacggacctccggcgccagctggtggaggaaaggagggaggccaaccagtccatcgccaaggcacaggcggcgcaggcggaggccaaattggcgcgggcggaggggagtctcgccagccaacgcgccgaggaatgggaggtgcggttcaacgctctgcacgcccgcatggagagggccgaggcctctacgtgctcggaagttgagcggacgcgcaatcagctcgtggactcataccgcgagctgggtgcgcggactgctgacttcgaggtgcccgaccgagaggcgggccttcgcttcctcgagtggctgcaagaggaattgctggcactcccgaccatcatggagggattcatgtcctttgcctccctcgttacctgcgaaggggccatgaatgcgctgtcccgcgaggggtgcaatcactatgagggcttcgaccggtccgatgaagactttgggcgcgaaatttttaaggtcgaagaccctgtggtgaaggattctgcgggggccctcttcgatcggatgtggggtcctcatggccgggagtag

SEQ ID NO: 33980 - DNA, 2193 bp, Zea mays
  Peptide Sequence Number=SeqID_75759
atgaagaacgtagaccgacctccatctaatccaaaacggattataattcagtctactcaagagtgctttagcgtcgacataccccgtgttctggcggaaactgttagacaaaaaacaaggcaggctgctgatgaggatgatgactttatgccattatcgaagaagcgtaacatggatgacagtcctccaaaagtcttgaagaagatagttacaaagcggaggaaagtagtggacccccccccccccgacagatgtaaatgtttacgctattcattgtatacattttttcagcagaggcttaatgtgagatgtaatccccaagacgtattagtaagcatccagatattaaatgacagacagcgccaagctattgcacggagggggttctccagtattcttgatatgagagttgatgcactcggcagtagatctcatttagcttggctgatggaaaaacttgaccataatgacatgacaattcgagccggcccaaggaaggagctcaaaattacaaaggatgcggtgcaccttattttggggttaccaaatgctggtggaggaacggcattgggcattgatgaagctattgctgccaacaatttaagggctgaacttggtttatcgaaagaagattttggggttgcagctcttcaagatcgtctgaggaaagggtctgatgatgatctaagcattagatccttcttcctgatactgttcaataggttgttgttccctactgccagctggggaataaccaaccatgagctgtattatttggatcatcttcatgactcagcgacacctcagaataaacgtggaacaccacgcatcaaatattttgataggaatattattcaagcactgacaagagctgacaagggcaagcacacaattcacattgaactcccgctcatcagggatttgatatcaagcaagctgaatcagcttctatcccgccaccgcctgggtttcatagagaagttgtcacattatgatacggagttaattgatgaggtcctccgtgctgagtcgggggacaatgaagatggttatgatgtgcagaaaacaactacaaaatcagatgatattcttccccagacggcagaaagttgccccgatgaagctgatattcatccactggttcaaacaaatgtaacgaaacagatcaaaacacctacaaccccagtgggtaaacatggtgacggtggcaagaacatgccgatcaacacaaacgtcactcctaaagcaacaccacatacgaaatcttctgcgccgatatttgatgcgacgccgcaaataaagtctactggcggcgtccaacaagcggcagaaacagatctccccgacagtggtccatgctttgatcagactccatctgaacatgttcctgtcgaaaccgatccagctacaaacactcctcaggttgaacaggtttcacttgattcggagatgcaaactatgttagctctacgcgaatatttgtgtggtacacaatctgacaccagcaggaccattttagattatggtgaatattcttcgacatgttctgatatatatgaatcttttgccgatgggaagtgtctcaacaatgtgttcatgcagtgcttcatccagtgcgttgatcatgatgccaaaaatcagcaaccctccatgagttcgaacagattaattcttgatgttaatgttgggtcactactcaactttgaggaacaggaacgacacagtcggaaccctcaaccttttgatgaatctgtactgcacacacttctagacaatgcattgcccgagacagatgaaatggataaatgcaaagcgatcatggttcccatggtaagcagggggcactggacattgtatgttgtaaatacagtgaagaagtgcattcacattttagattccaatccatatggggcaacacttggtggtaccacatggaaggactatcattttgccggattagacttagggggcagaaatataccatgggctaaggttattatgagtagattaaacaaagccatacaacatgtacggctcaggacatgctttcccaaatttggcaacttcacagttggcttgtgcccaaattgtcctaacatgctagcaggatccaatgattgtaggttttatgttatgggatacattctcttttatgactgcgtcgaaggatctctgcggtcagacatagaagca

SEQ ID NO: 33981 - DNA, 201 bp, Zea mays
  Peptide Sequence Number=SeqID_75760
atggcagcagtatccaatgactgtgggttttatgttatgggctacattctcttttatgaatgcgacgaaggatctctgcggtcagacatagaagaaggcaacactagtgagatacggtctcttgcgctgcattatatcacattccatccgaagaacaaagcattatcgctgcttcaagacatccaaagattcaaggtctaa

SEQ ID NO: 33982 - DNA, 344 bp, Zea mays
  Peptide Sequence Number=SeqID_75761
aatacgtcctcgtgccggagcaaggagctgctcaggaggtagccccagatccagcaccagagcctgcaccagaggacctgcctaccactgctttggaaggcaagtcccggatgaaaattggaataaggattaagattgccctcctcacgcgacctgagacgtggtctcccattccgggttatggtgggtacaagtgcggtcactgcacaacgacagtcggggtcagtgaggcattgtacgccaaggcggacatggttgctggagtgacttggccgtccatcttgccaccgggttggactgtcgagtgggaacctacctcggctgaggaggagcatgaggagtga

SEQ ID NO: 33983 - DNA, 387 bp, Zea mays
  Peptide Sequence Number=SeqID_75762
atggccgagccgtgctgggctgcgcgtgccacactggccagctgcgagatcgcgcagggctcaaacagccacgccgcgggccgagccaaccgttccctggccactgtgccgaggatcatgccatgtcggggccacgctccgcaccagctcagccgcgccagtcagccgtggagggctggccacgcctggccgctaggggggccaccgcgccgcgtgccgggggccgtgcccgcaccggctggccacgggccaccgcgcgctggcaggagttggaggttgccaaatgaacaggtgcaagaggaaagaatagcgagaaaagggaataactactctctaaggttgtcgaaggacaaggagaagaacaagatgtccaagataggggcatga

SEQ ID NO: 33984 - DNA, 408 bp, Zea mays
  Peptide Sequence Number=SeqID_75763
atgggccagggcgaggacagttgggaggagcgatgttcacggtccactgagataattcttgaggatcccttggactttaaatggtggtctttccttaccaaggggaaactactctctaaggttgtcgaaggacaaggagaagatcaagacatgcaagatagggacacgagcataataaaagatgaacctgaagtaaggattgtaaccggcaagggagaggatgcatccaaggtcaggataggtaaaacaccattctcaagtcgagatgggaaagatgataattcaaaaggcgtcaaagaagggggagcaattaatgatgaaatagatgaggcattatccccgaatagggatggaaatgaggaggcttcaaagggtaggttcaatgtaagcaggaaggcaagggaatag

SEQ ID NO: 33985 - DNA, 834 bp, Zea mays
  Peptide Sequence Number=SeqID_75764
atggcccacttggagctcccgattccgtggcacggctcaccgaagcagccgcgctgtcctacctatttaaagtttgagaataggtcgagggcgttgcgcccccgatgcctctattcattggctttacccgatagaactcgtgtgggctccagctatcctgagggaaacttcggagggaaccagctactagatgacgggtcggatggggagctcgcaggccgttgcggcgcagcgccccgaggggcgtgccagaggcgcgcggataccgtccgcgccgacgacggctgccgggggcgcctagggccccccgggctttggccgccggcgcgggcgacaacggtccacgccccgagccgatcggcggaccagcaggagccgttccgcatacgaccggggcgcgtcgccagcccccatccgcttccctcccggcaatttcaagcactctttgactctcttttcaaagtccttttcatctttccctcgcggtacttgttcgctatcagtctctcgcctgtatttagccttggacggagtttaccgcccgatttgggctgcattcccaaacaacccgactcgttgacggcgcctcgtggtgcgatagggtccgggccggacggggctctcaccctcccaggcgtccctttccagagaacttgggcccggtccgtcgctgaggacgcctctccagactacaattcgggcgacgaggccgcccgattctcaagctgggctgctcccggttcgctcgccgttactaggggaatcctccgggtagtcccgactgacctggtgtcgcggtccgagggcaagctcggtcgctcgatgggtccttag

SEQ ID NO: 33986 - DNA, 555 bp, Zea mays
  Peptide Sequence Number=SeqID_75765
atggcgatttggcatgcgcgcagcgagggagagggcgagagagagggccggttgaatcccgcgaaccatcgagtttttgaacgcaagttgcgcccgaagccttctggcggagggcacgtctgcctgggcgtcacgccaaaagacactcccaacacccccccacggggcgagggacgtggcgtctggccccccacgtcgcagggcgagggaagcggatgggggctggcgacgcgccccggccgtatgcggaacggctcctgctggtccgccgatcggctcggggcgtggaccgttgtcgcccgcgccggcggccaaagcccgggggccctaggcgcccccggcagccgtcgtcggcgcggacggtatccgcgcgcctctggcgcgcccctcggggcgctgcgctgcaacggcctgcgagctccccatccgacccgtcttgaaacatggaccaaggagtctgacatgcgtgcgagtcgacgggttcagaaacctgagatgcgcaaggaagctgacgagcgggaggccctcacgggccgcaccgctggccgaccctga

SEQ ID NO: 33987 - DNA, 510 bp, Zea mays
  Peptide Sequence Number=SeqID_75766
atgggggagaatcccgcgaaccatcgagtttttgaacgcaagttgcgcccgaagccttttggcggagggcacgtctgcctgggcgtcacgccaaaagacactcccaacacccccccgcggggcgagggacgtggcgtctggccccccgcgccgcagggcgagggaagtggatgggggctggcgacacgccccggccgtatgcggaacggctcctgctggtccaccgatcggctcggggcgtggaccgttgtcgcccgcgccggcggccaaagcccgggggccctaggcgcccccggcagccgtcgtcggcgcggacggtatccgcgcgcctctggcgcgcccctcggggcgctgcgccgcaacggcctgcgagctccccatccgacccgtcttgaaacacggaccaaggagtctgacatgcgtgcgagtcgacgggttcagaaacctgagatgcgcaaggaagctgacgagcgggaggccctcacgggccgcaccgctggccgaccctga

SEQ ID NO: 33988 - DNA, 330 bp, Zea mays
  Peptide Sequence Number=SeqID_75767
atggcccctgaagaaatcagcttgaattcgtctcctgctggtccgccgatcggctcggggcgtggacggggagcccgcgccggcggccaaagcccgggggccctaggcgcccccggcagccgtcgtcggcgcggacggtatccgcgcgcctctggcgcgcccctcggggcgctgcgccgcaacggcctgcgagctccccatccgacccgtcttgaaacacggaccaaggagtctgacatgcgtgcgagtcgacgggttcagaaacctgagatgcgcaaggaagctgacgagcgggaggccctcacgggccgcaccgctggccgaccctga

SEQ ID NO: 33989 - DNA, 843 bp, Zea mays
  Peptide Sequence Number=SeqID_75768
atggggggctcggagcccggttccttcgcggagaaggatccctttcgggcaactggcgcgccggttgctcgacgcgtgggcctgggttccaggctggcgtgtcaggagtcggagaagcgcgtccatctggcgcggttgcatgccgcctgcatggctgcccgccccttctgcccattggtctgggcgaaaatgggggtcgcctcgtcgggtcttcccgtcttccaagcccccggatggggggtatccgccgcctttccgcctcctcgttggaggaacgcaactccatgggagttggtacctctcagccatcgttcggcttcaaggattttcatcacgcagcccggtcgcaccccttcaccggcggtcacccgagatggcgacctccagcttgatggtgggggaaagcgagccgggctgcggcctctgccccttcctcagcctcaaggattttcatcaccaaggccggggaggggagagtgccgagttggggtcggcccctgcgtgggcggtggcccgctccttcactcagtgatggggggagaagcgggcattgcccgtggcgtccggcagctgcagcgtgcctggtcttcagccgcgagtggcttcggggccacttgcggcgttggcgtctgccacggcagccggaagaggttcttccgccggcgcggcggccgggaccggccacgggctgacctccaacttctacggccttctgcccgtccttgcctcacgagttttggcacgggcgggagcctcctggcagcggcatccaccctgaggtcagcgttgccgctgttcggccccccggagcagaagtcgccgtcgtcgccacttctggagtag

SEQ ID NO: 33990 - DNA, 388 bp, Zea mays
  Peptide Sequence Number=SeqID_75769
atggctgagaggtaccaactcccatggagttgcgttcctccaacgaggaggcggaaaggcggcggataccccccatccgggggcttggaatatgggaagacacgacgcttaagggaggaagaagacatgaccaacgggcagaaggggcgggcagccttgcaggcggcatgcaaccgcgccagggaccgggaaagggggatgccccgaaagggatccttctccgcgaaggaaccgggctccgagccccccactactgatcaggggttcgaaggctggccctccgaagggttcaacagccgcctcagatcgcgtgggcccgacacccactactggctggcccccgaagggttcacagtcgcctcagacaccgagcgagggatgacccggg

SEQ ID NO: 33991 - DNA, 1053 bp, Zea mays
  Peptide Sequence Number=SeqID_75770
atgaagatccttgaagctgagggcggggcagaggccgcagcccagctcgcttctccccaccatcgaactggtggtcaccgtcttgggacagaagaagtcgaaccgccgcgcgcggagcgcacaacagcccagcggttacaagcattcctccactatcgcccagaccagcgggtgaaagggcggaccgccgcgcaggcggcatgcaaccgcaccaaggggacgcaccctttcgacttcgacgcgtccagcatggaggcccaggcccacatgtcatgtaaccggctcgtcgattaccacgtgcgagaaactgcaccgccactcgcgccagtaccacgcctcctcgactgcggaaccggtgccgcgactcgaggcaaccctgcgcatgacccgacagtgccaaccgagcacatcagtcacgggtcagtcagccgcgggagaaggcgcgacggtcgatacagccagaaatgggccggcattaatggcggtggcaggcgggcgaaagcagcagtcaagtcggaccgggaaaggggacactccgaaagggatccttctccgcgaaggaagtgggccccgagccctcctactgatcaaaggttcgaaggctggcccctcggaagggttcaacagccgcctcagagcactcgggctccgagccccctactgatcagaggttcgaaggctggcccctcggaagggttcaacagccgcctcagagcactcgggctccgcgcccactactggtcagaggttcaaaggctgggccctcgtaagggttcaacggcagcctcaggccactcgggctctgcgcccactactgatcaggggttcgtaggctggcccccgaagggttcgacagccgcctcagagcacgcagagcgagggatgaccctggaatcccaccagagggaggcatcgagccctcggaccccgtcaaaaggggaccgggtccggcaaatcacccgcaggggctcgggggctgctctcgcaaacccggctccgaccaaaccgttgacagcgtcaacataccagcccgagaacttgggacctgactaa

SEQ ID NO: 33992 - DNA, 963 bp, Zea mays
  Peptide Sequence Number=SeqID_75771
atgaccaccagttcgatggtggggagaagcaagccgggctgcgacctctgccccacccttagcttcaactctgcggaggaggcgccctccagccatgccggggaaagcgaactgctgctgcctagccagggacggtcccattctcgttttcatggcgaggacgggagtgaggacctgccggtgcgctttggggcggccggcgcccgctggtgcggtgttggtgggcaggtggacgccgccgccggtgctgaggtggtggcagctggagaaagcttctccgccgacgagaccgtcagcaccacccgcggattgacctccggctctttggctttaatgtctggttctcgtccctcgagtggggacacgaacgagagccttccagtggtagcgtccgcactgggaccatcgctgctgctgcagaggtcgccagcgagtcaccaggagtttgtcgtctcgcaggctctccaatgtggaggttgttcatacccgcgggagtggaaccagagttctgtttgtaatggcaccttgagtgccggtgagtccctcggcttggtcggccttgccacccaaggcttctcttgtttagttaaaggaaaacctcggctgctctgtgatgagccggagccggaggcagcgcggctggaacctggccaggtcgtccactggcggcaccaaccctggagtcgggctgccgaggccatgagccgggctgatgtcctcggggatcctccgaccgtgtcaccgtccgaggtcgggccggattccgccgaaggtggagtcgacgccgagggtgctgctgcccccctattgatgtctgaacctgacttgtttgtcggtagcagaatcgcttatccgagcgagagttgcttatcacgggaggtgatgagtgaggagtccctcggctcggtcggccttgccgcttacgtgtactccgtcgttttcaggatcccactatcgaagtag

SEQ ID NO: 33993 - DNA, 567 bp, Zea mays
  Peptide Sequence Number=SeqID_75772
atgtggtctgttgccacactgcagttctatggacacctcgtgctgcttgtgatcgtcggctcagttgcttacgcgacagtcctatccagggcaaaccgtccccccgagcgggtacaatgttgtgggcaaggagttgagattgacccagcgaccatcacagatcaaatggaggttaagagaagagtacagtcgggtaatgttcagaaggcgatcgagaaaatcaacgaccttaaccccacgattttggccagaagagattcaaattttaagtgctccatcattttcgataagaagacatttcacatcatgcacacaccattattttcgccgtcgtcggacgtcccgttcgtcttcccggccttcgccctgttcttcctccccaacctgctatcctcgcccacggtcgcagccgcgagccaaccgaagctcgtcgacgtgggtacggggcgagtcggtcatgctcctagcctttctccatgtgtgccgtcaaggaggacatggtggcgcctgtcacgcttaggttatcttagtgatgaggagtccaggcctgagatattggacaactaa

SEQ ID NO: 33994 - DNA, 462 bp, Zea mays
  Peptide Sequence Number=SeqID_75773
atgatggtcctcgcctcagttgtcaccacctcattcgtaattctacttcttttctctctcctttcatgccttcacctccgcgccaccccattctcagtagaggacgtaggagcaggtgcctcctccccgtattcgtccgacaccagccccgacaccgactcgcgcagtggctattgcacgttcactgggacatttcacatcatgcacacaccattattttcgccgtcgtcggacgtcccgttcgtcttcccggtcttcgccctgttcttcctccccaacctgctatcctcgcccacggtcgcagccgcgagccaaccgaagctcgtcgacgcgggtacggggcgagtcggtcatgctcctagcctttctccatgtgtgccgtcaaggaggacatggtggcgcctgtcacgcttaggttatcttagtgatgaggagtccaggcctgagatattggacaactaa

SEQ ID NO: 33995 - DNA, 383 bp, Zea mays
  Peptide Sequence Number=SeqID_75774
atgatggtcctcgcctcagttgtcaccacctcattcgtaattctacttcttttctctctcccttcatgccttcacctccgcgccaccccattctcagtagaggacgtaggagcaggtgcctcctccccgtattcgtccgacaccagccccgacaccgactcgcgcagtggctattgcacgttcactaggacatttcacatcatgcacacaccattattttcgccgtcgtcggacgtcccgttcgtcttcccggtcttcgccctgttcttcctccccaacctgctatcctcgcccacggtcgcagccgcgagccaaccgaagctcgtcgacgcggatgtccaggtcttcgtcgtgtccttctccggcaacgcacagcggcacag

SEQ ID NO: 33996 - DNA, 1017 bp, Zea mays
  Peptide Sequence Number=SeqID_75775
atgaagacgccgcacccatgcgacgtctccaggccacgcggaggacggcgcctgaccccaccgcatgggcaggccaaagggcgccacgtggcaagaaaagacaatacatcccagtatgtatcgtggggcggcgtcaaggtcatccagcaggcgctgggtctgctggcgaacagtacactcggcaaagaagcagtggtctcagaactcagcaaagtcctgctctcagtaacgacgacgtttgccgagagcaggactctcgacacaggaatacattcggcgaagggtggctctcgacaaagggtcgtcagccgccgtctaaagctgacggccgttaccttcgccgagagccgagttctggcactccgcaaagaattttctttgctgagtgccccccgtttgacactcgacagagcaagctttgtcgagtgcccccgttggacacccggcaaaaaagcagtggtctcagaactcagcaaagtcctgctctcggtaacgacggcgtttgccgagagcaggactctcgacacaggaatacactcgacgaagggcggctctcggcaaagggtcgtcagccgccgtctaaagctgacggttgttacctttgtcgagagccgagttctggcagtccgcaaagaattttctttgccgagtgccccccgtttgacactcgacagagcaagctttgtcgagtgcccctgttggacactcggcaaagaagcagtggtctcagaactcagcaaagtcctgctctcggtaacgatggcgtttgccgagagcaggactctcgatacaggaatacactcggtgaagggcggctctcgacaaagggtcgtcagccgccgtctaaagctgacggccgttacctttgccgagaaccgagttctggcactccgcaaagaattttcttcgctgagtgccccccgtttgacactcgacagagcaagctttgccgagtgcccccgttggacactcggcaaacgtcttgcgctcggcaaaggtaacgaccatcagctataa

SEQ ID NO: 33997 - DNA, 192 bp, Zea mays
  Peptide Sequence Number=SeqID_75776
atggtttcccattctggttatgatggatacaagtgcggtcacttcacgacggcatccggggtcagtggagcattactcagcgagtgtgtcagtaccctgaatcaggggtaccctcttctacagcatgaagacgccgcacccatgcgacgtctccaggccacgcggaagacggcgcctgaccccaccgcatag

SEQ ID NO: 33998 - DNA, 171 bp, Zea mays
  Peptide Sequence Number=SeqID_75777
atggacgcgctaaattttgaatatccagactatgaaagatttgacaagggtgctgaagatacacgagagacgacaggcgattttctacaggtttgggccgctttgagatgtgtaacaccctacttcctggtgtggatctttatgtggtgggttacaagggaagtctcctga

SEQ ID NO: 33999 - DNA, 513 bp, Zea mays
  Peptide Sequence Number=SeqID_75778
atggagtgtcgcgagatcatcgaactcgcgaagcacgttagcaaacgacacgagcagacctccaaggacggctcccctcctcgtcgccgacctggcaaggaaagggtcgacagtggcgaggtggccgcgggagaaccggacctcgggtatcagtcacccgagggggtcctgaaggacgttttcaccggagactccaaatccgtttccatctgttccggcatgatgacatccgaattgagtagccaggcctgcagtttaggacccctctacgaaagcagggggtccggtagcctgggggctggttctaaagaacaggagcttgttccatggggtggtccggagcagtgtagccgcttagtctggttccgtacccaaagcctgcacactccaccactctgtgatgggcaccctagtatttggagctatagtcctatgggtctgacaacctggggtccggctctagagaatggatacttgtctcctggggtggtccggagccgtgtagccacttag

SEQ ID NO: 34000 - DNA, 159 bp, Zea mays
  Peptide Sequence Number=SeqID_75779
atggagctaggactccgcttgaagggggatgtaataacttttgctttttgtaaggacacccgtcgcagagtggtggagcgtgtaggattatggtacgggaccaggctaagcggctacacggctccggaccaccccaggagacaagtatccattctctag

SEQ ID NO: 34001 - DNA, 495 bp, Zea mays
  Peptide Sequence Number=SeqID_75780
atggtgtgtttgggcctcggcggccgcagaaaacacacactacaagataatccgatcctgcaggctcggatcttgacatttgaagggagcagcagcaccctcggcgtcaactacaccatcgccgccagggtcttctccaggaatccggctcgagcagatggctcgggccggtcaccccgaagcctcagccagccgtcccccgaggacatcggctcgatttgtggcctcggcaattcaactccggcgtcggtcccgccagtggacgacccggtcaggctccggccgaccaaatcttcttttcgagccaactctgcctctgtccgtgctgacactgctacctccggcttcggctcatcagagagcggccgagggtttcctttaactaagcaagagaagcctcggacagcaaggccgaccgagccgagggactcctacgcctctgggatacggatacctcactcgtcacctttgcacgaggcaactcacgcttggtga

SEQ ID NO: 34002 - DNA, 417 bp, Zea mays
  Peptide Sequence Number=SeqID_75781
atggtgtgtttgggcctcggcggccgcataaaacacacactacaagataacccgatcctgcaggctcggatcttgacagttgaagggagcaacagcaccctcggcgtcaactacgccttcggcgagggaccgggaaagggggataccccgaaaaggatccttctccgtgaaggaaataggctccgagcttccctactgatcagaggttcaaagactggcccctcggaggggtttaacagccgccttagagcgcgtgggccccgcacccactactggttagaggttcgaaggccggcccctcggaagggttcaacggccgcctcaggccactcgggctccgcgcccactactgatcaggggttcgtaggctggccctcgaagggttcacagccgcctcagacacagagcgagggatga

SEQ ID NO: 34003 - DNA, 159 bp, Zea mays
  Peptide Sequence Number=SeqID_75782
atggcgagagtagcgtgtaccctccgtggcaagaggctggatggtgagtcattgattattgataagccttaccttgactcccttaaagccagcataaccttgagagtctttttactttgtcgggtgaagaagcgacaaacttttgttgcttctgtttaa

SEQ ID NO: 34004 - DNA, 147 bp, Zea mays
  Peptide Sequence Number=SeqID_75783
atgggcgtggagagatgccagcatatccttgagagtcttttactttgtcgggtgaagaagcaacaaacttttgttgcttctgttcaaaggtggtacccaaagatgaacaacaagactatagctgcgggagggaaggccctccattaa

SEQ ID NO: 34005 - DNA, 900 bp, Zea mays
  Peptide Sequence Number=SeqID_75784
atgccggaggcagtggcggctgcggtgagcgcatgggggatcgcgagcggggaggacggggtgggggcacggctgcgcgcggtggagaccgccgggacgtgctggcactcggagactggcccgaagcccatggagggcttgcccggcgccacgttgtgcagcctatcctacggccacaaggagaaggaggggacgtcgggtcggcatcgcttccaccgaatgggatggaggatgttcgagtacgacgacacccagggcggcggcggcgaccacgtgctgtgcaaggtgcaccgttcgtcctcgtctctggccaagaacaagtccaaggccaagaggacggcgacaggcgatcaccccgaggcgccgccaaccaaggtgatccacgacgtgcaggaccccgccggcgccatcttcactggtgcttacccgacgatggatgatcccctgatggtcggaggcgaggaggcatcagaggcggacttgggcaagttcaacctcggtgacttgctcaacatcgacaatgtcgattggaaagctttgctagactatgccgatgggaagcagcagcagcaacaaccatgcgctgagccggccaagcagagcagtgacgtgcaggtgcatgtggaccccgccgccaccttgatgccctatgttcatggtcatgaacaaggcgaggattccatgatggtcggaggcgaggaagaacagcgtcgacgcattgaggggttcaacgtcgacgacttgttcgacgtcaacaatgtcgattggaaagctttgctagagatgctaggagacgatgaggagcaggggctgccgctgcagcagcagccacgcgctgagccggcggccgagcagagccagagcagcaggatcgagggcccatctgtgccgcccgtttga

SEQ ID NO: 34006 - DNA, 832 bp, Zea mays
  Peptide Sequence Number=SeqID_75785
gctgcgcgcggtggagaccgccgggacgtgctggcactcggagactggcccgaagcccatggagggcttgcccggcgccacgttctgcagcctatcctacggccacaaggagaaggaggggacgtcgggtcggcatcgcttccaccgaatgggatggaggatgttcgagtacgacgacacccagggcggcggcggcgaccacgtgctgtgcaaggtgcaccgttcgtcctcgtctctggccaagaacaagtccaaggccaagaggacggcgacaggcgatcaccccgaggcgccgccaaccaaggtgatccacgacgtgcaggaccccgccggcgccatcttcactggtgcttacccgacgatggatgatcccctgatggtcggaggcgaggaggcatcagaggcggacttgggcaagttcaacctcggtgacttgctcaacatcgacaatgtcgattggaaagctttgctagactatgccgatgggaagcagcagcagcaacaaccatgcgctgagccggccaagcagagcagtgacgtgcaggtgcatgtggaccccgccgccaccttgatgccctatgttcatggtcatgaacaaggcgaggattccatgatggtcggaggcgaggaagaacagcgtcgacgcattgaggaggcgttcaacgtcgacgacttgttcgacgtcaacaatgtcgattggaaagctttgctagagatgctaggagacgatgaggagcagggactgccgctgcagcagcagccacgcgctgagccggcggccgagcagagccagagcagcaggatcgagggcccatctgtgccgcccgtttga

SEQ ID NO: 34007 - DNA, 1095 bp, Zea mays
  Peptide Sequence Number=SeqID_75786
atggccgccaacgatcacgtcttccgggccaccaacgaggcgtccgtcgccctcctgcgtgacctccgcgccggaaccgtcgacccgagattcaaagccttcatccaccacgcggacgtttacaccgctgtccctgaggagctggtcgccgacctggagccggtgccgggcaccgacgtgacggaggacgggtacaacaggcagtggtatatatactgtccgaagcgatacaagaacggcgagggaaggaccagcgggcacaggctgcgcgcggtggagaccgccgggacgtgctggcactcggagactggcccgaagcccatggagggcttgcccggcgccacgttctgcagcctatcctacggccacaaggagaaggaggggacgtcgggtcggcatcgcttccaccgaatgggatggaggatgttcgagtacgacgacacccagggcggcggcggcgaccacgtgctgtgcaaggtgcaccgttcgtcctcgtctctggccaagaacaagtccaaggccaagaggacggcgacaggcgatcaccccgaggcgccgccaaccaaggtgatccacgacgtgcaggaccccgccggcgccatcttcactggtgcttacccgacgatggatgatcccctgatggtcggaggcgaggaggcatcagaggcggacttgggcaagttcaacctcggtgacttgctcaacatcgacaatgtcgattggaaagctttgctagactatgccgatgggaagcagcagcagcaacaaccatgcgctgagccggccaagcagagcagtgacgtgcaggtgcatgtggaccccgccgccaccttgatgccctatgttcatggtcatgaacaaggcgaggattccatgatggtcggaggcgaggaagaacagcgtcgacgcattgaggaggcgttcaacgtcgacgacttgttcgacgtcaacaatgtcgattggaaagctttgctagagatgctaggagacgatgaggagcagggactgccgctgcagcagcagccacgcgctgagccggcggccgagcagagccagagcagcaggatcgagggcccatctgtgccgcccgtttga

SEQ ID NO: 34008 - DNA, 768 bp, Zea mays
  Peptide Sequence Number=SeqID_75787
atggccggaatcgctcggtccacgtgcgcaggcgggtgtcctcgtcggcggcgggtgtgccggccaaattacggcgatctagttcaatcccttggcacgtggcttgcccggtctacgctcgccgacggtcggagggagtccggcgaccgtggactggcctctccggcgaagcagactccgattccttgctcgggaagcttcaccgaggtgtgctcagtcttctccgagggtcggacagggttgggaaaggcttggttggccggtctacggcggcaggggctcgggtggccgcggacacgccgtgcacgggcaaacgacggtgagtttgagctccgggtttggctgaccttggaggctcaccctctgcaaccgagttggcgttcccttgactccgagactattgggttcaaggtagacgacaccaccaaggccgcaactatgaagaccctgaccaccttctgtggatatcatcccctggagatggtgatgcatccactgggactcttcctcgctgagaagagggatgaccccatgtggtgcaaccgagtgagccaagtgaaagacgtgtgggccatgcatcccgaccaagttgggaggatcactgtttggtgtatgagtgcactgtaccgcctacaggccctgcaatgcgatgccatggcacacctcactaaccttgctcagaccactaagctcaccctcgacagtcgagaggactttgtggtcgacttgtcttcaaaattggtggagaaagacctacaggtggaatag

SEQ ID NO: 34009 - DNA, 363 bp, Zea mays
  Peptide Sequence Number=SeqID_75788
atggcacacctcactaacctagctcagaccactaagctcaccctcgacagtcgagaagacttcatggtcgacttgtattcaaaattggtggagaaagacctacaggattatgttggaaccatgagtcgagataacgatggccaaaatttctattttcagatggcagctaggcagcgtcgcgggcagaacgagcagtatgaccaggccttcaatgacctatgccagtatgcgggctatcatgcagactctgatgaaaagaagagagatcgtttccgcagaggtctcaacaccaagttgtgtgagtgcctcaacactgttcgggctgacagcttcaatgaattggtcaacctggccatatcatag

SEQ ID NO: 34010 - DNA, 456 bp, Zea mays
  Peptide Sequence Number=SeqID_75789
atggcgcggttaagacacgcggcgcaaggccggacgacggctatcatcggcgttcttatcggcttctaccgtggtgacacaggtaatgatggcccctcccgtgacgtggtcggtccgagccctgggttgggcgaggcagaggctcctccgaggtcgaggtcgagtctgtcttccgaggtcgaggtcgagtccgagcccttgggtcaggcgagacggagaccgtcggttgaggccgaggtcgagtccgagccctgggtcgggcgaggcggagttcgttgtcttccggggccgagcccgagtccgagccctgggtcgggcgaggcggagttcgtcgtcttccggggccgagcccgagtccgagccctaggtcgggcgaggcggagttcgtcgtcttccagagccgagcccgagtccgagccctgggtcgggcgaggcggagtctcttatggcgcctga

SEQ ID NO: 34011 - DNA, 163 bp, Zea mays
  Peptide Sequence Number=SeqID_75790
atggcgcggttaggacacgcggcgcaaggccggacgacggctatcaccggcgttcttatcggcttctaccaggaattcaaatgggacgatgtgaaggttgacaagcatcgggagaattaccttggtcatagtgttaaggctccggttggtagatggcagaaag

SEQ ID NO: 34012 - DNA, 489 bp, Zea mays
  Peptide Sequence Number=SeqID_75791
atgtcgcgcctcccatctacgcccgcctccacacccgtccccacacgtgacgcaggccgagccatcagcgcccttccccaggccgccttcaacgccgtcaccacgcgcggtgcaagccgagagccatcctcgccccaaatactcgcagcagtcgacgaccacctcccatctacacccgcctccacactcgtccccacgcgctggctttcgtcaccgacccactccttgagtaagtgtgtgaggcaccctggtccatgggcggatttcggcgtgaagcgcctccgcctgcacggccacatcgagggctcaatcgacgacgccagggccaagcctaaggtggaagatctggtggtgccaactagcagccatggcgccatcggctggtgcctccccatccaccttgccatccacctgttcgaaagggaatgggtctgggctggtggcggcagcagatacttcctcgacgtcggcacaaaaaggcatatttga

SEQ ID NO: 34013 - DNA, 681 bp, Zea mays
  Peptide Sequence Number=SeqID_75792
atggcgccatcgtacgccaacgtcatgttccgcgctcagccactccaggaggacgaccgctccacgcacgccctccgcctttgcgccttctctctaacccagggctggtgcctcccccattccaccttgccatccacctgttcgaaagggaatgggtctgggctggtggcggcagcagatacttcctcgacgtcggcacaaaaaggcatatttgagaactattgtgatcctggcatcttggtcaaggctccgtccactcaagggacacgatctcgcctcacccgagcccagcctcgggcaaaggcagccgacccaggaggattcacgtctcgcccgaggatcccctcaagcaacggacgcaccttcgattcgcccgaggcccaactcgggcaagcttcgcggagaagcaaccttggccagatcgccacgccaaccgaccgtatcgcaggagcattcaatgaaaacagcgccgcctgcgctgctccgactgctgtgccacccgtcagggtgaggctgacagctgccaagaccggcctcaggtgccataggaagctccgcctcgcccgacccctgagctcggactcagccttgactccggaaggcggtctccgcctcgcccgaccccagggctcggactccacctcgacctcggaagacagactccgcctcgcccgaccctag

SEQ ID NO: 34014 - DNA, 495 bp, Zea mays
  Peptide Sequence Number=SeqID_75793
atgaggaaatgggcaaggcctagcccactactcctcatgctcctctcctgccggagcaacatcccactcgaccgtccaacccggtggcagggtggtaggccaagtcacaccatcaactacatcctgcatggtacctgcaaaaatggtgccacaagcaaggctgagtatactaatactcagctagacttaaccggttacaaggaatcaagcagtctcattagctgcgagaagcagacgattcgaatcgagtttttaaaccttgcaaggcctcaccgccttggcatacaatgctccactgaccccgactgccgtcgtgcagtggccgcacttgtacccaccatagctagcatgggagaccctgtctcaggttgcatgagggataaagtccgcgcccggcttcactcaggcatcctccctggatccaagtccacggaccaacatatatcccattatcaagatgaatacaatcaattcctgacctcgcgcgagtgctag

SEQ ID NO: 34015 - DNA, 369 bp, Zea mays
  Peptide Sequence Number=SeqID_75794
atgaggaaatgggcaaggcctagcccactactcctcatgctcctctcctgccggagcaacatcccactcgaccgtccaacccggtggcagggtggtaggctaagtcacaccatcaaccaaatcctgcatggtacctgcaaaaatggtgccacaagcaaggctgagtatactaatactcagctagacttaaccgtgaccgcacttgtacccaccatagctagcatgggagacccagtctcaggtcgcatgagggataaagtccgcgcccggcttcactcaggcatcctccctggatccaagtccatagaccaacataaatcccgttatcaagatgaatacaatcaattcctgacctcgcgcgagtgctag

SEQ ID NO: 34016 - DNA, 267 bp, Zea mays
  Peptide Sequence Number=SeqID_75795
atggacacggcggagctccaacggcggccgggaaccgagctcggaacggcggggtttacggcggcggcgctctggcgtgcgcgcagcgagagagaggtggaagagggaggccggttgggtgttacaaaggaagacctcgccgtgccggcaaacgaagctcaggccgcgacctctatgcggccgactgaagaaaccaagcggatcaacctggggtttgccgatgagcgcaaggcggccatcatcagctccagtttgaatgacaaatag

SEQ ID NO: 34017 - DNA, 628 bp, Zea mays
  Peptide Sequence Number=SeqID_75796
atggtgaaggggtatcctccgatttcagccgttggatcagatccaaaggccgagagcgccgccgccgtaaaccccgccgttccgagcttggttcccggccgccgttggagctccgccgtgtccattgccacggtgagcttcgcctcgacccgcccaccgtcgccccgggccgccgtcggcgtctccgtcgccacccgaggagtccccggaggccgctttgaggtcgcccggggacccgcagggcccccgcgcccctcgtctccggcgagttctccgccgcgggacgggcgccgccgcctcagctggctggggaaggagacaggagccagccgccccatctccgccgtccatcttagatcggacggccctgtttcaaatagcccgaacccagcctcagccgttcgcctgagatccaacggcccagagccgtttcccccgcgccccgcctccctgccaactgggccccgcctgccagtcgcccgtgctcgcgctgccaactgggccccgcctgtcagccccgcgccctcgctgcccgcccggccccgcctgtcagccgctcacgccgccgcgcgcccgcgcgcccgcccgcaggatctaatcctggtcgtccgtttgagatccaacggct

SEQ ID NO: 34018 - DNA, 207 bp, Zea mays
  Peptide Sequence Number=SeqID_75797
atgagggtggaatgggacacccttagctgttttattagaggaaccagaggagtagttggcttcaccgtagggccgtcaatggggtccgggcacagtacttgctctgccgaggcaggctacgtagtgagaccataccaggtcaccttggtagtgatcaatggggaggctagaaccccgggcagaatgggaatcacagcttgtgggtaa

SEQ ID NO: 34019 - DNA, 318 bp, Zea mays
  Peptide Sequence Number=SeqID_75798
atggaggcattgaagcagatgaagggaggtaaagtgatggcccctgatggcatccctatggagtacatctccccaaaggaagagtggctaacaaaaccaaatcaagaacctctgcaaccagcctcggcagagcaagtactgtacccggaccccattgacggccctacggcgaagccaactactcctctgggtcctctaattaatcagctaagggcgtcccattccaccctcatggttgcactgttgtcccaggttgtcactccccaacaggtccttacggagaggtactcaggaaacagtctgagccccctaaagtaa

SEQ ID NO: 34020 - DNA, 495 bp, Zea mays
  Peptide Sequence Number=SeqID_75799
atgtttatcaacccatgcatctacaggaaatgggaggactcaccttttcccccaaacggtcgaactggaacacagtcgctgcaaatggcagcgaaacctgatgcatgtgggcggagaaacccctggtcattatcaatcctacagcaatttcacattctctcgcacaggattgcccacaatgatgtcgccctagctggatctatggtggcatggcgagtggggcagcaatctcgtgtgagtgggtgccaggagcggcagtccgagagggcaagaggagatgatcctgagccacctgtccacgcacttgagatggaacacgtgcgtgcacggcagctgccgaacctcctccttctccccgtactacgcaaggcagatgcagcactcttgcaattgcagtttcagacaggtttttacaagactgctatgctgcgtgatttcaagcagttcagctcagatcacagttttaacatgatagcgatcatggtactaagctga

SEQ ID NO: 34021 - DNA, 1296 bp, Zea mays
  Peptide Sequence Number=SeqID_75800
atggaactggcagcctcctcctcctcctccgccgccggctgtggcgacctcgaagtgcacgacgccaatgacgctccggggaacaggtcgtatctgatgaacaaggcgcgagcgttcctggagctcttcttcgcgatgtggttcgtgatgggcaacgtgtgggtgttcgacgcccggctggggtcgttccagcgtgcgccgaggctgagtgctgcatctgccttgcgtagtacggggagaaggaggaggttcggcagctgccgtgcacacacgtgtttcatctcaagtgcatatacaggtggctcaggatcatctcctcttgccctctctgcaagcaagagctcaagtgaactttatattcattacacacatgacattctcgcttattctttggatcaagttccagctaacaagggaaatcaaggaagaattgatctttatattagcaggcggatgcaatcactaatcaaaaccacgatgcaaggattgataatgaccaggggtttctccgcccacatgcaccaggtttcgctgccatttgcagcgactgtgttccagttcgaccgtttggggaaaaggcaaggaaacaggatctgtcacggaaggcgattcccatttctcagtgatgtcgatgtcctgtactcctgtatatttggattcaacaatatgccattagatgctgtatgctgtcaagcgtcctatttgcaagagataaatggcttacgcccgaggggcttattcttccttatcatggattctgtttcattgggagaaacaaatgcccttgcttactttcattataactgtgctatttttttgatccaatgttgttctaagatcaagaagtggaatacttgttctaagggtcccaagttgggtggtggtggtgggaagcgttttcagtgcattggtgccacaacactggatgagtataggaagcatatagagaaagatcctgccttggaaagaaggtttcaaccagttaaggttccagagcctactatggatgaaacaatacagatcttaagaggacttcgtgagagatatgaacttcatcacaaactgagatacacagatgatgctttaattgctgctgcacagctgtcttatcagtatatcagcgatcgttttctgcctgacaaagccattgacttgattgatgaagctggatctcgtgttaggctgaggcatgcgcagctccctgatgaagccaaagagctggacaaagagctgcggcagataagcaagcagaaaaatgaggctgtacgtggccaagattttgagaagaatctgtag

SEQ ID NO: 34022 - DNA, 279 bp, Zea mays
  Peptide Sequence Number=SeqID_75801
atgtcgcacgcgttcgacgactactatatcatggactgtggcgtcatctcggcaccgaaggtgatgcagaggaggaccgacagcaatgatcagttcgtcatcctccccaccgtcggggtagctttttgtgctgcaagcgcgtatggtggtacgtgcctcatgactgacgatgtacgagggaacttcttccggcaggcgtggggcgtgctcaccaatgatgagaccatgaaaatcgtggcatatatcgaagtcggcatgatactgatggttgcaatgtag

SEQ ID NO: 34023 - DNA, 516 bp, Zea mays
  Peptide Sequence Number=SeqID_75802
atgatgtatgtagaggagttgcgcatccggtggtgcaacgaccaggtgtactaccttgctaatgagtctgaggtgcacttcgtgtggcagcccaaccaagagtcatcggtactcgacatgtcgcacgcgttcgacgactactatatcatggactgtggcgtcatctcggcgccggaggtgacgcagaggaggactgacaacaatgatcagttcgtcatcctccccaccgtcggggtagctttttgtggtggtctacctttaattctctttgcaaacgcacacaattgctttttttttgagcaagcgcgtatggtgctcaacgacgaccaattcgaggatgcggactctgctagcggaacctaccggcgctatgaccccaagccgggtgacttcgcggttgaggtcgaagtctctggcaccgaggtgtgcctcgacgttgttatcggcaccgactgtttcgccacgctactcgccaaggagcttctcccgttggaccatgacagttctaacttctaa

SEQ ID NO: 34024 - DNA, 438 bp, Zea mays
  Peptide Sequence Number=SeqID_75803
atgcggaggcggccccccgcctcgccctgccctgccttcaccgatgatttcggcgactcaccggttattccctgctgcatcacaagctccactcctacaaagatggattcagcagactccatagccgacaaggcaattggaaggatgcaagaggttgcggacaagattttttctgtagcgagggaaacaatccgtcctggacgcgggttgacctcatttgacgctaccaaattacgtgtagcattggaggacattgcttgcatgctagagcaagactctctggtgttgcaagagaatttggacaacgtgaacaacgtaaacaaccctgatgacgagtaccttagtccggattgggactttactgagcactttgcaaacttctggggtgttgaatatgactccgaccatatgccatcgtttagtgacaatgaagtttaa

SEQ ID NO: 34025 - DNA, 408 bp, Zea mays
  Peptide Sequence Number=SeqID_75804
atgtcagtacgcctaatttgtgtagatagtccccatgtctggtatactaacgacctaataaatccacatcagatggattcagcagactccatagccgacaaggcaattggaaggatgcaagaggttgcggacaagattttttctgtagcgagggaaacaatccgtcctggacgcgggttgacctcatttgacgctaccaaattacgtgtagcattggaggacattgcttgcatgctagagcaagactctctggtgttgcaagagaatttggacaacgtgaacaacgtaaacaaccctgatgacgagtaccttagtccggattgggactttactgagcactttgcaaacttctggggtgttgaatatgactccgaccatatgccatcgtttagtgacaatgaagtttaa

SEQ ID NO: 34026 - DNA, 474 bp, Zea mays
  Peptide Sequence Number=SeqID_75805
atgcataatggtaagggtttctgtccactggaagttgtcgccgtcgggcccgagctccgcgtgtttgatctcagggctggtcatccagtttcattgtcagatgattgtggtggccattctcattcagacgcaataagagctatctgcttcagtgtgagtggagctttgtttgcttcagctggtgatgaaaaacttgtgaaggtttggaagactgattcgtggcgttgcatccagactataacttcggagaagaggataaatttggtgttgtttggcactggaattaacaagctggattaccttgcaacgatggatttggaccccgactctcctacatactcccaggtgatccacaggctcccagtcacccacatcggcgatgagctgcatcactctggctggaactcgtgtagctcctgccatggtgatccatcagcaaagcgtcgcttcctgatccttccttcattgttatga

SEQ ID NO: 34027 - DNA, 267 bp, Zea mays
  Peptide Sequence Number=SeqID_75806
atgtcgctggagaccattgagaagggccccagggagaagctcgtctacgtcacctgcgtctacaatggcactggaattaacaagctggattaccttgcaacgatggatttggaccccgactctcctacatactcccaggtgatccacaggctcccaatcacccacatcggcgatgagctgcatcactctggctggaactcgtgcagctcctgccatggtgatccatcagcaaagcgtcgcttcctgatcctaccttcgttgctgtga

SEQ ID NO: 34028 - DNA, 468 bp, Zea mays
  Peptide Sequence Number=SeqID_75807
atggcgagctcgccggtgctcgccgtctcctccatccccctccctcccccgagcgcctataaaagcacccgcccggaccccgtcctcaccacaccagctccggccatctccactgctttcccccgagccattcgagctagcgccgccgtgctcccttcgtcgctccgcggaagagggatccgatccttcggaacttatagctccgaaagaagggcctggattatgggatgggaatcgaattgcatggtgagcatgagagagcccgcattcactattactttgattaaaagatatgggtccgtgtccactggtatggatgagtctggtatggtatggcaattagtgtttctactacaaccgggaatagggaaaggtgtgtatgttctggaaagaaagtcgtgccacgggagcgggaagctcagtggtggtcaagcaagtgttatttctattgtcttgggaaaaccttaa

SEQ ID NO: 34029 - DNA, 183 bp, Zea mays
  Peptide Sequence Number=SeqID_75808
atggcgagctcgccggtgctcgccgtctcctccatccccctccctttcccgagcgcctataaaagcacccgcccggaccccgtcctcaccacaccagctccggccatctccactgctttcccccgagccattcgagctagcgccgccgtgctcccttcgtcgctccgcggaagagggatctga

SEQ ID NO: 34030 - DNA, 682 bp, Zea mays
  Peptide Sequence Number=SeqID_75809
atgtggcgtggtcggcccgagcgaggtggtgacttctccgaggtcgaggctgagtccgagccccgggggttgggcgaggcggagaccttcttccggagtcgaggtcgagtccgagccctaggcctcaccctggcaggtggcatagcagtcggagcagcacaggcggcgttgttttcctgtcaggataaggtgtcaggggcgatccttgcattgaattctcctgcgatccggtcggctggcgaggcgatctggccaaggttgcttctccgtgaagcctacccgagctgggctttgggcgagtcaaagctttgtgctgatgggggttaccagctgagattaggagccttgggggtacccctaattacggtccccgacatcagtgatgagaaagttgattttgatccaaatgaagatgacctgttgagctctcaggaacttgaagaatttgctaaagacatggaggaggatcaaactgactttcagaccaagattgatgctatgatctcgatcccccccaatgatgaggttttacaagatgtgaaaggtaaaaaatctctagacatgcccagcaacatctcagatggcatcagaaaaagttctaggctggagaagaacgatgatatgaaggtggccgataaagctatctccagagctgaagctaaagatgccttcctcaacaaag

SEQ ID NO: 34031 - DNA, 538 bp, Zea mays
  Peptide Sequence Number=SeqID_75810
atggcctccccttgtggcgtggtcggcccgagcgaggtggataaggtgtcaggggcgatccttgcattgaattctcctgcgatccggtcggctggcgaggcgatctggccaaggttgcttctccgtgaagcctacccgagctgggctttgggcgagtcaaagctttgtgctgatgggggttaccagctgagattaggagccttgggggtacccctaattacggtccccgacatcagtgatgagaaagttgattttgatccaaatgaagatgacctgttgagctctcaggaacttgaagaatttgctaaagacatggaggaggatcaaactgactttcagaccaagattgatgctatgatctcgatcccccccaatgatgaggttttacaagatgtgaaaggtaaaaaatctctagacatgcccagcaacatctcagatggcatcagaaaaagttctaggctggagaagaacgatgatatgaaggtggccgataaagctatctccagagctgaagctaaagatgccttcctcaacaaag

SEQ ID NO: 34032 - DNA, 555 bp, Zea mays
  Peptide Sequence Number=SeqID_75811
atggcggaggcgacggggttcccctccggcaggaacgccgcggaggccgccgccacgaaggacgccgcagccgtcaccagccccgaccaacccgagatctacagacgcgagggtattagcgggcggggtttctggaacccgatggaaagtggatcggcgcggcgccccgaagcgagaatggcggctgggcggactcgagatggcgccattccgggggaggcagattgccgcgggggcctagaactcgatggaaagtggatcggcgtggacgcagcgcgcgggggagggcaggttggggccccgcggagcgagcgagcgagggcgccccgagattggcgggcagggtttctagaagcgagaatggaaggcgccatggatggcggctgggggctcgccgagattgccgcgggggagaggggagcgcttgccgagggagatcgccgcggtgggagagggcgcttgccgaggcatgggcagaagaaaggaggcaacgcgaggcatgggcaggcggaggcggggcacgaggggctgtggacgccctccttacgttcttaa

SEQ ID NO: 34033 - DNA, 378 bp, Zea mays
  Peptide Sequence Number=SeqID_75812
atggcggctgggcggactcgagatggcgccattccgggggaggcagattgccgcgggggcctagaactcgatggaaagtggatcggcgtggacgcagcgcgcgggggagggcaggttggggccccgcggagcgagcgagcgagggcgccccgagattggcgggcagggtttctagaagcgagaatggaaggcgccatggatggcggctgggggctcgccgagattgccgcgggggagaggggagcgcttgccgagggagatcgccgcggtgggagagggcgcttgccgaggcatgggcagaagaaaggaggcaacgcgaggcatgggcaggcggaggcggggcacgaggggctgtggacgccctccttacgttcttaa

SEQ ID NO: 34034 - DNA, 489 bp, Zea mays
  Peptide Sequence Number=SeqID_75813
atggcgcaacaggcggcggtgccctgcaccacggtggcgcaatgccggcgagtgggcggaccggcgcacaagtgggtgagatcctacacgggcgtgtcctatacgtatagagggatgagtcgatctggacgagggagttctcaccgagtgttttgcagccctgagctctgcccacggccgagcgcagcgcagcggcggagcaagaagtgcggcgagaaatcccggcagccaccgccacccgcacagcgattacgagcttcaatcgacttcggcatgacccgaagactagccgagacgttccacaagccttccacggcgcatagcgcgtggtccgaccacggcgacggagcttcccaggcccggagcctatttctttggttttccgcgctcgagttgatgttgggtgctcggatagtggggatggtgattgccgccgaggggggagtcgcgtccttgcgcctttatagtaccgccacggagtccggctag

SEQ ID NO: 34035 - DNA, 462 bp, Zea mays
  Peptide Sequence Number=SeqID_75814
atggcgcaacaggcggcggtgccctgctccacggtggcgcaatgccggcgagtgggcggaccggcgcacaagtgggtgagatcctacacgggcgtgtcctatacgtatagagggatgagtcgatctggacgagggagttctcaccgagtgttttgcagccccgagctctgcccacggccgagcgcagcgcagcggcggagcaagaagtgcggcgagaaatcccggcagccaccgccacccgcacagcgattacgagcttcaatcgacttcggcatgacccgaagactagccgagacgttccacaagccttccacggcgcatagcgcgtggcccgaccacggcgacggagcttcccaggcccggagtcggtccgccgcgccatcttccacacaggttgcgcggagcccagaggagagggataaggggagggaaaacccacgccatggatttatagatgggtga

SEQ ID NO: 34036 - DNA, 321 bp, Zea mays
  Peptide Sequence Number=SeqID_75815
atgcgacatcggacgacggaggggtcgagggcgcgagtcgggcggctcctcccccttccacgcgatgcgacagcggaggggtcgagggtgcgagtcgggcggctcctcccccttccacgcgatgcgacggcggaggggtcgttaggcgacgtcgaggacagcgcgaggggcaacgccgaggatggggaagatggagggaggcatcgcgcggtgtctccttcggtgggggagggggcggacgcggcggtgggatgggcggggagcagacgacgatgcgcgatgtggggatggggcgtcgcggcctcgtgggggcgggggtag

SEQ ID NO: 34037 - DNA, 867 bp, Zea mays
  Peptide Sequence Number=SeqID_75816
atgggatttaggggcgtgtctggaacttgggagcgcctccagccccagattcacagtgaaaaattactactggaggctttttggctcactgtaccacctacttacgtcaattataactacgtgttatgctcaatcgtgttacgctactgcctcctcggcgcccctcggccagctaaagggacctcctcggcgcgctcctttgccgccacaggcgccaccgcgcgcctccatgcctccgccccagcgcctgccgcggctggagcaggaggcgtcgtgtcgttctcgatccaggcgcccaacgagaagatcgagatgtactcgccggccttctatgccgcctgcaccgccggaggaatcgccagctgcggcctcacccacatggccgtcacgccgctcgacctcgtcaattgcaacatgcagcatcaacaagtgaagctgctcgacttagagctgctctccggcgtgctccacccggcgctgttcggcaacctcaccagtcttttgaacgcatatgtgcataatagggctttgattctcaagtcctgcaatattggaatagtcaggccaaacatagtctcagagaagtcgttgggtgctgatttgcgcattggccaaccgctctcgcgtccacatctggtgcggttctgcctcccgaggccacgacgccccatccctcacaccgcgcatcgtcatctgctccccgcccatcccgccgccgcgtccgccccctcccccaccgaaggaatccccgcggactccgccccggctccccagaatgcgatccactcaactctctccctcaatccccgcttcctttcatggattgggatctcaagacgccggtctccagggacctgcccgacctag

SEQ ID NO: 34038 - DNA, 417 bp, Zea mays
  Peptide Sequence Number=SeqID_75817
atggggaagcctgtcccatcactcctcatgctcctcctcagccgaggcagggtcccactcgacagtccaacccggtggcagggtggtcggccaagtgatcccagcaaccatctcctccagagaacctgtaaaaattatgccacaagcaaggctgagtatactaatactcagctagacttacccgtgaccgcacttgtacccaccataaccggaatgggagacctcgtctcaggtcgcgtgaggggcaaagtctactgccaggttcaatcaggtactaggcttaccgatttaccatatttctcgggtaggtttgaactacaacagggttttaaaaatttccaaaaattctgcaaaaattacagtggattgtcactggctattttagcttattttaagaatttgaggcttaaagtataa

SEQ ID NO: 34039 - DNA, 417 bp, Zea mays
  Peptide Sequence Number=SeqID_75818
atggggaagcctgtcccatcactcctcatgctcctcctcagccgaggcagggtcccactcgacagtccaacccggtggcagggtggtcggccaagtgatcccagcaaccatctcctccagagaacctgtaaaaattatgccacaagcaaggctgagtatactaatactcagctagacttacccgtgaccccacttgtacccaccataaccggaatgggagacctcgtctcaggtcgcgtgaggggcaaagtctactgccaggttcaatcaggtactaggcttaccgatttaccatatttctcgggtaggtttgaactacaacagggttttaaaaatttccaaaaattatgcaaaaattacagtggattgtccctggctattttagcttattttaagaatatgagggcaaaagtataa

SEQ ID NO: 34040 - DNA, 1728 bp, Zea mays
  Peptide Sequence Number=SeqID_75819
atggcggaagaggcatcgcctccgcctccgccgcccaagctgctctacattgccgtcgccgacggcgggggccgccgggcgttccggtacacgcgccccgtgctgcagagcaccctgcatctcatgggatgcaagcctcgccatgccttcaagggtagtaggctgggtatcacgacagtggtttctactgattccatacgccatatgatgagaggcttcgcagatcaaaaacagaatcctcttctctatgcctcgacctaccatgcaggcgaatatctagatcctattgcagttgctcaggcgaaggcaaagcacaaggcgaataaacccacggttgtttctcatccaaatacctgtggaggcacttcttcagacgacaaatcacagcaagggtcctcggaactacctcctagagccgaactgattggcagcaagcagatggcggtagaaggctacaaggcgcagagcgagatggtgatcgacagcctggacagattaattacctcctgggaagagcagaaagaatccgtgatcgtcgaaggagtgcatctaagccttaacttcgtgatgggattaatgaagaagcatccttccataataccattcatggtatacatcacaaacgaggagaaacacatggaacggtttgctgtgcgtgcgaagtacatgacactagacccagcgaagaacaggtacatcaagtacatccgaaacatcagagccatccaggaatacctgtgcaaccgcgctgacaagcacctcgtgccgaagatcaacaacaccaacgtcgaccagagcgtggccgccatacacgccacggccttcagctgcctccgccggcgagcggccggggagcagctgtacgacctcaacacgaacactgctgccgtagtggacgaggagtacaggaaccagcgtgcggccaacaccttgggttccaagggcatgttccagctgatccagaggcaggggtcttcgaggaaccttatggcgctcctcaacaccgacggctcagtcaccaaagcctggcatgtaggtgccactgacggcggtggggaaaatcttggtggtaatacaagcagcggcaagaagcccgatgaaaatcgtgtgctggatgcctcgcagattgggaaggcagaggcggtcaacctccagttcggtcctttcgggatcagcgcctggatgagcgacacgggtggaaccagccatgctggaagtgtggaagacctgagggctgatggcgtggagactggtggtaggaattactcgtcgtgctgcagttcgccgaagacgtcggattccacttcgaaggagatgctttcacctcgccagcttatggaggactattcggtctatgtcagcgaagaagaggaagaggaggaagctgacgacccttgtgatgctgaaactgatgaagatctatccgatgaagaaagagacatgcacgagatagatgcaggctctgtggacgagcactcgaccaagtcagacgaggagtatgaggacctagccatgcgcgatgtgatggagagtggcgactggtccgacgatgagcagcaaggcgtcagcaaaaccaagaactcacctaccctggagtgcagcattcatgggagtggggcagctgaagatgatggcataaatggccggtaccaccacaacctggacctgttcctgaagatgtccaaggaggtggtagccagcaacagaatgccttgcgcgtcgtcatag

SEQ ID NO: 34041 - DNA, 789 bp, Zea mays
  Peptide Sequence Number=SeqID_75820
atggagtggacggaggagaacctgtcggcactttgcgcgccgctcgcctcagccgccggctccatttgggcaccgaaaacgatcaaatttctgacagggtcatttgaattttttttggttggctcgtcgtcggagttccatggctcccattttgggacgttcggttacgctttcttaaaccaggacatgcttactccagggaaaaacaatgcgactgccggttacctggtcgttgatgcgaacggtggcctaaaccagatgagaatgggaataagtgatatggttgcagtggcgaagatcatgaacgcgtcgctggtgatccctactctggatcatcagtcattctggaccgacccaagcgatttcagagatatattcgacatcgaccacttcaaggagtcgttgaaggaagacattgtgatcgtggattcgctaccactggattatagaagggcgaaaccctacgtgagagcacccacctcctggtccagggcttctttctatagagactgcgcgaaagtcctgaggaagttcaaagtggtgaggtttacccacacggattcacggatcgtgaacaacggcctcgctccttctctgcaaaagctccggtgccgcgcgaattacagggcgctcccttacaggaaggagatccaagggctcggcagcactctggtggatcggctgaggaatggggtccgccgagcattacatcgcgctccacctaagggaactggcctcaaacttccggagcgtttaatacgtgatcggctgggcccgagatctttttga

SEQ ID NO: 34042 - DNA, 1845 bp, Zea mays
  Peptide Sequence Number=SeqID_75821
atggccgcggccgcaaccacgtccacgaccacggcaaccatcccacccggcccgcaccgcaggcgccagcccaacgacatcgagcgcgacgacgacacctgctgcggcggagccggcgtcgatcgccgcttcccccacgcctgcggcgcgcaacacgacgacgacgccgagcgcggcctccaccacgccgccgctgccacgccctgcggcgggactagggcgctgctgttggcgcggaggaggcgagcgtgggccaccgcggcagcggcagcagcaggcgcgccgccccggacggcctgggcctggacgaggggcgtcgtgctctgcctcctcgccctcgccgcggtcgtcgtcgggttccagctgggctcgcaccggggcggcgggagcacggacgcgggcgccggcggtgacggcggcgtcaggctcttgcacttgcacagggtggagacggccgacgccgatgtcgtcatggagtggacggaggagaacctgtcggcacttgcgcgccgctcgcctcagccgccggaaagttttgcgttttggtacccctggtccctggcagagtcagccagtgagcaaactggtggtcatatttggttcggttacgctttcttaaaccaggacatgcttactccagggaaaaacaatgcgactgccggttacctggtcgttgatgcgaacggtggcctaaaccagatgagaatgggaataagtgatatggttgcagtggcgaagatcatgaacgcgtcgctggtgatccctactctggatcatcagtcattctggaccgacccaagcgatttcagagatatattcgacatcgaccacttcaaggagtcgttgaaggaagacattgtgatcgtggattcgctaccactggattatagaagggcgaaaccctacgtgagagcacccacctcctggtccagggcttctttctatagagactgcgcgaaagtcctgaggaagttcaaagtggtgaggtttacccacacggattcacggatcgtgaacaacggcctcgctccttctctgcaaaagctccggtgccgcgcgaattacagggcgctccagtacaggaaggagatccaagggctcggcagcactctggtggatcggctgaggaatgggtccgccgagcattacatcgcgctccacctaagatacgagaaggacatgctggccttcaccgggtgcaaccacaacctgacgctgcgcgaggcagcggagctgacgggcatgcggttcaaggtgcggcgctggaaggagaaggacatcgacagcgaggagaagcggctgcagggcgggtgccccatgacgccccgcgaggcggccgtgttccttaaggctatggggtacccctccgccaccaacatctacatcgtggccggcgagatatacggggagcatagcctggacgcgctcaaggctgagtaccccaacacctacacgcactacagcctcgccacggtggacgagctggagccactggagctctaccagaacaggctcgccgccgtggactacatcgtcgccctgcagagcgacgtgttcgtctacacgtacgacggcaacatggcaagggccgtgcaagggcacaggagatttgaagggttcagaaaaaccataaaccctgacaggctgaagtttgtggagcttattgacaagctggatgaaggttccatgtcctggagtgagttccagatcgtggtgaggaagcaccatgagaacagactgggaggtccatatgagaggttgcgtggtgcaagtccaaggcaggaggaatacttctactcaaatccggtccccggatgcctctgcaaaagggttcagagtagatga

SEQ ID NO: 34043 - DNA, 267 bp, Zea mays
  Peptide Sequence Number=SeqID_75822
atggcaagggccgtgcaagggcacaggagatttgaagggttcagaaaaaccataaaccctgacaggctgaagtttgtggagcttattgacaagctggatgaaggttccatgtcctggagtgagttccagatcgtggtgaggaagcaccatgagaacagactgggaggtccatatgagaggttgcgtggtgcaagtccaaggcaggaggaatacttctactcaaatccggtccccggatgcctctgcaaaagggttcagagtagatga

SEQ ID NO: 34044 - DNA, 837 bp, Zea mays
  Peptide Sequence Number=SeqID_75823
atgaacatccttgaagctgagggcggggcagaggccgcagcccgacttgcttctccccaccacaaggctgggttcccaccctccgacgcgggggctgggtcccacatgtcatgcaagctgaccagaaatagaagaagccaaactgctgcacgcgaagcagacgccccgcgaatcgcccgtcccgtcgcattaactcctcggcagggcaagcgacacctttggcaggcgaagcgggcgtcgtttcacctccgccatgatgaccgcgtcaaaaaagggaccgggaaaggggatatttcgaaaaggatccttctcagcaaaggaaacggcccccccgagccctcctacttatcaggggttcaaaggctggcccctcggaaggccgccccagagcactcgggctccgagcccattactgatcaggggttcaaaggctggcccctcggaagggttcgacagccgccccagagcactcgggctccgtgccctttactgatcaggggttcgaaggctggcccctcagaagggttcaacagccgccccagagcacgcagagtgagggatgactctgggtacgtccgttacatggccgaggctcgggctacgctcctgaggtaccctaggacattttcgagaccagcaggagcgatttgtaacggaatcccaccagagggaggcatcgagccctcggaccctatcgaatgggtccgggtccggcaaatcacctgcaggcttcgtcgtgaaagcaaccttggccaaatcgccttaccaaccgaccgtgtcgcaggcacattcaatgcgaagatcgcctggcaccttatcctgacacgcgcgccgtag

SEQ ID NO: 34045 - DNA, 1020 bp, Zea mays
  Peptide Sequence Number=SeqID_75824
atggcctcagggcaaacgctactgctgaaaggccttcgttcacgtcccctcacgggggacgagaaccagccattaaagccaaagagccggaggcccggagcacaggtggcgctgacggtctcgccggcggaagcaaccaccgctgcgatgggaagcctctccagtggcggccgccgcttcagcaccggcgacaccagccgcctgcgcacggcgcgaccgtcgcccagatggaggacggacagttgcaccctggccaggcagcagcagttcaccttcccccgcatggctggaggacgcctcctctgcacagctagaggatgcccctctcccccgaatgctggaggaagaagcgggtcgccggcccacgcggaggcaggccccaactcgatgcgccccccctccccaccccggatgatgaacatccttgaagctgagggcggggcagaggccgcagcccggcttgcttctccccaccacaaggcctacggtcatcatcctgggtggctctccccactcgccttccaagcaccgcgagcaaagtctccaccgacgagctccagggttcccaccctccgacgcgggggctgggtcccacatgtcatgcgagctgaccggaaacagaagaagccaaaccgctacacgcgaagcagggaccgggaaagggggtatttcgagaaaggatccttctcggtgaaggaagcgggcccccgagccctcctactgatcaggcgttcgaaggctggcccctcgaaagggggttcaaaggctggcccctcgaaagggttcaacagccaccccagagcatgcagagtgagggatgactctgggtacgtccgttacatggccgaggctcgggctacgctcccgaggagcgattttgtaatggaatcccaccagagggaggcatcgagcccttggaccctatcgaatgggtccggcaaatcacctgcagaggctcaggggctgctcccgcaacccggctacggccaaaccgttgacagcgtcaacaaactagcctaa

SEQ ID NO: 34046 - DNA, 281 bp, Zea mays
  Peptide Sequence Number=SeqID_75825
atgagttctaagtctaacgatgtgccggtcatcttcctgtggaagattgcccataatggagtcatcctggaggacagcttggaggaacagctgccgacgcccaccccattggtagagtcaccggccttcgcagctaggtcatcgacatcagcaccgcctgcaccagctgttcaagctcctgcacccggaggcgacgacccagacgactctgggaatgatgacgaggatgacgacgatgagaatgaagaggaacatgtcaacgaagaagccaactacgccca

SEQ ID NO: 34047 - DNA, 318 bp, Zea mays
  Peptide Sequence Number=SeqID_75826
atggaggcaagaaaagctttgaggtaccaagtgcacgggagaaggtcaaggaggctgaggaacccaaagccaagggtgaagaagaaggcttgcaaagtcaagggacattttgagacagaatcttctattccgctgcaacctactcgaagggtcttctcattccactgcgtactaagtcttcgagtagagcgacatccagatcctgttcctgggtcaaggggaactttcacccttagcgccacagccgacaactcagagtggtcccgatgcatggatcttcgagatccgggactagctgaaagaaaatatccttcataa

SEQ ID NO: 34048 - DNA, 1746 bp, Zea mays
  Peptide Sequence Number=SeqID_75827
atggaaggaaagaaattgggcaccggacagtgtgcggtgtgcaccggactgtccggacattttgagacaggatcttctattccgctgcaacctactcgaagagtcttctcactccactgcgtactaagtcttcgagtagagcgacatctagatcctgttcccgggtcaaagggaactttcaattggtatcaaagtgctttcatgagtgttgatcctgatttgagacagatttttagtagaagtatttttccctctaatgttagtaaaaatccttcaaatgaagaactaagatgtttatctctcaatcaccatgcttgcaacatcttagttgactctctttctagaaatgcttattttgccatcatgagcagtgatagtgatctatttgttgatgctcatgatttatggaataggattaaagaaaaatattttgtggcaaactgtgatgctcctactccctatattacttgtgagactaaccattcaaagggagaagaacaagaacgttggcacccaaacgatgaatccacctcgtcaacaggtttgttctccactagtgataaatgttttattgctgataatgacggtggagacgaaagccatgatgaggagaattatgaggatgacagcgaggatgaatcttcatcatcacaaggtacattttcctatattgcttccactgacattaatgacagggaaaatgagaccgatgatgtggaagaaggggagattcgccgtttttacaaccatctcaacaaagcggacaaagctctcttggttaagttgttgagaagaaacaaggaacaaggcgagacgcttctcaggctagaggagactctcatcagaaccaacgacagcctggtgaagatgaccaaagaacatgaggagctaaagtactctcatgggaatttggtccaacgtacacatttagataattcatcaccatgtgctaacccctgttgttcaaaagaaagccaatgtttgaataagcatcaagctgcagggtcacaaaagaaattgtgtgggaacaagaagcaaagacaactgaggagaagacacattgctcaactctctcaagatatccacgggcgcgtggtgaagaagcttgagaaaggaaaaactgcagcaagtgtcaagctcaataagaaaaatgttcctaaagatgaagaaatcaacatgagcttgaaaaaaggtaaagattcagttaatcatgttgtttgcactgaccttctctccatgtcattcaagtacaaaaagggaaaaggaaaaaggaggtgtttcaagtgcaagaagttaggccacctcatcgcgtcttgtccgtacaaagacaagaatgaagggacaaggagttgctttggatgcaaaaataaggaccacacgattacttcatgtccggttatgaagaatcaaggatgtgcatcctccaaggtgaccctcaccaaggaaaatgacacacagcaagcgtcatgtcaggttgagcgacgcttctgctacaagtgtggtgagcagggtcatctatccaaggtgccactgaggcatgcattgttgtatttagtcaacctttcatttagccttcaattggtattaagtggcttttcatttgatattcaaattggtatcttttgtgatgaaagtgataaagtatgccttgaccaaggtggaaaagagaagatgtgcaagaaatggagcaatcaggacttgggtacctctgtaagtcaagaaattggtatctcaggtcatgagtaa

SEQ ID NO: 34049 - DNA, 729 bp, Zea mays
  Peptide Sequence Number=SeqID_75828
atgtatgggcagtcactcaatctgaactcgtacgatccaaaccccagggttatgatggctagggagcaccaggaggataaggagggggaatgttttggacatggcggtggcctgactcattctggtataactattaagagaaggagatcgttgatcgggcacttcaatagctcacttgtatccccaactcgccagaaaacaatacagatcacgcttaatctagatgattcttcattaagtgaacagaggaaggtagttatcaaagagcagaagacagttgttgcttcccgttacatgcttggggtatcaagcaataacgggaaaattaccagtctcaactccagcattgatagtgacaaaagtaatggaggaagcaccatatctgaaccaaataaaaaatttgttgccccgaaagtcagacaagaggcaaaacctcaggaacggccaaataatacatctactggtaatactaagtcagtttccacaaagcaagaaattagcaaggacacactcaagaatggtggcgcttcacctagtccaaatggttgtgttgtagtcaagaagcaaatgccaaaggagagcaaaaaggaatctgctacagaaagaagatcaccaccaaagctttataagagttcaccaacaccagcgatgacttcaccaacaaagctcgatccagcagcaaagcagaatggaccatttgctagtgcagtaaaccagctgtctatataa

SEQ ID NO: 34050 - DNA, 426 bp, Zea mays
  Peptide Sequence Number=SeqID_75829
atggcaactgtaagatggctatcagaagaaaaaaagaatcagtcatcaacggtataccataatcaagctactgccaaaacacaacatgagatgaatcttgcatctgcaggaatgccaaataatacatctactggtaatagtaagttagtttccacaaagcaagaaattagcaaggacacacgcaagaatggtggcgcttcacctagtccaaatggttgtgttgtagtcaagaagcaaatgccaaaggagagcaaaaaggaatctgctacagaaagaagatcaccaccaaagctttataagtgttcaccaacaccagcgaggacttcaccaacaaagctcggtccagcagcaaagcagaatggaaactctagtccagtccattctatatctaccattaaaagaagggttactgaaactatctattag

SEQ ID NO: 34051 - DNA, 261 bp, Zea mays
  Peptide Sequence Number=SeqID_75830
atgagctggagatctacttggagggtggctactatgctttgccaagtggagaaagcaaatgaagacatgcttaaccagctatacagctcgataaagttgatgttttgtacattaatagtccctgtgttctcaaacactagacattctgaacaagatgtagttgaacttttgaaactccacccatcagtttataagatattgtttagtttgcaaatagaagagccatgtggggttgaaaaatctgagattgagcaaagctaa

SEQ ID NO: 34052 - DNA, 681 bp, Zea mays
  Peptide Sequence Number=SeqID_75831
atgacatcccctcagagacgcaatacctcgtcgtcaaagggtcgcggctcaccggcgagcagcccttcgtgtacaccgtcttcctccccatactggagggatcattctgtgacattcttcagtgaaacatcgacgatgagctggagatctacttggagggtggctactatgctttgccaagtggagaaagcaaatgaagacatgcttaaccagctatacagctcgataaagttgatgttttgtacattaatagtccctgtgttctcaaacactagacattctgaacaagatgcagttgaacttttgaaactccacccatcagtttataagatattgtttagtttgcaaatagaagagccatgtggggttgaaaactcaaccttcattgatgctaaagaggaatactcgagccttaggattgtcaaggacaagtttgaaggttggaaagctcagtacccttctgcataccgagatgcccatgtagccctgagtgcaccatctgtgttcaacccttatgtgagactagagctcttgaagtgggatcccctccacgaaacgaccgatttctttgacatggattggcacaaggttctctttgactatggcgtgcaagatgacgagagcccctcaggtgccttttgtgtctgcatctgggttttttattgcgacactgagggctga

SEQ ID NO: 34053 - DNA, 801 bp, Zea mays
  Peptide Sequence Number=SeqID_75832
gggctacagttcgcccccttccccttcaccggcatcctcttcctcctcctctcccctcccgattccttctctctcccgctaaatggatgggcaccctacggcggaatcctcccccgcagccgctgccttcgcacacaagcgcgcgcgctcggaatactccgacgagggagctccaggcgaaccaagggcgacggaaccgccgccggacaaggtagctgtggatccgccctcggccgcgatttctttgtcttgctccgggcggcgagcagcagtgggcgtcctcgacgcggatccaccggccagcttcgcggaccggcgacccggccgatccgtccgaagacgccgccgccggtcgtctctgtccgccggttcgtcgtctgcggggtggaggtcaaagggagttcatcgattcggcgacagatctacgctcagccgatctgcgtcattcgagcttcaaggtccaagccaaggagctactgcttgaggataggaatcaagatgagcagccatgatgccaaagtgctgcaaaacttggtcctcaatcttgcatcctcagtggaaactggtgctttcaatattagaagctttctagaagaggctttccgtcatttgggtgacgagcattaccttctgaatgctctacttgcaattcgaaaggaggtagaccagatggagcaggatgcacttgagagcaaagcaaggtctgacccagagaaggagaggatggaggaacaaattaaccttgcagaggctgtcaagccagtgcctagacaatttactttcacccccttcctcacctaa

SEQ ID NO: 34054 - DNA, 540 bp, Zea mays
  Peptide Sequence Number=SeqID_75833
atggatgggcaccctacggcggaatcctcccccgcagccgctgccttcgcacacaagcgcgcgcgctcggaatactccgacgagggagctccaggcgaaccaagggcgacggaaccgccgccggacaaggtcaaagggagttcatcgattcggcgacagatctacgctcagccgatctgcgtcattcgagcttcaaggtccaagccaaggagctactgcttgaggataggaatcaagatgagcagccatgatgccaaagtgctgcaaaacttggtcctcaatcttgcatcctcagtggaaactggtgctttcaatattagaagctttctagaagaggctttccgtcatttgggtgacgagcattaccttctgaatgctctacttgcaattcgaaaggaggtagaccagatggagcaggatgcacttgagagcaaagcaaggtctgacccagagaaggagaggatggaggaacaaattaaccttgcagaggctgtcaagccagtgcctagacaatttactttcacccccttcctcacctaa

SEQ ID NO: 34055 - DNA, 579 bp, Zea mays
  Peptide Sequence Number=SeqID_75834
atgaacgaatgtgagctcactcttgctgtctcacaccccccacacatgtcaagaacagaaaagttgcatcgccgctcacgccaataccgcgcctcctcgaggccgtcgcagaagactgagaagataaattttcaaaaccaatacagcgactcgaggcaccgcgcgcatggcccatcaaagacattaagtgcggaggtcacgagccagttagccgcagggacaggcgtgacagtcggcgtgaccatgggcgggccgacagtaattgcatcaacgggcacgcaagagcagcgagccaatcgccagtcaaactttggccctacctgcaggctcgcatcctcccctgaggcgggcctgggggccactgtcggtaccctgaatcaggggtacgccttactatggcggcgtcagggccaccctgcagacggcgcacctgtccagtccattgtcgaaacagtgcgcccgtgctgcgcggcgcactgtgctcatcatcccttgtacgagaagcttcccctgcacaccgatactacgcagatctcggatgtcagggcgcaaggagattgctccaacagcaaacattag

SEQ ID NO: 34056 - DNA, 444 bp, Zea mays
  Peptide Sequence Number=SeqID_75835
atggctgctactcgagggatgaacccctttttaaaggaagatttccccgctcgcgccccgaagcgtcacgagcagggcctcccccgatgcgcaccaaggttcccatcctatggcatgggggccaggccccacatgtcatacaagctggcccgaagcgcgaagaaggcgtaccaccgcacaaggagcgcgcaaccaccccgtggttatgcgccccttcatcttcgtcgcaaccagcggtcaagaaggcgaaccgccgcacaagaagcgtgcaaccaccccgcggttgtgcgccccttcgtcctcgctgcaaccagtggtccaacttctggcatgggggcccaggccacatgtcatgcacccggcgcgctggtttctgggtgcagaaaagtcgcaccgccgctcgcgccaataccgcgcctcctcgaggccgtcgcagaagactga

SEQ ID NO: 34057 - DNA, 1338 bp, Zea mays
  Peptide Sequence Number=SeqID_75836
atggctaccgcctgggggatcgatccctttttaaaggcggctctccccactcgcatcctcaagcgtcacgggcaaagtcttcaccaatgtgctccggggtcctcctcctatgacacgggggctgggtcccacacgccatgcaagctgactggaaacagaagaagccaaaccactgcgcgcgaagcaggtaaccgccccacggttataagtgttcccccattctcgctgaaaccaacaggcgaaagggcagaccgccatgcaggaggcgtgcaaccgcaccatggttgtgcaccctttcggcttcatcgcatccggtgggtcagcgtgaaggccttggcccacacgtcatgtaaccggtgcgccggttactacgtgcaagaaaccgcaccgccacttgcgccaatgccgcgcctctcgactgcggaaccgatgccgcgactcgaggcaaccctgcgcatggcccaacagtgccaatcgagcaccacgatcacgggtcagtcagccgcgggaggaggcgtgacactcgatatggccaaaagtggaccggcaggcaagcgacacctttggcaggcgaagcgggcgtcccttcacctccgccatgatgaccgcgtcaaaaaaaggctggcccctcggaagggttcgacagccgccccagagcactcgggcttcaagctcattactgatcaggggttcaaaggctggcccctcagaagggttcgacagccgcctcagagcactcgggctccgcgcccattactgatcaggggttcgaaggctggcccctcggaagggttcgacagccgccccagagcacgcagagtgagggatgactttgggtacgtccgttacatggccgaggctcgggctacgctcccgaggtaccctaggacattttcgagaccagcaggagcgatttttaacggaatcccaccagagggaggcatcgagccctcggaccctatcgaacgggtctgggtccggcaaatcacctgcagtcacttcgccctttcactgaccgacctgacaggaaaacagcgccgctcgctccgctccgactgctgtgccacccaccaggatgatgctgacaacaaccaagtgcagcctcaggcgcaacaggaagctccgcctcgcccgacctcagggctcggcctcaaccacggcctcggaaggtggtctccgcctcgcccgaccccaggactcggcctcaacctcggcctcggaaggtggtctccgcctcgcccgacctcagggctcggcctcgggagaagtctccgcctcgcccgaccttgggctcggaccgaccgcgccatgggggatacatcattaccctacgcctag

SEQ ID NO: 34058 - DNA, 1320 bp, Zea mays
  Peptide Sequence Number=SeqID_75837
atgaagactttgcccacgacgcttgaggatgcgagtggggagagccgccttttaaaaagggatcgatcccccgggcggagcacaacctcacggaggttggcacccttcagccatcgctcggcttcaaggattttcatcatgcagcccggctgcattccctcaccaatggtcatccaggatgatgaccaccagttcgatggtggggagaagcaagccgggctgcggcctctgccccgccctcagcttcaaggatcttcatcatccttgctggggaggagggcggggcaggtcggggcctgcctccgcgtgagcagcggcccgctccttccctcagcgatcgggggagagaggcgttcgccgtccggggagctggcagctgccgcgtgtctggctccccggtctgagcggctctggcgctgctttcggtgccacctcccaccactggggcttagcgtggctgcccgtctaccgcatgggtgtcggttgcgccgtgtgcgcgccggccacgtccaggccctccctgcaccatcggctgctcaacacgtcgtacgccgtgagggcggtactcatgttctgggatggtcccgttctcgttctcgtggcgagaacgggagtgaggacctgccggtgcgctttggggcggccgccgcttgctggtgcggtgtaggtgggcaggtggctgccgtcgtcggtgctgaggtggcggcaaccagagaaggtttctccgtcgacgagatcgtcggcgccacctgcggtcggacctccggctcttcgaccttgacggcttgtcctcgcccctcgtgtggggaccggtcgccggtgagccacccggagtttgctgtcccgcaggccatccggtgtggaggttgttcatacccgcgggagtggaaccggagttccatttgtaatggcaccttgagtactatctttgagatccttcggccgctctgcgatgagctggagccggaggctgcggtgtcggcgtggacagaggcggagtcggctcaaaaagaggcttcgtcagaccgggagcacatggcttccctggccgaggaggtggagatccttccacccgtgtcgtcgtccgaggctgggccagattccgtcgaaggtggaaacaacgccgagggtgctgctgctccctctgtcgatgacttgttcgtcggtagcagaatcgcttatccgagcgagagttacttttcgcggaaggtgatgagtgaggatcccgctatcgaagcagtcgaaaagcgcgaaagacgttctggcaggaagacttttaccgaggaaaattttgacgttgagggggttccccccttctag

SEQ ID NO: 34059 - DNA, 264 bp, Zea mays
  Peptide Sequence Number=SeqID_75838
atgcctgagccctgtgtacatgccaacgtggccgtcggagaagtgctggagccctgtgtacacgataacgtggccgtcggagaagtgtctgagccctgtagaagcacagctggcggattaggtcccgaccctgggttcccatctgcatttgacgaaggaggcctcacctttggctgtggtcattcctggacgaacctgtcagaaagctggacccgtggggaatccagatgggtttccggaggaaggcaggcttcagctccttag

SEQ ID NO: 34060 - DNA, 294 bp, Zea mays
  Peptide Sequence Number=SeqID_75839
atgaacaagaacacaagagacacaagatttatcccgaggttcggtcacaccaccaaggtgccctacttcctcgttgaggcgcccacaaagagctgggtctctttcaaccctaatcctccctttgccgaccacaaaggtcaagctcacacactaatctttgctcaaacgagcggtgagtttaggagagaaaaccccagctcaactgcccggaggcaagttcagctggtgtatggtcaaagaggttcacagctgaagttgagttcagctgaagttgagaaagctcaactcagctga

SEQ ID NO: 34061 - DNA, 405 bp, Zea mays
  Peptide Sequence Number=SeqID_75840
atggctaagctgagcttttcagctggggctgaacttcagctgaactcaacttcagctgtgaacctctttgaccataccccagctgaaacttgcctctgggcagttgagctggagttttctctcctaaactctctgtctgccagtcagactggcaaaacaggtcgccaggagctgtcaggggcggttcaactggttttggtcaactttgaccagtctgcgctttggtactacatcgagttctttgtggattcattactcttggagcttctagctcctagacgactaggtgtctcttgtgagtctccaaatcttgtggaagaccacaagaaagtttgtattacccgctcgtttgagcaaagattattgtgtgagcttgacctttgtggtcggcaaagggaggattag

SEQ ID NO: 34062 - DNA, 315 bp, Zea mays
  Peptide Sequence Number=SeqID_75841
atgaacaagaacacaagagacacaagatttatcccgaggttcggtcacaccaccaaggtgccctacttcctcgttgaggcgcccacaaagagccaggtctctttcaaccctaatcctccctttaccgaccacaaaggtcctgacaccgggttgaaccgccctagggccggttcaaccgcctgggggtcagactggcagtcagtctgccagtcaggaggtgagaccggtcaggtgaccctgacaccggttgaacctcccctaggaccggttcaaccggttttgaccagtgaggtccggggaaaataccccggctaa

SEQ ID NO: 34063 - DNA, 285 bp, Zea mays
  Peptide Sequence Number=SeqID_75842
atggctaagctgaacttcaacttcaaccggggtccagggcaagttcaaccggggtccagagaggttcaaccggggtccagggcaagttcaaccggggtccagagaggttcaaccggtgtccagggaaagttcagccggggtattttccccggacctcactggtcaaaaccggttgaaccggtcctaggggaggttcaaccggtgtcagggtcacctgaccggtctgacctcctaactggcagactgactgccagtgtgacccccaggcggttgaagcggccctag

SEQ ID NO: 34064 - DNA, 165 bp, Zea mays
  Peptide Sequence Number=SeqID_75843
atggctaagctgaacttcaagttcaaccggggtccagacaggttcaaccggggtccagggcaagttcaatcggtgtccagagaggttcaaccggtgtccagggaaagttcagctggggtattttccccggacctcactggtcaaaactggttgaaccggtcctag

SEQ ID NO: 34065 - DNA, 306 bp, Zea mays
  Peptide Sequence Number=SeqID_75844
atgaagagttataacatgttgatgcatcagcaaggtgacttgaagccatgttttgaactcatacatggtgatatggtacaagtcacagggtttgatttatgtttgcttcaaaaggaatcgtcgtactataaagagggatccaaaaagaagctgaacttcaacttcaaccggggtccagagaggttcaaccggggtccagggcaagttcaaccggggtccagtgaggttcaaccggtgtccagggaaagttcagccggggtattttcctcggacctcactggtcaaaaccggttgaaccggtcctag

SEQ ID NO: 34066 - DNA, 165 bp, Zea mays
  Peptide Sequence Number=SeqID_75845
atggctaagctgaacttcaacttcaactggggtccaggcaggttcaactggggtccagggcaagttcaaccggggtccagagaggttcaaccggtgtccagggaaagttcagccggggtattttccccggacctcactggtcaaaaccggttgaaccggtcctag

SEQ ID NO: 34067 - DNA, 165 bp, Zea mays
  Peptide Sequence Number=SeqID_75846
atggctaagctgaacttcaagttcaaccggggtccagacaggttcaaccggggtctagggcaagttcaaccggggtccagagaggttcaaccggtgtccagggaaagttcagccggggtattttccccggacctcactggtcaaaaccggttgaaccggtcctag

SEQ ID NO: 34068 - DNA, 165 bp, Zea mays
  Peptide Sequence Number=SeqID_75847
atggctaagctgaacttcaagttcaaccggggtccagacaggttcaaccggggtccagggcaagttcaaccggggtccagagaggttcaaccggtatccagggaaagttcagccggggtattttccccggacctcactggtcaaaaccgggtgaaccagtcctag

SEQ ID NO: 34069 - DNA, 529 bp, Zea mays
  Peptide Sequence Number=SeqID_75848
atggggaacagaccaatgtatcggggtgcaagctttccttttacatcgaaacgggtcacacccttcattggcgatactttcagctcaagggaggcacatacaaggatactgagccccgacatgtgggcccagaggcagaatggaagggatgcatgcggcagtatggatgtgccgcctgccaatggaatggataggcacgccgcctgcgaggtcgcgcagtcccgaggccttacgtcaggctccgcccgttggcttacgtcacgggtaccatgccacatggcagcatcggggctctgcttgagcagggagcagaagtgtgccaaaggatcacatttagccaataaaaagaccaagaaatgggttcaacaaaaagagcaagggataatcgaaggcagccctgaggcgcttcgctataattcaccagacatgtccggtgcacaccggacagtgtccggtgctccagaggagagcgactctgaactcgccagcttcagattaccgctccgctataattcaccggacatgtccg

SEQ ID NO: 34070 - DNA, 381 bp, Zea mays
  Peptide Sequence Number=SeqID_75849
atggaacatcttgcaccttcgtctgcatttgatttgcccaaagatgcttatggtaaatgtatctataacactaataaattggctagagaacaactattatcttggtgttttaaggatcttcggaagaagaaggctcccaacagtagcccctcgtgctcgtgctttcctaaaaacccgaaggttgttctcatagtcatgcctattgtttttcgcttgttctcaaatgctgtaagtcaaggacaaggcaacacaattattaaaggtcaaggatcttcatcctacgaagcattatctcctcttggatataatgatcttcagacgaagctcaagggaggcacatacaaggatgctgagccccgacatgtgggcccaggagcataa

SEQ ID NO: 34071 - DNA, 312 bp, Zea mays
  Peptide Sequence Number=SeqID_75850
atgtctagacgtggtaaatctgctaaacaaaggaagggtcctttcaccggaactgccttcgatccgctgcctttgccaactaatgttgataagtctgaggatcatgacacatatcgacagaggtattggatgtgtgctaactttgcatttgagccaactattgttcaacgtcggttgaatttaatgactcctccaccgctatgtgattttgagcagtggattgacacagaaatatcagagaaagacaagaagtggttggagaatcttaaaaagtgggatgcagaggacaaaaagaggatggagaaaagatga

SEQ ID NO: 34072 - DNA, 522 bp, Zea mays
  Peptide Sequence Number=SeqID_75851
atgtctagacgtggtaaatctgctaaacaaaggaagggtcctttgaccggaactgccttcgacccgctgcctttgccaactggtgttccagtacctatgtgtttttgtggtgatccttgtaaggttgataagtctgaggatcatgacacctatcgacagaggtattggatgtgtgctaactttgcatttgagccaactattgttcaacgtcggttgaatttaatgactcctccacagttatgtgattttgagcagtggattgacacagaaatattagagaaagacaagaagtggttggagaatcttaaaaagtgggatgcagaggacaaagagaggatggagaaaagacgagaggagcttgctgcggagcaacaacgtgaagacgagcaaaaaatgagacgtgttgctgaatgcaaagaagagaaggagaagaagcttgagcgtgcatgtcgtgcaaaggaagcaatagaggagaaccctgatgcatttcgcaagggcaaatggccccgttgcactcagtag

SEQ ID NO: 34073 - DNA, 669 bp, Zea mays
  Peptide Sequence Number=SeqID_75852
atgcccccacccacccagccgcccctgcccccggtgagacaccagcacgagttggccttcttctccggctgcagcgacgccgctggcccccaccaccccatccccaagctcatcttcctaaaggccctagcggaggcgttgcagatcccgcaagagcaggtgacgctcgcatacctccgcgcccgtccgccatgtgccctcaccgcacgccatcatcgcgtcagtgccattccaggaaggctcgcgttcgcgctgctccaggaggcctcgcgtgccttgtccgtgcgtggcccacatgctccgccctgcgtcccccccgccattctcgcgtcggaggtcgagatgtttataaacatcaaggagcatgttcttgtttctgagcatcatgtgctcacaaatgaggagaagaagacgctattggagcggtacacgttaaaggaaactcaggtactatggcctcagacgaggtcagggcatgaagatcatcaggccagtgagacggcggcaaatacgtcacataccactatgttgtatgacaacgtcagaacgcaggtcatggttaaggagttgctttctttgggagagcagattggtactgtaaacacaggcctttcagacgatgtattgtccacgtgcctaaacatgagcctgtacatgccacaactttag

SEQ ID NO: 34074 - DNA, 813 bp, Zea mays
  Peptide Sequence Number=SeqID_75853
atggcgagcaacttcagcactctattttttggaaatagattttatgagcagatattgacgagtgccagctgccagatatttacccatgtcatggaacctgcatcattgtgcctgggacatacagatgcttatcaaagaaaaccatcaggagccttccaggtactatggcctcagacgaggtcagggcatgaagatcatcaggccagtgagacggcggcaaatacatcacatatcactatgttgtatgacaacgtcagaacgcagaggggggaagagttgcttgcgtactggtggagagaggatcattggttgaaagcgatgtttctacatatgaggtctataattaaggttgaggaagagttggttggggttcctatgaaaggtggactagatgaggtctgtaattactttttttgttatgctctatcattacttgaaagaatcatcccagaggttaaagtatatgcttattcggctgcacaagttaagaaagctttggaggtcactcactacctaggtggtgaaaactatgtgttctggggtggaagagagggttaccaaagtcttctgaatactgatatgaatagagaacttgaccatctgctaactttcttcaagctgatgttgactacaagaagaagattggattcaacgttagcttcagagtacctgttgcccattaaagaaccactactagaattagaaaggccaccaattttttcagcacaggattggctaagaaagtctggtgttcactggagctactttgtagaggctgcttctttttgtgcagtaatacacagtaacctgtga

SEQ ID NO: 34075 - DNA, 675 bp, Zea mays
  Peptide Sequence Number=SeqID_75854
atggcgagggcgatccacggggagccaacgtggaggtggggctgcgcacgctgggagactcgacggcggcagctgggcgagcgagacggctccgggcgcgacgtcgagtgcgggcgagatggctctgcggccatccagagcgagcgactgaccgacccaggggcatcaccgaaggaccgagatcggccggggtggggcttcgggcacaccagcggttacagtcggacggctatagcgcgcaggagacaacggcgatggatgtgcacggtcccggtcctggccagactagtgaggtgtcatgggcacacgcacccggccccgcgaacgaaccaaggcaaggcggacccaatcagcgccgaggatcggccggacggacggccggaaaagagcgaaaagggagatgaggataaagggtgttacaaatctaacccccttaacagaatctcgcccccgagattcaagaagaagctagcaaggaagcaagcggctaacccccttagcaggagcattgatacacacttggtgaagatgctgccgactctgatcttgactgatttggaggagttggaggttgccaaatggataggtgcaagaggaaagaatagcgagaaaagggatggaaatgaggaggcttcaaagggtaggtgcaatggaagcataaaggtaagggaatag

SEQ ID NO: 34076 - DNA, 219 bp, Zea mays
  Peptide Sequence Number=SeqID_75855
atgacgcatggtgaggcgaggctaaagacgcttgctctggcatgcggtgctttgcaagcgacctcggctcggcgactcacattggcgagggcgatcaacgacgagccaacatggaggtggggctgcgcacgctgggagactcgacggcgacagctgggcgagcgagacggctccgggcgcgacgtcgagtgcgggcgagatggctctgtagccatctag

SEQ ID NO: 34077 - DNA, 153 bp, Zea mays
  Peptide Sequence Number=SeqID_75856
atggcgaaggccgggaagatgaacgggacgtccgatgacggcaaaaacgatgccactgtgctagtcagtgtcggggctggtgtcagacgaatacggggaggaggcgcctgctcccacgcccgagaatggggtggcgtgaaggcggaggcatga

SEQ ID NO: 34078 - DNA, 315 bp, Zea mays
  Peptide Sequence Number=SeqID_75857
atgtcggggctggtgtcggacgaatacggggaggaggtgcctgctcctacgccctctgccgagaatgggaccggggggtccctcgggccgacgagtgagtgtcgccgcgtgccccagcccagatgggtcgagcgcgtgggcgagcgcgaaggggggaaaggagtgaggcggccggagaccggcgtgagagaggtgggaatcccgcggccttcgtgttcgtcccgcgcccaggtcgagcgtaaggagaggatccaggtgtacaacgggggtgtagcagagtgctacgtgtctagcgggggagagctagcgccctaa

SEQ ID NO: 34079 - DNA, 144 bp, Zea mays
  Peptide Sequence Number=SeqID_75858
atgaagctaaccatagtagcccaaaaggtaatcaaggaccagatgctcagggtctttgatctcatagaactcgaagagttcgatcacttggtcgccatgcttgatcgtcgattcctcaaagctcagaaacgaaccgcgatctaa

SEQ ID NO: 34080 - DNA, 227 bp, Zea mays
  Peptide Sequence Number=SeqID_75859
cttcgaggaatcgacgatcaagcatggcgaccaagtgatcgaactcttcgagttctatgagatcaaagaccctgagcatctgtttggtgaaggcaatgataccctgccggaccacctaggaagtgatcaatggggagtcatgatccccgggcagaacgggaatcacggctcatgggtaaaagatggttggtttacagatgatgatgatggttatgactatggtaatg

SEQ ID NO: 34081 - DNA, 279 bp, Zea mays
  Peptide Sequence Number=SeqID_75860
atgcagttcttcgagttccacaagatcgaagaccctgagcatctgtttggtgaaggcaatgataccctgccggaccacctaggaagtgatcaatggggagtcatgatccccgggcaaaacgggaatcacggctcatgggtaaaatggttcaatatacaatggttctatttatggttttggctcgatgatgataatgatgttcctcgaggaggaaatggtaaagaaggtgtcgaggcggatctccaggagttccaggtcttcgacgagtccgaggattag

SEQ ID NO: 34082 - DNA, 405 bp, Zea mays
  Peptide Sequence Number=SeqID_75861
atggaggatgaggcgagtcggggggctgcctccgtgggggtcggttgccctcttcttcccctggcgtctgggggagaacggcatcctccagcttcacggagacttcctccagccatgccgggagaggcgggccgccgtcactcagccagggcgcagcgctacgtcctccgtccggacgatggttgcgccgcgcaccgcgagggcagcgcccacgctctgggcggtcctggcaagggcgaagacctgccggcgcgcttcgaggcgtcggcagccggagatggcttctctaccgatgagattgccaactccgccagtagccctaggtctccgtctcccgacctgaatggctggctctcgtcctcgggatgtttgtgtgagtgggagtcgcttcttgcggaaaggtga

SEQ ID NO: 34083 - DNA, 876 bp, Zea mays
  Peptide Sequence Number=SeqID_75862
atgggcgccgaacatggtgtctccggtgagctgcaagcggggcccacgcgatctgaggcggctgttgaacccttcggggggccacccttcgaacctctgatcagtagggaggctcggagcctggttccttcacggggaaggatccctttcgggcatctggcgcgccggttgtgcgacgcgtgggcctgggcctccgtgctggcgtgtcgggagtcggagaagcgcgtccacttggcgcggtcgcatgccgcctgcatggctgcccgcctctttcgcccgttggtctgggcgaaagtggagggtcacttcccggccgcacccctccaccggtggtcacccaagatggtgacctccagcttgatggtggggaaagccagccgggctgcggcctctgcccctacctcggcctcaaggattttcgtcatccaggccaagatggaggatgaggcgagtcggggggctgcctccgtgggggtcggttgccctcttcttcccctggcgtctggggtagaacggcatcctccagcttcacggagacttcctccagccatgccgggagaggcgggccgccgtcactcagccagggcgcagcgctacgtcctccgtccggacgatggttgcgccgcgcaccgcgagggcagcgcccacgctctgggcggtcctggcaaaggcgaagacctgccggcgcgcttcgaggcgtcggcagccggagatggcttctctaccgatgagattgccaactccgccagtagccctgggtctccgtctcccgggctgaatggctggctctcgtcctcggtgggtgagagtccttctgccgtggcacccgccccgaagccgctgctgaagctgcttcgtcgctcggggcgagggtag

SEQ ID NO: 34084 - DNA, 126 bp, Zea mays
  Peptide Sequence Number=SeqID_75863
atggcgaacacggaagggagattcttacccgcgattgaaggagtagcgagctcgtccacggttcggggcgggtccgcggtggagcaacacaccgattttgggccttacacattgaaggttggatga

SEQ ID NO: 34085 - DNA, 267 bp, Zea mays
  Peptide Sequence Number=SeqID_75864
atggcgaacacggaagggagattcttacccgcgattgaaggagtagcgagctcgtccacggttcggggcgggtccgcggtggagcaacacaccggtgagcgatttcccgagttcagcgcgtctcccgtgcttcactgtcttggtcttattgagtcggggtcagtgtctatcatcgaagttgggggaatatggttaagatgtaatcatggacattactccacaacccatcacactcaatcaaagatccaaatcagacaaatatcataa

SEQ ID NO: 34086 - DNA, 774 bp, Zea mays
  Peptide Sequence Number=SeqID_75865
atgggggattgggggtggtcaagaaatccaaatgaagtccctctagaatctcttggatataagcaagctgggattccacatcttaagtggttcagtgtggaggggcagtacaatgtcatggtgattgatctgcttggtccaagtctgaagggcttatttaactactgcagcagaaagttctcacttaaaacagtactaatgcttgctgatcagatttatactgcaacattccagaggcttgagtctaggccaaacaacccagctcaaggggttgctccactgggatccactaatccaagtgtcaacataaatgacaattcactcaatcttgtttctagatcacctctatatgataccaatcctagatatgcccgtgtgcaaagagagggattagtctccaggcatgagaaatccataaatcttgcacaagaagagtcactagcccttagacgaaatgccagcagctctggtattgaacatttagctgctcagaagaaacgcaacagcactgaaaatgagggtgaatataaggtccatcgatctgaatcaactaagagtttgtctacaaaagcttatagtagcagctatgctgttgtcgcttcagaagatgaggatgtctgccctacttgcctggaagaatacacgccagacaatccaaaaataataaccaagtgctgtcaccattttcatcttggttgtatttatgaatggatggagagaagtgatacatgcccaatttgtggtaaggaaatggagttttgcgagagcccatga

SEQ ID NO: 34087 - DNA, 432 bp, Zea mays
  Peptide Sequence Number=SeqID_75866
atggggaagcctgtcccatcactcctcatgctcctcctcagccgaggcaggcacaatggatcaagcggtctcattagctgcgagaagcagacgattcgaatcgagtttttatccttgcaaggctatgtgcacaaggaatcgaagaatggagcagaggattacccggtctacgttcaccggcggtcgggtgaagtccggcgaccgtggactggcttctccggcgaagcaaagtccgattccttgctcggggagcttcaccgaggcgtgcacagtcgcttccgatggtcgggcatggctgggaagggctctgttggccggtctacggtggcagaggctcggatggccgcgggcacgccgtgcacggggcaaacgccgatggtttcgggctccggtgaggtcgagcgtgcacggaggagtacggtcaacgcctga

SEQ ID NO: 34088 - DNA, 288 bp, Zea mays
  Peptide Sequence Number=SeqID_75867
atggggaagcctgtcccatcactcctcatgctcctcctcagccgaggcagggtcccactcgacagtccaacccgatggcaagatggacggccaagtcactccagcaaccatgtcctccagagaacctgtaaaattatgccacaagcaaggctgatgaccgcacttgtacccaccataaccggaatgggagaccacgtctcaggtcgcgtgaggggtaaagtctgcgggcaggttcactcaggtttgggttttgttagggataagcatagtggattgtattttccctga

SEQ ID NO: 34089 - DNA, 204 bp, Zea mays
  Peptide Sequence Number=SeqID_75868
atggggaagcctgtcccatcactcctcatgctcctcctcagccgaggcaggtcccactcgactgtccaacccggtggcaagatggacggccaagtcactccagcaaccatgtcctccagagaaccttacaatggatcaagcagtctcattggctgcgagaagcagacgattcgaatcgagtttttaaaccttgcaaggatttaa

SEQ ID NO: 34090 - DNA, 666 bp, Zea mays
  Peptide Sequence Number=SeqID_75869
atgcacctcatcctgtggtacctcttctttacctgggaggatgtgagtacagcaagggtgaactcacatacgttcatcgcccaacaagttgtggggaataatgtgcacgaactcaccaacgaacacccgcaacagcaacaacaacagcagcagcaacagcagcagcaggagcgacgatcgcctcgcttccaaggtcactggaaagtccagggccccaactgctaccagggcagcgccagcggcttccaatgccccagccgggggtccggcggcagcggcgtcgtggtggcggaggaggtcccagctgggggattcacgcccactcccgacactgggggtgacacaggaggcgcatccagctccaaccccccgcctgctccagaggagatggaggtggtgtttgggcggcgactccggtcgggtgtcgagcaagaagcggcgccagtccccctcccccgcatgctgtcccgcgcccccactgtggacagcctagaccccatacagggggtccggatcccattccaggggtccgaactcactggtgatacctcagagtttgtcactttctctggacacgtggtggcaccggacctgcccatgtggtggggtcaggtgctgttgctggcccagagtagttacctgaggctggggcgagtcatggcctag

SEQ ID NO: 34091 - DNA, 402 bp, Zea mays
  Peptide Sequence Number=SeqID_75870
atggcccccagccccttggacaagggcaaaggggctgcaaacagtgcctccgccccaggtagctccggggggtcggaggaggagaggcgacacaggttgcattgcgctgacgggtcgctcatttcggagcccgcccagaagcgccagaaggctgcagatgggaccgaggaggccagctcccaggcccatgacgcgcagaggcgcgttagtccctcgatcccgccaccaccaccaccatctgggggtgatcacccccaggagcaccagcagcagcaacagcaacaggaggggcaacagcagcgacctcagcagcagcagccacaacagcagcagccacagccagtgcaacaacagcagcaggagcagcgatcgcctcgcttccaaggtcactggaaagtctag

SEQ ID NO: 34092 - DNA, 2601 bp, Zea mays
  Peptide Sequence Number=SeqID_75871
atgccttcccatggtgggaaactggtgcgaagtcctgccttcgcgctgtatctgcaaagccgcgatccggccgcctttgtacgtgagacggaggatggggcggtgcggatcgttggtcggtacgtgccgaggacagagggccagcgtagctgggatatccgcgggtggaatgaccgcttgaacagggtttttgaattgaatcgactgccgtataacggctatcccagccaagacgatgtggaccgccgcgggaagaagccggtggtggagtctggagatgaccctgcgccggcggccgccccatcctctaagaagaggaaactaggtactgctatgggaggacttggggtttccgatggttttgctagagaattgatgaggacatgcgcggccccggggggaaggatgtcttcgcccgagctccaggagtcttcggcgcggatgatgagggttaccgggggttggtggcctaggaatgttcctatcccccgcgcggccggcgaagacttttttacatctcgcatggttcgagaatggagagtgtttccttacgggcggaatattgctgctgttgtgtcggcagtgatggacaaggatcgccagggagctgcacagaagcgccaggcggttgtcaggcttcatgaagccaggccgaagaggcagcgaggggctgcgaaggctgctgcccccggcggaggcaagccgccgctggcggcgaagtcggccgtccctgtgtctagcaaggcggcggaggttgcggctgacgccggtggttccaagtctgcgaagactgtgccgccgtccagcagggcgccggaggtcgcgaaggcggcccgagggttgccgtcgccgggcaagcgcgtcgccgacttcgccaccgatattagtgtggacgactatcttggtgggtcggacgaaggccaacttgttattgttgcgcctgccgcggcgaccacggcggctgccgtggtgccgaaggcgaagggcggtgctcttagtgccggaggcgagatgccggcactcgctgctgtcagggacgaggcgggcgctgtgtcccgccagctgaaggagatgaaggaggcgctaagtcaggcggctgacttcgtagaccgcgcggcgtcgggggccctcacggcagttgtgtctgccgaagtcgagagacttcggacgcaacatgctgacgccgtccgggaaaaatcggccgccgacagtaagtgccgcaagctggcggacaaggtggccgcgctggagggggaaaagactgacctccggcgccaattggtggaggagaggagggaggccaatgaggccctcgccaaggcgcaggctgtgctggcggaggccaatttggcgcgggcggagggcagtcttgccagggagcgcgtcgcgcagttggaggagcggctcaacgccctgcagagccgtgtggagaggaccgaggccgcgacgcgcgcggaggctgagcggacgcgcaaacagcttatggattcataccatgagctgggcgcgcggacccgtgacttcgaagtgccggaccgagagcccggacttcgctgcctggagtgggtacaggaggagttgcaggcactccccactattgtggaggggtttatgtcgtatgcctccctggtcacctccgagggggcgatgaacgcgctctctcgcgaagggtgccggcactttgaggtcttcgaccaagctgatgaagattttgagcgagatatctacaaggttgaggaccctatagtgaaggagtccaccggagccatctacgaccggatgtggggcccgcacggtcgaggggtggtcagggagcgggccgagacggcgagggctcaggcggcgcgtggcgagagggtggatgatttcggggcgttgaacagcgcgctgcctgacccagagtcgaacccggcggaggccgtgtccgaggccgccctggagccgtccccggagactgccgaaggcgctcctgatgcccccgcagccgctgcggccggcggaggcccgcccccagagaccgccggaggcgctcctgatgcccccgcagccgctgcgccgagggctgaagatcctgcgatggtggcggcggaggcgacagcggaggctcccgcgatggctgggtcttcgcaggttcaagattttgggcctgcgcacgcaaccgccactactaattttttggcggcttcgaccgtggatggtggtaataaatatgatgggtctgcatctgagttttctgattttgctgactgtgggagctcggttgagtggactgaggagtcgtcggaggaggacttggactattttgcggccttggatgtggcagcggcggaggcttcaccgcacgctgcggacacagaagatgtgtctggtccgagtattgggcgcaggcggcgaagggcggttgcgaagcgtagagtgagcggggcggagggcggtcggcttcgtgtgagtagggctagccggcaggaactgttgtccttgcctgccgccgcgagtacaggtgaaggggaattgcgaagtctttttgcgggtgaggagcttaggataatgttatttaactatagggagatgggaattattccgaaggttgagccgatgtag

SEQ ID NO: 34093 - DNA, 363 bp, Zea mays
  Peptide Sequence Number=SeqID_75872
atggggaggctagaaccccgggcagaatgggaatcacggcttgtgggtaaagtgtgcaacctctgcagagggttagaaactggtatatcagccgtgctcatgatggcacgtatcaggtgcactgcacgtaagtctgtgatcccctttttgccttctcgactggtggagcgtcccctgcgtcgtacggtgtcaggtcagtccagtcacctggagagactacatcgtcgcctgtacaaggagcaggagcgccgacaccaggagcaggagcagcaggactcttccccctcgcctcagcgggaggtggagtctgagaggtcgccttcccctgcacctcagccaaagatgccccctgcaccaccttag

SEQ ID NO: 34094 - DNA, 603 bp, Zea mays
  Peptide Sequence Number=SeqID_75873
atggcccatatcaggtgcactgcacgtaagtctgtgatcccctttttgccttctcgactggcggagcgtcccctgcgtcgcacggagcaggagcagcaggactcttccccctcgcctcagcgggaggtggagtctgagaggctgccttcccctgcacctcagccagagatgcaacttgcaccaccacagggcatcccggctgctggaggagaccctgacggagacggagacgacgacgacgctggtggcagttcgagccactgcacggagcgctcagaggagtcagagcccgaggggtggatcgctagacccatcactcgtgatgccgctcgcggcggggtagctgaaggccttgacctaaagtactaccctcgccgttcgaccgacaatgctggaggtgtgattgtctcaccagttggtgagggcaatcctaggctgagcagcatggttgcggaattgcgtgctgaatgcgcggcgtgccactatcttgatggtggttgtcccgcccctgttgggattcaacacccttaccgttcaccgcctcgtggtcgcttcgactatggtaccccagactgcaagacccgcatagatttagatccatag

SEQ ID NO: 34095 - DNA, 912 bp, Zea mays
  Peptide Sequence Number=SeqID_75874
atgggtgctactggtatattatgtgattctacccatgatgcaatcacaaaagaatgtgttgctccagtatcaaataacacatttgcagaatggtactcgactgaaaacaaagacgggctgcctggttgctctgacgctggtattgatttcctccttgctggttattctgacagtactgctgctgctgttgaggaaactgccgctggtactactgctgctggttctgacgctgatgctagtgctgatgatgagccctaccagcaccccgcacacacccctcgcctcatttcacacagcttcgccctctctcgcgctctgcccatgctgcctgccgctgccggagacccgcgcccgtgttcccggccatccagctcgccggagatcgccccaagcctccccgagctccaccccaagacagcagcagcccatgccgtccttcctctggttctgcacggcgaccagcagggagctcagctccttcttgccatggcgctaggcacccatgtagcagggacagcgcccttcctccctgctcctcccttgcgcaggcctgcttcagccgagtccccttcttcacggcattcggcagcagggagactttcttcccacggctgcagcaagcagctctgctcgcctcctccccatggcgcctccacctccctgcgtgctctctgccccttctgtcttggcgagctgaagctctcccatggtgtggccgagcagcagctccccctcccctcgcccctgctctcctctggccggaccgaccccccagttcgagcggcagggagcccctgcttggacagcagccatggcatccaagttctctacgcggcgatgccgatcgaccgtctacgcgtctcacgtcgccggatctgcgcagccccatccgcgatgccgtcgaaacccgtg

SEQ ID NO: 34096 - DNA, 471 bp, Zea mays
  Peptide Sequence Number=SeqID_75875
atggactgcctatcccgctcgtccctctccttccccacaacagcagcggctcccaatccccggcaacatcttcctcatcgtcgcccatggcgcccagcgcagggagctccctccctctccaatgcagcagcacgtgagctcgcccccttcctccttttccctagtgcggcagcagggagcccctgcttggacagcagccatggcatccaagttctctgcgcggcaatgccggtccaaaaacagcagccccggatcccctgcgcatcgcgtgctcgctcgatctgcgtagtcccgacccgcaccgtcgcgatggtgtttgagacagccccatgccgtgtcgtcgatctacgcagcgcttgcgagccgtcgtcaaaaatccttggtgagcccctcgctagtattccattgtttttggatctcaagtgcttgataaaaatgtttgaaccattgagtgatgttaatcacagctag

SEQ ID NO: 34097 - DNA, 465 bp, Zea mays
  Peptide Sequence Number=SeqID_75876
atgaatgctctgtcccgcgaggggtgcgggcactttgaggtcttcgaccagtcggacgaaggcttcgaacgcaaaatcttccaggtcaaggactcggttctgaagcattcggcgggggcgctcttcgacaggatgtggggccctcattgccgagagacggtctgggagaggtctgaccgggcgattgatcagatggcacatgacgaagaggttgaggatcttggcgatctggacagcatgctgcccgacagcacgcttcccgaggcatcaggggtggagctggcgccgccatctgatgcgggcaagggcccctcggcgacccccgcgccaaacgcgccgactggagctggcaaagactccgcgccagcccctgcgctgatgggtgaggacgcttcgaaggcgatgggcgaaccagctgccgaagaccccgcggcggcggtcgggccttcacaggtggcagaatag

SEQ ID NO: 34098 - DNA, 1308 bp, Zea mays
  Peptide Sequence Number=SeqID_75877
atgtcttcgctcgagctccgggagtctttgatgcgaatgctgaaggttaccgggggtcgatggccaagtaacgttccgattacctgggcggccggcgaggacatatttacgtctcatttggcccgtgagatgaagatttttccttatggacggaatattgctgctgttgtatcggcagtgatggacaaggaccgtcaagatgcggtgcggaagcgccgggcgttcgctagggtcggggaccctatccgtgaggtgaagagtgcgcggggagacgcgaagtccaccgcccctggcagcggcaacccaccgctggctgcgaagccggtcgttcctaggcccagcaagtcttcggtgggtgcgagggctgttgcctccggcgcgggcaagccgccctcggctgagccgacaaaggagcgaaggccgtcgtcgccggtgcgcaccgacgaagaggtggcgggtggtgccgactttgacacggacatctgcgtggatgattacctcattggttatgatgcagggtcggatgcgaggcagctggctgttgtcacaggttcggtggtagccactttgcctacgatggcggttggagcgaagggtactttgcatgactcatggtccaagttctgcaccagcggcgagatttcatcggtcgccgctgctaaatacgtggcgggctctgtgtcccagcaactgaggcatgcatccgagcagctgaagcatgcggccgccttcaccgaccatgttgcgtcgggcgccctgacttcggagttcactgccgagaggcaacgactcgagggcaggatcgagcgcagcatgtggatgctgctcgggacaagtcagctgcggaaaataggagccacaggctgttggagaggttggcggctgaggaggccgagaaggaggatctcaggctccagttggcataggagaggagggacgcaaacagatcctatgctaaggcgcaggttgcacaagctgaggccaaacttgcgtgggcagagggcagtctcgcccgccaacgcgtccaggagatggagacgaggctcggtggcctgcgcgaccgcctggacaaaatggaggcctcgacgcgcacggaggtcgagcggatgcattcatagtttgtggacgcgtaccaggagctgggaggagctagaggtgctcctgacaactgtgacgggcctcatgtcctttgcctccctcgtcacctgtgagggggccgcgaatgccttgtcccacgagggatgcgggcactttgaggtcttcgaccagtcggatgaaggcttcgagcgcgaaatcttccaggtctag

SEQ ID NO: 34099 - DNA, 499 bp, Zea mays
  Peptide Sequence Number=SeqID_75878
atgacggcacgccgcttgccgccacccgccacccgcctggccgcctccctctgcctggccggtggctgctggcctgctgcctggcccagtgcccaatctgccatctgccatctgaccgaaagcaattcatttgacaagaacgatgacatgtctgaggatgaaatgactgtcctaggtgggagagagattgatgttgtggaatcaaataatgatgacaaaagaaaagccaagaaaatgcataagggggtgaaagtaaaggataacaactctaaatccaaagtgtgggaagtttttgataaagtgactattggagatgcatccgaggatggaaagaagacattaaaggcaaagtgcaagtattgtaagaaaatgtatgcctacatgcaagggtcaacgacatcaacattatcgaggcatatgaagagttgtggggcatattcaaagcatttggaaaagaaactagatcaatctcttctcaactttgctccttcaaatgcag

SEQ ID NO: 34100 - DNA, 1566 bp, Zea mays
  Peptide Sequence Number=SeqID_75879
atgggaagcgctcccgtgaacgtctgcgtgtctcgacgcgggcagcaagcggaagggcctgccgcagtgctggccattggcacggccaatccgccgcactgcgtgcatcaggacgagttcccagactactacttccgcatgtccaggagcgagcatctcaccgacctcaaggtcaagctcaagagaatatgtgagaaatcaggaatagagaaacgcttcttccacatcaacgaggaaatactggccgcccatccggacttcaacgaccgagagaagccgtcgctccaagcccgaatcgagatgacggtaacggaagtccccaagctcgccgcgcgcgccgccgccaaggccatcgcggagtggggccgcccagccacggacatcacgcacgtcgtgttcagcacatactccggcgcgaggtccccgagcgcggacctccgcctggcgtcgcttctgggcctgcggccctccgtgtgccgtaccacgctgagcctccacggctgctcggggggcgtccgggcgctccacctggccaaagacatcgccgagaacaaccacggcgcgcgggtcctcgtggtctgcgccgaggtttccctcatctcctacagcggccccacggacggctgcgtggactctgtcctcggcctggcactgttcggcgacggcgccggcgccgtcatcctgggcgccggccccgtctccggctcggagcggccgctgttcgagaccgtgtgcgccgcgcagacgaccgtgccgatgaccgaggccgcgatcaccacgcagttcgcgccaggcggcatggagtaccgcatcggcaagcaggttccggggatcgtggagcagactatcaggcagtgcctgctcgacgtcactgggccgctcggcatcgacgtggtgacatggaacgacctcttctgggcggtgcactgtggaggccgcgccatcttggacagcgttgaggcagctctcggactgggatctcagaaagctagcagccagtcgccatgtgctgagagagttatggaatctggtgtgcaaggggagggggtgaatcaaagtaatgagatagattcagaaagcaattcatttgacaagaacgatgacatgtctgaggatgaaatgactgtcctaggtgggagagagattgatgttgtggaatcaaataatgatgacaaaagaaaagccaagaaaaggcgtaagggggtgaaagtaaaggataacaactctaaatccaaagtgtgggaagtttttgataaagtgactattggagatgcatccgaggatggaaagaagacattaaaggcaaagtgcaagtattgtgaatcaggttctggtctccctactatcacatcccctagagattataatcatgagcaagttagaaaattaattgccaagatgattatagttcatgagtacccatttagaatgattgagcatacatggtttaacattgtcatgaagtatttgaatccacaatatgagttcattggtaggaaaaccattagagcagaatgcttgaaagtgtatgagtctgaaaaagaaaaactgtcaacaggtgtgtaa

SEQ ID NO: 34101 - DNA, 900 bp, Zea mays
  Peptide Sequence Number=SeqID_75880
atggctactgtggctgaggatatcattagtgacgccgaggaaggggatgattggacacaaccccatatgactgcaaagatcaacaacaatgttgatgacgatgacggtgtcgtatttgaagacgatgctgatgagaacgagggatacctattcgctgggcaatatgaggataccgatgaggatataaagatcgatggtagtcaagatgaatcgagtgccattgatgttcctgacccgtacgacaaggtgtataacaacatccctgaagaaacccatatgctaaagactgttcccaactgcggttattgcaccgcgaagaagtttgagtatgagacacctggtttttgttgtcgtggtgggaaggttgagctagccccactggagacccctccccaactcaagaggttgtgggatagtacagactctgatgctaggcactttcgtgataacattaggttttttaatggccatttctctttcacttccctatactgttgcctcgatagtatgacaactaatgtaagggattctggtatatacacgttccgagcacagggcatgatgtatcacaatatcaagtcatttggtagggatggtggggcagagcataaacaccttgagctttacttttatgatgatgatcccactctcgagcatcggtaccgtaagtgtcgcgaagagcatcaacagaaagacaaagaggttattcgacagatagtcgacatactacgtggaaacccgtactccgagcaccttaggaccatgggtcacgttgagaaccttgatgactatcgtatcgcgttgaacctagaccagacgttgaaccagaagacatataacacacctctcacttcggaggtggccactgtctggatcgaagggagcgaagggcgaggctag

SEQ ID NO: 34102 - DNA, 4788 bp, Zea mays
  Peptide Sequence Number=SeqID_75881
ggtttctttatggagaacggagaaccaacagaaacagatcagatggaacataatgatggacgcacaccattgacaaacatctcaaacaccattactatagctgatgaaaatggatcgaaaaggcttggtccaaatgtcgatgctaaggaacttagtctttcagatggctgtagcacaattgatttcacaaactttgcaacacaagttccaaatgtgaatcgagatgatgatagcgattggttgcataggaatgagacattcaagtcagacgatgttttcacaacaagagaccttctgacaccaggcggtgtgcatgaaactgttggtaacacgcctaaccataatttgggaaggactgcctactttagagagcggtacaaaaacttaactccagccgagagggagcttaatcgtgaacgccttaggttgtataataatacaccaaagcggaaagggtcaaagatagagtacataagaaaacgtagagcactgttggctgacacattgagtcaggagtccatcgccatggagtccccaacatatacccctgaggttgtacaccctacaacagatgcaattgaacctaatggatccgctcttaccccctgcgactgggttatccctgatatcgccagtaacccgttcctaccagcttcaacacagaccgaggatgccgattcactgcgtatgtctactagaccactaagacgtaaacaacatgtgccacgtggtgaaagacaagctatcttagcccgtcgaaaccggcaatttgaagcatccatttcaaggaacatggctactgtggctgaggatatcattagtgacgccgaggaaggggatgatcggacacaaccccatatgactgcaaagatcaacaacaatggtaattactatcatttttatccccccttttatcctgaatgcccagttgatgacgatgacggtgtcgtatttgaagacgatgctgatgagaacgagggatacctattcgctgggcaatatgaggataccgatgaggatatagagatcgatggtagtcaagatgaatcgagtgccattgatgttcctgacccgtacgacaaggtgtatagcaacatccctgaagaaacccatatgctaaagactgttcccaactgcggttattgcaccgcgaagaagtttgagtatgagacacctggtttttgttgtcgtggtgggaaggttgagctagccccactggagacccctccccaactcaagaggttgtgggatagtgcagactctgatgctaggcactttcgtgataacattaggttttttaatggccatttctctttcacttccctatactgttgcctcgatagtatgacaactaatgtaagggattctggtatatacacgttccgagcacagggcatgatgtatcacaatatcaagtcatttggtagggatggtggggcagagcataaacaccttgagctttacttttatgatgatgatcccactctcgagcatcggtaccgtaagtgtcgcgaagagcatcaacagaaagacaaagaggttattcgacagatagtcgacatactacgtggaaacccgtactccgagcaccttaggaccatgggtcacgttgagaaccttgatgactatcgtatcgcgttgaacctagaccagacgttgaaccagaagacatataacacacctctcacttcggaggtggccgctgtctggatcgaagggagcgaagggcgaggccagttcagcaagagtgttatgctccatgggaaggagagttcaagccactgcatccgctcataccatggatgctacgatgcactatcatatccattgttcttccctagaggcgaacttggctggcacggaaatatcccaaaggttggagtatccatggacgaagtggatgcataccgtgcgacacatagggcaagtaatgcaaatgatgaagatgcggaatctcctagccatttatgtgtgtctgtacgtgactactactgctacaaattccagattcgccccggggtattcaatcctatacttcatggaaagcggctttttcagcagttcgcggtcgacacgtacataaagattgagaactctcgtttagattacatacgcaagaatcaggatcggttaagggcagacctgtaccagggcttggtggatagcatgctagatggagatattagaggagagaaggttggcaagcgaactgtgctgtcgacgtcgtttattggcggtcctcgtgacatgagacgtcggtatatggatgctatggctctggtgcggaagtttggtaaaccagacatatttcttaccatgacatgtaaccctaactgggatgagataaggagggagcttctccctgggcagacaccgcaagatcgtgcggatcttgtagtgcgtgtctttcatgcgaagctacaagagttaaagcatcggctgactaaacaggatattcttggtaaggtccgagcctacgtctatgtcgtggagtttcagaagcggggtttgccgcatgcccattttctacttataatgcagaggaagtacaagctcacatgtcctgagcagtacgaccttttgatctcagccgagatcccaagcaacaagtaccctgaactacgaaagatggttatcaagcatatgatgcatggcccgtgtgggtcgctaaaccctaactgcccatgcactaagggtcgtaaatcgtgcaagaatcattaccctcggcctttcagtgacacaaccttgcaagggaaggattcgtaccctatttatagacgtcgtgacgatgaccgtaaagaaaaggtccgagggtgcgaactggacaatagatgggttgtcccttataacccatacctccttcgtctcttcaactgccacatcaatgtcgaggcatgtgggagcatcaaggctgttaaatacctgttcaaatacatatacaaaggccatgatcgtgcgtttgttgttatgagagatgcgagcaaggcagatgatgatgttgatgagatcaagcagtatagagatgcaaggtgggtgactcctccggaagccttgtggaggatatacggctttgagcttagtcagatatctccacctgttatgcagcttcaactccatcttccaaacatgcacatggtggcgtttcacgagcggcaaatggtcgagcgagtcgtcaaccgtccaggtgttgataggtcgatgctcacatcatattttgaggcgaataggtttaataaggaggcttgtggcatcctatatcgtgacttccctgagtggtacacttggcagagtggtaagggaaaagtatggcaacggaggaaacgagatacaggtggacaagtcggtaggatagtctctgctcatccggctgagggggagcgctactatcttcgtgttctcctaaaccacgtgactggcgccgcctcctatgtggatctaaggacagttgatggtgtcaccctaccgacttttcgtgaggcagcagagagaaggggactacttgagtcggacaacacactagatgagtgtctcactgaacgtgctcttttccagatgccatcgtcgctgcgacggctttttgccacaatactggtttactgtgagccaagcgatgtggctgtactctggcagaaacacaaagattctatgtcagaggactatcaacacaagagtcagaacaaaactcatgttgagcagatggtattgattgacattaggaacatgctgcagtcaatgggaaaggacataaagacattccctctacctcctatgatcgacgcgtatgacgatgctattggtactgctcgagaggtttacgaggaggaaagtatccaaccgacagtggaagatgtggctcttaaagactctcttaacgaggaacagagggccgcctatgataagattatgtctaccgttgacaccgatcagggcggattattctttgtggatggacctggtggcaccgggaagacttatctatacagagtactgctcgcgacgctacgcaaccagggcaagattgcagtggcaacagctacatctggcgttgcggcttccataatgcctggaggaagaaccgcccattcacgcttcaagataccactcgctattgacgatggcgctgtatgtagcttcacgaagcagagtggaacagcagagttgctacggaaagcatctctcattatctgggacgaggcttctatgactaagagacaagccgtggaggcactggacaatagcatgcgcgatataatgggtcgccccgcactaccatttggtggtaaaaccattgtcttcggtggagatttcagacaggtcttgcctgttgttcgtaaagggtcaagggctcaagtggtcgcgtcttcgctacgaatgtcttacctatgggagtccatgtcccacttaaagcttgttagcaacatgagagcaaaaaacgacccttggtttgcggagtttttgctgcgcgtaggcggtggaactgaggaaacaaatagtgacggcgacattcgtcttcctgatgatgtgtgtgtgccttacagtgggagtgacaacgatcttgacaacctaatagactttgctttcccaaatctcaacgaaaatatgtctgattccacctacatcacttcaagggcgatactgtcaacacggaacgactgggttgatatgataaatgttaagatgattgatcgttttcaaggggagcatatggtgtatcatagtttcgatagcgccgtggatgatccccacaaactactacccacccgagttcctaaacacattgacgcctaa

SEQ ID NO: 34103 - DNA, 5883 bp, Zea mays
  Peptide Sequence Number=SeqID_75882
atgctaaagactgttcccaactgcggttattgcaccgcgaagaagtttgagtatgagacacctggtttttgttgtcgtggtgggaaggttgagctagccccactggagacccctccccaactcaagaggttgtgggatagtgcagactctgatgctaggcactttcgtgataacattaggttttttaatggccatttctctttcacttccctatactgttgcctcgatagtatgacaactaatgtaagggattctggtatatacacgttccgagcacagggcatgatgtatcacaatatcaagtcatttggtagggatggtggggcagagcataaacaccttgagctttacttttatgatgatgatcccactctcgagcatcggtaccgtaagtgtcgcgaagagcatcaacagaaagacaaagaggttattcgacagatagtcgacatactacgtggaaacccgtactccgagcaccttaggaccatgggtcacgttgagaaccttgatgactatcgtatcgcgttgaacctagaccagacgttgaaccagaagacatataacacacctctcacttcggaggtggccgctgtctggatcgaagggagcgaagggcgaggccagttcagcaagagtgttatgctccatgggaaggagagtttcagccactgcatccgctcataccatggatgctacgatgcactatcatatccattgttcttccctagaggcgaacttggctggcacggaaatatcccaaaggttggagtatccatggacgaagtggatgcataccgtgcgacacatagggcaagtaatgcaaatgatgaagatgcggaatctcctagccatttatgtgtgtctgtacgtgactactactgctacaaattccagattcgccccggggtattcaatcctatacttcatggaaagcggctttttcagcagttcgcggtcgacacgtacataaagattgagaactctcgtttagattacatacgcaagaatcaggatcggttaagggcagacctgtaccagggcttggtggatagcatgctagatggagatattagaggagagaaggttggcaagcgaactgtgctgtcgacgtcgtttattggcggtcctcgtgacatgagacgtcggtatatggatgctatggctctggtgcggaagtttggtaaaccagacatatttcttaccatgacatgtaaccctaactgggatgagataaggagggagcttctccctgggcagacaccgcaagatcgtgcggatcttgtagtgcgtgtctttcatgcgaagctacaagagttaaagcatcggctgactaaacaggatattcttggtaaggtccgagcctacgtctatgtcgtggagtttcagaagcggggtttgccgcatgcccattttctacttataatgcagaggaagtacaagctcacatgtcctgagcagtacgaccttttgatctcagccgagatcccaagcaacaagtaccctgaactacgaaagatggttatcaagcatatgatgcatggcccgtgtgggtcgctaaaccctaactgcccatgcactaagggtcgtaaatcgtgcaagaatcattaccctcggcctttcagtgacacaaccttgcaagggaaggattcgtaccctatttatagacgtcgtgacgatgaccgtaaagaaaaggtccgagggtgcgaactggacaatagatgggttgtcccttataacccatacctccttcgtctcttcaactgccacatcaatgtcgaggcatgtgggagcatcaaggctgttaaatacctgttcaaatacatatacaaaggccatgatcgtgcgtttgttgttatgagagatgcgagcaaggcagatgatgatgttgatgagatcaagcagtatagagatgcaaggtgggtgactcctccggaagccttgtggaggatatacggctttgagcttagtcagatatctccacctgttatgcagcttcaactccatcttccaaacatgcacatggtggcgtttcacgagcggcaaatggtcgagcgagtcgtcaaccgtccaggtgttgataggtcgatgctcacatcatattttgaggcgaataggtttaataaggaggcttgtggcatcctatatcgtgacttccctgagtggtacacttggcagagtggtaagggaaaagtatggcaacggaggaaacgagatacaggtggacaagtcggtaggatagtctctgctcatccggctgagggggagcgctactatcttcgtgttctcctaaaccacgtgactggcgccgcctcctatgtggatctaaggacagttgatggtgtcaccctaccgacttttcgtgaggcagcagagagaaggggactacttgagtcggacaacacactagatgagtgtctcactgaacgtgctcttttccagatgccatcgtcgctgcgacggctttttgccacaatactggtttactgtgagccaagcgatgtggctgtactctggcagaaacacaaagattctatgtcagaggactatcaacacaagagtcagaacaaaactcatgttgagcagatggtattgattgacattaggaacatgctgcagtcaatgggaaaggacataaagacattccctctacctcctatgatcgacgcgtatgacgatgctattggtactgctcgagaggtttacgaggaggaaagtatccaaccgacagtggaagatgtggctcttaaagactctcttaacgaggaacagagggccgcctatgataagattatgtctaccgttgacaccgatcagggcggattattctttgtggatggacctggtggcaccgggaagacttatctatacagagtactgctcgcgacgctacgcaaccagggcaagattgcagtggcaacagctacatctggcgttgcggcttccataatgcctggaggaagaaccgcccattcacgcttcaagataccactcgctattgacgatggcgctgtatgtagcttcacgaagcagagtggaacagcagagttgctacggaaagcatctctcattatctgggacgaggcttctatgactaagagacaagccgtggaggcactggacaatagcatgcgcgatataatgggtcgccccgcactaccatttggtggtaaaaccattgtcttcggtggagatttcagacaggtcttgcctgttgttcgtaaagggtcaagggctcaagtggtcgcgtcttcgctacgaatgtcttacctatgggagtccatgtcccacttaaagcttgttagcaacatgagagcaaaaaacgacccttggtttgcggagtttttgctgcgcgtaggcggtggaactgaggaaacaaatagtgacggcgacattcgtcttcctgatgatgtgtgtgtgccttacagtgggagtgacaacgatcttgacaacctaatagactttgctttcccaaatctcaacgaaaatatgtctgattccacctacatcacttcaagggcgatactgtcaacacggaacgactgggttgatatgataaatgttaagatgattgatcgttttcaaggggagcatatggtgtatcatagtttcgatagcgccgtggatgatccccacaactactacccacccgagttcctaaacacattgacgcctaatgggctaccacctcatgttttgaagctcaagattggatgtcctgttatattgctccggaatatagaccctgcaaatggactttgcaatggcaccaggctggtcgttcgtggcttccaaagaaatagcattgacgcagagattgtactgggtcaacacgttggaaaacggattttcctatcgcgtataccgttgtgtccctccgatgaagagatgatccctttccagttcaaaagaaagcagtttcctgtacggcttagctttgcaatgacggttaacaaagcacagggtcagactattcccaatgttggtgtatacttgcctgaaccagtgttctctcatggccaactatatgttgctctatctagagcgacggcccgatcgaacataaagattcttgtcatcccagctgtcgatgggaggaaaaagttaaggaagggtgtaaagaaaacccccaccgtagattgtgggacatatatcaagaacatcgtctacaaagaggaaatcccttgtgaaccaagggtagaagtcgttcttattgatgatgcctttgttgaaaggaagtggatggagtgtttatttcagccgagcgcatatttaggtgacgaggttatagactgttacataaatttgataaaagctcaaaagcatctaaagtgccgatctggaggtcgcgttcacatagaaaatgctttccagttcaatttcctgaagcgagatggtgatcttgaaattaaaacagaggagctatatccaattaaagacatgacacacatatgtagcgctgaacgaagggtgttactttacctagaccatgacatggtgtttattccgataaacatccgagagacgcattggtatcttgctgtgatccatgcaagaaatatggagatacaagtgctcgattcacttggtacttcacaagaccgcaaagacctcactgactctattaaaggactgcaaagacaaatagatatgatatctcaacgtaaggagttaaaagaccacaggtggccagacctccaagttgcttcttggtcgctcagagaaatagacatgggatatgcaaagcagacagatagctcttcatgtggcctctttcttttgaactatatcgaatactggacaggggatgaactgtctgacagttttactcaggatgacatgtcacactttaggaaaaaaatggctgctatattactatcttcagacctgaataagagaagggggtgtctgttatacaaaaatgaaaaagaagttgactctggaagcccatctgatgttgagatattagaaaacccaacagattctaataagaggaaactactccacgtgcttgatgatagcgaagtagtgtttgaagatgaggaaggccctattactcaagcagacttgcaaaggtggtttgttgatgattgggataaaagagctcctgtaaaagtctctaacgatggttgcaccaatgactttttaatggttggtctttccacaaaggacatgccagtgaccaaagccgattcaatagatgttttatgtgattatatcatggcaatagaagacgatacgacactagagagaacatgggtgcgaagtttcaatccttttaagatagaaatatctgtcaaagacctgcaaaacatattaacgacaactcaagatatgattctaagatgttttgatatggctgttcggctgcttgccaataaagagtcacgtaaaccgaaagaagaaatcataaataatagaaagcattatatggacatgcgtttttggagaatggttggttttggtaaaataccaaagtaccatcaggatcctacaacagaagagttggccaaaacactagattgttggccatcaatgaattattatatcacgggttgtagatatgttctcatgccatggaaattcaatggatgtcacgcccttttcgtaatagatcatgttaaaaagcatgtgacttttatcgattttacaccgactcaagattggtgtaaacacatgccatacaagaggtttaataccagctaccttgttctacaagctatggccatgtgggggaatgacagacgactgaaatttgttggggatgcaaaaactcttcgaagaaactttgtgattgatcttttaagttatgaggacaattcgtgccgatatgccatccctgcaaacatacaacaaagacttgtcgatatcgctagaaaggattag

SEQ ID NO: 34104 - DNA, 192 bp, Zea mays
  Peptide Sequence Number=SeqID_75883
atggctcaccggagttcctccggcccgcccgaggctttcttaccgccgttctcccctatctgcccgtggattcatggccctttccccgccatcgagttcgccgtggcaccctcttcctctctgcccaactccggcgacctcggagccaccctagcccgcgcctacctcaactccggattgaatatgaactaa

SEQ ID NO: 34105 - DNA, 249 bp, Zea mays
  Peptide Sequence Number=SeqID_75884
atggagttcgccgtggcaccctcttcccctctgcccaactccggtgaccctggaggcaccctagcccgcgcctgcctcaactccggcgacctcaccgccgcggagaggagcgacaccgcccacagccatctattttcccttgacaacgagcagtccgaagttcctaagtgtgtagttggagacctccctgagcaacaacctggtgaaggcaagtgtcctctgacctattatgtcctacatactttatga

SEQ ID NO: 34106 - DNA, 240 bp, Zea mays
  Peptide Sequence Number=SeqID_75885
atgacgagcgcaatgcaagcaactgaaatagcacgaaaaatactcacaatgcaggctcctatttatatgttcagagccccacagtttggtgggtcccgcagcataagctatcacaggaaacttcgtcttcaagatacaagcttctcccttatgacgaaggcacacaagatgaagacatccaaagaggataagagtaaacgtcgaagctatcaccagatggacaacttcgactcgcaatga

SEQ ID NO: 34107 - DNA, 165 bp, Zea mays
  Peptide Sequence Number=SeqID_75886
atggacttaccaattagcttaactaagcttgaccctaatttgctaagtgtaccccaaaaatcttcagtagatatggttgatggtgtgacttggcctactaccctgccactggattggacggtcgagtgggatgctgctccagcaggagaggagcaggagaagtag

SEQ ID NO: 34108 - DNA, 207 bp, Zea mays
  Peptide Sequence Number=SeqID_75887
atggcggcagacggggtcagtggagcattgtatgccaaggcgactcagctagtgctttggcaaaccaaacccctcagccaaatagttgcatggtctagaggtatgcttcaggatatggttgatggtgtgacttggcctaccaccctaccactgggttggacggtcgagtgggatgctgctccagcaggagaggagcaggaagagtag

SEQ ID NO: 34109 - DNA, 420 bp, Zea mays
  Peptide Sequence Number=SeqID_75888
atggggctcggtgtatgcggctcgctctgccaaggtggctatgagatcgatggttctggttatggctatggtgctgctagtccactacagccaaacaggatacttgctgagtatgttgatgtgtactcacccttgctctacacaccaaaccccccccatccccaggttgtcagcattgcaaccactgctcaggcgaagatgaagttgtggaaggagactttcaagagttccaagactacgatgagttctaggcgtgggttagcggcaacccctagtcggctgcctgtgaaggccgcgtttatctacgtttctttcccgcacttaggggtgaaaacgggcggatacggacggatattagctcatcctgtatcctaccctaatgtatttaaaacggattcgggatcggatacggatagttag

SEQ ID NO: 34110 - DNA, 306 bp, Zea mays
  Peptide Sequence Number=SeqID_75889
atgtcggaaagcgcccggccggcggtcgcgcggaagatcgtgaagtcgctacagcggtgcacgcggcactctctggagcgtccgcccttcgagactgccctcggcgagtattgccagttcccccggccgtcgttgtcacctgccgctgcagcggcagcgacctccggcggtcgcggagaggttgatgaggggatcttcgtcaggacgccggctgccatgtcttgtgctggattctacaaatatgtccataggggtgaaaacgggcggatacggacggatattagctcatcctgtatcctaccctaa

SEQ ID NO: 34111 - DNA, 546 bp, Zea mays
  Peptide Sequence Number=SeqID_75890
atggcgaacggcgaggcgaggctcaagacacagcttgctctagcgcgcggtgctttgcaagcgagctcggatcggcgactcacactggcgagggcgatcaacgacgagccaacgtggaggtggggctgcacacgctgggagactcgacggcagcggctgagcgagcgagacggctccaggcgcgacgtcgagtgcgggcgagacagctctgcggtcatccagagcaggcgactggcactcgaccgacgcaggggcatcaccggaggaccgagatcggctgggatggggctggccgccgccatggccacggctaggggctggagccggccggctgccgtgcgcagagacccgaccctgccttgccgcgcccgtgggggcgatctgcgcagtggcctgagggcgtgcggcacccaggcacgaagaggcggcacgcgcaacgaaaccgcccacgcacgcaaaaaaagtctgggcgctagggaggacgaccggcatggctggggcggcttgggcgctgcccctgcttccactgcacgcgcgatgggctag

SEQ ID NO: 34112 - DNA, 113 bp, Zea mays
  Peptide Sequence Number=SeqID_75891
atggcgaacggcgaggcgaggctcaagacacagcttgctctggcgcgcgatgctttgcaagcgagctcggctcggcgactcacactggcgagggcgatcaacgacgagccaac

SEQ ID NO: 34113 - DNA, 483 bp, Zea mays
  Peptide Sequence Number=SeqID_75892
atgacgaagcagcctatgaaggtgtacaaatgggacctggatgagacacttattttgctcaagtcacttctggttggctcatatgctagggattttgaaggcctcaaggatcgtgagaaaagtactcaaacaaggaagcgatgggagaacctcattttagaactctgtgatgtgcacttcttttatgaggagcggagtgccggtccaagagagattcaccaagccttttcagtcatgccaggagcatcatccaaggtgttccaagacaagttagagctccagcccatgtttgtcgcccaatggaaatttgctcatgttacattcagtaagccagaatacctccaagattcagatattgtaatgaacagattccataaacagagacctgtttatggaggttgggaacaacaccatggattggagcatacatccactacccaaaaaaggtcctacttaggcaacaaccagatgaacaggatatga

SEQ ID NO: 34114 - DNA, 360 bp, Zea mays
  Peptide Sequence Number=SeqID_75893
atgacgaatcagcctatgaaggtgtacaaatgggacatggatgagacacttattttgctcaagtcacttctggttggctcatatgctagggattttgaaggcctcaaggatcgtgagaaaagtactcaaacaaggaagcgatgggagaacctcattctagaactctgtgatgagcacttcttttatgaggagatgttccttgtttggtttactggttttttcgattctggtttcgcagcggagtgccggtccaagagggattcaccaagccttttcagtcatgctaggagcatcatgtacaccctcaaggagaaggggattgacatggtgattgcttctcgctccccacctcggacatag

SEQ ID NO: 34115 - DNA, 1056 bp, Zea mays
  Peptide Sequence Number=SeqID_75894
atgacgccatccgcgagatctacaaccacaactgcaccggcctctccttcgaggagctctacagggagggctgggagagcacgacgccaccaccataacttcctgggtggcattcaaagagttcatattataaaaggatgtgtagatggatcacttctattagaactgtttacaggagatggagaaggaacaatgatcgctaggtttaggaaaatatacaatttcttatttgatgaagactttcttgctgaaaaagaagataagcagttgacgtctcatcctccaaagaacattgaatcgaaaatcttgcgtgagcatatcaagaaagagagggaggcagcaaaggctggaaaacgatcatactatctgaagaaatctgaactttgtgaaaggaagctggtgaacaagtacaacgagctcaaggtaaagtctacaaggtttaaggggatgcttgtaaatattgatacaaacaatggtgatcctcaagttgggtggacttgtatagttgcatctggtggtttcaactttgatgccaagttgtcagtcccattgtcatatgattcttgttctgtgaaaaaatggaattcaaccaacataggattcttttgtggtaataggcagagggaaagtactaacgttgaggacatgtttgttgctcatatctctgaaattgacaccctagcccatggccttcacaacgttgccaagctgattgagatgatctcttctgcaagcggtaccagagcgtctggtagtgagattggtgccttgattgaggaaaggagacttgatatgctagaaaagaaggctctagagtgcagtgagcccactgttccatccagcaagcagaactgccagagattctatttcagtccgctctatagatggtgccatgtccatagctctagacacagtggaaagagaagatgccaaggatggaatagtgggctcacaacagtgtatccacggatgacatatttaggatttgtgttctatacaccacaacatatggttcaatttgtttctctatacgtgaatggtttgcaaaaatattga

SEQ ID NO: 34116 - DNA, 1056 bp, Zea mays
  Peptide Sequence Number=SeqID_75895
atgacgccatccgcgagatctacaaccacaactgcaccggcctctccttcgaggagctctacagggagggctgggagagcacgacgccaccaccataacttcctgggtggcattcaaagagttcatattataaaaggatgtgtagatggatcacttctattagaactgtttacaggagatggagaaggaacaatgatcgctaggtttaggaaaatatacaatttcttatttgatgaagactttcttgctgaaaaagaagataagcagttgacgtctcatcctccaaagaacattgaatcgaaaatcttgcgtgagcatatcaagaaagagagggaggcagcaaaggctggaaaacgatcatactatctgaagaaatctgaactttgtgaaaggaagctggtgaacaagtacaacgagctcaaggtaaagtctacaaggtttaaggggatgcttgtaaatattgatacaaacaatggtgatcctcaagttgggtggacttgtatagttgcatctggtggtttcaactttgatgccaagttgtcagtcccattgtcatatgattcttgttctgtgaaaaaatggaattcaaccaacataggattcttttgtggtaataggcagagggaaagtactaacgttgaggacatgtttgttgctcatatctctgaaattgacaccctagcccatggccttcacaacgttgccaagctgattgagatgatctcttctgcaagcggtaccagagcgtctggtagtgagattggtgccttgattgaggaaaggagacttgatatgctagaaaagaaggctctagagtgcagtgagcccactgttccatccagcaagcagaactgccagagattctatttcagtccgctctatagatggtgccatgtccatagctctagacacagtggaaagagaagatgccaaggatggaacagtgggctcacaacagtgtatccacggatgacatatttaggatttgtgttctatacaccacaacatatggttcaatttgtttctctatacgtgaatggtttgcaaaaatattga

SEQ ID NO: 34117 - DNA, 699 bp, Zea mays
  Peptide Sequence Number=SeqID_75896
atgaaagctgaagatccccagattcttgaaggtcacccggtctctaccagaggagaaaagaagacttgggaattaccagaaggagccatagtcttggaaggaattccagtctcccctcaggctatggataagcaagagcaccccgagtcctcccaagatcctccgccagagttgtttgagcccctcaccatgaagaagattctagcaccatcccttgaagtcaaggaagaagctgcaagcaccccgccagcaccgccgccctctgaggaacaacaagagccagtccagcttgaagaagagtttgaccccgtgctaccatctcagtcgccgccagaagaagtcatcaacatcagctccctcttgacccatccaggagatgtctcagattgcagttgtgcaccagccttgccagaagagaagctgcctggtctgaagttagttatacctagtcctctgcgtgcattgggtagtgaagtttttcttcactttggccagagccctgcatgtatgagagatctaatcctcaccttatgcttccattctcatcttaacccacctcaagagaaaagtgccttacccaagaagataccgagaagcttacccttgaagcctggaacaagctacagaagaaaccagtccagccgctcagtcaaaaggaccgaccgtgagaatcaaagcactgcccctgagtcaaagtaa

SEQ ID NO: 34118 - DNA, 243 bp, Zea mays
  Peptide Sequence Number=SeqID_75897
atggagcaggtgctacgcggcagcgggtgcgacaaggggagggggcctggtgttgccggcgatgatggcggcggtgggtgcgctgcaaagggggagtggggcggtggtagtgcgctgcaaaagggggcgtggggcggtggtagtgcgcatggaggcgggcacgagtgcgaggggcacggggctctggccaaagtgaagaaaaacttcactacccaatgcacgcagaggactgggtataactaa

SEQ ID NO: 34119 - DNA, 984 bp, Zea mays
  Peptide Sequence Number=SeqID_75898
atggtcggcagtgcaagtcaaagtgcttttgttcctcatgtggcctcaaatgcagatagcactggtcttgcgtctgctttatcagctgctgcagattgtaaaacccttgctgaaaaggcaattgcagcactccctcctgagcttagtgcacaagcaaatgaccccaagagaaaggcaaggtcacaagacccaggatggcagtttgggtggtggccagacacaacaaagaaggattttgttcagtgtgtcttctgtaagaagattgtgccatctggaatcaagaggtttaagcagcatctagccggtgggtttggtgacaccatgaagtgtgctagagtaccagaagtggtttcaaaggagatgcacacctatctgagaaggaacatgagggttatgattactgctgatggtgatgaaggtgaagaggaaggggagcagattgatgtatgtcccctaccaagttctgggacaaaaaccaagcaagcaaaaaagcaaattgctcaagcttccatgtcttcatttgttgtagcagctcctataaaaccaaatacacagaaggcaagcaaatcaatccaaacaaaaaagaggaaccgactagaacaccagaggcttaataaattggtctatgccagttacaacaggaagatggaaaataggtttcaaacactaagggagctgggatccaaaggaaaaagacgcaacccactgatgcttgaagagttcatgtgggaaaatgaatgggttgaagaaaatgaagatgatggtgctggttcgtcttctcagcctcaacgaacatatgttaggacaaggaagcattctagaaatacagcagctcaagatattggagaagaggatagtgatgatcaagaagatggtgttgctgcagcacaagcagaacaacaacaaacccaagaagcaactggatacatggacgaagatggtgctgctgctgatgcattttgtttggatgctgatctgctctag

SEQ ID NO: 34120 - DNA, 360 bp, Zea mays
  Peptide Sequence Number=SeqID_75899
atggtgcctgcggccaggcctgactgcctgtcagcctcactctgtcaggtggcactgcagtcggagcggcgcaggcggcgctgtctttctgtcaggccgctttatgctgatgggggttaccaactgagaattagtagacttgagggtacccctaattatggtccccgacagttagattttaatggtggttgtggacgtgctaataacgttgaggtcttattccctgagtcaaatatggtcagcagtgcaagtcaaagtgcttttgttcctcatgtggcctcaaatgcagatagcactggtcccgcgttaaaaaagacgagcgcaatgcaagcagctggaatggcacaaaaaagtttataa

SEQ ID NO: 34121 - DNA, 447 bp, Zea mays
  Peptide Sequence Number=SeqID_75900
atggatgacttcgaggagttccaggaatacaacgagttccagtttactttactggcaaacccccagtcagctgcctatgagcaggagcagcaggactcttccccctcgcctcagcgggaggtggagtctgggagaccgccttcccctgcacctcagccagagatgccccctgcaccacctcagggcatcccggctgttggaggagaccctgacggtgacggagacgacgacgacgccggtggcagttcaagccacggcatgaagcgctcggaggagccagagccgaagggatggatcgctagacccatcactcgtgacgccgctcgcgggtatcacttccacgatgccctcgataccctgttgcatcgggctttcaaccgacacacttggtctattgagtaccgttgtgtagtctaccagcatcgttgcgggctatacccggactag

SEQ ID NO: 34122 - DNA, 243 bp, Zea mays
  Peptide Sequence Number=SeqID_75901
atgggccggcaaaggggaatcttggcccagctgcgggggaaggcggcctcccagactccacctgctgctgaggcgagggggaagagtcatgctgctcctggcgtcggcgttcctgctcctcgtgcaggcgacgatgcagtctctccagatgactggactgacctggcaccgtgcgacgcagtggacgctccgccagacgagaaggcaaaaaggggatcactgacttacgtgtcgtgcatctaa

SEQ ID NO: 34123 - DNA, 792 bp, Zea mays
  Peptide Sequence Number=SeqID_75902
atgcaggaatcccttgcaggaccgccatcacagcaaaatcctcccgagggccttcccaggaatcccttgcaggaccgccatcacagcaaaatcctcccgagggcctccccaggaatcccttgcaggaccgccatcacagcaaaatcctcccgagggcctccctacactgaccactcccctactgcccttgcccctttcaggaacaagaatgggtcaatttggacaagtctctggactgagcacatgaaaacagggaagtacaggggtctaaccataaaactatctcagacacagaacgtccctgttacggacggcgggttgattactgtgaagtacaggggctcttatgtgaaatgcggcggtgaaggggtacgggtaaaccccagccgcccgatgaagaatcaagagtctagattagaccgtgaaccgcggagaggaaagcgaacccaacagagggacccttaccggaggattaacagcgcggttaccccgaccacgacgcgaggtggtgttgcggcggagagaaggttccggcgagaaatccccagagcccctgtggaaccccgactgcaagctgaggccgagggcgacgttggtggtactctctgctcacagttcccccctcgatttggcgttggctctcggttccagcgatggcggcgaactggattttttttcctcactgcgttaatggcggaagcgcagggtcttcatttatctactggcgccgcgtttgttaccgagaacgcagggaagaagataggccccggcgagttcggcgcgggtggttga

SEQ ID NO: 34124 - DNA, 351 bp, Zea mays
  Peptide Sequence Number=SeqID_75903
atggatcttacacggtggcccccacctggcagtgacacagtgaaaaagaaaaagaaaagggggcgcaagtgggccgcgcgggagagaaggaggagatgggccagaatgggtacagtcggcccaggtctcctattcctaaaagtcactttaggcacaggatttcaaagtgtgaaatccatatttgtctttagaaggaaaaggaccgccatcacagcaaaatcctcccgagggccttcccaggaatcccttgcaggaccaccatcacagcaaaatcctcccgagggcctccccaggaatcccttgcaggaccgccatcacagcaaaatcctcccgagggcctccctacactga

SEQ ID NO: 34125 - DNA, 1005 bp, Zea mays
  Peptide Sequence Number=SeqID_75904
atgcacatatctctgtccgcagaatttgactactcggttggcccaacaattgttttattgagcaggttgatctctcagccaccagacaccagacacgcagccggggttggccagcgccagccaccaggccgccgtggctccgacttccaacgtcgtgccccgcctggcaaccgaccgcatccaccgcctcctggctggctgggcagggtagacacaaaggtctcatccagtgctccactcctccgcatccttttctgctccgagacacctgctgaagctggaagtctgccactggctgctgccatccactgcgggctcgatcgccacgccgacgccatccccgtcctcgagcgcgccgtcacagtccggcacaagaatcgtatgctgacagcgagcctgaggccggtgcagccgacggcgacgactaccagcagctgcagcctgtcgagcccgactagaggggtgagtggtgctgctcctgatgagatcgctggaggcttaatggagattcctgtaatctatgaggcacttggcgatctcgatgaggcccaaaagcttcttcatagggcactcaggcgagggctcatcgagggagtggagcattgttgccggtgttgtggcacaaatgggcgttctgtactacatggtgggaggtatgcaaattcggggaactcgttcaagggtgcagttgcaaagtctagggccattgtacagatagatggagtacacagcgacatatttagccctggtgctgaaagggggagccacacacttctgattcaagtattatttacccgctatgaattcaaagtcggcactcacgatggccttggacacaatcctgagcaacaagatgttgaaatactatttggacctggctatactggtcttgcggatcttgggaatagatactttgagaaacagagtttgaaagctgcatttgctactgcactagctgatccaacagtagacctaaacatgcaaatgcaccgaagggatctctga

SEQ ID NO: 34126 - DNA, 309 bp, Zea mays
  Peptide Sequence Number=SeqID_75905
atgccatgggaagtacagatagatggagtacacagcgacatatttagccctggtgctgaaagggggagccacacacttctgattcaagtattatttacccgctatgaattcaaagtcggcactcacgatggccttggacacaatcctgagcaacaagatgttgaaatactatttggacctggctatactggtcttgcggatcttgggaatagatactttgagaaacagagtttgaaagctgcatttgctactgcactagctgatccaacagtagacctaaacatgcaaatgcaccgaagggatctctga

SEQ ID NO: 34127 - DNA, 165 bp, Zea mays
  Peptide Sequence Number=SeqID_75906
atggccgataaaggcaaaggcaagggcatcgtcattggcgatcctcgcatgtcaattatatcacaaaaggagattgctcgaaaggcttcggacgagaaggctaaaaagtccgaagacgccagggggctgtgggacacctccattctattcattttgatccattga

SEQ ID NO: 34128 - DNA, 369 bp, Zea mays
  Peptide Sequence Number=SeqID_75907
atggccgataaaggcaaaggcaagggcatcgtcatcagcaatcctcgcatgtcagatatatcacaaaaggagattgctcgaaaggcttcggacgagaaggctaaaagcaaaaagactgttccacgtgatcggtcaacaaagaaaccccggtcacctgctaaaacaaaacggtcaaacaaaacgacccgaaaggcgacacaacaagcatcgcctattcattctatgagaccagggtactttccacctatttactcatcgtcggtatattatcctgttcaaacatggaatggcatgacgatgaatccatggtacatgtatagtccctttgtctatccaggctggggggcacctccattctattcattttga

SEQ ID NO: 34129 - DNA, 369 bp, Zea mays
  Peptide Sequence Number=SeqID_75908
atggctgataaaggcaaaggtaagggcatcgtcatcagcaattctcgcatgtcagatatatcacaaaaggagattgctcgaaaggcttcggacgagaaggctaaaagcaaaaagattgttccacgtgatcggtcaacaaagaaaccccggtcacctgctaaaacaaaacggtcaaacaaaacgacccgaaaggcgacacaacaagcatcgcctattcattctatgagaccagggtactttccacctatttactcatcgtcggtatattatcctattcaaacatggaatgacatgacgatgaatccatggtacatgtatagtccctttgtctatccaggctggggggcacctccattctattcattttga

SEQ ID NO: 34130 - DNA, 489 bp, Zea mays
  Peptide Sequence Number=SeqID_75909
atgatttacttaatgttgcatgatcgacagtcgagagaagatgctatagttggtgcggtggtagaggaccatgcgggagatgatgatggagatgatgtgggagacattgctggagacgatgttggtggatattcaacgggtgtggattctggtgctggtggagattccgtagctgggtttggatcttctcgagttaggagaactaggaagctacattctgttggaccacctccggagcttccacccgagtctcaggctttgataaagccaagtgaaaagacttggatcaatgactcgttcacaggcacaggacactataggcatgtgaacatggtccttggtattcttgttcgtctccattggcctggtcttgtgactttgtctagtggcaagtctgtcgccaccaccacttgggagaattatcgctatggcatctgtagaatgtttcacaacacacatacactagattgggatgcattctgggtatga

SEQ ID NO: 34131 - DNA, 666 bp, Zea mays
  Peptide Sequence Number=SeqID_75910
atgaagggaaggatgtcaaagaaaatgagatcttttgctcggagtttacttggtacgaggagcagatcaaggagtagctcgaggagcagcttgaggagtgaggacttagtgtttcagggcacaggttcttccatgagcagacacagagcattggtagaacatttgcctctagacgatcaacatgatgatgctaaaatcaagcgacagtcgagagaagatgctatagttggtgcggtggtagaggaccatgcgggagatgatgatggagatgatgtgggagacattgctggagacgatgttggtggatattcaacgggtgtggattctggtgctggtggagattccgtagctgggtttggatcttctcgagttaggagaactaggaagctacattctgttggaccacctccggagcttccacccgagtctcaggctttgataaagccaagtgaaaagacttggatcaatgactcgttcacaggcacaggacactataggcatgtgaacatggtccttggtattcttgttcgtctccattggcctggtcttgtgactttgtctagtggcaagtctgtcgccaccaccacttgggagaattatcgctatggcatctgtagaatgtttcacaacacacatacactagattgggatgcattctgggtatga

SEQ ID NO: 34132 - DNA, 546 bp, Zea mays
  Peptide Sequence Number=SeqID_75911
atggggaagcctgtcccatcactcctcatgctcctcctcagccgaggcagggtcccactcaacagtccaacccggtggcaaggtggacggccaagttatcccagcaaccatctcctccagagaacctgtaaaaattatgccacaagcaaggctgagtatactaatactcagctagacttacccggggcactccgtccccacccatatcaaccgtccccatcgattccccgtcagcagatcagggctcaccgccttggcgtacaatgcctcactgaccccgactggccgtcgtgcagtgaccgcacttgtacccaccataaccggaatgggagacctcgtctcaggtcgcgtgaggggcaaagtctactgccaggttcaatcaggttatgcataaaaccggggcttgccttccaaagcagtggcaggcaggtcctctggtgcaggctcgggtgctggatctggggctacctcctgagcagtacagtctatcgaaatgcaatgaacatatatgtcatgattatgcaggatttaataatattatgctaa

SEQ ID NO: 34133 - DNA, 816 bp, Zea mays
  Peptide Sequence Number=SeqID_75912
atggaagaaacacacctccacgtgttcgacgctttctgctcgcgccagagcacgctcacgcgcgcccccgcatgcccagcgccgcgcctgagccaaaccagcgtcgtggcccgcgcccgcgcctataaaaccctcccaggcttcgactacactcttccacgcacccccaaacctcaccggagtttagctcgtcgtcgtttgcccgtgcgcagagagtccgcggccgcccaatccccctgtcaccgtagaccggccattagagccattcccaaccccgcccatccctcggagaagactgtgcacacctccgtgaggctccccgagcgaggaatcggagtttgcttcgcaggagaggccagtccacgctcgccggagctctcaaccccgccggagtacgtggaccgggtaaaccactccaccatccttcgattccttgtgcacacggtcgctacgttaccccgtgaagctcaccgtgccctcggattgaaccagttcgccgtggtttggccggtatactcgccgccgacgaggacacccgcctgcgcgcgtggaccgggcgattccggccatccccgacgtcaagctgtacctcgacgtgaccgccagagcctccccgagccaaccccaccctccgccggacctccctcgccgccggataacttagaaaaactctacaaaaataaccccaagactgtaacctttgctgacggagagtacatccctcgtgcccggagcaaggagtctgcttcaggaggtagccccagatccagcacccgagcctgcaccagaggacctgcccgcccactgctttggtag

SEQ ID NO: 34134 - DNA, 408 bp, Zea mays
  Peptide Sequence Number=SeqID_75913
atgggttatgagaatactcaaacaagggagcagaaggtgtgggctgacctgaatcgcgctagccacggtgaggctgtttccacggtggcggagactggctttgggggaaattcgaaattgggacgcactagcgatcaactgaggatgattcttggtggttgggttcttgactaccctatggagctcgcggcgagtggattcgtggcctctaccgtggcggtcattccggtgatcaacggagaggctagagggagtcacggcgatgcggtggtgaggttgggacacgcggtggacaacggcgatggcacgacggcgatgagatccaatccgagggcgttgagaaaggggaggggtatcacggctggccagggtggcatccagctcaccggcggcaaggatctttactga

SEQ ID NO: 34135 - DNA, 522 bp, Zea mays
  Peptide Sequence Number=SeqID_75914
atggccgaggctcgggctacgcttccgaggtaccctaggacatttccgagaccagtgggaacgatttgtaatggaatcccaccggagggaggcaccgagcccttggaccctatcaaatgggaccgggtccagcaaatcacttgcaggaacgtttcacccgtcttgcagacattacagaacatcggagatgaagaaatgcggaagcgattacataacttacatttattaaaaacagtactatgcatagaaaaacatttttgtaaaatcagggtttcaaggaaggtaatcaagttcaaggaaggaggagcgagtggtggtcgtgaatttggacgagacacacggcggctggaggaaaggaaactttactggcgcaagggattcgtggcctctaccgtggcggtcattccggtgatcaacggagaggctagaggaagtcatggcgatgcggtggcgcggttgagacacgcggtggacaatggcgatggcacgacgacggtgaacagctttacccgcgggcggtga

SEQ ID NO: 34136 - DNA, 513 bp, Zea mays
  Peptide Sequence Number=SeqID_75915
atgaagctgtggaaggagacttccaggagttccaagactacgacgagttctaggtgtgggttagcggcaacccccagtcggctgcctatgaaggtcgcggttatctacgtttcgttttcgcactttgatttattatggctcgacttagacacactgcacgaaagtccgtcatccccttcttaccctcccgccttgctgagcgtccgcttcgccgtcccgtggccggcgccccctgcaccaccactgggcgccccagcctctggagtagccgctggaggagatctagatgacggaggtggtgacgacagctcgagccacgacaccgacttccctgctgaccaggagctggaaggatgggttgctcgacccatcactcgtgacgctgctcgcgggtgtcacttccacgacgcgctcgacaccctgctacgtcaggcacttaaccgacgtacttggtccatcgagtatcactgtgtggtctaccagcatagtcgcggggtctacccggaccgctag

SEQ ID NO: 34137 - DNA, 261 bp, Zea mays
  Peptide Sequence Number=SeqID_75916
atgaagctgtggaaggagacttccaggagttccaagactacgacgagttctaggcgtgggttagcggcaacccccagtcggctgcctgtgaaggccgcagttatctatgtttcgttttcgcactttgatttattatggctcgacttagacacactgcacgaaagtccgtcatccccttcttaccctcctgccttgctgagcgtccgcttcgctgtctcgaatggtcgttctaaggactatagacctctgtccctgccttga

SEQ ID NO: 34138 - DNA, 1104 bp, Zea mays
  Peptide Sequence Number=SeqID_75917
atgaagctgtggaaggagacttccagaagttccaagactacgacgagttctaggcgtgggttagcggcaacccccagtcggctgcctgtgaaggtcgcggttatctacgtttcgttttcgcactttgatttattatggctcgacttagacacactgcacgaaagtccgtcatccccttcttaccctcccgccttgctgagcgtccgcttcgccgtcccgtggccggacagtccagccacttggagagactgcaccaccgcctgcatgaggagcaggaacgagatagagtccgtgaggagctgctcccccgtgcttcctctggaggcgccccctgcaccatcactgggcgccctagcttctggagtagctgctggaggagacccagacgacggaggtggcgacgacagctcgagccacgacaccgacttctctgctaaccatgagccggaaggatgggttgctcgacccatcactcgcgacgctgctcgcgggtgtcacttccacgatgcgctcgacaccctgctacgtcgggcacttaaccggcgtacttggtccatcgagtatcgctgtgtggtctaccagcatagtcgcggggtctacccagaccgctgggaggcaacctgcttggtgcgccgtccggagaacagtctccagggtgctgaggtctgctcagagcactattctatctctgagcgggactcagctgaggcggccatgcaagatgctgcacggcgtgcgctttcacactactgctcggttctcggtggggtagctgacggtcttgacctgaagtattacccccgccatccatctggcagcacaggaggcgtgattgtctcacctgtcggtgagggcaatcctaggttgagcagcacagtcaacctagccgccgtgctaaacacggagctagaccatgcaccagacgagttgagtagggctcatgctgagatcgccctgctgcgggctgagcgcgcggaacgtcgtcacctggatgacggttcccccgctcccgttgggactcagcacccgtaccgctcacctcggcgtggacgccagtcttatggcaatcccgactgcaagaccaagataaatctagaaccatag

SEQ ID NO: 34139 - DNA, 855 bp, Zea mays
  Peptide Sequence Number=SeqID_75918
atggaggcccgggcccacatgtcatgtaaccggcgcaacggttactacgtgcaaggaaaccgcaccgccactcgcgccaatgtcgcgtctactcgactgcagaaccagtgccgcgactcgaggcagccctgcgcgtggcccaacagtgacaagcgacacctccggcagaagaagcgggcgccgtttcgcctctgtcatgatgaccgcgtcaaaaaaggctcgaaggctggcccctcggaagggttcgacagccgcctcagagcacgtagagtcagggatgaccctgggtatgtccgctacatggtcgaggctcgggctacgctcccgagaacctccaagcgagtgcccgcactccctttgaggctcggggctactgtccggtaccgtaattgggggtacccccaatgctccttaatccggctggaaaacatcttcagaacaaaccatacacggctgatgaagcgcggttcaagtcagggcctcgtctaccaagggacgcgacctcatccgagcccagcctcgggcgggaacaatagtcccggacggattcacgcctcgcccgaggcctcggacgcaacagggagctccgcctcgcccgacctcaggccttggcctcagcctcggcctcgggagaaggtctccgcctcgcccgaccccaggcctcggcctcagcctcggcctcgggataaggtctccgccttgcccgacctcaggccttggcctcagcctcggcctcgggagaaggtctccacctcgcccgacctcaggctcggcctcaggagaagtctccgcctcgcccgacatgggcctcggaccgactacgctacaggggatacatcattaccctactcctag

SEQ ID NO: 34140 - DNA, 279 bp, Zea mays
  Peptide Sequence Number=SeqID_75919
atggggagcgcccgcgttgctttcgtcttgctgctgttggaggagcgcaacttcgcggagggcggggggcaagctgagccggagctctacctcccgtacgggccggcgggccacctcttccttcagcattcaggggagagggcgctcaccggcctagcggagggggcgaacttcgacaatgcggggccgatcgaccgcaagcgtcgtcagctccagcatgcctggttcgctggctcagctggctctggcacagcttccggtgccacctcccactgctga

SEQ ID NO: 34141 - DNA, 978 bp, Zea mays
  Peptide Sequence Number=SeqID_75920
atgcactgcgcccttccaccttccgagcccccggatggggagcgcccgcgttgctttcgtcttgctgctgttggaggagcgcaacttcgcgaaagttggcacctttcagccatcgctcggcttcaaggattttcatcaggcagcccggctgcatcccctcaccgatggtcacccaagacggtgaccaccagttcgatggtggggagaagcaaaccgggctgcggcctctgccccaccctcagcttcaaggatcttcatcatccttgctggggaggagggcgaggcgagccggggcctgcctttgcgtgggctggtgtcccgcttcttcctctagcttctgggggtggaaaccatcctccagctctacggaggaggcgccctccagccatgccagggaaggtgaactgttgctgcccagccagggtgcaacattccatcctttgtccgagcgacggtggacagccgcaccggggggtctcccaacacgtcgtacgccgcgagggcggcactcgtgttctgggatggtcccattctcgttttcgtggcgaggacgggagtgaggacctgccggtgcgctttggggcggccggcgcccgctggtgcggtgttggtggacaggtggacgccgccgtcggcgctgaggtggtggtagctggagaaagcttctccgccgacgagaccgtcagcgccacccgcggaccgacctctggctctttggctttaatatctggttctcatcccttgagtggggacgcgaacaagagtcttctggcggcagcgtccgtcctgggaccatcgctgctgctgcagaggtcgctggcaagtcgcccggagtttgtcgtcccgcaggctgtccgatgtggaggttgttcatacccgcgggagtggaaccggagttccatttgtaatggcaccttgagtgccggtgtctgttcattgtggctgtcggggcctgaacatgtgtgtttttgggcataa

SEQ ID NO: 34142 - DNA, 648 bp, Zea mays
  Peptide Sequence Number=SeqID_75921
atgggggtcgccaggccaaaggagctgactgcaaatatgtgcagagctgcaaggcgacatgacagagcgccaccaaacgatctttctgtgctggctggtgatttccttctgtctagagcatgtgtggcccttgcagcacttgggaacacagaggtggtttctctaatggcaactgctgtagaacatctagttactggtgaaactatgcagatctcaacaagcagagagcaacggcgaagcatggagtactacctgcagaagacatactacaaaacggcatcattgatatcaaatagttgcaaggctgttgctattcttgcagggcacacaactgaggtctcggtgcttgcatatgaatatggtcgaaacctgggtctagccttccagttaattgatgatgttcttgatttcaccggcacctctgcatcccttgggaagggttcattgtctgatattcgccaccgtggtgggtacgctgagaacccgaacgtcaccggcatcgacacgctcgcggacgaagtgcaggtcgatctccacgtacttcatgtgttgatgctgcacgggattggtggagaggtagaccgtgctaacattgtgacagtagacgagggtggcgcactgaagggggttgtggagctcgtggagtag

SEQ ID NO: 34143 - DNA, 315 bp, Zea mays
  Peptide Sequence Number=SeqID_75922
atggaacagattccacagacagtgaaggacttgaagcgaatgataatattattcgttgacttgaaaaattgtagactgctttctgtgctggctggtgatttccttctgtctagagcatgtgtggcccttgcagcacttgggaacacagaggtggtttctctaatggcaactgctgtagaacatctagttactggtgaaactatgcagatctcaacaagcagaaacaagcgtgtttttaagaggactgtctctggcctagttggtgctttattcaacattatactacaccttcagagtccatattatactgcttga

SEQ ID NO: 34144 - DNA, 477 bp, Zea mays
  Peptide Sequence Number=SeqID_75923
atgcccatactgctaggagctatcccgaacccaatccgcgcaagtacgagcggccgtggcgagggaggcggggaagaacatcaccgcctcgtcggattcgcgccggcggtggggaagtggactgcgattgggccattcggtggcggttgggtccctaacggtgcgccgggtggagttaatcggagttcagttgacggcagcgcgggggggattcctcgccgaagctgtgttttcgccacatctccgccgtgcgccgcgggtagctgcgttcgtcgtcgaatcccgattagagctagggcccttgggcaccaggaagctgtgttccggcgatgctccgccgcgctcggagtgctggggccgtcgcgcggtgtctcaggtgggaagaagcgtaggggctatttgatcctcatccaacggccacgattagacgctgggaagtcggatctaagccatagatttcagggtgtgcggtcctga

SEQ ID NO: 34145 - DNA, 477 bp, Zea mays
  Peptide Sequence Number=SeqID_75924
atgcccatactgctaggagctatcccgaacccaatccgcgcaagtacgagcggccgtggcgagggaggcggggaagagcatcaccgcctcgtcggattcgcgccggcggtggggaagtggactgcgattgggccattcggtggcggttgggtccctaacggtgcgccgggtggagttaatcggagttcagttgacggcagcgcgggggggattcctcgccgaagctgtgttttcgccacatctccgccgtgcgccgcgggtagctgcgttcgtcgtcgaatcccgattagagctagggcccttgggcaccaggaagctgtgttccggcgatgctccgccgcgctcggagtgctggggccgtcgcgcggtgtctcaggtgggaagaaacgtaggggctatttgatcctcatccaacggccacgattagacgctgggaagtcggatctaagccatagatttcagggtgtgcggtcctga

SEQ ID NO: 34146 - DNA, 900 bp, Zea mays
  Peptide Sequence Number=SeqID_75925
atggggccgctcgacaacgccgcgtcggccgcgctggaggccgccgccgccgccgccgccgccccctcgcgggcgggctcgtacgcggtgctgcagtgcggcgaggactcggagtacgtgcggcagaagtacggcggctacttcgccgtcttccgcgcgctgctggaggaggacggcgagaggtggcgggtgtacagcgccgtccgcggggagctccccgccgacgccgaggcagccgggttcgacgggttcgtcatctccgggagctgcgccgacgcgcacggcgacgagccctggatcctcgcgctcgtcgacctcacccgccgcgtccacgccgccggcaagcgcgtcctcggcgtctgcttcggccaccagatcctgtgccgggcgctgggcgggcgcacggggcggtcggccaagggctgggacatcggggtgagctgcatccacccgacggcggcggcggcgcggctgttcgcgccgctgaagctgcccgtgcacatgccggtgatcgagttccaccaggacgaggtgtgggagctgccccccggcgccgaggcgctggcgcggtccgacaagacccgcgtcgagatgttccgcctcggcggccgcgccatgggcgtccagggccacccggagtacagcaaggacgtcctcatgagcatcgccgaccgcctcctccgccacaaccacatactggactgccaggtggaagtggccaagacgagcttcgacgtgcggcagccggacaaggagctgtggagcaaggactgccaggtggaagtggccaagacgagcttcgacgtgcggcagccggacaaggagctgtggagcaaggtgtgcaggggcttcctcaagggaaggctccagtcgtcgcagcagcaaggtgtggcgctatag

SEQ ID NO: 34147 - DNA, 979 bp, Zea mays
  Peptide Sequence Number=SeqID_75926
atggccgccaccatcgcagagttggacgacgctggtagcggcggcggctgtgggggcggcgagcggatgaagctgctattcagcctgggcgatcgcatccttccgcgcccaggagacggcacgctgtggacctcctcgtgcggctcgctgacacatacgacgcaagccattgtccgcctccagccctccatcgacagcagcggcgatggcacctccttccatctgcaacaacccatggaggtcgacggtggtgcatctaggcgctcgctgcgggtgcccgtggacaagcgattgctcgggatggtggtggaggtggatgcgaggtgggagcccatgggggcgcaggagtactacgactactggcgagccatgtacaacgcccgcggcaacagggtcctacacgctccccctgctacacacgtgatctacgactcaagatcattggccaacaagctttcgcaaacttttggtccttgggcacctacctaccggccggcacaggaaaacaccagacgcgacgacgtcccagtatcagaagctaggcgccggattggacggaatacaaaagatctcgaacaggaacaggcacaggcacacaggacgaagccggaagcatcgatcggctacagatgtacaaactacagtggacacactgtgggcgaccacagacgacgacgaggagagcggtggtctgtggtggagtggagtgcatgggaagggacacctgtggcacacgagttcgacgtggatggaaggtgcacccatatagctctgctagaaacacacatgcagcggccgttaagactgtctccaacaacgccgctcgacaacgtcgcgtcggccgcgctggaggccgtcgccgccgccccctcgtgggcgggctcgtacgcggtgctgcagtgcggcgaggactcggagtacgggcgccagaagtacggcggctacttcaccgtcttctgcgcgctgctggaggaggacg

SEQ ID NO: 34148 - DNA, 318 bp, Zea mays
  Peptide Sequence Number=SeqID_75927
atgccgaccctcgacgagagcgacatggcggttcgccagaccggtggccgggacccccaccacgggatccagatttttgatgcaccggctggaggcccccaaccagccggcgtggctcctagtgcccccgtcgtggctcccagtgcccccgccgcggccccccaccccttggacgagggcaaaggggctgcaagcagttccttcgcccaaggtggcactggggggtcggaggaagagaggcgacgccggctgcgccgcaccgacgggtcatttgtttcggaccccccagaagcgtcagaggactgctggtggggctga

SEQ ID NO: 34149 - DNA, 1251 bp, Zea mays
  Peptide Sequence Number=SeqID_75928
atgccgaccctcgacgagagcgacatggcggttcgccagaccggtggccgggacccccaccacgggatccagatttttgatgcaccggctggaggcccccaaccagccggcttggctcctagtgcccccgtcgtggctcccagtgcccccgccgcggccccccaccccttggacgagggcaaaggggctgcaagcagttccttcgcccaaggtggcactggggggtcggaggaagagaggcgacgccggctgcgccgcaccgacgggtcatttgtttcggaccccccagaagcgtcagaggactgctggggcaccagcggcagcagcaacaacaatagcaacaacagcagtagcagcaacagcaacggcagcaacagcaggggacgtcccgcttctagggtcactggaagggcttcctccccatctgctcccaaggtcgcgcctccttcgctggatagcatgcccgccggcgggtctggctctcagcaggaagcatctgctgggagtggcaccggcgaaccgccaacagctaccgcagcctcaacgatggcgatgccgtcgagtacaccgtcggtagcagcagaggaggtcccagctacgcccacccccgccatggagggtgatgcggggggcgcgtccagctctatcccgccgcccactccgaaggagacggaggtggtttttgggcggcggctccagtccggcgccgagccagaggcagctccagttcccctcctccaggtgctgtctcgtgcccatcaggctcttcacgagaccgaggcggcgatccaacaggaatgggaggcgctagaatctgagcaccagcgcctcagcgactggcgcacccagctggaggagcgcaccaaggcggcgtcccaccagtttgcctttgagcggtccgaacttgcacgggaccgcaaagactacaaaaaggacctccagaaggtgtatgccctggagctggaggtgagccgcaaggagaagatgttggccaagagggaggaggccttgaaccagagggaggctcttatgacagagctccgggccaagctgaaagccttggaccagaccctagaggcccagcgaacccagcaggtggaggccatagagaagataaaaaaatgggagcaggagctggaggacaaggccagcgacatcgccctcgccgaggagaacctcaaggcgaaggatgcgtccctggacaggcgggtgacggatctcgccaggcgagaggcagacctcgccttctag

SEQ ID NO: 34150 - DNA, 630 bp, Zea mays
  Peptide Sequence Number=SeqID_75929
atgcggggggcgcgtcccagctctatcccgccgcccactccgaaggagacggaggtggtttttgggcggcggctccagtccggcgccgagccagaggcagctccagttcccctcctccaggtgctgtctcgtgcccatcaggctcttcacgagaccgaggcggcgatccaacaggaatgggaggcgctagaatctgagcaccagcgcctcagcgactggcgcacccagctggaggagcgcaccaaggcggcgtcccaccagtttgcctttgagcggtccgaacttgcacgggaccgcaaagactacaaaaaggacctccagaaggtgtatgccctggagctggaggtgagccgcaaggagaagatgttggccaagagggaggaggccttgaaccagagggaggctcttatgacagagctccgggccaagctgaaagccttggaccagaccctagaggcccagcgaacccagcaggtggaggccatagagaagataaaaaaatgggagcaggagctggaggacaaggccagcgacatcgccctcgccgaggagaacctcaaggcgaaggatgcgtccctggacaggcgggtgacggatctcgccaggcgagaggcagacctcgccttctag

SEQ ID NO: 34151 - DNA, 384 bp, Zea mays
  Peptide Sequence Number=SeqID_75930
atgaacaagacaccggcactcaaagtgccattacaaatggaactccggttccacctccgcaggtacgaacaaccccacacgataggggggcctacggagcgacagaagaccgacgaacggctcgccgtcgcccgctccagcagcggcgacgacgacgacttctgctccggggggccgaacagcagcagcgatgacctcagggcggatgctgctgccatgaggccctcgcccatgccctcactcgagaggcaaggatgggcagaaggccgtagagctggagaaggcggcgccgggagcggctccgaagccactcggctcagagagtcgggcacgcggcagctgccaacgccccgaacggcgaacgcccttccccccgatcactga

SEQ ID NO: 34152 - DNA, 990 bp, Zea mays
  Peptide Sequence Number=SeqID_75931
atgcagcccggctgcaccccttcgccggcggtcacccaagacggtgacctccagttcgatggcggggaaaagcaagccgggctacggcctctacccctccctcagcttcaaggattttcatcatcagtgctggggaggggagtgtgccgagttggggtcggttcctgcgcgggcggcgacccgctccttccctcagtgatcggggggaagggcgttcgccgttcgtggcgctggcagctgccgcgtgcctggctctctgacccgagtggcttcggagccgctcccggcgccgccttccgccacggcagctggaagaggttcttccaccgacgagatagctggtgccgcccacggactggcatccaactctacggccttctgcccgtccttgcctctcgagagtccctcggctcggttggccttgctgtccgaggcttctcttgcttagttaaaggaacccctcggccgctcttcgatgagccgaagccaggggtagcggtgtcagcacagacagaggcagagttggctcaaaaagaagacttggtcggccagagcctggccgggtcgtccactggcgggaccgacgccggaattgagttgccgaggcctcgggccgggctgatgtcttcgggggacagctggccgaggcctcggggtgaccggtcgagccgtctgctcgagccagattcctggagaagaccctggcggcgatggtctgggcatggtgatgatgtcgtccttcagagtagagattctccgactgcgtcgccgtccgaggctaggttggacctcgccgaaggtgtagttgacgtcgagggtgctgctgctcccttcaactatcaagatccgagcctgcaggatcggattatcttgtatcgagaaggcccgaagaatcgtttcggcagaggagctttcaagcgtgaagacttgttcggtccgcggaatcacttatctgaacgcgagttacttatcgcagaaggtgatgagtga

SEQ ID NO: 34153 - DNA, 1011 bp, Zea mays
  Peptide Sequence Number=SeqID_75932
atgcctttgccaatagaatcttcaaacgtgttcaatgaactccagcgaatcgcacggttagccaatggttcagtaggaggccgcagggctgatttatatgcccccggtcggagtcacgagggcaacggttgcagcccgagaactccggcgctggaatcggatcgaggtaacccaacgagagttccgctgtctgtttgggggttgttgcgaggtaggaggaaaatctttggtgcgggccattggcagcgacattacgccaacgcgtatgcgcggaacatacagggagcggaagagggatctgatcctccggaacttatagctccggaagaagggcaagaacccgacccctccgagataaacctcttgtgccaggaaagcttcgacgaaggcaagtccatccttcccttgatgcattatttacctatttctctctaccactgcctaagcctggaatatgggatgggaatcgaattgcatgttctacctgtggcctgggctattttacctttcactgcgctttatgattttcggctcactctcgagcttgtatcccccggactggcttgtatcacatttgagtcccaaaggatcgggacgcttcaggtggtatcagagcctataggactggccatagaccgcaaccctgaccttaaaagttgccttaacaagaaaacacctcttaccccaagaagcactctccctcctttccccaatattaacagacccttcttttcttctaccagatggaaggcccctgggttattaggacatcctattgctcagaggaggaaggctttcctcaccttctacgaaagttgcgcgctacgcatggggatccgtaagaagtccgaatatgtctggaaggaatactgcgaaaatggaatagaaaagtgctctatggcagtctacctgggagaaagccgaaactacccaaaccaccctcccttccaagtcaccttcatcgggcaccgctttccagacacttgccagtgttgcccgaaaagcccttaa

SEQ ID NO: 34154 - DNA, 210 bp, Zea mays
  Peptide Sequence Number=SeqID_75933
atgaagttcacccgcggcgacgccccatctcttgtttggcgacaagccttgctcgtccctggcggctcaatcgaaggtgtgggtgcccaagcggaagagggatccgatcctccggaatttatagcttcggaagaagggcaagaacccgacccctccgagataaacctcttgtgccaggaaagcttcgacgaaggcaagtccatcccttga

SEQ ID NO: 34155 - DNA, 594 bp, Zea mays
  Peptide Sequence Number=SeqID_75934
atggctgctgggccgagcagagagctcgccgggagaaacacagcagaggcacgcgccggccatgggggattcctcgcgcgcgctggaccagaggagcacccgcgccgtgggaggcgccatggacgagtaggagcagtaggctcgcagcttgtcccgggcgcctgcacttggaggaaatggcggtcaggtggggctgccgagggaatccacggcaaggcggggatggccggacttgagaagggcagaggtccggctagggcgacggcggctcacctgctcgagctggggccggtccggccatggccagcgaccgagagagcagagagaggggaaaaaacaaaaatggagcagcggcctggagggagcagaacgccgaagggagaagaaaagccagccgtgggagggagctcggtgcgctggagggaaggaacgcccggccatggaagcccctgcgcgctggggaaggagcttcagctctacgtgcttgaaggagcccacagctggaaaatggtagaggaggaagagaaaggtgttggcggctgcggtggaaatggaaaatttcagaatgcaagggagggaaacccatatttatag

SEQ ID NO: 34156 - DNA, 498 bp, Zea mays
  Peptide Sequence Number=SeqID_75935
atgtggggtggctcgagggaatccacggcaaggcgaggatggccggacttaagaaaggcagagagagaggaaaaacaaaaattggagcagcggcctggagggagcagaacgccgaggggagaaggaaagccagccgtgggagggagctcggcgaccagggaggaaaaactcctgctcaccggcctggggaagaaggagcaggggcgccacgccaagggattgaagacagggagcgccggcgttgagggaggaggggtgcagcgaaggggtggctggggaagaacgccctgctggatgggtgccgggcgccatggcaaggagccaagctctggcgtgcgtggagcctgcggctggaaaatggcagaggaggaagagaagagatgttggcggctagggtcggagaaggcgaatcgtgatattttaaaatcgctgtcgatgcggggttttgagtttggttcggacatgagatatttggtcgagtcggataaagttgattag

SEQ ID NO: 34157 - DNA, 342 bp, Zea mays
  Peptide Sequence Number=SeqID_75936
atggagaggctgctggcgacctgcagggagggagcgccatggggaagctcgagcttgagccatggagcaggggaggaaaaagggtattcagctggagcaagcctacgcgagggagaaggagcagggagggcactcggccatggagggaagctcggctgcttgagctacgccggcaccatgggaggtgctgcactggcgtgcgtgaggagcaggaaggaggatggcatggggagaagaagccagtcgaagaaggtgaatcgtgatattttaaaatcgctgtcgatacgaggttttgagtttggttcggacatgagatatttggccaagtcggataacaattga

SEQ ID NO: 34158 - DNA, 1368 bp, Zea mays
  Peptide Sequence Number=SeqID_75937
atgaagtcagttgatcgtcctcccgctaatcccaaacacataacaattgagtcaagccaagaattctttagtgttgagataccacggccggcctctattggagttcctccaaacacaaagcattctgatcagtgtcctgcacctgtcgagaaaccatctgttatttatgaagccaatgaacaaactggatctggcaatgacgacgatgacttcatgacacctacaaagaagcgtaatgctgctggaagtcatatgaatatcttacggaagacatgcacaaagaggccgaaagtagtagaaactccacggcagaaactcaatgttagatgcaaccctcaggatgtgattataactattaagatattgaatgagaggcaacgacaagccgttgctagaaaaggattttccaatattcttgacatgacacttgatgcactgggtagccgttctcatcttcgttggttgatggataagttggaccacaaggatatgactattcgccctagagttggcaaggaactaaagattacgaaagaaactgtccaccttatactaggccttccgaatgctggcggtggtaagccactaggaatcgatgaagcagtggcgggcaataacttgagggctgaacttggattgcccaaggatgagtttgttgttgcatctcttcaggaccgattgagaaaaggaaatgatgatgacctctctatcagatgcttctttttgatattgttcaatagattgttgttccccacttccagctggggcatatctaaccatgaagtgttattgacggaagaaatggaccgtttccacgaaatagactggtgccacttaatttttaacgacctatgtgaagctgcacaaaagtggcatacaagaagcacttctaatgtgtccacgacgatatatggatgctcagttgtcatactattccgaatcttttctgaaacttgctattctgctgtccctagtgtgcagtttcaatcagagcatagggacaggacaaacattttttatgtccctcgtcccgatccttgtggtcatcatactattcatatccagctccctttgatcaaggatatgctttcaagtaagataaagcagctccaaccacgtgaccgaccaaaattcattgaaaagtttgttgagtatgattctgaagttggcaaagcctgttccatcataaaaagtactcttaccaagatggttgtgaagcagtatgaactagcggacacatttgctgagttaattgatgatgtccttcgcgcagagtctggcgacccagacaatgttgcggaagcgcctcaaacagataaacctccagatatatctcagcatatgtcgtcagaggaacagatcccatga

SEQ ID NO: 34159 - DNA, 609 bp, Zea mays
  Peptide Sequence Number=SeqID_75938
atgaatgtttttctggaggggagagtattggggatgccggttgctaggccggagccgcaggagccccgagtgatcgcccatgtcgacatggactgcttctatgttcaaggtccatgcgcgggagatgaggccaagagggtctgttctggtattaatcttgttcaggtcccagtggcacgtggcaaggctgaccttaatctttacagaagtgctggtgctgaggttgttgcaatccttgcaagcaaagggaagtgcgagcgggcatccatcgacgaagtttatcttgaccttactgatgcagcaaaggaaatgctcttacaagctcccccagattcaccagaggggatttttatggaggcagcaaagtcaaatatcttgggccttccggctgatgatcttggggttgagactattggtgatctcctaagttttacagaggaaaaattacaagagcagtatggagtaaatactggccacgggatggtggcggccttcgcgcgggcagcgtggctcaaggagtaccacgagaaggtgctggtggagatctacggatatatcccatacctccgcgacgccacccctcttgatttttactctcttgatttttaa

SEQ ID NO: 34160 - DNA, 333 bp, Zea mays
  Peptide Sequence Number=SeqID_75939
atggtggcggccttcgcgcgggcagcgtggctcaaggagtaccacgagaaggtgctggtggagatctacagatcgactgtgtcgagtgcttcgacggcactgagatcgtcttgtcgtccccccaatggcaattccaccaacgacgtcatgtccaaggacttcactacaggcatctcctcccacctctacctacccgcgggggtggatcctgagaagaagctccgcatcgttgtgttcttccacgatggtgcattcatggtccacaacgcctccttcccgttgtaccacatttacgtcgccttcgtcgatgctgctgtgcccaccagccgctga

SEQ ID NO: 34161 - DNA, 2310 bp, Zea mays
  Peptide Sequence Number=SeqID_75940
atggccagagtagaaccaataggatcaacactagctgccacatcttctgttaatacacgtgtgccaatgcagagacctgattctggaggtttatttcgtgtgagagttcgatcaaagacctacattgtatcagtagatttgaagaagcagctgccattaagtcaactctcagatttacctgtgcctagagaggtcttgcagggccttgatgttgttgtgcgtgaggcctcaagatggaacaagattatccttggtagaggattttactcaccaagcagcagtatagacattgggcagggtgctgtagctatgaaaggaacccagcagtcccttaaatccactcagcaagggttgatcctgtgtgttgactattctgtcatgccgttttacaaagctggaccggtgatggatcttgttcagaaattagtgaggtaccttgattatcggacaactttgaacaagaggcaaatggaaaatctggttgatgagcttaaaggccgacgtgtaactgtgattcatcggaggactaatcagaagtacacagtgcaaggtttgacacccttacctgccagccagatgacctttgtggatgctgaatccggccaaacacggaggctcgtggattattatgctcagaaacatggcaaggtgattgagtatcagatgctgccatgcttggatttgagcaagagcaaggacaaaccgaatcatgttccaattgagctctgcactcttcttgaaggacagaggtttccaaaagcaaacttgaatcagaattctgagaggatactaaaaggaagtgctctaatccgtgcatctgaccggaggaaggagattcaaaacttggtgaatgcttcggatggaccgtgcagaggagaaattgcacagcaatttgggatttccttggatgtacgaatgacagaagtcacgggtaggatccttcctccaccaaacctcaaacttggggcatccaatgggcagacctccaaattgagtatcgatcatggctgccagtggaatcttgtgaagaagagactagtagagggccgggttcttcagtgctggggcatcgtcgacttcagtgctgagccgtctggctctggcgcccgtcaggagcccctcgatacaaggatgtttgttgagaagattgtgaggaagtgctgtgagcttggtatccgtatgaaccctaatccatgcttcgtgcacataacaaggatggcagtgctcttcgatccacatggactacatgaagagctaaacaaagcaaaacaagctgcagtgagcaagaagcagaggttgcagctccttttctgcccgatgtccgagcagcattcggggtacaagacactgaagctgatttgtgacacacagctggggatcctgacccagtgtttactgagcgaccgcgcaaacaatcgaaagggacaggaccagtacatgacgaatcttgctctaaagatcaacggcaagcttgggggcagcaacgttcagctgtttgactcgctcccacgggtcggtggtggggtacctttcatgttcatcggtgctgacgttaaccacccgtcccccggtaacgtggagagcccatcgatcgcagccgtggtcgcctctgtcaactctggtgtcaacaagtatgtgaccagaatccgtgcccagccgcaccgctgcgaggtgatccagcagcttggtgagatctgccgggagctcattggagtctttgagaagcagaaccgcgtgaagccgcagaagatcatctacttccgtgatggcgtgagcgacgggcagttcgatatggtcctgaacgaggagctggctgacctggagaaggcgatcaaggtgaatggctatgcgccaaccatcaccgtggtcgtggccaagaagcggcaccacactcggctgttccccagggacgaacagcagccgcagacgaagaccgggaacgtgccgcctggcacggtggtggacacgggcgtggtggacccgtccgcgtacgacttctacctgtgcagccacactgggattctggggacgagcaggccgacgcactactacaccctggtggacgagcacggcttcggctccgacgacctgcagaagctgatctacaacctgtgcttcgtgttcgcgcggtgcaccaagccggtgtcgctggcgacgcccgtctactatgccgacctcgcggcctaccgtggcaggctctactacgaggctgccatgatggcgtcccaggcccagcgaggggggtcctttgacgtcactaacttcccgaggctgcacaaggatgtggaggacaacatgttcttcatctga

SEQ ID NO: 34162 - DNA, 2571 bp, Zea mays
  Peptide Sequence Number=SeqID_75941
atggccagagtagaaccaataggatcaacactagctgccacatcttctgttaatacacgtgtgccaatgcagagacctgattctggaggttcattatctcaagcaacggttaaacttttggtgaatcactttattgtcagctaccgaaaggtgacaactatttttcattatgacataaacatcaagcttgatgaagcttcgtctaatgcttcgggcaaagagctatccaaggcagaatttctctctgtcaaggatgagctcttcagggaaagcagtttacggcgtctttcctcatgtgttgcttatgatggtggaagaaatctgtatacttctgctgaactgcctgcaggtttatttcgtgtgagagttcgatcaaagacctacattgtatcagtagatttgaagaagcagctgccattaagtcaactctcagatttacctgtgcctagagaggtcttgcagggccttgatgttgttgtgcgtgaggcctcaagatggaacaagattatccttggtagaggattttactcaccaagcagcagtatagacattgggcagggtgctgtagctatgaaaggaacccagcagtcccttaaatccactcagcaagggttgatcctgtgtgttgactattctgtcatgccgttttacaaagctggaccggtgatggatcttgttcagaaattagtgaggtaccttgattatcggacaactttgaacaagaggcaaatggaaaatctggttgatgagcttaaaggccgacgtgtaactgtgattcatcggaggactaatcagaagtacacagtgcaaggtttgacacccttacctgccagccagatgacctttgtggatgctgaatccggccaaacacggaggctcgtggattattatgctcagaaacatggcaaggtgattgagtatcagatgctgccatgcttggatttgagcaagagcaaggacaaaccgaatcatgttccaattgagctctgcactcttcttgaaggacagaggtttccaaaagcaaacttgaatcagaattctgagaggatactaaaaggaagtgctctaatccgtgcatctgaccggaggaaggagattcaaaacttggtgaatgcttcggatggaccgtgcagaggagaaattgcacagcaatttgggatttccttggatgtacgaatgacagaagtcacgggtaggatccttcctccaccaaacctcaaacttggggcatccaatgggcagacctccaaattgagtatcgatcatggctgccagtggaatcttgtgaagaagagactagtagagggccgggttcttcagtgctggggcatcgtcgacttcagtgctgagccgtctggctctggcgcccgtcaggagcccctcgatacaaggatgtttgttgagaagattgtgaggaagtgctgtgagcttggtatccgtatgaaccctaatccatgcttcgtgcacataacaaggatggcagtgctcttcgatccacatggactacatgaagagctaaacaaagcaaaacaagctgcagtgagcaagaagcagaggttgcagctccttttctgcccgatgtccgagcagcattcggggtacaagacactgaagctgatttgtgacacacagctggggatcctgacccagtgtttactgagcgaccgcgcaaacaatcgaaagggacaggaccagtacatgacgaatcttgctctaaagatcaacggcaagcttgggggcagcaacgttcagctgtttgactcgctcccacgggtcggtggtggggtacctttcatgttcatcggtgctgacgttaaccacccgtcccccggtaacgtggagagcccatcgatcgcagccgtggtcgcctctgtcaactctggtgtcaacaagtatgtgaccagaatccgtgcccagccgcaccgctgcgaggtgatccagcagcttggtgagatctgccgggagctcattggagtctttgagaagcagaaccgcgtgaagccgcagaagatcatctacttccgtgatggcgtgagcgacgggcagttcgatatggtcctgaacgaggagctggctgacctggagaaggcgatcaaggtgaatggctatgcgccaaccatcaccgtggtcgtggccaagaagcggcaccacactcggctgttccccagggacgaacagcagccgcagacgaagaccgggaacgtgccgcctggcacggtggtggacacgggcgtggtggacccgtccgcgtacgacttctacctgtgcagccacactgggattctggggacgagcaggccgacgcactactacaccctggtggacgagcacggcttcggctccgacgacctgcagaagctgatctacaacctgtgcttcgtgttcgcgcggtgcaccaagccggtgtcgctggcgacgcccgtctactatgccgacctcgcggcctaccgtggcaggctctactacgaggctgccatgatggcgtcccaggcccagcgaggggggtcctttgacgtcactaacttcccgaggctgcacaaggatgtggaggacaacatgttcttcatctga

SEQ ID NO: 34163 - DNA, 738 bp, Zea mays
  Peptide Sequence Number=SeqID_75942
atgtggaatggagtgtcactgctgctgggcacagatttcaaagacacctgccaagtcgtcgctcgcaaggcattgagggccctgtgtcagatctatgaagaagtggtcgacacaccgctcagattctttccgccctttcagagaaaccgtccagtttggatggccaggatgcgtgcattggaagaagatgcagaaaagcacaaccgtaagctccatgtggatctcaccacagctcaagcccgtgtagctgccttggaaagtcgtgaagtcattgctgttgaagccttgaagcaagccaaggatgagcacgtccagaagttgatggaggcctacttggtcacccaaaaccaacgtagagccctatggatccaagagcccgtttcatccaacccagttcaacccatgagggctgaagatccccatattcttgaaggtcatccgatctctaccaaaggagagaagaaggcttgggaactcccggaaggagccatagtcttggaaggaattccagtcttccctcgggctatggataagcaagagcaccccgagtcctcccaagatcccctgccagagttgtttgagcccctcaccatgaagaagattccagcaccgtcccttgaggtcaaagaagaagctgcaagcaccccaccagcaccgccgccctctgaggagctacaagagctagtcccgcttgaagaagagttcaaccccgtgttgccatctcagtcgccgccataa

SEQ ID NO: 34164 - DNA, 393 bp, Zea mays
  Peptide Sequence Number=SeqID_75943
atgcggtccgaccccagggttatgaaggttggggagcaccgggaggataaggagggggaaagttttgtccggtttggacatggtggtggcctgactccttctggtataaccgttaagaaaaaggagatcggaagtcagatggaggttcgctgccaaaccagcttttgccagaaggaagatggtttccccaagttgctgagagcatgcacagttcgcctcggaatcaggagtcagccagagtatgatggtcgtgaattcgtcgagcatggcacagagaagtgtgtcatgactgtatacattggatccagtccgcaccatgtggaaatggagtgtcactgctggtgggcacagatttcaaagacacctgccaagtcgtcgctcacaaggcattga

SEQ ID NO: 34165 - DNA, 594 bp, Zea mays
  Peptide Sequence Number=SeqID_75944
atggaatctctatttgtaggcttgtctcataacaagccaaaaaaatcggtggcaaccgcaatagttcgagaagttttatctcatgactggttgctcctagactatatttgcacgcaaggtgatcttgccctcatcgattttattaaggaaatcccttgtgaaccaagggtagaagtcgtgcttattgatgatgcctttgttgaaaggaagtggatggaatgtttatttcagccgaacgcatatttaggtgacgaggttatagactgttacataaatttgataaaagctcaaaagcatctaaagtgtcgatctggaggtcgcgttcacatagaaaatgctttccagttcaatttcctgaagcgagatggtgatgttgaaattaaaacagaggggctatatccaattgaagacatgacacaaatatgtagcgctaaacgaagggtgttactttacctagaccatgacatggtgttcattccgataaacatccgagagacgcactggtatcttgtcgttatccatgcaagaaatatggagatacaagtgctcgattcacttggttcttcccaagaccgcaaagacctcactgactct

SEQ ID NO: 34166 - DNA, 1611 bp, Zea mays
  Peptide Sequence Number=SeqID_75945
atggaatctctatttgtaggcttgtctcataacaagccaaaaaaatcggtggcaaccgcaatagttcgagaagttttatctcatgactggttgctcctagactatatttgcacgcaaggtgatcttgccctcatcgattttattaaggaaatcccttgtgaaccaagggtagaagtcgtgcttattgatgatgcctttgttgaaaggaagtggatggaatgtttatttcagccgaacgcatatttaggtgacgaggttatagactgttacataaatttgataaaagctcaaaagcatctaaagtgtcgatctggaggtcgcgttcacatagaaaatgctttccagttcaatttcctgaagcgagatggtgatgttgaaattaaaacagaggggctatatccaattgaagacatgacacaaatatgtagcgctaaacgaagggtgttactttacctagaccatgacatggtgttcattccgataaacatccgagagacgcactggtatcttgtcgttatccatgcaagaaatatggagatacaagtgctcgattcacttggttcttcacaagaccgcaaagacctcactgactctattaaaggactgcaaagacaaattgatatgatatctcaacgtaaggagttaaaagaccacaggtggccagacctccaagttgcttcttggccgctcaaggaaatagacatgggatatgcaaagcagacatatagctcttcatgtggtctctttcttttgaactatatcgaatactggacaggggatgaactgtctgacagttttacccagatattagaaaacccaacagattctaataagaggaaactactccacgtgcttgatgatagcgaagtagtgtatgaagatgaggaaggccctattactcaagcggacttgcaaaggtggtttgttgatgattgggataaaagagctcctgtaaaagtctctaccgatgggtgcaacaatgactttttaatggttggtctttccacaaaggacatgccagtgaccaaagccgattcaatagatgttttatgtgattatatcatggcaatagaagacgatacgacactagagagaacatgggtgcgaagtttcaatccttttaagatagaaatatctgtcaaagacctgcaaaacatattaacgataaatcaagatatgattctaagatgttttgacatggctgttcggctgcttgccaataaagagtcacgtaggccgaaagaagaaatcataaataatagaaagcattatatggacatgcgtttttgggttcttatgccatggaaattcaatggatgtcacgcccttttcgtaatagatcatgttataaagcatgtgacttttatcgactttacaccgactcaagattggtgtaaacacatgccatacaagaggtttaataacagctacctcgttctacaagctatggccatgtgggggaatgacaaacgactgaaatttgttggggatgcaaagactcttcgaagaaactttgtgattgatctgttaagttatgaggacaattcgtgtcgatatgccatccctgcaaacatacaacagagactcatcgatatcgctaaaaaggattag

SEQ ID NO: 34167 - DNA, 909 bp, Zea mays
  Peptide Sequence Number=SeqID_75946
atgggatatgcaaagcagacatatagctcttcatgtggtctctttcttttgaactatatcgaatactggacaggggatgaactgtctgacagttttacccagatattagaaaacccaacagattctaataagaggaaactactccacgtgcttgatgatagcgaagtagtgtatgaagatgaggaaggccctattactcaagcggacttgcaaaggtggtttgttgatgattgggataaaagagctcctgtaaaagtctctaccgatgggtgcaacaatgactttttaatggttggtctttccacaaaggacatgccagtgaccaaagccgattcaatagatgttttatgtgattatatcatggcaatagaagacgatacgacactagagagaacatgggtgcgaagtttcaatccttttaagatagaaatatctgtcaaagacctgcaaaacatattaacgataaatcaagatatgattctaagatgttttgacatggctgttcggctgcttgccaataaagagtcacgtaggccgaaagaagaaatcataaataatagaaagcattatatggacatgcgtttttgggttcttatgccatggaaattcaatggatgtcacgcccttttcgtaatagatcatgttataaagcatgtgacttttatcgactttacaccgactcaagattggtgtaaacacatgccatacaagaggtttaataacagctacctcgttctacaagctatggccatgtgggggaatgacaaacgactgaaatttgttggggatgcaaagactcttcgaagaaactttgtgattgatctgttaagttatgaggacaattcgtgtcgatatgccatccctgcaaacatacaacagagactcatcgatatcgctaaaaaggattag

SEQ ID NO: 34168 - DNA, 426 bp, Zea mays
  Peptide Sequence Number=SeqID_75947
atggcgcgcggcgcggcctgcctgcgcggcggcccggcgtggcaacctgccctgcgcggccccggctcggcggcgtgcggatgcgccccccggcgcgcgggcagccccgacgcgcaggctcgcggccccccagcggctcggcgcggccagcgtggcagccaacctgcgcggcggcccagtcgcgtcctccccggccgggggctcgagcggtttctcgagtgcccctccgtaaggacctgttcgttggatgaccacccgggaaaacagtgcaaccatgagggtggaatgagatacttgatcggagatggttggtttataggtggtgacgaggatgatggttttgactatggtaatggtaaagaaagagaagaaggcatcgaggtggatctccaggagttccaggacatcgatgagtttgaggattag

SEQ ID NO: 34169 - DNA, 504 bp, Zea mays
  Peptide Sequence Number=SeqID_75948
atggccgagctcccctcgtgcgcggcgggacctgcgtgcccacgactcgcccaggagcggccccggcatggcacacggtgccctcgcgcagccagtgcggctcgagcagccccggcacagccactcgcgcccttgcgcgtcgcgcaggactggttcgtggatcgcgaattgtttacgggcttcgaggaatcgacaatcaagcatggcgaccaagtgatcgaactcttcaagttctacgagattgaagatcctgagcatctgtttggtgaaggcaaggggctcgagcggtttctcgagtgcccctccgtaaggacctgttcgttggatgaccacccgggaaaacagtgcaaccatgagggtggaatgagatacttgatcggagatggttggtttataggtggtgacgaggatgatggttttgactatggtaatggtaaagaaagagaagaaggcatcgaggtggatctccaggagttccaggacatcgatgagtttgaggattag

SEQ ID NO: 34170 - DNA, 198 bp, Zea mays
  Peptide Sequence Number=SeqID_75949
atgaaactggtatatcagccgtgctcacggttaagagcagccttgggatcctctttgattagagatacttcgatcagagatggttggtttacagatgatgatgaggatggttatgatcatgcttatggtaatggtaaagaagaagtcgtcgaggcggatctccaggagttccaggacttcgacgagtccgaggattag

SEQ ID NO: 34171 - DNA, 936 bp, Zea mays
  Peptide Sequence Number=SeqID_75950
atggagatgatcaaggacctgcctgaagaactcaagcaggacatcaagcgctacctctgcctcgagctggttaacgggcccggcctgtcggcgcggccgccttccgcgtacccgcccctttctctctctgttcgcccggccccacctgtcggcgcccgctttccccgcgcgcgctcgctccctcgctctctctctgctcgcgggcccgggctgtcagccccgtcttcctcgcccgccaccgtcgacccgggtccccgtcgcgtccccgtcgccgccgaggagtccccggagcccgccttgaggccgcccatccgatctccgccgttcaacccagatcgggcggccctgattcaactcgcccggacccaatcctggccgtccgtcggagatccagcggcccaggcccactaccccctcaccccgtctctctgcccgctaggccccgcctgtcagcccgcccgcgcgctcgctctgccgtttgggcccagcctgtcagcccgccccgcgcgcgcgctgtccgcccggccccgcctgtcagcctgcccgcgccccgcgctgtccgcccggccccgcctgtcagcctgcccgcgccccgcgctgcctgcccggccccgcctgtcagccgcccaggccgccgcgcgcccgcgcgcccgcccgcaggatctaatcctgatcgttcgctttagatctgacggctacaccgagcagtctgtgtttcccgaggcagttgcagaggaagtccctgatcagcagtttggtgaaggcaaggggctcaggctgtttcctgagtacctctccgtaaggactgccgtcgtgccgtcaatggggtccaggcacagtgcttgctctgccgaggctgagtgccgagagggtagtgaaactggtatatcagtcgtgctcacggttaagagcagccttgggatcctctttgattag

SEQ ID NO: 34172 - DNA, 210 bp, Zea mays
  Peptide Sequence Number=SeqID_75951
atgtcctcgttttttgtgaccacataccttcacggttcatgcatcataccatctcttgatcgtaccgcagctgcttctgatgagatcctcgcagttgacactccttcagaaggaggcgatgttgttattgtcagtagcagtgacaattctacatctactgcatcagctgtctcgtggcgagcccggttcgttgggcaaggttacaagtag

SEQ ID NO: 34173 - DNA, 282 bp, Zea mays
  Peptide Sequence Number=SeqID_75952
atgaactacgtcgaggagaattgtgctccagcagtttatacaccagaattaagatacgtgtgcattgctggaaggtacattcaaggtgctcctcttctggggaactccgcagctgcttctgatgagatcctcacagttgacactccttcagaaggaggcgatgctgttattgtcagtagcagtgacaattctacatctactccatcagctgtctcgtggcgagcccgggttcgttgggcaaggttacaagcagttggtttgaccacggttgaaggaatctga

SEQ ID NO: 34174 - DNA, 351 bp, Zea mays
  Peptide Sequence Number=SeqID_75953
atgggaccccagttcacccgtccgtcacaatctggacagaccccaaacaccaacgaaacacagggttctgagaccggacaaggaaacccacagatggacattcagtggtcgatgcctcctagaggacagattcttcctcctccacaaccaggtatgggatattggccaccaccaccatggggatatcctacacatccaatggggccttggggacgccccccatggccaacacagccacttccgtcacatgcgattcagcaaaaaagtgactatcaaactagaaaatcaaactatctgaaatcaaactacagattcagcaaaaaagtgaaaacagcaagtgatgcacactaa

SEQ ID NO: 34175 - DNA, 438 bp, Zea mays
  Peptide Sequence Number=SeqID_75954
atgaccactgaccagtacatatgcttcctttgttgcgagttatgttatgtttttgtacagatgtatagtgctcagatgggatctccaatgggaccccagttcacccgtccgtcacaatctggacagaccccaaacaccaacgaaacacagggttctgagaccggacaaggaaacccacagatggacattcagtggtcgatgcctcctagaggacagattcttcctcctccacaaccaggtatgggatattggccaccaccaccatggggatatcctacacatccaatggggccttggggacgccccccatggccaacacagccacttccgtcacatgcgattcagcaaaaaagtgactatcaaactagaaaatcaaactatctgaaatcaaactacagattcagcaaaaaagtgaaaacagcaagtgatgcacactaa

SEQ ID NO: 34176 - DNA, 456 bp, Zea mays
  Peptide Sequence Number=SeqID_75955
agtgccaccgcaacagaaaagcgccgccgcgccaccgccagcacgcagcgccgccgcgccaccgccagcaggccgcgccgccgctccaccgccctggctcgccgccccgtctccctttctcctcttttcgccagctccgccgcgtcgctgccctgcccaatctcgtcggcctcggtgccgccaccagccagctcgtcgtcgcgtcgccgtcagaacgccgcgccgccgcaccacagcccaagctcggcctcggcgtctcctcgacggtctccttgaagatgtatagtgctcagatgggatctccaatgggaccccagttcacccgtccgtcacaatctggacagaccccaaacaccaacgaaacacagggttctgagaccggacaaggaaacccacagatggacattcagtggtcgatgcctcctagaggacagattcttcctcctccacaaccag

SEQ ID NO: 34177 - DNA, 156 bp, Zea mays
  Peptide Sequence Number=SeqID_75956
atgaatgctgtggtaacttcacacctacccgtctgtttatatagtgctgcagttgagaacgagtcgccaacagtcgggaccttgcgtggttccggatacctcggtaaaaataccggcgtcatccacgagagtttgcatctgtaccttgctctttaa

SEQ ID NO: 34178 - DNA, 447 bp, Zea mays
  Peptide Sequence Number=SeqID_75957
atgacgccggtatttttaccgaggtatccggaaccacgcaagggcgaggacgcgattcctcccgaggtcgaggttgaggccgagacctggggtcgggcgaggcggagaccaccttccgaggccgaggttgaggccgagccctatggtcgggcgaggcggagaccaccttccgaggccgaggttgaggccgagccctggggtcaggcgaggcggagacctcctcctgaggacgaggcccaaggtcgggcgaggcggagcttcctgttgtgcctgaggctgaacttagctgttgtcagcctcatcctgacgggtggcacagcagttggagcggggcgagcggcaatcctcgcattgaatgcgcctgcgatacggttggttggtgaggcgatttggccaaggttgcttcacaacgaagcctgcccgagctgggcttcgggcgagtcgagg

SEQ ID NO: 34179 - DNA, 669 bp, Zea mays
  Peptide Sequence Number=SeqID_75958
atggcatggaggtccagggccctcttacagaaggttggcaacacggggaaggatgggacggcgctcgcgcaaggccgctcgctccctgccgcgtggacgcttgtaaccccctactgcaagcgcacccggcctgggcgcggggctaacacgaaggccgcagctttgccgctggcattcatggggaagctcattcctgttcctaaacgtccattaggaaaagtctttgcatgctgctataagaggagcaaacaagttgcaaccacctttgccccaattgtcaaggccaccatctatgccgccctttcctcatcagatgcattcacaagtaccaaattcatttgggttgactcatgcaaatgctccgcggcacaatttacaacaaccaatgtttcatctgctgctgtcactactaacaaggtcgtgttggacttggtcatcagcttggctgctgctaagaagcctgctcgcacaaatacttatgctgaacttcgtgaaaggaagctgatgaacaagtacaacgagctcaaggtaaggtgctgtaatagaagattcaaggggatagatgttggctctatggacgaacactcgaccaagttagatgaggagtatgagagcctagccatgcgcgacgtgatggtgactggtctgacgatgagcagcaagctatga

SEQ ID NO: 34180 - DNA, 188 bp, Zea mays
  Peptide Sequence Number=SeqID_75959
ctgaacttcgtgaaaggaagctgatgaacaagtacaacgagctcaaggtaaggtgctgtaatagaagattcaaggggatagatgttggctctatggacgaacactcgaccaagttagatgaggagtatgagagcctagccatgcgcgacgtgatggtgactggtctgacgatgagcagcaagctatga

SEQ ID NO: 34181 - DNA, 783 bp, Zea mays
  Peptide Sequence Number=SeqID_75960
atggggaagcctgtcccatcactcctcatgctcctcctcagccgaggcagggtcccactcaacagtccaactcggtggcaaggtggacgaccaagttatcccagcaaccatctcctccagagaacctgtaaaaattatgccacaagcaaggctgagtatactaatactcagctagacttacccggttacaatggatcaagcagtctcattagctgcgagaagcagacgattcgaatcgagttttttatccttgcaagtccttccccttatgcaaacagtaaccgcgggaaagaaaagggcagcgcggcttaccggcggcgagggaggtccggcgaagggtggggtcggctcggggagactctggcggtcacgtcgaggtacggctcgacgtcggagatggccggaatcgcccggtccacgcgtgcaggcgggtgtcctcgtcggcggcgagtataccggccaaaccacggcgaactggttcaatccgagggcatggtgagcttcacggggtcacgcagcgactgtgtgcacaaggaatcgaaggatggtggagtggtttacccggtccacgtactccggcgggggcgagagctccggcgagcgtggactggcttctccggcgaagtaaactccgattccttgctcggggagcctcacgaaggtgtgcacagtcttctccgagggctggacggggttgggaatggctctactggccggtctatggtgacagagggattgggcggccgcggactcgctgcgcacgggcaaacggcgacgagctaa

SEQ ID NO: 34182 - DNA, 891 bp, Zea mays
  Peptide Sequence Number=SeqID_75961
atggggaagcctgtcccatcactcctcatgctcctcctcagccgaggcagggtcccactcaacagtccaacccggtggcaagtacaatggatcaagcagtctcattatctgcgagaagcagacgattcgaatcgagtttttatccttgcaagatcagggctcaccgccttggcgtacaatgcctcactgaccccgactggccgtcgtgcagtgaccgcacttgtacccaccataaccggaatgcaggtcctctggtgcgggctcgggtgctggatctggggctacctcctgagcagctccttgctccggcacgaggatgtactctccgtcagcaagattacagtctatcgaaatgcaatgaacattccttccccttatgcaaacagtaaccgcgggaaagaaaagggcggcgcggcttaccggcggcgagggaggtccggcgaagggtggggtcggctcggggagactctggcggtcacgtcgaggtacggctcgacatcggagatggccggaatcgcccggtccacgcgtgcaggcgggtgtcctcgtcggcggcgagtataccggccaaaccacggcgaactggttcaatccgagggcacggtgagcttcacggggtcacgcagcgactgtgtgcacaaggaatcgaaggatggtggagtggtttacccggtccacgtactccggcgggggcgagagctccggcgagcgtggactggcttctccggcgaagtaaactccgattccttgctcggggagcctcacggaggtgtgcacagtcttctccgagggctggacggggttgggaatggctctactggccggtctatggtgacagagggattgggcggccgcggacttgctgcgcacgggcaaacggcgacgagctaa

SEQ ID NO: 34183 - DNA, 597 bp, Zea mays
  Peptide Sequence Number=SeqID_75962
atggtcaggccgaccccaatttcatgtccgccgctcggagaacccaaccgtagccccaatcggccggtctgcacgctcgccggagctcctccgcgcgctgccgacgtcagggacctcacctgtggagaaatagaacctcagggaccccgaaacggagaagagagtgaagtgactgaagggaagacacaaccacctttggactctcgggcaaggacttggctctacttcgacatctgcgagtccaagcctgactcacctgtgaacaaaggcaagccccgaaaggatggcttctacctgcaagaatattttcatttggagcaatggtgggatcttactgcaaagttccctgtgatgctcttttcatccttgggaacagaaacaatcctaaggatggaacatacccttgagagtcttttccttagtcgggtgaggaagcgacaaagttttgttgcttttgctccaaggtggtatctaatgaagaaaaacaagaatgaagatacgggaggacttggtcctccacataggatctttttgtttgataattattgggaggagtttttgcctcccttgatatgtgtactcagcactcgtttatag

SEQ ID NO: 34184 - DNA, 624 bp, Zea mays
  Peptide Sequence Number=SeqID_75963
atggatgctatagcaagattgttgttggatcatcagacaacaactttgttattagctgatccactggttgccattgaaaatcggaagaaaattagcgccaaacttgctcggtcagtccaactgaataccattcgccatggtacagtaactgaacggatatggttgccagcatggcttgctcgtcgacggcgacctctctgcgcgaagattcacgccgccgccgtgatccgtgttcactggcggttggataactacggcagagaaaagatctcacggcggggaagggataggattgcgccatggatattttcgggttgccatggtctcgcagtaccccgaccacgtgcatcaacaacgtggccgtgcggccgtcaccggagtttgcatcctccgccgcgattgtgccactcttccgaaaacgaagaagagagtgaagtgactgaagggaagacacaaccacctttggactctcgggcaaggacttggctctactacgacatctgcgagtccaagcctgactcacctgtgaacaaaggcaagccccggtgcatgcaaccccttccttgtgtttttaaatacttttcgcacactttaagtctagtgaaatgtgcattaagtctatag

SEQ ID NO: 34185 - DNA, 540 bp, Zea mays
  Peptide Sequence Number=SeqID_75964
atggcgcctctggcaaggcctgactgcctgtcagtctcactctgtcaagtggcactgcagtcggagtggcgcaggcggcgctatccttctgtcagaccgcacctataccttgaagctgttattgtgtgtctggtgctgagtgccgactgtcgttggtctgtaactctgtatgagttaagtggtgccaaaaagtggtcgttttcccttcctttgatctgtacagagatccatggtagccgccggggtgctggtaacgttgaggtcatctttcctgagtctcatgtggttggtggagcccctgcatcctctgttgctgacagcatcgagcctgtgtcgacatcgttggccgctgcagattcttcggcacttgctgagaaggacattgcagcgctgtctcctgagcttcgtgcacaagcaattgatccgaagagcaggcaaggtcacaggaccctggatggaagtttgggaggtggccagacactgtcacactgcaaaggactttgttcagtgtattttctgtttgaagattcttccttctag

SEQ ID NO: 34186 - DNA, 558 bp, Zea mays
  Peptide Sequence Number=SeqID_75965
atggcgcttcctgttgacgtggcgggcccgcgcccgaggtcgggcgacgtgggggctcctccgaggctggggtcgagtctgtcttccgtggccgaggccgagcccgagcccctgggtcgggcgaggcggaggtcgttcggcagaggccagggcggagtccgagccctggggtcgggcgaagcggagcctctgcagctttatgctgatgggggttaccagctgagaattaggcgtcttgaggagatccatggtagccgccggggtgctggtaacgttgaggtcatctttcctgagtctcatgtggttggtggagcccctgcatcctctgttgctgacagcatcgagcctgtgtcgacatcgttggccgctgcagattcttcggcacttgctgagaaggacattgcagcgctgtctcctgagcttcgtgcacaagcaattgatccgaagagcaggcaaggtcacaggaccctggatggaagtttgggaggtggccagacactgtcacactgcaaaggactttgttcagtgtattttctgtttgaagattcttccttctag

SEQ ID NO: 34187 - DNA, 459 bp, Zea mays
  Peptide Sequence Number=SeqID_75966
atgggcaagagcaagaagggcggaagttcgtcgcaccactccggcgacaagcgaaagcgtgagccgagccctccctcggaggacttcggcgattccgagtactcggaggaggagttctcctctgagtccgaggggtcgccggtctacacctctcccccggcatcgtccgatgattcggacgattcccagggaatcgccgctgaggtgtggacatacatccgggtcgtcgagcgctccgggctcgagggctcggatgagtcggaggtctcctcgaacgagaactcctcatcgtccgaggggagagcggcggtgacggcgacgacgagggcgacgacgacgatggaggcgacggtgatggtgacggtgacggcggcaagggcgacggcgacggtggcgacgacaagagcaacggtggcagcagcaaggccagtggcaaagcaccaatggcttaaatattag

SEQ ID NO: 34188 - DNA, 459 bp, Zea mays
  Peptide Sequence Number=SeqID_75967
atgggcaagagcaagaagggcggaagttcgtcgcaccactccggcgacaagcgaaagcgtgagccgagccctccctcggaggacttcggcgattccgagtactcggaggaggagttctcctctgagtccgaggggtcgccggtctacacctctcccccggcatcgtccgatgattcggacgattcccagggaatcgccgccgaggtgtggacatacatccgggtcgtcgagcgctccgggctcgagggctcggatgagtcggaggtctcctcgaacgagaactcctcatcgtccgaggggagagcggcggtgacggcgacgacgagggcgacgacgacgatggaggcgacggtgatggtgacggtgacggcggcaagggcgacggcgacggtggcgacggcaagagcaacggtggcagcagcaaggccagtggcaaagcaccaatggcttaaatattag

SEQ ID NO: 34189 - DNA, 318 bp, Zea mays
  Peptide Sequence Number=SeqID_75968
atgtgtgagttttcaaaagaaaatgcttttcaaaatgtgtatgatgaagggttttcacccttatcacctttgagtagggacgatcagggactccctggtttaggggagggcctaagggttatgaaggctggggagcaccgggaggataaggagggggaaagttttgtccggtttggacatggtggtggcctgactccttctggtataaccgttaagcctcctgggactagtaattgtatcacatttgagtcccagaggatctggggcgcttcaggtggtatcagagctgttaggttggccgcaggacgtaacccttag

SEQ ID NO: 34190 - DNA, 519 bp, Zea mays
  Peptide Sequence Number=SeqID_75969
atggctcagccagagaaggtgaatgctgatcggcctcctgggactagtaattgtatcacatttgagtcccagaggatctggggcgcttcaggtggtatcagagctgttaggttggccgcaggacaagatgcagagaagcgcaaccgtaagctccatgtggatctcaccacagctcaagcccgtgcaactgccttggaaagtcatgaagtcattgttgttaaagccctgaagcaagctaaggatgagcacgtccagaagttgatggaggcctacttggtaacccataaccaacgtagagccctgcggatccaagaacccgctccatccaacccagttcaaaccatgagagttgaagatccccagattcttgaaggtcacccggtctatatcagaggagaaaagaaggcttgggaactcccagaaggagccatagtcttggaaggaattccagtcttccctcaggctataaataagccagagcaccctgagtcctcccaagatccctcgccagagttgtga

SEQ ID NO: 34191 - DNA, 291 bp, Zea mays
  Peptide Sequence Number=SeqID_75970
atgaagcacaaaaccgcagctctcaagctcactcaaagatttctctccaaagatttgaaatgggagaggcaagagatatcagaggtcagaggggtcagagaccagctgaactgcccctcaggaccagttcaaccggtcttgaccagtgagtttaggagagaaaaccccagctcaactgcccggaggcaagttcagctgctgaagaagctcaactcagctgaagtcaagttcagctggaaagctcagctgcagttgaagaagttcagctgcttttcagcaagaacactctag

SEQ ID NO: 34192 - DNA, 366 bp, Zea mays
  Peptide Sequence Number=SeqID_75971
atgaagcacaaaactgcagctctcaagctcactcaaagatttctctccaaagatttgaaatgggagaggcaagagatgtgtgtgagagagagggaggcctggcagcctgtctgccagtctgactggcagactgacgcgcagactgacctgcagactgaggtcagaggggtcagagaccagctgaactgcccctcaggaccagttcaactggtcttgaccagagagtttaggagagaaaaccccagctcaactgcccggaggcaagttcagctgctgaagaagctcaactcagctgaagtcaagttcagctggaaagctcagctgcagttgaagaagttcagctgcttttcagcaagaacactctag

SEQ ID NO: 34193 - DNA, 372 bp, Zea mays
  Peptide Sequence Number=SeqID_75972
atgagcaagaacgcaagagacacaagatttatcccgaggttcggtcacaccacaaaagggcggttgaacctccccctagggcggttgaacctcccctggcaggcctggcagcctgtctgccagtctgactggcagactgacgcgcagactgacctgcagactgaggtcagaggggtcagagaccagctgaactgcccctcaggaccagttcaactggtcttgaccagagagtttaggagagaaaaccccagctcaactgcccggaggcaagttcagctgctgaagaagctcaactcagctgaagtcaagttcagctggaaagctcagctgcagttgaagaagttcagctgcttttcagcaagaacactctag

SEQ ID NO: 34194 - DNA, 171 bp, Zea mays
  Peptide Sequence Number=SeqID_75973
atggtcgtccccctcgtctccggcgagccctcgccgcgagaccgagcggcgccaccgcgctcagacaacgagcagcccgtggttcctgagtgtgttgccgaagatcttcctgagcaacaacctcctgaaggcaagtgtcctcagacctatcatatcctatttactttataa

SEQ ID NO: 34195 - DNA, 381 bp, Zea mays
  Peptide Sequence Number=SeqID_75974
atggattgcgcggagttcgttcctgggaatgcggtgctgacggtagggagacaaatccgacgactgggtcccactatcaatggcgtctatgaaaggcagacacatggggagtggactaggcagcgacgctgtctgtcagcgcttcatgccaagtgggccgtggcaagagtgctgggtcttgtggtcaaggagatctactcggccgaggatgatccattttgtcattatgcatataatgaacaacaatatgcacatgattatgaagtggatttggacaacgagcagcccgtggttcctgagtgtgttgccgaagatcttcctgaacaacaacctggtggaggcaagtgtcctcagacctatcgtgtcctatttactttataa

SEQ ID NO: 34196 - DNA, 153 bp, Zea mays
  Peptide Sequence Number=SeqID_75975
atggcgagagtagcgtgtgccctccgtggcaagaggctggacggtgacaacgagcagcccgtggttactgagtgtgttgccgaagatcttcctgagcaacaacctggtggaggcaagtgtcctcagacctatcatgtcctatttactctataa

SEQ ID NO: 34197 - DNA, 459 bp, Zea mays
  Peptide Sequence Number=SeqID_75976
atggccttcacgccggcgcgggagcaccagagggcgctgcacgcggagaggcggactaatggcggcgctagattgctccggcgagcaatcgcgcgaacaacagggcagtacacaagaaaattaggggcgcacacaggtttctcacctcgaggggaagtgatggtgtcacggagcaacgacggtggcgcagggacacgacggacgacggtgtcgcagctccggctgcgcgagaatcactccgggtgcgaacgcgacggtggccgcagaacaggcggcggtcggcggcgggcggtggcggggctctctgcacgcgtgggcagagcgagagagagagggcgagcaagtctggcagagggcgcaaatgggcgaggggaggtgggcaagcagggcacgatgttcaaaaggggtgcgggggctcggacgtggccggagaacgcgtggacgtgggcgcgtccatga

SEQ ID NO: 34198 - DNA, 438 bp, Zea mays
  Peptide Sequence Number=SeqID_75977
atgaccggggataagcaaaggcaaaagccaacaagcaaaatctccaacacctacatcaacaaggtggacaaaaaggctgctacaccatatttgatcaagaagaaaaagaatggaaaggtgatagcaatcaaggccaacaagcaagccaacaaaggaaagggggccaaacacatctgggtgccaaaggaaataatttcaaccatgaaaagcaccaagaaggtttggatcccgaaagggaattcactggatgctagaattacttggaccaaggaatttaggaaagcaacacctcaaaagaagacattaagaagatccaagaaaagtccaagaatgaagatgtgtgttgcctgcggattgtctgtgcgaggagcaccgaactgtctggtgcccacacgccggactgtctggtgcaccaggaacctcagccccaacggctag

SEQ ID NO: 34199 - DNA, 180 bp, Zea mays
  Peptide Sequence Number=SeqID_75978
atggcggcgcgaagggcaggaagggcggttctctcttctctggctagatctctcgggttgcaaaaacctaagaggcaggcaggaagcggagcaaagaaccgtcaccggaccctctcctgggtatacaaagaccaaggcgaggatggttccaacgttccgcccggaccgattcacatttaa

SEQ ID NO: 34200 - DNA, 591 bp, Zea mays
  Peptide Sequence Number=SeqID_75979
atggcggcgcgaagggcaggaagggcggttctctcttctctggctagatctctcgggttgcaaaaacctaagaggcaggcaggaagcggagcaaagaaccgtcaccggaccctctcctgggtatataaagaccaaggcgaggacggttccaacgttccgcccggaccgaacgcgggattcaaaaacgcgaggcgaaacagccgttcttcgaacggctcgcgcacgcgcaacggccgccccgccaactactcgccccgtcgcattgactccgcggctggacaggcggcgcttctggcaggagcagcgggcgacgcttcgcctttgccgaaacaaccgcgccaaaaaaggaaccaggctccgggcctccttactgatcagaggttcgaaggctggcccccccgaagggttcaacagccgcctcagatcgcgtgggccctacacctactactggtcagaggttcgaaggccggccccccgaagggttccacggccgcctcaggctactcgggctccatgcccattactgatcaggggttcgaaggctggcccccgaagcgttcacaaccacctcagacgccgagcgagggatga

SEQ ID NO: 34201 - DNA, 462 bp, Zea mays
  Peptide Sequence Number=SeqID_75980
atgaatcgggaaatggtgaaggggtttacccggtccacgtgcgccggcgagttcttgaactccggtgagcgcgatttggcttctctggtgatgcgggccctcggttcaagcttgggcaaggctcacggtctcaccaggaagctatctgggggcttgaatcgaacggagggggactggagaggggttggccacggcggtggctctcgagcggcactggcgggctgcggggaggtcgccggaggcaagggctggctcgggcgagtccggcgaggtacggaggaagcaatggggaaggcaaccgagcgctggggtgggttttataggcgcggacgcggccggggcgccggctcaaccgtttggcgcgacgcgggcacgcggggcgcgcgcgggcgtgccctggcgagctcagagcgcgtcgaacacgtggcgcgttgcttctgcccgtgttcttcgctctgctga

SEQ ID NO: 34202 - DNA, 462 bp, Zea mays
  Peptide Sequence Number=SeqID_75981
atgaatcgggaaatggtgaaggggtttacccggtccacgtgcgccggcgagttcttgaactccggtgagcgcgatttggcttctccggtgacgcgggccctcggttcaagcttgggcaaggctcacggtctcaccaggaagctatctgggggcttgaatcgaacggagggggattggagaggggttggccacggcggtggctctcgagcggcactggcgggctgcggggaggtcgccggaggcaagggctggctcgggcgagtccggcgaggtacggaggaagcaatggggaaggcaaccgagcgctggggtgggttttataggcgcggacgcgaccggggcgccggctcaaccgtttggcgcgacgcgggcacgcggggcgcgcgcgggcatgccctggcgagctcagagcgcgtcgaacacgtggcgcgttgcttctgcccgtgttcttcgctctgctga

SEQ ID NO: 34203 - DNA, 105 bp, Zea mays
  Peptide Sequence Number=SeqID_75982
atgggcgtggagagatgcatatccttgagagtcttttactttgtcgggtggtacccaaagaggagaaccaagactagagctgcgagagggaaggccctccgttaa

SEQ ID NO: 34204 - DNA, 177 bp, Zea mays
  Peptide Sequence Number=SeqID_75983
atggcgagagtagcgtgtaccctccgtggcaagaggatggacgagtcattgattattgataagccttaccttgactcccttaaagccagcatatccttgagagtcttttactttgttgggtggtacccaaagacgagaaccaagactaaagctgcgggagggaaggccctccgttaa

SEQ ID NO: 34205 - DNA, 207 bp, Zea mays
  Peptide Sequence Number=SeqID_75984
atggcgagagtagcgtgtaccctccgtggcaagaggctggacggtggtgtatctgtgctctcggttgagtcattgattattgataagccttaccttgactcccttaaagccagcatatccttgagagtcttttactttgtcgggtggtacccaaagacgaacaccaagactagagctgcgggagggaaggccctccgtttttattaa

SEQ ID NO: 34206 - DNA, 556 bp, Zea mays
  Peptide Sequence Number=SeqID_75985
aaaatatggtttaagtgatgatacagtggattttgttggacatgcacttgctcttcatagagatgatcgttatctcgatgaaccggcacttgatacagtgaaaaggatgaaactatatgcagactctcttgcacgctttcaaggaggatcaccttatatctatccactatatgggctgggtgagctaccacagggttttgcacgactgagtgctgtttatggtggtacttacatgttaaacaagccagattgcaaggatctgagtcttctgcttctaacttctgagagagatccagggatcatacctcgcaatgcacatcctccagaacccgaagggtttgatggcaatgcagaggttggggctaaccagactccacccatcagaaatgccgagcagataacaatttggaaggcaatgacaaagacccctgcatctattgccttaatcatctacacattcattgcagtttggtttgttggtggcctctctgtgttccatctgtatctcatgagcacaaatcagttgtcctacttctgctttgtagacaacatatga

SEQ ID NO: 34207 - DNA, 1008 bp, Zea mays
  Peptide Sequence Number=SeqID_75986
gatctgagtcttctgcttctaacttctgggagagatccggggatcatacctcgcaatgcacatcctccagaacctgaagggtttgatgacaatgcagaggttggggctaaccagactccacctgtgcgtttgccccgagtgaaagatgttgttgtcaatggaattactgtgaagataaaatactgtgacacttgcatgttgtacaggcctcctcgttgctcccattgctctatctgcaacaactgcgtggagcgttttgaccatcactgcccatgggttggacaatgcatagggcttaggaattacaggttcttctacatgtttgtattctcaacaactctgctctgcctgtacgtctttgggttctgctggacaacatatgagaacttcaggtatcgctatgatcaacgagccaacccatacaacaggggaatcatggtaaacatcaaacagatcttatttaccacgatccctccttccaagaacaacttctgtggtagggtccaacaggagcatggtctaaggcctcgtccaacaaatggtttcatgagtccaaacatggggagagctgttggtgacatcgagatgggtagaaaaccagtggcttgggatgagcctaggatggcagctgagattggtgatttaggagcaggtctgagcaacctgctggaggacaaggatggcaggtttcgtagcgcatctccagatctcagccgcgacgcccttgcagttggaggaggcttagaagaggaaggctcctcggcgatgaacgctgggcgttcaagctggggagttgaagcagtatggatcacctattcaccccctctaggtgctctcaaaaccgcatttcgctcgaggcctctctcggtggtcaccataactctgcttcgctcgaacctgccctcggacaaggtgaacagaagcaacaagaccgcggccccgtcagacttcaccaactacgatgatgcacgcgaccactgttccctcgcgctgcctgccaactcctga

SEQ ID NO: 34208 - DNA, 285 bp, Zea mays
  Peptide Sequence Number=SeqID_75987
atgggccaggccttttctggtcgcagggtggctacgaggaacacggacgccgaaaaggagacgcgacgggccctgctcccgctgttcctcaggccggtggttcggttcgcggcgcgcgtggtggaaggtgggccggcggtcgcggtggcaacgatcctgcaccgcgccggcgcactgcccaggaaccggggcctggagcgcctcgtccgagacgacgcgctccacggccgcggacaggactgcatcgccagcttcgtcgtcggcgtcatgcgctgcctctgctag

SEQ ID NO: 34209 - DNA, 3132 bp, Zea mays
  Peptide Sequence Number=SeqID_75988
atgtcgtgcgcgtacgacgactactatatcaaggaatatggcgtcatcttggcgctagaggtgacgcagaggaggaccgacagcaatgaccactcgtcatcgttgggcgtgtatggtggtgcctacctgatgactgataatgtacgagagaacttctaccggcagagtagagtctgcccaccaccatctccattctccactacgtggtccgtgcctcccccaaccgcccactcccctccttcccctcctcgtccttcccgctcctcatgccctggcgacgccattggtagcttcgcttcgtctgttggtcggagcgcaggggaagcgagaggggggagggcgagggcgctaggaggggagggaggagtccgacggagcagtggcaagatgttcgacagcttgctcaactccaagttctacaacaaatggtacccaaagattgcctcctcttcctcaggtttcttggtgctccgctcgctctgttcacggtcccagttggattcgttccttctcgcgcctgctgttcctcggctcttgggtagtttcttcgctggtaagcacgccttcaaatgcatccggacgcggatggctctgataaggcggaagaagcacgccatgatccggttcctgaagaaggacgtcgccgacctcctcgccaatggcctcgacacccacgccttccgaaggatagatggcctcttagttgagctgaaccatgcttcttgctatgatatgatcgaaggattctgtcattacattgggaagcaactgggaagccttcagaagcagagggattgccccccagaattcagggaagctgtctcaaccctgatatttgctgctgctcgctatcctgatttacctgaactttgtgacctaaggcacatattcacagaaagatatggaaattttgttgagcattttgttagccaggagttcattcggaaacttgacagtacagagttcactaatgaggaaaggttccaagtcatgcaaagtgttgctgaagaattatccgtcagttttgatgccaaggaattggaactcaagttatgggcctcactacaaacagaacatgatatgcttgagaagggttcaaggaagccagcagaactagcaatgccttcatcgagcaagcagatatgtgtcgagaatgcttcatgtgaagaacaagaggatatccttgagaagagtttgacaaggccaacagaaccagcaatgtctttatttgacaagacaaagtacaatggggatgctccatgtgaaagaaaaaataaggatatgcttgagaattactcaaccaagcccatagaactagcaactgcttcatccaacaagcagaaggttactgagaatgttccaggtaaaagaaactatgatgctgaacctgcacaccataccgagaaagtggagatacagttggtccaaaaagatattcagtctgttgctgatgcacatcatacaattgatgagaattcgaggaagcagcaaccttatgtgtctgatgagaaggaacatttgcagaaaccagtgtctcctgtggacactaacaggacccaaaaagatgttcagaagcttaacagaagagctgtccgccatttggaaaaggagctgatggaggcagtggaacttgatctcaacggcctaccaaaatttggatttggcgcagtcagatttcccgaagcagaaggcaacaaaacagttcaactaaatgtcaagccaaatgaggccgtgagagatttccatattgaaaaagagaatgatgaagtccttcattgttcacgtttgcctggtggttctgaacacaatgggggacatgcagattcagggctaagagctcagggcctagagaatcaaggacatccagtgagtcctcttagtggtaacactagaaaaaaggctccttacactaagctgaatgctgtaaacataaagaatcctactgagaaacaagcaaacaatggtttcttgcatgataaaccgcaacatttagctgatctgggatacccggtgcagaaaggacaaggagacccagagagggcacttactatgctgcctccttatgttgaaccaaagtctaacatgcaacctgtgaatgatgatcctgaaaagcaaactccaagtggttacagaaagcccaacatccctggacaaactgatcacttggaaaacaaaaatgtgcttcgacctgtttctgtcagaaggagaactgcaaagctgccagcacctgttgatgcttatgttgaggtgcctaacaatgcgaaggtcacaagccaaacacccaaaagtcacagaagccactcaagcaggaggaatggtgctaaagatgaccagaaccggaaatgtaatgggactgatgatgttggtagcgagacgaatgctcagataactccaagtagccaatcaaagcacgtaggcaggaggaatggagctttaaaccacaagaacaactctggcaggttgatgcagcgtatgcaacctgaagcagctgagactgctattgattgtggtaatctcttgcctcgaaatgcaaatggacagatgcgacacaacagcgggcgcggtggagacatggatgaggaggaaaggatgatggacaagcttttgatgcactatagcaagaaaggttcggatctgaccaacaatgaaacacatacagatgctgcgcagaaggtttccttgcatcccacgggtagagctatctcgctaccacctgaatctgttggcccgagcaaagatgcgaaggttcctgctcgatgcacatcacttcagccggaaggtcctaggagtgcgcatgttcacccaaaaatgccagacttcgatgaattggctgctcggggatgctttctcttcaactgcttatatagatctgtacgtttgtttgctggagaggcagcgcatgacgccgacgacgaagctggcgatgcagtcctgtccgcggccgtggagcgcgtcgtctcggacgaggcgctccaggccccggttcctgggcagtgcgccggcgcggtgcaggatcgttgccaccgcgaccgccggcccaccttccaccacgcgcgccgcgaaccgaaccaccggcctgaggaacagcgggagcagggcctgcacgagcacgagtgtcgtcagacaacataa

SEQ ID NO: 34210 - DNA, 243 bp, Zea mays
  Peptide Sequence Number=SeqID_75989
atggcgggcggaaatacgctcgccgaagctaaggaacggtggctggccggtgagggattcgagttagggatcaaggtgaacatccctgatctttggctcaaggactggagcaagaattacatcattgcatatcttgcaattaagcattctcatagaatttatcaaacattgtctatgtcctactcgaataaccacaacccatgccttgcctatgtattaggagccatttccattctaatataa

SEQ ID NO: 34211 - DNA, 336 bp, Zea mays
  Peptide Sequence Number=SeqID_75990
atgtgcaatgcatcatgtagggctccactagacatggaaatagaggataccatactcttagctttacagaagcctgaagtgcatgatgacattgctcgcgatacgtgctgcaaatttgggatagatagacctcaagttgtacctatgcaaggactacctcagtttttagtagaagaaaatgttgttggcttgggatttagcatggttcttggattctacaaagcgattgtcttcaccaatcctttgataaattctattagaatgcttaattgcaagatatgcaatgatgtaattcttgctccaatcctaatgaaccagttcttcacaataggctaa

SEQ ID NO: 34212 - DNA, 495 bp, Zea mays
  Peptide Sequence Number=SeqID_75991
atggatgccgaaccccctctctttagtgcctttctttacagcccctgcgtcgccgtgcgttctaactatgatgataatacaaaagttgtagaggacttcttaagctttctagaaagtcttagttcacgatttttggatgaatattttgaacaatggaaccaaaatacaggacattttcctacttcacgtctggatgccatccaattaatatcttctctacgatattgcaatggaagggactgctcttatgtgttattggtgctattccgcttgtacggccaacgaaataggtcctactacacaagggaaatagaggataccatactcttagcttcacagaagcctgaagtgtatgatgacattgctcgcgatacgtgctgcaaatttgggatagatagacctcaagttgtacctgtgcaaggactacctcagtgtttgaaccatacttatggaatgcatgtcaaaggaaaagatgaaatggaactcaaattttag

SEQ ID NO: 34213 - DNA, 261 bp, Zea mays
  Peptide Sequence Number=SeqID_75992
atggcacaagcagcgtaccaaatgtggttggtgcgagttcttatttatacgctcggcacgctccaaattggagggtcccgtctgtcattgactgttgctattctagcaaagggaaggtaccttcggactcaggttaaaagcatacacgatgagaagagcatgatcgtgacgaaggttgccgttgttccgaagctacgcgtaagggagcttcgactcaatcacggaaaaaggaaccgacttaaagaggaaacggctatctag

SEQ ID NO: 34214 - DNA, 216 bp, Zea mays
  Peptide Sequence Number=SeqID_75993
atggataatattgaattacatttataccttcggcttgacagaagtatatctgttgggggccttcgtcctccgaaggtcctcaaaaacgttaaaagcatacacgatgagaagagcatgatcgtgacgaaggttgtcgttgttctgaagctacgcgcaagggagcttcggctcaatcacggaaaaaggaaccgacttaaaggggaaaaggctatctag

SEQ ID NO: 34215 - DNA, 327 bp, Zea mays
  Peptide Sequence Number=SeqID_75994
atgcagggttcctggctgaccgccatcgcagcaaaatcaaccagggacctccctacactgaccacccccctactgcccttgcccctttcgggtaaagcaatagcaaactacccaagtgaatcaggggtaaacaagaactatggactaggcctcaatttctgtaaatgccaggggcctcgggacaagaaacccgagacacagtcaacagttacaatggaccgcgggttgttttcaccaaagtccgaggggttcatgtgcaaacacgccaggccgaaggggtatccgatgatcctagccgtcagattaggaacggacgccccagattaa

SEQ ID NO: 34216 - DNA, 264 bp, Zea mays
  Peptide Sequence Number=SeqID_75995
atgtcaactgagaaacgccacctagatcagatcatactcctcgccttgtggctcctcctgaaccacctgttcttctcctgtggggggtgtaaagcaatagcaaactacccaagtgaatcaggggtaaacaagaacattattgggtacaaagtggtcaagggcacaacttgcctggcacttgagaatccagtctggactgcgcgccaaatcatagaaagtgcaggggctaactcagaagattcaccagacccaggggctctttag

SEQ ID NO: 34217 - DNA, 492 bp, Zea mays
  Peptide Sequence Number=SeqID_75996
atgcgtttccgcaaaactttcaggctggaggaccagttcactccgcgatggttcaacgtgacggatgcggtcgcctccacgccgtggggtgacctgcaaatttgtgagtacagcggcaaatacacggagcaccgggctgccatagacagctccagcaccaccgacgacgagacagacgtcacttcggtccagttcgacccatggcaatatggtgccgatatgggacaataccgtggaaatgagattcttgctgcagaaggtgttttctacttccaacaagttaccccaggaacccccataagaacaaggttttgcaatcatgatagccacaatgtagtaaaagtggcagctaattccagagttatgcttcctgtggagcaaggaagcgaatgcaagccagcgttttgtattagtgcattctgttcagttcttacttcatcatcccgtgttctcgcgtgtgccatggccgagtggcaagctcaacactgctag

SEQ ID NO: 34218 - DNA, 999 bp, Zea mays
  Peptide Sequence Number=SeqID_75997
atggaggagaggcgtccatgggaggagaaacaacaacctgctcccaggcgtgacttcaatgaggaccgagcgcaggggaacgacagggctgagggcgagctcggcgagcaccaaggatttgcagacaacttgttcaaagaggctaagaccaagcttgacagcctaaatggaatcatatatagcaacattatacatgctcactgctccttcaaggcgatatgggacaagaccttggaaatgagattcttgctgcagaaggcgttttctacttccaacaagttaccccaggaacccatcagaacaaggttttgcaatcatgataagcaaatagagcaagcatatgatgatcttttgaattcgtcgaagcatactttgagaagcatgatggagctacaggaggctttgcttgagagtaatcaggctacaaaggatgccaatgtagcttatgtttttggtcaatctgtcgcgattagtgcgagaggtgagaggcctaaagattgggttccaccagaagatgtttctgctgtttattacgccaaatgtgatgacattgacgagacactccctatgggtgctgacgggaacgatgggattgtagacatcttctctgcacattcctactatgatgcagcagggcataactgtgatgaatcattttattatctgttttatggtgaaaaattgaaattgtcacggaacctcaagatattagacctacctacagatgtcattgttccaaggaccttagacagtcttgcaggtgcacccaatagcttgataggacctgattcctgtatctccaccatacctcccaagagcgttcatcccatatcacagacattacatatcagtaggggacaaccttggaatagaagcagcaaaactcggcagtttcttcacctacaacaatttttgttcgaaaaccctgagtatggagtgtactttcgcaagtgttacccgaccaaaagaaaagactctcaaggatatgttggcctttag

SEQ ID NO: 34219 - DNA, 363 bp, Zea mays
  Peptide Sequence Number=SeqID_75998
atgactggggataagaaaaggcaaaagctcaagcaaaagccaacaagcaaaatctccaacacctacatcaaaaaggtggacaaaaagactgctacaccatatttgatcaagaggaaaaagaatggaaaggtaatagtaatcaaggccaacaagccagccaacaaaggaaagggggccaaatgcatctgggtgccaaaggaaataatttcaaccatgaaaagcaccaagaaggtttggatgccgaaagggaatctcattgtaaggaaaatgaagtccccggagaaagacaacaaccttccactgcaaatcttcaagacctcttcattttacatcatttacatgtcttctccgacatttggttag

SEQ ID NO: 34220 - DNA, 771 bp, Zea mays
  Peptide Sequence Number=SeqID_75999
atggcggggaaaaccaagggtgggaagaacaaaggaaaggcgcagggcgctggtcagtccgcctctgctgagccagaggtgccggcgactgacggagccgaagtggtgaatccagagaatggggaagtaaacgaaccccccgtcacggaggatggtgtgaaaaatgttgagaaaggagacggggatgccctggaggttgtgcagcctgcaagaaagccagctgaaggagagcttcatctatacgctgttcctgtcaggacacaatcaggtgaaaagcttgagctgcagctaagcccaggagattctgttattgatgttaaacaattccttttggatgctcctgaaacatgcttctatacatgctacaatttgatattgcatactgaagatgggtcagctcatcagttggaagactacaatgaaatatctgaaatagcagatataacttctagtggatgttcactggagatggttgctgcaatatacgatgagaggtctattaggtcacatctccgacgtgtgagggagctactatctctgtctagtctttatgtttccctatcaacatccttagctctgcatcaggagtctgctcaaggaaaatctgcaggtcctgaaaaaggccctattcaggagcttgatggtttaaatttcatggaggatagtgctggcgctctcactaatttattggcttctgcaccagcagagataaaatgtgttggaagcattgttttttcgtctttcaatcctccgcctagttatcggaggtaa

SEQ ID NO: 34221 - DNA, 597 bp, Zea mays
  Peptide Sequence Number=SeqID_76000
atggcggggaaaaccaagggtgggaagaacaaaggaaaggcgcagggcgctggagagcttcatctatacgctgttcctgtcaggacacaatcaggtgaaaagcttgagctgcagctaagcccaggagattctgttattgatgttaaacaattccttttggatgctcctgaaacatgcttctatacatgctacaatttgatattgcatactgaagatgggtcagctcatcagttggaagactacaatgaaatatctgaaatagcagatataacttctagtggatgttcactggagatggttgctgcaatatacgatgagaggtctattaggtcacatctccgacgtgtgagggagctactatctctgtctagtctttatgtttccctatcaacatccttagctctgcatcaggagtctgctcaaggaaaatctgcaggtcctgaaaaaggccctattcaggagcttgatggtttaaatttcatggaggatagtgctggcgctctcactaatttattggcttctgcaccagcagagataaaatgtgttggaagcattgttttttcgtctttcaatcctccgcctagttatcggaggtaa

SEQ ID NO: 34222 - DNA, 159 bp, Zea mays
  Peptide Sequence Number=SeqID_76001
atgactaagggcccgtttggcacagctccagctcctgattctaagcgaggatctggaggagtcgtgccaaacgggagaatcaggaggatcagctcctcacgaggatcaggatctggagctaaagaagcaggagttggagctttgccaaacgggccctaa

SEQ ID NO: 34223 - DNA, 1381 bp, Zea mays
  Peptide Sequence Number=SeqID_76002
cggccaagaacgcttgtggcgtggcgtggagctggcaaccgtcgtggatttgatcttccctgggcgcctcgagcatagcggcgccggggaaggcggtgacgccaggtggtggcgctgcgccggcggtcagaagatgacgacggcgcggcagtggtggcggcgcgcagcggcggccgtcaaggacaggaggagcctgtacctgacgcgtgtggtggcgttgcggccacggccagtctccggggtggccacgcccgcgctgaggagcccgaagctggaggcggccgtgatccgcgcgaccagccacgacgagcgatccgtggaccacgggagcgcggcacgggtgttcgcactggcgcgcgcgtcgccgccgtcgcttcagccgctcatgtgggcgctagcgcgccgcgcacggcggacccggtgctgggccgtggcgcttaaagcgctcgtgctcgcgcatggcctgctcctgcggtccgacgttgcgccacgcgcggcgcgcctcggccgcgtcccctttgacctcgccgacttccgcgaccgctcgtcgccgccgtccaaatcgtcgggcttctccgccttcgtgcgcgcctactttcgcttcctcgacactcgctccctcttcaccgcccaggagctagacgccgccaacagcggcgaggccgacggcgaggacgcgcggctggacagcgtgaccaagctgcagcacctgctggacttgctcatgcagatccggccgtacggggacggcgtgcagcagggcctcattctggaggcgatggactgcgtcgtcatcgagatcttcgaggtcaacagccaaatatgcacgggcattgcccggttcctcgtcgccgttctcgggtcggccccgacgacgccacgggcacggccgggagagacgctggcggcagcgaggcggcgcaggggagtgcaggggatgcgggtgctgaggaaggccgcagagcagagcgcgcagctgtcgtcgtacttggagctgtgccgggacctgggcgtactcaacgccgccgagtttccggccgtggagcgtgtctcggacgatgacatcagggacctcgagaagatcatcatgaaccacgtcgtcgaagaacgcggcaaggacgtggagaaagaaacgaaggcgcttgtcgccgtggaggaaacccgactagcttccaagacagtggtgacaaaagagtgggtggtgttcgacgacgacgacaatgacgccgccggcgccaggccgagggcccgtttggcacagctccagctcctgattctaagcgaggatctggaggagccgtgccaaacgggagaatcaggaggatcagctcctcacgaggatcaggatctggagctaaagaagcaggagttggagctttga

SEQ ID NO: 34224 - DNA, 252 bp, Zea mays
  Peptide Sequence Number=SeqID_76003
atggtgtttattctgataaacatccgagagacgcattggtatcttgtcgtgatcaatgcaagaaatatggagatacaagtgctcgattcacttggtacttcacaagaccgcaaagacctcactgactctgatgcaaagattattcgaaggaactttgtaattgatctgttaagttatgaggacaattcgtgtcgatatatcatccctgcaaacatacaacagcgacttatcgatatcgctaaaaaagattag

SEQ ID NO: 34225 - DNA, 1989 bp, Zea mays
  Peptide Sequence Number=SeqID_76004
atggaatctctatttgtaggcttgtctcataacaagccaaaaacatcagtggcaaccgcaatagttcgagaagttttatctcatgattggttgctcctagactatatttgcacgcaaggtgatcttgctctcatcgattttatcaaggaaatcccttgtgaaccaagggtagaagtggttcttattgatgatgcctttgttgaaaggaagtggatggagtgtttatttcagccgagcgcatatttaggtgacgaggttatagactgttacataaatttgataaaagctcaaaagcatctaaagtgtcgatctggaggtcgcgttcacatagaaaatgctttccagttcaatttcctgaagcgagatggtgatcttgaaattaaaacagaggagctatatccaattaaagacatgacacacatatgtagcgctgaacgaagggtgttactttacctagaccatgacatggtgtttattccgataaacatccgagagacgcattggtatcttgttgtgatccatgcaagaaatatggagatacaagtgctcgattcacttggtacttcacaagaccgcaaagacctcactgactctattaaaggactgcaaagacaaatagatatgatatctcaacgtaaggagttaaaagaccacaggtggccagacctccaagttgcttcttggccgctcagagaaatagacatgggatatgcaaagcagacagatagctcttcatgtggcctctttcttttgaactatattgaatactggacaggggatgaactgtctgacagttttacccaggatgacatgtcacactttaggaaaaaaatggctgctatattactatcttcagacctgaataagagaagggggtgtctgttatacaaaaatgaaaaagaagttgactctggaagcccatctgatgttgagatattagaaaacccaacagattctaataagaggaaactactccacgtgcttgatgatagcgaagtagtgtttgaagatgaggaaggccctattactcaagcagacttgcaaaggtggtttgttgatgattgggataaaagagctcctgtaaaagtctctaacgatggttgcaccaatgactttttaatggttggtctttccacaaaggacatgccagtgaccaaagccgattcaatagatgttttatgtgattatatcatggcaatagaagacgatacgacactagagagaacatgggtgcgaagtttcaatccttttaagatagaaatatctgtcaaagacctgcaaaacatattaacaacaactcaagatatgattctaagatgttttgatatggctgttcggctgcttgccaataaagagtcacgtagaccgaaagaagaaatcataaataatagaaagcattatatggacatgtgtttttggagaatggttggttttggtaaacttccaaagtaccatcaggattctacaacagaagagttagccaaaacactcgattgttggccatcaatgaattattatatcacgggttgtagatatgttctcatgccatggaaattcaatggatgttacgcccttttcgtaatagatcatgttaaaaagcatgtgacttttattgattttacaccgactcaagattggtgtaaacacatgtcatacaagaggttcgcggaagcgattatcatggcctcaaaaaaatataagattgcttacagcaagaaacgttctgcatgggcggaggatatctttaagtgggaacatacaattcagactggtgttctaattgacttaagagggtttaataccggctacctcgttctacaagctatggccatgtgggggaatgacagacgactgaaatttgttggggatgcaaagactcttcgaaggaactttgtgattgatctgttaagttatgaggacaattcgtgccgatatgccatccctgcaaacatacaacagagactcatcgatatcgctaaaaaggattag

SEQ ID NO: 34226 - DNA, 531 bp, Zea mays
  Peptide Sequence Number=SeqID_76005
atgtctgctcaaatgaccaaccctgtactgttatgcaataatcctttgttcgaacactacactcacatccagcaaatagttctcatgccatggaaattcaatggatgttacgcccttttcgtaatagatcatgttaaaaagcatgtgacttttattgattttacaccgactcaagattggtgtaaacacatgccatacaagaggttcgcggaagcgattatcatggcctcaaaaaaatataagattgcttacagcaagaaacgttctgcatgggcggaggatatctttaagtgggaacatacaattcagactggtgttccaattgacttaagagggtttaataccagctacctcgttctacaagctatggccatgtgggggaatgacagacgactgaaatttgttggggatgcaaagactcttcgaaggaactttgtgattgatctgttaagttatgaggataattcgtgccgatatgccatccctgcaaacatacaacagagactcatcgatatcgctaaaaaggattag

SEQ ID NO: 34227 - DNA, 2217 bp, Zea mays
  Peptide Sequence Number=SeqID_76006
atggagttggaagatttcatcaggctcgactcgatctggatgagatggactctgctcgctgaggaccgaacaccgaagccaggcagccagccgaggaagccaggcgacaggcgacgccaagtcgagaacaccctaggtggtcgctcgcaggctgcgagtgagagccgtggcggagtcgccgtccttgcccacggaggaggacacagccgccggcgcagtgggatggcgacgccgacgcccatgcccggaagcgaggggacgctcgtggcggtgatgccgcggtccccgtccccgacgccggcggaggcggggacctcggcgaccgagacgcccgtgctaatattcctttacttccacaaggcgatccgcgcggagctcgaggcgctgcacggcgccgccgtgctcctggccaccgagcgcaccggcgatgtcgcggcgctcgccgagcgctgccgctttttcttcagcatctacaaacaccactgcgatgccgaggacgcgaactccatccagtcagctgcagtgatgcacttcaaagaggtggttgatcttaaggggcagagaacaggagggaggactggagtgctagcggtggtagtgaaacacaaagagcaaggtgggaagcgagtgagggacgcgacactgcgaaatatcgctgaggatcaggttgtttttcctgcagtcgatagtgagctgtcctttgtgcaggagcatgctgaagaagaacacaggtttaacaatttcaggtgtttaattcagcaattccaaatagcaggagccaaatcaactgcactggacttctactcaaaactgtgttcacatgctgataaaatattggagacaatcgaaaaacacttcagcaatgaagaaaccaagctacaaactgaaaatggttctaggccaggcaagcgaggaaaagatgcagtatcttttcctggtactaatggaagctactgctctcaaactgctgacattgatgcaagtccatgtagcaaaaagccttgttgtattcctgggttgagagtaaagagtagcaaccttggtattggttccctggcttctgtgaagtcctttcgctctttaccatacaattctactgctccttcaatatattcgagcctcttctcatgggagacagatgcatcattgtcttgttcggatggcatttcaaggccaattgatacaatattcaaatttcataaggcaattcgcaaggatttagagtacttagatgttgaatctggaaggctcattgatggtgatgagtcttgccttcgccaattcattggaaggttccgtttgttatggggtctttacagggctcacagcaatgctgaggatgaaattgtgttcccagcattggaatccagagaaacattgcacaatgtgagccattcatatactcttgaccacaagcaggaagaacaattattcgaagatatctctgatgttctctttcagctttcacaactacatgatagccagggccatgcccagactaaagttaatgaagtaaagcaaagctgtttccattcatctaatgacgttgattttactaggaagtataatgagcttgccacaaaacttcaggccatgtgcaagtctatccgggtcgccttgactaatcatgtccatagagaagaacttgaattgtggccgttgtttgacaaacatttttctgtggaggagcaagataaacttgtaggtcgtataattggttcaacaggtgctgaggttctccaatctatggtaccctgggttacatcagctctcactcaagaggagcagaacaaaatgcttgatacctggaagcaagcaacaaaaaatacaatgtttggggaatggctaaacgagtggtggaagggagctggaacatctgattcttcagcagaggcaccctctgctccagaagatagtcatttacaagataagcttgaacaaaatgaccagatgtttaagcctggctggaaggacatatttcgaatgaaccagagtgaacttgaggctgaggtgtattttggcatgcttgatgccttgttggctgctgaagagcttccggaggaataccgtgataggtgtcaggatatactgtgcaatgactgtgagaggaaaggcagatgtcgatttcactggctataccacaaatgcggctcctgtgggtcgtacaatacccgagttatcaagactgacactgcagattgctccacaccaaattag

SEQ ID NO: 34228 - DNA, 482 bp, Zea mays
  Peptide Sequence Number=SeqID_76007
ccgaggaagccagggtgccaggcgacaggcgacgccaagtcgagaacaccctaggtggtcgctcgcaggctgcaagtgagagccgtggcagagtcgccgtccttgcccacggaggaggacacagccgccggcgcagtgggatggcgacgccgacgcccatgcccggaagcgaggggacgctcgtggcggtgatgccgcggtccccgtccccgacgccggcggaggcggggacatcggcgaccgagacgcccgtgctgatattcctttacttccacaaggcgatccgcgcggagctcgaggcgctgcacggcgccgccgtgctcctggccaccgagcgcaccgccgatgtcgcggcgctcgccgagcgctgccgctttttcttcagtatctacaaacaccactgcgaccgagacctccgtcctctgttttttgtgtttctggccattttcccctgtcacttcctgttgggcggggggccttga

SEQ ID NO: 34229 - DNA, 1194 bp, Zea mays
  Peptide Sequence Number=SeqID_76008
atgggcggcgtcacgtccaccatcgccgcgcgcttcgccttcttcccgcccacgccgccgtcctacaccgtcgtggtcgccgacgctgcgacaggccgcctcgccatcccggagatctcacgggccctctcgcgccgccggaggcgggacggcgccggcgctgggggctcctcctcggcctcctccgtcgcggccgccgagaacgaggagggcgcggaggtggtgcgcctccggacccgccgcgggaacgagatcgtgggggtgtacgtgcgccacgcgcgggcctccgccacgctgctctactcccacggcaacgccgccgacctcggccagatgtacggcctcttcgtcgagctcagccgccgcctccgcgtcaacctcttcgggtatgattattctggttatgggagatctacagggaagcccactgagtgtaatacatatgcagacattgaagcagcatataactgcctcaaggaaaaatatagtgtcgcagatgaggatataatcttatacggccagtctgttggaagtggtccaaccattgatcttgcttcacgattgccagacttgcgagctgtggttttgcatagtcctattttatctggagtaagagtactatatccagtcaaacggacgttttggttcgacatttacaagaacatcgataaaattggtttggtaaattgtccggtgcttgtcatccatggtacatcagatgatgtcgttgactgctcccacggtaaacagctatgggaacattgcaaagtaaaatattctccactgtggttaaatggtggtgggcactgcaacctcgagctatatccagattacattaagcacttgaagcagtttgtgtcaagcgttagcaaaaaaacatcaaagccggaccagaaagagataatggcaaaggatggcactaccagtaaagaaagagaggaagcatactcggagaaacctcagccggcagctaagtgctcacagtcacagatctcacgtaagagcatagatagccgagttgggaaatccaaaacagtggatgttcctgataaatcacggatgagctcagatgacatcgacaagttccggaggagaaggtgcttgccttattatacggatcgtgctccacttatcaactgtgacacggcagcaagcggatcatgctccacatatcaattggaaactgttgggtga

SEQ ID NO: 34230 - DNA, 1233 bp, Zea mays
  Peptide Sequence Number=SeqID_76009
atgggcggcgtcacgtccaccatcgccgcgcgcttcgccttcttcccgcccacgccgccgtcctacaccgtcgtggtcgccgacgctgcgacaggccgcctcgccatcccggagatctcacgggccctctcgcgccgccggaggcgggacggcgccggcgctgggggctcctcctcggcctcctccgtcgcggccgccgagaacgaggagggcgcggaggtggtgcgcctccggacccgccgcgggaacgagatcgtgggggtgtacgtgcgccacgcgcgggcctccgccacgctgctctactcccacggcaacgccgccgacctcggccagatgtacggcctcttcgtcgagctcagccgccgcctccgcgtcaacctcttcgggtatgattattctggttatgggagatctacagggaagcccactgagtgtaatacatatgcagacattgaagcagcatataactgcctcaaggaaaaatatagtgtcgcagatgaggatataatcttatacggccagtctgttggaagtggtccaaccattgatcttgcttcacgattgccagacttgcgagctgtggttttgcatagtcctattttatctggagtaagagtactatatccagtcaaacggacgttttggttcgacatttacaagaacatcgataaaattggtttggtaaattgtccggtgcttgtcatccatggtacatcagatgatgtcgttgactgctcccacggtaaacagctatgggaacattgcaaagtaaaatattctccactgtggttaaatggtggtgggcactgcaacctcgagctatatccagattacattaagcacttgaagcagtttgtgtcaagcgttagcaaaaaaacatcaaagccggaccagaaagagataatggcaaaggatggcactaccagtaaagaaagagaggaagcatactcggagaaacctcagccggcagctaagtgctcacagtcacagatctcacgtaagagcatagatagccgagttgggaaatccaaaacagtggatattgtcgaacagtacctgagtgaggatactatagcatggaaatcaagcaactttattacatacatcatgctgcgaggaatggcatcagccgttcctgcagtggagaggaaagaactgttaaataagaaaaggaaccagaaagctaccatcatcatccatcagagacaaagccacttgactgaaagctggtag

SEQ ID NO: 34231 - DNA, 588 bp, Zea mays
  Peptide Sequence Number=SeqID_76010
gggtttccggacgggattccgtgcaagggaccttgcggggaccagcgccccagggaggcttgccagcggcccaccaaacggcgccacccagacgggccagagattccgcgcaaaaaaggaagggttccgccccgggggccagagatcccgcgccgaagtgggtggggcagattcccccaacgggtgcaaggcggcccagcgccagatggattgacgccagagcagccgggggcgggagatcccgtgccaggagattgggcgccgcaggaagccaaacggcgccaggcgcgggggcgggagtccgccccaagagcggcggcacccgggtgggccgcgaccagcaagccgcagcagccgacggcgcagcgcagggcgaagatccgcgcgggccgcaacgcgggacggagatccgcgcagagacggcggcgccgcgactgcagcggaggatgggtggccgcgacggatccgcagccgacggcggagcgcagggcggagatccgcgcgggccgcagcgcgggacggagatccgcgcagggacggcggcgccgcgactgcagcggaggatggggggaccgcgacggcggctga

SEQ ID NO: 34232 - DNA, 1044 bp, Zea mays
  Peptide Sequence Number=SeqID_76011
atggcgccgcagaaaccaacggcgcagcgcggggcggagtccgcgcaggagccgccgcagaagccgacggcgcagcacggggcggagttcgcgcaggagcggcggcaccgggtggccgcgacagcaggccgcagcagccgacggcgcagcgcagggcgaagatccgcgcgggccgcaacgcgggacggagatccgcgcagagacggcggcgccgcgactgcagcggaggatgggtggccgcgacggatccgcagccgacggcgcagcgcagggcggagatccgcgcgggccgcagcgcgggacgaagatccgcgcagggacggcggcgccgcgactgcagcggaggatggggggaccgcgacggcggctgaggatggaagaccgcgacggcggacgacagctgaggatagggaggccgcgacggcggcccggcggctgaggatgggaaggccgcgacggcggccggcggctgaggatgggaaggccgcgacggcggctaaaaaattaggaaaaaccctaatcttagtgcaacgtgggcgtcaacctctctgtggtggcggtgattggatgggtgtggtcgatgacggcggggaggtcggtggaaatgattacaaccatttaatcgttagggataaatctgttgatgagctacatgaagttgttcctaatgttgttggtgccataagctcggccatcacggatcttataaatcttggagcaaagaagttagttgttccagggaacttcccaatagggtgcgtcccattatatcttgcaatctttcagagccaaaaagaggattactatgaggaacaaacaggctgcattaagtggctcaatgattttgctgagtaccataataagatgcttcaggaggagttggagaaactcaggaatcttcaccctgatgtgaccatcatttatgctgattactatggtgctgcattgaacatattccgtgccccactccagtttggtgagtaccattttcaaatcaaaacaaacaaaacatataatataactgatgttgactttctgttctaa

SEQ ID NO: 34233 - DNA, 249 bp, Zea mays
  Peptide Sequence Number=SeqID_76012
atggctaattccccaattgaagcggaagcagttttctcctccaagggtatagatgaatatgcaaagctattcagtaagccgctgtctgattcgcagatttctgctttggcagctctgtttgggtggtcagttcctgattcccatggggagagtgattacaatgcggacaacctggtgttttgtggtaaagcaaggatgagtacacatcaacgtactcagcaaatgtcccgtttggctgaggtggactag

SEQ ID NO: 34234 - DNA, 222 bp, Zea mays
  Peptide Sequence Number=SeqID_76013
atggttcgagagacaaggattatgttatggttttggttcaactatgatgatgtgttcctcgatgaggaaatgccaaacgggacatttgctgagtacgttgatgtgtactcatccttgctttaccacaaaacaccaggttgtccgcattgcaaccactgctcaggaggagatgaagtcgtggaaggagacttccaggagttccaagactacgacgagttctag

SEQ ID NO: 34235 - DNA, 201 bp, Zea mays
  Peptide Sequence Number=SeqID_76014
atggggagtcatgatccccaggcaaaacaggaatcacggctcatgggtaaaccaaacggggcatttgctgagtacgttgatgtgtactcatccttgctttaccacaaaacgccaggttgtccacattgcaaccactgctcaggagaagatgaagccgtggaaggagacttccaggagttccaagactacgacgagttctag

SEQ ID NO: 34236 - DNA, 117 bp, Zea mays
  Peptide Sequence Number=SeqID_76015
atgtcgactgagaaacgccacctagatcaagtcgaatgcctcagtgttaggcggctcctcttcgaccacctgttcttctcctgtggggggtgtgagacagcaagaatgccaaattag

SEQ ID NO: 34237 - DNA, 627 bp, Zea mays
  Peptide Sequence Number=SeqID_76016
atgtcgactgagaaacgccacctagatcaagtcgaatgcctcagtgttaggcggctcctcttcgaccacctgctcttctcctatgggggggcgcgtctggccacggagaatggcgggtccgcggcggcgatgcgccaccggcgaggaattgctcacgcaccgcaggtcccgacctccaatagtggtcgcggacgattaccccaggtaccgatggccctccttggccccactccgaggacagaggcccggcagcgacaaggttcaccggcggcgcaaaaagagaagaacccacggcggcggcgcagctcacgcgaaaccctcacgcagagctatggtggcggcgcaggggggaaatttgagcaagaggcgagacctaatcgggttatatacccgagagagctcgtatttgcgccaggttcagagcggtcatggcgccgcaagccccgccgagacccccgcggtgtcgttgaagacgagtctgacctgtgggccccgcatggaagacagccgcgcgcgagcaaggggctgcgccgtggaccccggctctcggcgcgcgtggagttgaacttgggccgcgcggtgtacatccattggtgggccgaaatcaggggtcaattcaacctttag

SEQ ID NO: 34238 - DNA, 615 bp, Zea mays
  Peptide Sequence Number=SeqID_76017
atggcgagtaaagtcaaggacgacagtgttctcagggttttttcatggatctttaaccatctaaagaagagcagcagttggccacgtgctcctagccgcacactgtcgctgctctctgcttggcgctctcctctcccgaccacagctacaccacacgactgtgagctcgtgaagtcaatcaagaggcatcgagttctgtttgatgaggaggggaagatagtggtaaggaggatagacaactcgatgagtaggcatgtgactttttccaagaggtggaacagactgctgaagaagatgaaggagctctctatcctctacgatgcggatattggcctcatcatcatctccagcaccagcaggctctacgagttcgccaacaccaagacataccgactgacctttgaaagtactaaagaactgatagatacaagatctatggcatttgacattaacatcctagagaggcagacctgcaaaagtctaaccacatctgggaccaagacggagaagctgaggcaggagtgcctgcggaaggggacgaaactggcgcatggggtggctgacgccctcttcgctgtaccacacaccgaggataaaggcattgaagagcactaa

SEQ ID NO: 34239 - DNA, 714 bp, Zea mays
  Peptide Sequence Number=SeqID_76018
atgcccgggcccgcccccgccgtggcgccgccgctcaccatcttctacggcggcatggtggtggtgttcgaggacttcccggcggagaaggcggccgaggtcatgtgcctcgcggccggcgacgacctacccatcgcccgcaaggcgtcgctgcagcggttcctggccaagcgcaaggatcgcctcgtcgagcgcgcgccctacgcccgcccatcatcccccgcggaggagccggagaagaagacggtaaagccggcctcggccttggcctcctggctcggactcgacagcacggaagccgactgcctcaccatcacgctgttctgccatcgactggttctgcggttctgcccacccccgacagtacgcggctatgggcctggtggtgtgcgccgccttggggagcggctggacgacggggtcaggaatggaggggccaccgacgtcttcacaaaatcaccacggtggcacatgcgggtggtgttgacactaccttggtccctcttgacgaaatcaccacggtggcacatgcgggtggcctttgcctgcagcgtgtgcgggcagtgtacgaccagggccatcaatcctcatgcctacaccaatgagacggtgtttgttcagggtgttcagaagcacgaagaggctagtaaagtcaaggacgacagtgttctcagggttttttcatggatctttaaccatctaaagaagaggtag

SEQ ID NO: 34240 - DNA, 843 bp, Zea mays
  Peptide Sequence Number=SeqID_76019
atggggtgcacctgtgctgccttcttcttgctgctgttggaggagcgcgacctcgtgggggttggctcatcgctcggctttaaggattttcatcatgcagcctggctgcagtccctcgccggtggatgttcatcatccgtgctggggaggagggcgagccgagttggggccctgccttccgcatgggctggcgacccgcttcttcctccagcattcggtggagaagggcgttcaccagcatatgcggaggaggcgaactgccacctgctgccccgtcggggtgtggttgtccgtccaccgcacgggcgacggtcgcgtcgtgcgcaggccggccatgtccacggcccttcccgtgccgccggccgcaccggggggtcgcacaacacgtcgtacgccgcgagggcggtgttcgtgttcttggacagtcttgtcctcgctcctgtggcgaagacgggagtgagtacctgcgggtgcgcactggggcgtccgccattcgccggtggcgttggcgcgcaggtggccgctgtcgtcggtgctgaggtggtggtcgtcatagtggtcgccggcgagccgcttggagttagttatctcgcagcccctctggtgtggaggttgggaaaaccgctgagggcgctgccgacgtttaagtctagataccatagttaccctaaaatcacttattcgagcgtgagctacctttcgcagaaggtgatgagtgaggattccgttatcgacgcagtcgaaaggcacgcccaagctatggccttaaagcagcgtgcccgtgctgaagggctcgagacggctcttaacgagtccgtcgagaactgcaaggcgcttgcctag

SEQ ID NO: 34241 - DNA, 291 bp, Zea mays
  Peptide Sequence Number=SeqID_76020
atggctcttatgctacaacattctggtgtctcagttcctccagttcagtctgctccacctcctccgcttcacgctcctgttgtgccagcaattcagtcaggaccccctgctcctactgttggtccttcttctccgctccggccagtcactctggctttcacgtcaccggttctcagctctgtctgccctcagccgccagtgccaccagcatctgctgttaccactactgctgtggcagtatctgtgaccacttctgttccgagacaaatggtgaccgttggcgcgaagtag

SEQ ID NO: 34242 - DNA, 891 bp, Zea mays
  Peptide Sequence Number=SeqID_76021
atgccgcgcacgaagaatgtgtcggcgccagggggaggcgatgatgaggatcctcgtcgccccttcaggcaggtcaagggcaagacagtttacttggagcagcaggaatgccgcaagaagcggcgtacagacagagcagcccgtgcagcggcagcagccgctgcgcagccgagcttgagatcagccacagactctgtcagatcagattgcataccattgggcgggcgggtaacgggtatccgctggatagcggatacccgacgggtacgggtatgggtagagatccatacccacgaacgtttatgggtacggggcacgcttgaggcctcacgccttgtttttggatcctaccgtcctgcgcctgaggctcctgtgccagcttctgctcctgtttttgactctcaggccgaggatgctgctcttcgtcagttcgacactcaggatacaacagttgatgatgatgatgatgatgatgattttggggttcctcctccgcctcctatgcctccacgctcacatgatcatgaggctgggagttctagtgctacccctgctgcccctccggctattgaccctgctattgcttcgattctccagtctctcactcagcagcaggctcacctggcagccgagcagacccggttatcccaaaagggatgctctcgatgtttcagaccatacaggacaggcaggattcgcttcagcagcagctactccaagatcgggctgagagcagggcattcaaggctcttatgctacaacattatggtgtctcagttcctccggttcagtctgctccacctcctccgcttcacgctcctgttgtgccagcgattcagtcagggccccctgttcctactgttggtccttcttctccgctccggccggtga

SEQ ID NO: 34243 - DNA, 1487 bp, Zea mays
  Peptide Sequence Number=SeqID_76022
catatgtggtctgtagcgctgactcgcagaccgcgcggcatcgggggccttacggcagttgtgtctgccgaagtcgagagactcagacgcaacatgctgacgccgtccgggaaaagtcgaccaccgacagtaagtgccgcaagctggcggataaggtggccgcgctggagggtgagaagactgacctctggcgccaactagcggaggagaggaaggaggctaatgaggccctcgccaaggtgcagtctgcgcaggcggaggctaatttggcgcgggcggagggcagtcttgccaggcagcgcgccgagcagttggaggagcggctcagcgctctgcagacccgtgtggagagggccgaggcctcgacacgctcggaggctgagcggacacgcaaacagcttatggattcataccatgagctgggcacgcggaccgctgacttcgaagtgccggaccgggagcccggacttcgctgcctcgagtggatacaggaggagttgctggcgcttcccgccatcgtggaggggtttatgtcctatgcctccctggtcacctgcgagggggcgatgaacgcgctctctcgcgaagggtgccagcactatgaggtcttcgaccaagctgatgaggatttcgagcgcgatatctacaaggttgaggaccctgtggtgaaggaatccgcgggagccctctacgaccggatgtggggccctcacggtcgggaggtggtcagggagcgggccgagacggcgaggggtcaggcggcgtgtggcgagagggtggatgacttcggggctttgaacagcgcgctgcctgacccggagccgaacccgacagcggctgtgtccgaggccgccctggagccgcccccggaaaccgccaaaggcgttcctgatgcccccgcagccactacggccagcggaggcccgtcgccaactgccgcgccgagggctgaggatcctgtgaaggtggcggcggagccgacagcggaggatcccgcgacgtctgggtcttcgcaggttcaagattttgggcctgcgcacgcaaccgctactactaattttttggcggcttcgaccgtggatgatggtaataaatcggatgggtctgcatctaagttttctgattttggtgactctgggagctcggttgagtggactgaggagtcgtcagatgaggacatggactactttgcggccttggatgtggcagcggcggaggcttcgccgcatgctgcggatgctgaagttgtgcctggtccgagtactgggcgtaggcggcgaagggcggttgcgaagcgtagagtgagtggggtggacggcgatcggcttcgtgtgagtagggctggcaggcaggaactgttgtccttgccggccgctgtgagttccagtgagggggagctgcgaagtctttttgcgggtgaggagcttaggataaagttatttaactatagggagatgggaattattccgaaggttgagccgatgtag

SEQ ID NO: 34244 - DNA, 1776 bp, Zea mays
  Peptide Sequence Number=SeqID_76023
atgccgacctcttcttcttctgctgccgctacgccgccggccaacgcgtcgtctgaggagacgctgagtactgtggcggcggaggagttgcgcgccggcgatacggtggatttcggtgtgtcgcagatgtcctcggtccgcgtgcaggatatgcagcagcttggttactttggcggcggagtcgctcgtgtcctggggacggaggaggtccccgagccggaaggcgagttggttctgactccgaatgccgtggtggctctgtcgaagtatgtctgggcgacgacttcgtacggcagacaaccatcagtcgaagtcttcgcgaagtactattgcctgcactggcagaagaggatgatcggaaatgaagttgcccagtttgggtccttcgaagaacacccggggttccccgtgtccgagatgtgctcgcattattactcggcatacccgccgtttgaagtggcagaggaggatgcggacgaagggtcccttcggtgcgccgccggcctgggcagcgggcgcgatttggttgaggagtttgtggcgtacggggtatggcctttggcgcatggctgggcgttgggcgaagtatgccctcgccagatgccttcccatggtgggaagctggtgcgaagtcctgccttcgcgttggatctgcatagccgcgatccggccgcctttttgcgtgaggcggaggatggggcggtgcggatcgtcggtcgggttttcgagttgaaccgtctgccttatggcggttatcccggccaagacgatgtggatcgtcgcgggaagaagctggtggtagagactggagacgaccccgcgccggcggccgcccctttctctaagaagaggaaactaggtattgctatgggaggactgggggtttctgatggttttgctagggaattgatgaggacatgcgcggccccggggggagggatgtcttcgcccgagctccgggagtcttcggcgcggatgctgagggttaccggggtgatggacaaggatcgtcagggagctgcgcagaagcgccaggcggtcgtcaggcttcatgaggccaggccgaagaggccgcgggggactgcgaaggctgctgcccccggcggaagccagctgccgctggcggcgaagtcggccgcccctgtgtccagcagggcgccagaggcgacgaaggcagctgccgccggcggtaccaagtctgcgaaggccgcccctgggtccagcaaggcgccggaggctgcgaaggcgtcccgagagttgccgccgccgggcaagcgcgttgccgacttcgccaccgacattagtgtggatgattatcttgttgggtcggacgaaggccaacttgtagttgttccgcctgccgtggcgaccgcggcggctgccgtggtgcccagggcgaagggcagtgctcttagtgccggcggcgagataccggcactcactgtcgtcagggacgaggcgggtgctgtgtcccgtcggctgaaggagatgaaggaggcactaagtcaggcggctgacttcgcagaccgcgcggcgtcgggggccctgacggcagttgtgtctgccgaagtcgagagacttcggacgcaacatgccgacgccgtccgggaaaagtcggccgcccgacagcaagcggaggccaatttggcgcgggcggagggaagtcttcccaggcagcgcgccgagcagttggaggagcggctcagcgctctgcagacccgtgtggatagggccgaggcctcgacgcgctcggaggctgagcggacacgcaaatag

SEQ ID NO: 34245 - DNA, 312 bp, Zea mays
  Peptide Sequence Number=SeqID_76024
atgcagtacaaggggtcaagcagtctcattagctgcgagaagcggatgattcgaatcgagtttttaaaccttgcaagggagatccttggtggcaggctcgggagctggctgctggtcttcctcgtggatagctccttgctcgggaatgagcactacaaggggtcaagcagtctcattagctgcgagaagcagacgattcgaatcgagtttttatccttgcaaggcatccttcctggatccaagtccatagaccattatagatcccgttatcaagatgagtacaatcaattcctgacctcgcgcgagtgctag

SEQ ID NO: 34246 - DNA, 183 bp, Zea mays
  Peptide Sequence Number=SeqID_76025
atggcggaggtgaagcgtcgcccgcttcgcctgccaaaggtgctcggcctgccctgccgcagagttaatgcgacgggacgagtggtttacggggcagccgggtcgcctcgagtcgcggctccggttccgcagtcgagaaggcgcggtactggcgcaagtggcggtgcagtttctcgcacgtag

SEQ ID NO: 34247 - DNA, 1284 bp, Zea mays
  Peptide Sequence Number=SeqID_76026
atgcaggcggcatgcaaatgcaccaaggggatgcaccttttcgacttcgacgcgtccagcatggaggcccaggcccacacgtcatgcgggcggaagcagcagtcaaatcgtctgcaggctcacgtcccctcctgggacagcgagagagccctctcccacggcgtgaagacgacgcgcccgggttccgttcctcgaacggctcgcgcatgcacaatggctgccctgcgaaccactcgtcctgtcgcattaactctgcggcagggcaggcggcacctttggcaggcgaagcgggcgacgcttcacctccgccatgatgaccgcgtcaaaaagggaccgagaaaggggatactccgaaagggatccttctctgcgaaggaagcgggccccgagccctcccaccgatcagaggttcgaaggctggcccctcgaaagggttcgacagccacctcaaagcactcgggctccgcgcccactactagtcagaggctggccccccccgaagggttcgacagccgcctcagaacacgcagagcgagggatgactctgggtacgtccgatacatggttgaggctcgggctacgctcccgaggctcgggggctcctctcgcaaacccggctccggccaaaccgttgacaacgtcaaggctccgtcccctcaagggacacgatctcgcctcgcccgagcccagcctcgggcaaagacagccaacccaggaggattcacgtctcgcccgagggtcccctcaagcaacgggcacaccttcgactcgcccgaggcccagctcgggcaggcttcgcggagaagcaaccttggccaagatcgcctcgccagccgaccggatcgcaggagcattcaatgcaaggatcgcctgacatcttatcctgacgcacgctcttcagtcgacagagccaaaccgccaagtccggcctcaggcgccataagaagctccgcctcgcccgaccccaaggctcggactcaacctcgaccacgggagacgatctccgcctcgcccgaccccagggctcgggctcaacctcggccatggaagacgatctctgcctcgcccgaccctagggctcgggctcaacctcgaccacggaagacgatctccgcctcgcccgaccccagggctcggactcaacctcaaccacggaagacgatctccgcctcgcccgaccccagggctcggactcaacctcgacctcggacgacggtctccgcctcgcccgaccccagggctcggactcagcctcgacctcggaggagcctccacctcgcctga

SEQ ID NO: 34248 - DNA, 471 bp, Zea mays
  Peptide Sequence Number=SeqID_76027
atggatggcatagaagcttttcgttctaggacgaggtcttcgcctgcaaagacagttacaaagaggttgttcaccgacgtagatggaggaaacactggctccaaggatgccgcggatagcgatgctgcccctagatcctcgccatcgagcaatcaacatgtcattgatcgattcgttgttcagctgaaggctttcgataggtttgagaacacatctgatgctcaatctgcggcaacccttattattgatagcaggcctagcaagggtctgcacaggttcttgcagaaacattgtgagggtgaaagagttaaagactatactatttgtggcatttcacttatagacattggcagaaacttgatggcgaagcaagacatgtcagagcttgggttcagaactgtggacgaagcgggtacgtctcctgacaagaacaacaaactggagaaccctcctaatcagccaaaggattaa

SEQ ID NO: 34249 - DNA, 1974 bp, Zea mays
  Peptide Sequence Number=SeqID_76028
atgcgtgatattctttcagaacatactccttcaaatgcgctcctcccgtttggtggcaagcctgtagttcttggtggcgatttccgacaaacactacctgttgttagaaaaggatgtcgctcttccatagttaacgcctctattacaaactctaatctctggcgccacgttgtcctccttaggctgcgcaccaacatgcgcctttttgatccctctttgcaagtacatgcgcgaaacgagctcgacatgtttgccaaatgggtactatcttttggtgatggtaccttgcctgctgaaagaagagcgagcgagcgtgaggctacatggattacaatccctaaagatttgttgctctgggttgagggtgataaggatgaaacaaagttgctccattgtgatatggtgctgcttgacgaagaggtacaacatctgcacgattatctatttggtaaagggaagctggcattgggaaccggtatccatgctgcaatattcccaccagtcatacaaaagttcaagcctctgataaaaggagtcgtctacaacatcacatacttctgggttagagcctcgaacaatttgtacaagcctgttttcaatgagaacatgattacctttacaaactggacaaaattggaggaggttgttgaggttcctccagcatttcctgtgcttacctactcactcacaccgatagaccagctccatttgtgtgtcgaccacagggagtactacacagatgccattggaattgtcacttccatctcggccgtggcgccgcaccgatccagagggcaacatacaaccagctctaagaggactatttccctgtgcaatgtcagtgcgagaaaagcgcatagtcccattaagtggaacgaggttctatcttcgaatcaacatatgcctcatgttcctgaggaacagaaaatcacttatatcagagatctgcacccatttgagaataaggatagggaattcttggtgacagtcactgtaaaaaagattggtgataggtggcggtacaatgcatgcaagaaatgcacccgcacaactgtggctcatggggattcctacaagtgcagcgatcaagtttgcgctaccattggcatgcccaaccaaaggtacaaactgcttctcactgcaggggatgagacgggtgacacagacttcatcctctttggccggatggcgcaacgcatcatcaagaagccatgtgatatgctcattgccaacaatctgatcggctttattcctgatccaatcacagatctgctcgagaagacgtatatatggaatgtcaacacagtcgtggcagagataggtactacaaaggactccatccaggcatcttcatcggggccaaaaaagtcacaacttgtgctattgcaaggcgcacccagtggcattgaagacactcctagcaaagcctctaacttggtcatgcctttgaccccgctcacaccacaaagttccgcaaccagtgtgcaagataagactattggtattggcagcagcgctgtggttccaggtgctactcccgctataacaaaggaactgacaaccacgcctaggaagaggacaaggtcttcgcctgcaaagacagttacaaagaggttgttcaccgacgtagatggaggaaccactagctccaaggatgccacggatagcggtgctgcccctagaagacattcatttacccaagcaacgtgtgcttctcatcttatctgcgcatcaccacctctttcacaagggttctcccaagttgctacactccatgacatacaagttgcaacaagtgcatacggtaacttgagagatcgatacacatctagcaccctgctttacatgattagccacattgtttactctgggtggacttctttggaggttttgatccatgttcacgtgcatgatcatcgacttacaacaacaaatgttcctaaggtcaccgacatgaaatatgttgtagattag

SEQ ID NO: 34250 - DNA, 414 bp, Zea mays
  Peptide Sequence Number=SeqID_76029
atgaaaattttcgagaaaaactgccctagaacttggctgtcaggtgcactgaatgagctctcccatggtacagtacctggctgggatcagaacgccagcgcagcagctctcaccgccgacgactccctccaccgtgattcgtgtcaccggcgtcaggattcgtgcctgcgtggatggataacctcgcggggtaaaagaatctttgccgccggatccacttttagtaagcatttctgcaaaatagcgtctttgattattgagaaaccttaccttgactcccttaaccagcatgcccttgagagtcttttctttagtcgggtgaggaagcgacaaatttttgttgcttctgctctaaggtggtacccaaggaagagcgcaaggaatgaagtgcgggaggaaaggatcctccattag

SEQ ID NO: 34251 - DNA, 207 bp, Zea mays
  Peptide Sequence Number=SeqID_76030
atgggatccacttttagtaagcatttctgcaaaacagagtctttgattattgagaaaccttaccttgactcccttaaccagcatgcccttgagagtcttttctttagtcgggtgaggaagcgacaaatttttgttgcttctgctctaaggtggtaccaaaggaagaacgcaaggaatgaagtgcaggaggaaaggatcatccattag

SEQ ID NO: 34252 - DNA, 585 bp, Zea mays
  Peptide Sequence Number=SeqID_76031
atgccgccgcgcacaaggagaacaacgcgcaaacatactggaccgattggtgtgccgagtcaccagctggccccaaggcatgataatagtagtagcggaagcaatgatcctataggggatctcgaagctgaagtaagtcggctccaagcggaactccgccacaggacggctatctgggtcgtagatggcgaccacataaatgagttgagaagagatatccgccatctgcgagatcagctcgcggaccgggatttggcactcgactgggttgttcaatcccgtttgcttgcatgggacaagatgcaaaaagctcaagctcgagtagccaagctcaacttggccgttgaagacctgcagacatattgcaataccttacatgaagaggttcatgtattatattcgcaactgcatcccagtgagcctacgaatcctgttgagtcggaagccggaccctcgcatgttgcaggacacacacttggtggtgagttagacctttttcaaccccctccttccatgaggctggtcgacgaatggtctcccacccccgacgacgaggccgccaaaagcaacgggaagcaggaataa

SEQ ID NO: 34253 - DNA, 246 bp, Zea mays
  Peptide Sequence Number=SeqID_76032
atggcggacatctcttctcaactcatttatgcggtcgccatctacgacccagatagccgtcctgtggcggagttccgcttggagccgacttacttcagcttcgagatcccctataggatcattgcttccgctactactattatcatgccttggggccagctggtgactcggcacaccaatcggtccaaatcaaccttagttgattcacaccttctatatgttgcactcttactacctggtctttaa

SEQ ID NO: 34254 - DNA, 438 bp, Zea mays
  Peptide Sequence Number=SeqID_76033
atgagctcatgcccaaactcgcgatcgatttgccgcggcaagcgcggagttcgctcagcgcaggacgggatttgttgcgatcctggaagattgatcgacaaatgggacccacgcgtcagtgacgtggataggcgcccgcggcttaggcagcagaatgggccgaacagaggggaaacgacccatgtagccacaagaagcggcgtctggatagagcagcccgagcagcgattgcagcagcaggagccgctgagcaggcagagcgaggagctcagttacagattccttccgatcagattgcctatcgagttcgtcgcctcgcctctcgtcctcgctcctccgctcctaccactcccaccactgctaccactccaagtggtcccacatcccaatcaccttctcccaggacgatcttcagctaaaagactatcctcacaatga

SEQ ID NO: 34255 - DNA, 240 bp, Zea mays
  Peptide Sequence Number=SeqID_76034
atgacgaggaccctcctcgcccctttaggcagttcgtcgcctcgcctctcatcctcgctcctccgctcctaccactcccaccactgctaccactctaccacccacttcgcctgctccagtcactcctgcgccatccaccacctcagccatacccactacctccactactccagcttccactgctcctcctcccgcttccgctcctcctatcccacctgctcgcttccgagagcgcgatga

SEQ ID NO: 34256 - DNA, 1378 bp, Zea mays
  Peptide Sequence Number=SeqID_76035
atgaagcaagtcgaccgtcctccaaataaccccaagcgtataacaatccagtcaagccaggagtgcttcagtgttgacattccctctgcagaacagcctaatccatgtccagaagttgaaaatcctccaaatgctgacagtcaaaatttgaccaatgaaacagttcagattgattctgatgaagatgacttcatgccagccctgaagaagcgtaatgtttctgaaagccacacaagagtgttaagaaaagtcgtgacaaagaggattaaacatgaggagctatcccgacagaggcttaatgtgaggtgcaaccctcaagatgtcattgcaagcattaacattttgaatgaaagacaacgtgaggctataagacgtaaaggtttctcttccattcttgatatgacagtagatgcgctgtgcagtatatcacacctccaatggttgatggacaagctagaccccaaggatatgacaatacgtcctggtccaggaaaggaactcaagatcacaaaggacattgttcatcttatccttggcgtgccaaatcatggcggtggtaaacctttgggtattgatgaagcagttgcagcaagcaacttgagggcagagcttggtgtggccaaagatgagttcaatgtggcatttctacaggatcgtttaaggaaaggcgaggatgatgacctttcaatcagatgtttcttcctcattctattcaaccgtttgctgtttccaactgctagctggggcatcacatatcatgaggtgcttctcacagaagaaatgcaccgtttccatgagatcgactggtgccagttgatttttaatgatctatgtgaagctgccaagaagtggcacaaccgaatcaccacaaatgtctccacgactatatacggatgctccattgttgtccttttgtattacttggatcacctgcatacagccgctgccccccaaaataagactggcacacctcgcattaaattttttgataagaatagcataaaagctttgaccaaagctgacaagaggaagccagagtgcaggaccaatatttttgatgcaccgcgccctgcccccatgcctcggccaacttttaacatcaaacttccatctatcaaagagatgatgtcaagtaagatcaacgatctcccacatcgtcatcgatctaaattcacagatattcttgctgcatatgacttggaggttgacaagtcatgcgtagccataaaagacagcattgacaaaattattgagaagcaatacgacatagcagacaagtttatagaattgatagacgaggtactacgtgccgagtctgaaaatttggaaaacgagactgatgagccacaacaacgggggaattcggctgattcagcag

SEQ ID NO: 34257 - DNA, 1002 bp, Zea mays
  Peptide Sequence Number=SeqID_76036
atgcctcggccaacttttaacatcaaactttcatctatcaaagagatgatgtcaagtaagatcaacgatctcccacatcgtcatcgatctaaattcacagatattcttgctgcatatgacttggaggttgacaagacatgcgtagccataaaagacagcattgacaaaattattgagaagcaatacgacatagcagacacgtttatagaattgatagacgaggtactacgtgccgagtctgaaaatttagaaaacgagactgatgagccacaacaaccggggaattcggctcattcagcaggacacactgttgatgccacccagcccacacccgatatgccatcccaagcttcgcagctcgagacccagctgggtggtactcagtttgaagaaattcacgaaagacaacagcatatccgtagagtgcttgagacgtgtcccgacgaatcggatgtagtttcagatcaacagagaggtgaaatggcaacagaggaaatggaacacaatgacagtgggccagtttttgacccgaccccaactcctcatgatgatacactgaaagggacaacaaactctggatctgatccaccccttacagagcaagagtgtgttcgttctctgtgggatttaatttgttccaaggacattgaccaaagcagggttgtcatagattacggtgaatatagtgcaaactgtatggatatttatgaatctttcgcggagggcaaatgtcttgagaatgtcttcatgcagtgtttcattgagtgtgttcgtgatgattctaaaaatcatcgtcgaactctgacatctaacagattaatacttgatgtcaacgttgggaattgcttgcacaacacattgcctgctttggtaaatctggataaatgcaagtcggtgtcatatcttctttcaatcaagcaaacaattcccgagacttacgtgctcatgcccttcatcaactcacattccatcgcatcaacaaggcgttgccacttccattag

SEQ ID NO: 34258 - DNA, 405 bp, Zea mays
  Peptide Sequence Number=SeqID_76037
atggcggagaacgtggaagcagtcgggtcggcggagagcgaaggagcagaaccgtcgccggagaaggacacaccagtgattctgcagagacatgaagttacaattgatccgagattagtacctaaagttggtatgacattcagtggggtggatgaagcatataaattttatagtaggtatgcatatgaagttggatttccattgaaaaagtatagggaacgaaaaaattataccgaaaagaatcaattacaatgcaacaagacgcatgatcctgaatacatggagttcataagttcaatgcaagagagtcgaattccgcaacattgtattatggattatgtatcagaaatgcacggtggtcctgagagtgtgcctgtaacagcacaggacatgtataacctgtaa

SEQ ID NO: 34259 - DNA, 267 bp, Zea mays
  Peptide Sequence Number=SeqID_76038
atgtctttgttgcctgcaatgagtgtgccttccctgtctgccgcccatgctatgagtatgagcgcgaggggaaccaatgctgcccctagtgcaagactagatacaagagacaaaaatgttggtttcctggcaacttctttgagggactacaaggacaaggatggtgtcaagggcctatatgcgtctgagaacatcattgcatcatgccactgggcatacaagggtgttgaggaagactcaatcctagaagatccctatttcttataa

SEQ ID NO: 34260 - DNA, 1191 bp, Zea mays
  Peptide Sequence Number=SeqID_76039
atgcgccggcagatgctcgaggcagccttggtgacggttgacctcggcacacgtcggcgcgacctcaccctgtcggacggccatcagcagtggcaccaggccgctatctcgaagtgcgagcatgatacgtgtcccgcgggcgacgaacttcaactctacggcagcggcggtagggaaggcactcacctcgtcatcaacaagggtgcactatttagcgccaccacattccgctaccggccgccacgagggcgcctccgctggttattgttgcgacctattccaggcccccggtcggcgttcctgcccatcgatatccctctccaatccctcactgatctagcaaccataacaatagatctattcacatttgatttaggagatgttgagtttataccaaaattcagtgtaagcgggatatggcagagatggcgagaatcatatcccaacgatgcgagtaaaagtacagaggccattacagtatttactggagttccaaccatgtatacacgtctgctgcaagggtatgatagtatggatcctgatcaaaagtcggcctcttcttacgctgcaaagcatctgaggttaatgatgtgtggatcatcagctcttccttccccacttatgaagaggtgggaggaagtgacaggccatcgtcttttggaacgctatggtatgactgagtttgtcatggcactgtctaatccattgcatggtatccgaaaagaaggtacagttggtaaacctcttccacgcattgaggccaagatcattatggaggacggggctgaaactacaactggagttggcgagctctgcattagaagtccatctcttttcaaggagtattggaaaagaccagaggtcaccgcagaatctttcattgatggaggattcttcaagacaggtgatacagtaactgtagatgaggaaggatacttcataattttgggacgcacaaatgccgacattatgaaatttggcggttacaagctgtcagcattagaaattgaggcagtactgttagagtctaacaagtggatgcataatatgtcatgtgcggtcgcacataaacgcgccgcaggcgtgcacgcgatgttcgccgcgccgctgaacgcgcagtgcgcgcgctggaacagccaggcaatcaggattagttgccttgttgggtgcctagaatttaggagtgattag

SEQ ID NO: 34261 - DNA, 525 bp, Zea mays
  Peptide Sequence Number=SeqID_76040
atgcaagccacactccagaaggttgagcaagggctgctgcaaatcaaggcagcagtgcaacatgagcaacaccagctggcgctgtccgcacggctccggacgtcggcggctgtgggcatacaagttgctgctcgtggcttccttgcacgacagaaagtgcgggagatgcgccggcagatgctcgaggcagccttggtgacggttgacctcgacacacgtcggcgcgacctcaccctgtcggacggccatcagcagtggcaccaggccgctatctcgaagtgcgagcatgatacgtgtcccgcgggcgacgaacttcaactctacggcagcggcggtagggaaggcactcacctcgtcatcaacaagggcgcactatttagcgccaccacattccgctaccggccgccactagggcgcctccactggttattgttgcgacctattccagggcctaaggaggtccacggaggggctacggtagcagcagccatgggccctcaagggggattagataaggatagttag

SEQ ID NO: 34262 - DNA, 741 bp, Zea mays
  Peptide Sequence Number=SeqID_76041
atgacctccaagacgagcggcagcataaccaccagcctgagcaccacggggaagctctgctccgtgggcagtagcttcatggcatccgcagaattgtctcctgtccccatgcatcattctgttttgctttgcagccctcgctggttgctgaagcaagaggtcccaaaagttgtcaactctatcaacaggcagttacgcgaaaaatcaatcaagacaaaggttggggcattttcagtactgaaggagcttgtggttgtattaccagactgtcttgctgatcattttggatcacttgttcctgggattgagaaggctttgaatgacaagtcttctacctccaacctgaagattgaagcacttgtattaacaaggcttgttatggcttcacattcgccatctgtgtttcatccatacatcaaggcactttctgcacctatactgtctgctatcagagatagatattataaagtcactactgaggctttgcggaaaactgcagttgattttaagccatacattggtccaatctataatgtgatactgggacgtttggccaatcaagatcaggatcagaattaccagcatgccttcccatactcgttgacaggatgggtacgtaatgaaattacaagacttacagctgtcaaggcattttcagttattgcgaattcacctctacgtattgatctctcgtgtgtcctggatcatgttgtttctgaactcacagctttccttcgtaag

SEQ ID NO: 34263 - DNA, 660 bp, Zea mays
  Peptide Sequence Number=SeqID_76042
aaaactgcagttgattttaagccatacattggtccaatctataatgtgatactgggacgtttggccaatcaagatcaggatcagaattaccagcatgccttcccatactcgttgacaggatgggtacgtaatgaaattacaagacttacagctgtcaaggcattttcagttattgcgaattcacctctacgtattgatctctcgtgtgtcctggatcatgttgtttctgaactcacagctttccttcgtaaggccaacagaggagctcttaggcaggcgacgttgggaactctaaattctttggttgtcacatatgcccacgcagacccacgcaggccaaataagttcgacggccatgtggccccgtcgaacttaacaataagaacgtgggtaccgtcaaacttatgggaacaaattcgacggccaccgtcgaacctaaaaacgcacgttcttaatgttaagttcgacggtacccacgttctttatgttaagttcgacggtacccacgttcttaatgttaagttcaacggggtcgtcgaacttacttctttaagttcgtctaaaaattgccgtcggctatattcgtcgataaacccacgttcttacggacttcaacaatgtggttttcctctcccttacaattgttcgggtgctgtctga

SEQ ID NO: 34264 - DNA, 180 bp, Zea mays
  Peptide Sequence Number=SeqID_76043
atggcggtcaggcgagggattcctgcactggagcttcctataaactgtagcgggttttctgaagctagtggaaccttggaaagttcttgtagtgttaccctgcctcgcctcctcggtagaggagaagaacaggtggtcgaagaggagccgcctaacactgaggctttcgacttgatctag

SEQ ID NO: 34265 - DNA, 324 bp, Zea mays
  Peptide Sequence Number=SeqID_76044
atggcggtcaggcgagggattcctgcactggagcttcctataaactgtagcgggttttctgaagctagtggaactttgcattataaatttgtggtcggcgccgagatccatggcaccgaggtcggcgccgagatccacggcgccaaggtgctgccacatcagatccacgggagagctcggcgtgggaggggagcggactccgacgagttcaacggcgtgggtgtggacagttcgggcgactcgggcgcgtgcgacgaggcagggctcggcactgcgaatggcgaggcacgcaggggctccggcgaacggggtgagatccagtga

SEQ ID NO: 34266 - DNA, 423 bp, Zea mays
  Peptide Sequence Number=SeqID_76045
atgcaggaatcccttgcaggaccgccatcacagcaaaatcctcccgagggcctccccaggaatcccttgcaggaccgccatcacagcaaaatcctcccgagggcttccctaggaatcccttgcaggaccgccatgacagcaaaatcctcccgagggcctccctacattgaccactcccctactgcccttgcccctttcgggggtctctgcgcaaataaacctaagactcagcaaacccccgcggtggacggcgggttcatttctttagaactcagggactctttagcaattgtgacacggcgaaggggtacggggcaccgtgagccgtcagatccgagacgtgcgcaccagattagatctggccgcccgcggagcggtacgccgcacggcccgtccattctgcgatcaacggcgcggatctaa

SEQ ID NO: 34267 - DNA, 315 bp, Zea mays
  Peptide Sequence Number=SeqID_76046
atgcaggaatcccttgcaggaccgccatcacagcaaaatcctcccgagggcctccccaggaatcccttgcaggaccgccatcacagcaaaatcctcccgagggcttccctaggaatcccttgcaggaccgccatgacagcaaaatcctcccgagggcctccctacattgaccactcccctactgcccttgcccctttcggcactagcaagtactacccagaaagttcagtggtaaacaagaagtacagggggctcggcgcaaaaatcccgagacacagggaacagggtccctggacggcgggtttatttaagtaa

SEQ ID NO: 34268 - DNA, 954 bp, Zea mays
  Peptide Sequence Number=SeqID_76047
atggtcggagtcggccgggtccacgtgcgcagggcggagatgctcgtcggcggggcgaggagttcggcctgctcatggcgcgatagttcaattgaacggggtcagagagcttcaccagggaacaaggaaggcgggcgaccgaagtccggtgaagtcgatctcgggcttccggtgaagtcctgccgggtccgagggcttggaaagcttcacgggccactggcggggctagccgaagcactggctcgacttggggatggctggagtgggctggccacggtggccgaagctctggtggcagtggcgggcggaaaagagctcgtcggagctaaggaggggtggctggccggtgatggtgagcgcgaggtgaacccccgcgcgccccctgtgcctgacaggcgggcaccgcctgtcggcgcaagcctgagcgctcactccccctctctctcactgccccgtgggccaaagctgtcggcgccgtcctctcgcacgcgcgcccgcttctctctctgtcccgccgtccccacctgtcagccgtcctcaaccttctgcccacgatcttcccgccgtggacgcacccacgaccgcgcgttctccggccacatccgtgcgctcgcgctccttttgagccccacgccctgctcgcccacggcccacccctcctctctcatttgcgccctctgcccaactctctcgctctgcccacgcaaacagggagctccgccactgcccgccgacgaccactgcctgttccgtggccgccgttgcgcccgtgccccgtccagcgccacgagccccgccgccgtcgacccgaggctccaccgcaccttcgcagtcctccacgcgctcggagttcgcactcaagcgtcgccgttagcccgccttgccaaggtctgcgccctctggtgcccttgcgccggcgtgagggccatggctgaacccgccagactgccctaa

SEQ ID NO: 34269 - DNA, 384 bp, Zea mays
  Peptide Sequence Number=SeqID_76048
atggcttggtcccacatacagctcttttaccacgcgactaaagatagccgcgtgggtactgcgtctttatacagtagtaaggggtaccctagtttcagggtaccgacaaccgccttcgctgagtgttcggcactcggcaaagacgtctttgccgagtgtatttctgtgccgagagtcctacactcggtaaacgagctcgttaccgagagcatgactttaccgagcgccgcacttggcaaaggctcctttgccgagtgctcgacaaaaagcactcggcaaatctcctggcactcggcaaaggcccggattccagtagtgattgaaggagtccccctggtggatctagaatcccccaaggggtcaagggccccaacagaagcctag

SEQ ID NO: 34270 - DNA, 720 bp, Zea mays
  Peptide Sequence Number=SeqID_76049
atggcacgccgcctgccagtggaatggacaagcgcacgccttatccgtaatgaatgcgaaggcacgcgtagcccagaggcatcatgtcaggttccgcccgttggcttatgccgcgcagtatgccacgtggcagcatcgggtctccgcctgagcggggagctggagtgtatgcgtataggtccggatcacaccagaccaggtctggacacgtgtcagctctggacccccgcctgggccctaattaaggcccgggtgtgttctgtcctggaaccttgggaccctactgtgggcggcccggaccccatacggggggagggtccagatcccattctagtgttctggtccgtacacgtgggggtcctggaccaacatggatgtctggactgtatatccagggatcctggaccaacttggaggatcaaactgtatatccaggggtccggcactttcccatgggagtccggactcactgttgatgtcttggagtatatcactttctctggacacgtggcggccccggagccgcccacgtggtggggtcaggtgctgttgctggcccagagtagtcgcccggggctagggcgagtcatgacctggtcccacgtacagctcctttaccacgcgactaaagatagccgcgtgggtactgcgtcttcatacagtagtaaggggtaccctagtttctgggtaccgacagtatatattataaactggtcctga

SEQ ID NO: 34271 - DNA, 795 bp, Zea mays
  Peptide Sequence Number=SeqID_76050
atggccgccccgccaaccactcgcactgtcgcattaactccgcggcgggacaggcggcgcctctggcaggagaagcgggcgacgcttcgccttcgccataatgaccgtgtcagtaaagggaccaggaaagggggataccccaaaaaggatccttccccaggaaggaatcaggctccgagcctccctactgatcagaggttcgaaggctggcccctcgaagggttcgacagccgcctcagatcgcgtgggccctacacccactactggtcagagaggctcgggggctgctctcgcaaacctggctccggccgaaccgttgacagcgtcaacataccagcccgagaacttgggacccgaccgtacacccgggctacggccagctcgcatgagggaacaaccagaccagccgaagcattacgcgaggcattaagacctcgaagaagtgaaaccactcctccgaggcctcgggggctacactcggcgggtgcgctcgcgcgcacccaccgaaacaaaatgcaaccgagaaaggctggttcccttgcaaaaaagtgcgacgaaagcctccaagcgagtgctaacactcccttcgaggctcgagggctactgtcggggaccataattaggggtaccctcaagactcctaattctcagctgagtgagactgacaggcagtcaggtcctgcagaaggcaccaccggaaactccgctccacccgacccagggctcggactcgggctcagccccggaagacggcgaactccgctccgcctgacccagggctcggactcgggctaa

SEQ ID NO: 34272 - DNA, 282 bp, Zea mays
  Peptide Sequence Number=SeqID_76051
atggcgaaggcgaagcgtcgcccgcttctcctggcaaaggcgccgcctgtgacggaacctcccaacccagcggcccaagaccagggaggaaagcgcccgcgcgcggccgcgccctggcggctttgcacaggggaccttggggttttggttaatttgaagcaggggaaggtccccgaccacggcagcgcacggagaggctccggcgagccactgtaccggccgtttggggcagtgaccggcgcacccgagcggcggacaccaaatccaagctaccctgagtaa

SEQ ID NO: 34273 - DNA, 1029 bp, Zea mays
  Peptide Sequence Number=SeqID_76052
atgctggtaatggaagagtaccatactaaagtagtttgcatgcataaacagaattctgaagaagtaccatttccaggtcacttgacatccaagagcaatgtgtgcagctttagggtggtgctgctggagctcatgataggcagacggtcaatggacaagagccgatcagcagggtattatgcaccagctttggggttcttgatgtttgctgttggtgtaaactcaagcgccaaggatttgattgaaacaataaaaaggccagatgctattgctgcgggctatatcagacagtttgtcaagctcgtcaccgtcgacgaccctttcatcaccacggactacatggtttcgggaggatcaacgggctcgtggccagggtccccctctagaaatgtggggaaaattgatgaggcatcagaactgaggagaactgtgagtgatatcaagcacaatgttcagacacagcttagcgagaatgctaagaccaataaacgagtgattgggattcacaaagaattgcagaaactgcttagagaagctattcagaacaccatcaattcagtcaccatggtagcaaccctgattgcctccattgccttcgttgtcatattcaatttgccaggtcaatacttccaagatgtgaatagtgggggagacattggtgaggctcaaacaactatgattgtgagtgaggcggtggtggtggacacgcgcaggacgggacggacgaagcatcttccaagccggggcagagcgctgtcgaagcagccagcaacaaaagctttcgctggagccgctggtggagtacagagacgtgggaaccagggtattgctgttgaccgattagttgggtctcaagatctcagaagtaaagacgattttctgacaagagcactggaacatattcttattctcaagacgaaagggataatcgatgagaagaagaaagatgacgaagatgacgatgaagaaagcgaggctaagaataggagggttaggtcctcaactgctcaagcctctgactcagactga

SEQ ID NO: 34274 - DNA, 747 bp, Zea mays
  Peptide Sequence Number=SeqID_76053
atggcgcgggagagagagaaaaagaggagagagaaagagagagaaaaagaaagaaaagatcttctcctcattttcgaaatccgatctttctacatgcatgcatttgcactttcaaagcaatcaaaagaaatgcaaggttcggcatggtgcatcaaacaacataagaattctgaagaagtaccatttccaggtcacttgacatccaagagcaatgtgtgcagctttagggtggtgctgctggagctcatgataggcagacggtcaatggacaagagccgatcagcagggtattatgcaccagctttggggttcttgatgtttgctgttggtgtaaactcaagcgccaaggatttgattgaaacaataaaaaggccagatgctattgctgcgggctatatcagacagtttgtcaagctcgtcaccgtcgacgaccctttcatcaccacggactacatggtttcgggaggatcaacgggctcgtggccagggtccccctctagaaatgtggggaaaattgatgaggcatcagaactgaggagaactgtgagtgatatcaagcacaatgttcagacacagcttagcgagaatgctaagaccaataaacgagtgattgggattcacaaagaattgcagaaactgcatagagaagctattcagaacaccatcaattcagtcaccatggtagcaaacctgatgcctccattgccttcgttgtcatatcaattgccagacgaatctctgggatcg

SEQ ID NO: 34275 - DNA, 711 bp, Zea mays
  Peptide Sequence Number=SeqID_76054
atggcggagcagcaccagtcggtcgtcgctggattgcctattagctcccctttgtcctatcatgaggattatgaggatcatagtattagtaacggcacaaatgatgattggttaccaattgttatgcccgcaaagaaactaatttctgatgaaaacctgaaatcaatactgaggaaatggaggcagcatgctgctgacaagcgattacttagggagcagaagaatgctcttgctgttgcagcattgtgttctctatcacttggcccaccagttcataaaagtacaacggtgtctaagctagcagttgaagaactagatattggccacgcctttaaagaaagacaagcaagaaagcaaagggccagcgatcagcaagttattgataatgatatttggtcgtgttttggtcagtatgacatggcggcagtgggtccatcctttttatacctggctcctgcccttgcgatcatcaactcacaagaattctttgggatcaatgataatgttgataaatccagtggcgatgagctccacctgctgctgcttataagatttaatggagggattggtacaaggctcttagttgatgcgctaaatgtccgacacttagcaggagataacctggcccttataatgcagtccatagctacactaataactagatttgccatacgcttagcaggagataacctggcccttataatgcagtga

SEQ ID NO: 34276 - DNA, 1101 bp, Zea mays
  Peptide Sequence Number=SeqID_76055
atgggcaagggatatcctagggacgaggatgttgaaaatctattagaataccatggttttgggttgaggcagtatgaagaactgtacttagtcaaagaaggaccttttcttaacagtgaaagtgatttcccatctggctgttcacagcttgtgcattctaaaaaatcgcagagggtcgttgatgatgtttcttatgggccagattgtgctccaactagcaaagaaaagactgtctttccatatactggtcaaccagttgctggcaaaagagatctatttctaccacagaatgctcctgcgattcctcctgatggcagaatggatttggatccatcatttcctgggcctatttcaatcactcctgacagacagattagcccattgttttcagatcctttctctccaagagctgccagtaaactattcagttcaacacatccaaagcctctatccccaactgatggtagaaaagacaggttttcatctgtccttactgttgtttctccacgtactggcaagagggacatactgtcaaaaacaccaaaagtagcttcaccaaaagctgaaggcaagaccaaattggttaatggccttatagctgaagaccaggatagtggtgttgctgagatccctcagaaggtagagatgcaaacagacatactgtggtcacaagctaacacgcaaaacaccaatgctctggcagaaccaattgtttcacatcctcttgcagataggatgtctttaaattactccagtatgtatggagcggaagatgacttcagggcacatgtttctggcatcggtgcagatatggatgagggaactccatcagatcatgaatgtttggttattggagctggattgcctattagctcccctttgtcctatcatgaggaatatgaggatcatagtattagtaacgacacaaatgatgattggttaccaattgttatgcccgcaaagaaactaatttctgatgaaaacctgaaagcaatactgaggaaatggaggcagcatgctgctgacaagcgattacttagggagcagaagaatgctcttgctgttgcagcattgtgttctctattcttcaaacccttttaa

SEQ ID NO: 34277 - DNA, 261 bp, Zea mays
  Peptide Sequence Number=SeqID_76056
atggccccccgccctgtacgcggccgtggccctcgccccggcgtggcgcggccccaacgcggcgtgcccgccccggcacggatatggatgtatgtttgcattcacatagataacggtctggttacggagtccgaagaactcgcaggagaagaccctgagcagcagctggttggtggaggcaagtgtcccttgacccatctatgtcctactcattcttataattcactccccgtatttacacaatttatacctaaggattga

SEQ ID NO: 34278 - DNA, 222 bp, Zea mays
  Peptide Sequence Number=SeqID_76057
atggcgcggctccggcgcggggcgcggcgcgtcctcccccaccccgagcccttcttcctccctgcgcgacacctcggcgcggtctgccctacgtgtgtgccccgacgcgagaacggtctggtcacggagtccgaagaactcgcaagagaagaccctgagcagcagctggttggtggaggcaaagtgtcccttgaccccacttatgtcctatacattccttaa

SEQ ID NO: 34279 - DNA, 381 bp, Zea mays
  Peptide Sequence Number=SeqID_76058
atgaggcatatagggtatttattcgaatgcccacaaagggagggcagtgcattgagtgcatcgggagggctcatagatttgcaattcatgaggccatggagcagcagacagtatgtagatgctggcattacaacagtactcaattcaagaacttcagttcttgcagctgccaatccaattttaggacgctatgatgatcttaagatgaccattctttctagatttgatcttatctttatcgtcaaggatatcagactgtatgctcaagataaggttttaaataaattatacatagacttcttgtatgtgtttcactgttttgggaaaataaaccaacgacatgctatgctagtgacagttaatgttgctaatagaaaataa

SEQ ID NO: 34280 - DNA, 1443 bp, Zea mays
  Peptide Sequence Number=SeqID_76059
atgccaacgctcttcgtgcccgtcctcaggtggggtctccccggggccgccactgcctacgacgccatgtcctgggccgtcgcggtcgcgcaggtggcgtatgtgacgcgccactgcagggagcgagggtgggacgggctctcgtgggacgctctggggactctggcccttcaccaaactctccatccgctcgaggaggaccgccgcaagattaaggagctcaagaacaagtccgcagactggcagctcgacctcctccagtttggctccaacacctccgagttggtgttgaatgtacattccataccatatcacccaagggacaggactatgtggagggtgaaaatgcttccaaaggatccacatctgaatcgaaacaaaaggaaattctcgaggttgtcatcatggaagttcttggttatgggaagttttatgttagactgtgggtgcgacggtcgagtgattttaagggatgacgctttacagattggttcaaaaaaaagcatatcctctttcaggcatacattctcatctttggcattgaaagaactgaaccatagaaaaaataaagacaggagcacttctccagattcaatgccaatgaaaaaacttatagctgttgcacaagctagaaggttttctcgatcaacttcctttccagataacttcctaaatgccaagtatattcctgaaacatcaataaatataccttctaaggaaggcccacataggcagttttcaccctcaaatcggataatcatgtctacttctggaaatgataatgtcaattctaggagtccgtttgataatattcagcagaagaaattagcagcgcatggagccaatgcagcgagaaggtctttcaaagatttcctcagtacattaacaagaaccaaagaaagtatatcgcgcgcgacacgtgttgctatggaatgtgctaaatttggcattgctggtgagctctgccccttgccaaatatgacacccaactatggagcatgtcaggtgatgtatgatgcctttggtgttaggctacatgcaggaaagcaagcaaaggtcttgaaccagattgtgtatgagcttccattagaacatccactggctgaaacaagaccgctgcgagagctactagggcacacacctccacaggagaccatcaagaatgttgaaatatcaattgaatttaatttatcttctcttgacgatttgcaattcatgaggccatggagcagcagacaatatgtagatgctggcattacaacagtactcaattcaaggacttcagttcttggagctgccaatccaattttaggacgctatgatgatcttaagatcgataagtccataactgccatgtacaggaggttgccgaagacactcgcattcgatgtatttcattcgctatgggacaagtgcaaggatagccacttgaccatcatatga

SEQ ID NO: 34281 - DNA, 1590 bp, Zea mays
  Peptide Sequence Number=SeqID_76060
atgactgaaaggtaccaactcccacggagttgcgttcctccaacgatgaggcgaaaagacggcgggcccacgcgtcacgtaaccggcgcgccggatgctgcgtgcaagcgactgcaccgccacttgcgccaccaccgcgcctcttcggttgcggaaccaataccgcgactcgaggcgacccagcagcgccagcctggcgcggcggccaatgcggccgaaagtgggccggcagtaatgacggtggcaggcgggtgggagcagcggtcacgtcgtcagccaaactcacgtcccatccgggggcagcaagagaacctcctctcacggcgtgaagacaacgtgcccgtgatccgttcctcgaacggctcgcgcacgcgcgacgaccgccccgccaaccactcgccccgtcgcattaactccgcggcgggacaggcggcgcttctggcaggagaagcgggcgacgcttcgccttcgccgctccgagcctccttactgatcagaggttcgaaggctggccccccgaagggtttcaacagccgcctcagatcgcgtgggccctacacccactactggtcagaggagcgatcttgtaacggaatcccatcggagggaggcatcgagccctcggaccccgtcgccaggggactgggtccggcagatcacccgcagctcatcggagacaccatgttcggcgcccatcgagggctcgggggctgctctcgcaaacccggctccggccgaaccgttgacagcgtcaacggtccagcccgagaacttgggccccgaccgtacacccgggctacagccagttcgcatgagggaacaaccagaccggccgaagcgttacgcaaggcattaagtcctcggaggagtgaaaccactcctccgaggcctcgggggctacacccggcgggtgcgctcgcgcgcacccaccagaacaaaatgcaaccgagaaaggctggtccccttgcaaaaaagtgcgacgaaagcctccaagcgagtgctaacactcccttcgaggctcgggggctactatcggggaccataattaggggtaccctcaagactcctaattctcagctggtaacccccatcagcataaagctgcaaaggcctgatggggctcggactcgggctaggtcccggaagacggcgaactccgctccgctcgactcagggctcggactcgggctaggtcccggaagacggcgaactccgctccgcccgacccagggctcggactcggaccaagtcccggaagacggcgaactccgctccgcccgacccagggctcggactcgggctcagccccggaagacgacgaactccgcttcgcccgaccccagggctcggactccgccctggcctctgccgaacgacctccgcctcgcccgacccaggggctcgggctcggcctcggccatggaagacagactcgacctcggcttcggaggagcctccacgtcgcccaacctagggcgcatgccagccacgtcgacaggaagcgccatcatcaccctactccgagctgactctggccgcagagaacaagaccgacatcccatctggctagctccgccagataggcaatga

SEQ ID NO: 34282 - DNA, 819 bp, Zea mays
  Peptide Sequence Number=SeqID_76061
atggggggatacccgtccgtcttttcgcctcatcgttggaggaacgcaactccgtggggagttgggtacctttcagccatcgttcggcttccaggaattttcatcatgcagcccggctgcacccctccaccggcggtcacccaagatggtgacctccagcttgattgggtgggggaaagcgagccgggctgcggcctctgcccctccctcagcctcaaggattttcatcaccagggctggggaggggactgcagcgtgcctggctttcggacgcgagtggcttcggagccgctcgcggcgccggcgtctgccacgacagctggaagaggttcctccgccggcgagatagccagggccgcccacggaccgacctccaactctacggccttctgcccgtccttgcctcacaagtttgggcatgggcgggggcctcctagcagcagcatccgccctgaggtcagtgctgccgctgttcggccccccggagcagaagtcgtcgccgtcgctgctgctggagcaggtgacggcgcgccgttcgtcggtcttctattgctccgcaggcccacccctatcgagtggggttactcgcctgttgattatctgaaccgcttcaccaagcatgagtcgccccgtgtcaaggtgacgagtgagcgatggcccgggcgtggtgatgacgtcgtccttcggagtggaggtcttcggactgcgtcgccgtccgaggctaggtcgaacctcgccgaagttgtcgtcgatgccgagggtgctgctgcccccttccagcgtcaagacccgagcctgcaggatcagattgtcttgtag

SEQ ID NO: 34283 - DNA, 255 bp, Zea mays
  Peptide Sequence Number=SeqID_76062
atgtccggcgagggtgatctcgggcttccggtgaagttctgccaggtcctagggcttggaaagcttcacgggccaatggcggagctaaccgaagcgctggcgcgacttggacgcgactggagagagctggccacggcggccgaggctctgaaagcttggcgggcggtggcgcagcgtgttcggggcaatttctggacgtgttcaagggaatttggcacaacttttatatttggatctcctggttttgagttttga

SEQ ID NO: 34284 - DNA, 243 bp, Zea mays
  Peptide Sequence Number=SeqID_76063
atggctcaccggagtgcccagtccatgcgtgggggcgggcgaccgatgtccggcgagggtgatctcgggcttccggtgaagttctgccaggtcctagggcttggaaagcttcacgggccaatggcggagctaaccgaagcgctggcgcgacttggacgcgactggagagagctggccacggcggccgaggctctgaaagcttggcgggcggtggcgcagcgtgttcggggcaatttctggtga

SEQ ID NO: 34285 - DNA, 366 bp, Zea mays
  Peptide Sequence Number=SeqID_76064
atgagtgaggaaaaagtgcgcacaaaagacccgtgttggtctgtggagacaatatatgatcctagagagctgccaggagtaagtaccgccggtccatggattggacggggtgttacaagtggtatcagagctgaccctcgtggtttcatgggcgtgtgtgggctaggggtttgggcatatggcgcatggcacttgtgggcctggagtggtcacatggcatggcatatgacgacactagacatacagacgtggctaagaggggaggttcctggattggggttgaccgacgaggacgtcggtcttctaaggggggtggattatgatatcctggcccctgggatggtgatttcctggcccaaggcttaa

SEQ ID NO: 34286 - DNA, 2493 bp, Zea mays
  Peptide Sequence Number=SeqID_76065
atggcgcatgctggtaggagcggaaccggcgctcaagcacaaggtgccccgaggccgagcagtcatcaagttccctcaaagacaagtgctgtggctgcaggaggttcctcaagtgcacctacaccgacgagtgctgctgcaaatgcaatgccatcttcaagtgctcaagctccaccatcagaagggaaggtttctagattatggttgaccgacgaggacgtcggtcttctaagaggggtggattgtgatatcctggccccctgcgatggtgatttcttggcccaaggcttaatagaattaatagagtatccattaccaacaaggaagttttcttgggtgcgcatgagtgagggcaaagagtgcacaaaagacccgagttggtctgtggggatgatatatgatcctagagagctgccaaaaagcagaaggcaagaactagagactgcagaatgcacatgtgatgtgatgaaaagggggagagggggagaaggaagggaccagcggcaaccttcagatgacgagttcatgtcgtcagtcatcactttgtcttcgtcactgctcactagtgctggtctggagacaactgctcactggtgctggtctggagacaacgctggtgacctggagtcctggagacgccggaccactgaccaggctgttcctgttcggtcaggcactcaggccctgagggactcaggatgtgtggcagtgtggccgttagggaccaggagtgcagactatgaatttgtgaaacctgagcacacggctggtcctgacacccttgctgacaagaaacgggcagcgggcggtggctctgtgtttaagccaccccctcccatggtagctgttgctgtgggttccatcgatgaagatgagaagccaggacctacagagaatgacgcgacaagcctctctacgacaattcgcagtaactcattgcgacgctaccgaggaagtggttccgatgataaaacatctttgaatgaatcaacagtcactgatgaggacgaaagggccccatcacccaaccatcaggatgagccccaccggcaagaggcccacatctctagaagctctcaaggttctcgtcctcatggcactcctcgtggttatggttactatgatgatagaggatcccatgataaacatggtgatcgtgagagatctgcatccattggctatagtaatagtggaaggcgaagataccatgatgatagagaatctcatactaggcgcgctgagcgtgagaggtctacatcaaatgaatatactaacaagagaagtcgacatgagcatagctcaagaagctcaagaacatctgcacgatctgattgggatgatggacgctgggaatgggaagatacacctcgtcgagattatcgtgataatcgtcctggctcccggagacaacatccaacacgatctcctatgctcgctgctgcatccccggatgcacgcctgcgtacttatttcatgctatcaaacattattgatgctgatagaagcccctcaaatcctgataggaacagtgagataaccgaggaaatgatgcaggagatggactacaatgctgaccgtgcatggtatgactgcgaagaacacactaccatgtttgatggtgatcattctatgtatcttggagatgataattcctacaaaaagagggaagcagagatgccgaagaagctgactcgtagagatggtagcctgatgacccttgctcaaagcaaaaagatgtcacagatgactgctgataatgctcagtgggaggatagacaattgttgagatctggagctgttaaaggaacagaagtgcaaactgaatttgatgatgaggaggaacggaaagtaatacttcttgttcatgacacaaagccccccttcctggatgggagagttgttttcacaaaacaagcagaacctgtaatgcctctgaaggacccaacatctgatatggctattattgcacgcaaaggttctagtctggttagggaaatccgtgaaaagcaaagcatgaacaaatcaaggcaacgattttgggagcttgctggatctaagcttggcaatatcttgggtgttgagaaaacagctgaacaggttgatgcagatactgctgttgttggtgaccaagcccaattagggaagaactttgatcctttggttcttgaagattttgattgggacaatgagtgggttgatccatcagctaattcatctgttgttggggatgaccctcttttcacatgggagcatgttgatcatgccatcgatgcatctacacaacttcaaggccgctactttcctaggagagctcatggtactcaagtgccaattcttgaggatgatgaagatggtcttgatgtgggtgatgagaatgaagacgatgacgattttgtgcttgacgaccttgacatggatgaagaagaagaaacaaacaacactacaacagtggtggccgtggtgatgagcaagacaaggatgatgttggtttag

SEQ ID NO: 34287 - DNA, 393 bp, Zea mays
  Peptide Sequence Number=SeqID_76066
atgtctctgtctgagtcgcttaaggaccatgtcgatgtgggcctactgaccgaggaccctttaactggtcacatgcctcgtcatggagctcttgggcaaaatggtgaaggtacagtaccgaacttgttgagtgattatgtgcatctacagggttgtccaaggtccttaggacaaggacaactgtgtcccacacccctcatcggagcttgcgccggcttcggcacacccgatcacccctccccatggccgagattgctcgccggagtaccatcgacctgcccggagcgccgacctcagacccccggagcccgcgcttgcctcgtctccggcaacttcaccgtcacgaatgggagcagcgccaaccaccgtgtcgttaacccgccgtgcgcttga

SEQ ID NO: 34288 - DNA, 699 bp, Zea mays
  Peptide Sequence Number=SeqID_76067
atggcgccccgcaagacctgtgacgacggcgactctcagctctcttacggaagcaggaggacggccttcttagagaaggttggccgcgcggggacgaggacgagacaggcgctctcttggggccgctctctttcctcacccgcgtggacgcttgtaaccccctactgcaagcgcacccgacctgggcgcgggacgaacacgaaggccgcgggatttccacctctctcacgcccgtctccggccacctcgcttcccaccttcgcgctcgcccacgcgctcgacccatctaggctggggcacgcggcacattcactcgtcggcttagggaccccccggtctcgaaacgccgacagccaggaccgtgtcaatgtgggcctaatgaccgaggaccctttaactggtcacatgcctcgtcatgggaggggccgtattggcctcgatcattgttccgcctccgacccctgcccctgccctggggcctgtagaagagaggtccacagtcccatcacctacgtctatggtgaggcggcaaggatcagggagccagaggctcatgccttccgccatgccagtctccaggtgtctgtgcctgctcctggggcatcggtcgagcccgacatcaccacggccgaggtggctcccgcgtgccccgcgtcatcgacggaggccatcatcgtcttctctgttgtcttgtcgtaa

SEQ ID NO: 34289 - DNA, 168 bp, Zea mays
  Peptide Sequence Number=SeqID_76068
atggcaggcgaaattaagcttgccggagctaaggaaaggtggctggccagagaggagatatggagcgaggaaatctggtctgtctccctgcccaaacccgaggcaaatccaagaaaaaccctgagtgacactggggtgtcacagtacgccactagggccattggatga

SEQ ID NO: 34290 - DNA, 507 bp, Zea mays
  Peptide Sequence Number=SeqID_76069
atggcgggcggaattaagctcgccggagctaaggaaaggtggctggccggtgaggagatatggagccaggaaatctggtctgtctccctgcccaaacccgaggcaaatccaagaaaaaccctgagtgacactggggtgtcacattctgtgtctaagttttttgagcctgatgattctgggagttcggtggtgtggacggaagagtcttcggatgaggatttggattattttgcggcactggatgtggctgcggcggaggcttctccgcgtgtgatgggtgctgaggttcccggtccgagtgctgggcgtaggcggcgaagggcggtgacgaagcgtagagtgagtgaggtggagggtggtcgtcttcgtgtggacagggctggcaagcgggaattgttgtcctcgccagctagggcgagtgtaggtgagggggagttgcgaagtctttttgagggtgaggagctgaggataatgctgtttaacttagggagatgggtatcatcctga

SEQ ID NO: 34291 - DNA, 216 bp, Zea mays
  Peptide Sequence Number=SeqID_76070
atgggagggatggtgttgctggcggcggtgggtgcgctgcaaaggggaagtggggcggtggtggtgcgcatggaggcgaggcacgagtgcggggggcacgggggaagaatagagtttttccaaagcacggactactcagattcaggggctaagcataactactattgctcggctcctgaactgagaactatgctaaatacgacttataagcactaa

SEQ ID NO: 34292 - DNA, 216 bp, Zea mays
  Peptide Sequence Number=SeqID_76071
atggcggcggtgagtgcgctgcaaagggggcgtggggcggtggtagtgcacatggaggtgagcacacaggcggggggcacaacttattctaggcttcaagggggaagaatagagtttttccaaagcaaggactactcagatttaagggctaagcataactactattgctcggctcctgaactgagaactatgctaaatgcgacttatgagcactaa

SEQ ID NO: 34293 - DNA, 186 bp, Zea mays
  Peptide Sequence Number=SeqID_76072
atggcggtgggtgcgctgcaaaagggggcatgggtggcggtagtgcgctgcacagggggtgtggggcggtggggaagaatagagtttttccaaagcacagactactcagatttgggggctaagcataactactattgctcgactcctgaactgagaactatgctaaatgcgacttataagcactaa

SEQ ID NO: 34294 - DNA, 558 bp, Zea mays
  Peptide Sequence Number=SeqID_76073
atggaggcccaggcccgcacatcatgtaaccggcacgccggttactacatacaagaaactgcaccgccactcgcgccagtaccgcgccttctcgactgcggaacctgtaccgcgactcgaggcgaccctgcgcatgactcgacagtgccaatcgagcacatcgatctcgggccggacaggcggcacctttggcaggcgaagcaggcgacgcttcacctccgccataatgaccgcgtcaaaaaaggggtcagaaaaggggatactccgaaagggatccttcttcgcgaaggaagcgggccccgagcccccctactgatcagaggttcaaaggctggccccaccaaagggttcaacagccgcctcagagcgctcgggcttcgcgcccactactggtcagaggttcaaaggccggcccctcgaaagggttcaacgaccgcctcaggccactcgggctccgcgcccactactgatcaggggttcgaaggctggcccccgaagggttcgacagccgcctcatacgcagagcgagggatgaccctgggtacgttcgatacataa

SEQ ID NO: 34295 - DNA, 927 bp, Zea mays
  Peptide Sequence Number=SeqID_76074
atggcgccccgcatgctctgtgacgacggtggctctcagcccccttacggaagcaagaggacgattcccacctctctcacgccggtctccggccgcctcgctcttccccccttcgcgctcgccctcgcgctcgacccatctgggctggggcacgcggcgacattcactcgtcggcccagggaccccccggtctcgaaacgccgacaagtagggggctcggggcccgcttccttcgcggagaaggatccctttcgaatcattatggcggaggtgaagcgtcgcctgctttgcctgccaaaggtgccgcctgtcccgctgcagagcagcccggctgcatcccctcgccggtggtcacccaagacggtgaccaccagttcgatggtggggagaagcgagccgggctgcggcctctgccccgccctcagcttcaaggatcttcatcatccttgctggggcggagggcgggctgagccggagctctacctcccgcatgggttcgtgggtcaccctctccttcaacattcaggggagagggtgctcactggcctagcggaaggggcggactccgacaacgcggggctggtcggccgcgagcgtcgtcagcttcagcgcgttgggctcgctggctcaactggctctggcttggctcccggtgcccccttccgccgtacgagaggtcgccgcgccgcgcgcaccagagggccgcccaagacgtcgcgcgctgctagggcggcgttcgtgttcttgggctatcctgcctttgctccggtacgacgcctcttgcgcggaggtcggtgctcgcctgtccgggaggatccgagtggggatctgccggtgggcatatggctgccgtcgtcgacgttgaggtggtggcggctgaagaagtcctcgttgccgacgagatcaccgccaccatccgcgctctag

SEQ ID NO: 34296 - DNA, 263 bp, Zea mays
  Peptide Sequence Number=SeqID_76075
atggatattttattgggtcatttgttatgcccagcgggtacggtgggcgtgggtatgttctctgttgccccatacccgctacccgatgggggcaccacgcaccaggcaccaggccagccgccagatggaccatccgggttccaggcgtccaagccatcctcccatccaccaccgccactccgccagccgaccactaggtcactaggccgcaccgccgcagctcgcaatcggcggttggaggtcggccagttgccctcgcccag

SEQ ID NO: 34297 - DNA, 510 bp, Zea mays
  Peptide Sequence Number=SeqID_76076
atggcggattttgatacccatgggtattttattgggtcatttgttatgcccatcgggtacggtgggcgtggttatgctggtacttattattgcgattcaaatgatcatgtctatcgtaatgttaatgggtatgggtactcgatgggtacccgctacccatgtcgccactatgcgatgttttctaggggcacggatccccaattccccagcatggacaggccgtcactaaacgccgcagagaattttgatgccaaaggaacagtgcatgccctggagctggcaggcggcgtgcctgtccaggccattgccaaacagtacgcccgtgctgcaaggtgcactgtgtccaccatcacttatgcattgccagggaagcttcccctacatgccaataccacgcagatcatggatatcagggtacaagaagattgctccagcaactccaagtattacatccattatattcctgggcccacatgtcggggctcagcacccttgtacgcgcccccttga

SEQ ID NO: 34298 - DNA, 312 bp, Zea mays
  Peptide Sequence Number=SeqID_76077
atggctgccgtcgtcagggctgaggtggtggcggctgaagaagtcctcgtcgccgacgagatcgccgccaccatctgcgctccgggcctccaactctttggctttgatagcttgtcctcgcccctcgagtggggacgtgggcgagggccttatcgcagcagcgtctgccctgaggtcatcgctgctgctgtttggctgcccggagcggaggttgctgtcgctgctgccggagtgggcggcggccctccaatgtggggggttgttcatacctgcgggggtggaaccagagttccgtctgtaatggcaccctga

SEQ ID NO: 34299 - DNA, 618 bp, Zea mays
  Peptide Sequence Number=SeqID_76078
atggcttccgtcgttggcgctaaggtggtggcggctgaagaagtcctcgtcgccgacgggatcactgccaccatccgggctccgggcctccggctctttggctttgatagcttgtcctcgcccctcgagtggggacgtgggcgagggccttgttgcagcagcgtccgccctgaggccatcgctgctgctgtttggccacctggagcggaggtcatcgtcgctgctgccggagcgggcgtcggcgagccaccaggggtttcatcgccccgcaggccctccaatgtggggggttgttcgtacctgcgggggtggaaccggagttccgtttgtaatggcaccttgagtgccggtgtttgttcgttgtggctgtcggggcctgaacatgattctgctatcgatatagtcgagaaggcacgaaaaattgtttcggcagaaaggttcccgagcattaagacttgttcggtcagcggaatcgcttatccgagcgtgagttacttaccgcagaaggtgatgagtgaggatcccactttcgaagtagtcaaaaagcacgaaagacgttctggcagaaagaccttttccgaggaaaattttgatgcagagggggttccccccttctag

SEQ ID NO: 34300 - DNA, 351 bp, Zea mays
  Peptide Sequence Number=SeqID_76079
atggcgaggcggcggtcgtggtgcatctcgtcgtggtcaggccagttcgctgctccaaccattggtgagacccctctctgcagattcaccatcttcccctctaagtttagtgccgatcaatttcaaggttggggtggttgggcgtcgagttatgtgagctccggtgatgtcctccgccgcgaatgcgtaaacccctttggtctgattaaacctggatcgttgggatcggatccgagggctaaggctttatcatggtgtggcgcgtttctgtccgtagatcatgaatcttgtggcaatgggtgcgtactggttcatatctgggctgatctattctggtcggtcagattgtaa

SEQ ID NO: 34301 - DNA, 300 bp, Zea mays
  Peptide Sequence Number=SeqID_76080
atggcgaggcggcggtcgtggtgcatctcgtcgtggtcaggccacttcgctgctccaaccattggtgagacccctctctgcagattcaccatcttcccctctaagtttagtgccgatcaatttcaaggttggggtggttgggcgtcgagttatgtgagctccggtgatgtcctccgccgcgattgtaatcggacggctgaaaatcaaagatacctcttcggctcgccccttttgcttatgagcccctgctctttttgtgaatcaacccgcgatcctttcctaggtgtagctgagtcttga

SEQ ID NO: 34302 - DNA, 447 bp, Zea mays
  Peptide Sequence Number=SeqID_76081
atggcgaggcggcggtcgtggtgcatctcgtcgtggtcaggccacttcgctgctccaaccattggtgagacccctctctgcagattcaccatcttcccctctaagtttagtgccgatcaatttcaaggttggggtggttgggcgtcgagttatgtgagctccggtgatgtcctccgccgcgaaccacccgggaaaacagtgctaccacaagggtttaatggggacgcccttggccgattaattaggaaagctagtgggaagactaccttacccgaaaggggcaagggcagtaggggagtggtcagtgtagggaggccctcgggaggattttgctgtgatggcggtcctgcaagggattcctgggaaggccctcggggaggattttgctgtgatggcggtcctgcaagggattcctgggggaggccctcggggaggattttgctgtga

SEQ ID NO: 34303 - DNA, 345 bp, Zea mays
  Peptide Sequence Number=SeqID_76082
atgacagaggaaaagggcggaggggcttaccggtggcaaggttgctccggtgaggggtcgggtgaggtccaggagtctctggcgatcacaccgtggtgtggatcgtctgtgatggtggtcggagcagggcttggaaagcttcacgggccactggcgaagctaaccgagggacaggcgcagcttggacgcggctggagcaaactggccgcggtggtcgaggcttggacagtgatggcgggcggaggagagctcgccagagctaaggaggggtgtctggccagcgagggtttcgctgagtggatcaagagatatggaggggtgaagttgggtttgtctcactgctga

SEQ ID NO: 34304 - DNA, 186 bp, Zea mays
  Peptide Sequence Number=SeqID_76083
atggcgggtggaggaaagctcgccggagctaaggaggggtgtctagccagcgagggttttgctgactggatcaagagatatggaggggtgaagttgggtttgtctcactgccgaacacagagagaagatcccgggtttgacgtgtccagagcacgcgtcccaataccatcttctggtatgaggtag

SEQ ID NO: 34305 - DNA, 795 bp, Zea mays
  Peptide Sequence Number=SeqID_76084
atgatgatcgtaggcctcgtggtggggagaagcaagccgggctacggcctctgccccaccctcagcttcaaggatgttcgtcatcctcgctgtggcggagggcaagctgagccggggttctacctcccgcatgtgccggcaagccgcctcttccttcagcatttaggggagagggcgctcatcggccttgcggagggggcgaacttcgacaacgcgggaccggttggccgcaagcgtcctggttctggcgcggcctccgacgttgcctcctgccgcttggtccgggcgtggccgtccgtccaccgcacgggcgactgttgcgccatgcgcaccgggggatcgtccaagacgtcgctggtgcagccgccattcgtcggcgtggcgctggcgcgcaggtggccgctgtcgtcggtgctgaggtggtggcagtcagaggaggttgtctccgccgatgagaccttcggcggcacctgcggtcggacctccggctctttggctttgatggcttgtcctcgcccctcgtgtggggacgtgggcgagggccttttcacagcagcgtttgccctgaggccctctggtgtggaggttgttcatacccgtgggagtgtaaccggagtcccatttgtaatgaaccttcggtcgctctgcgatgagctgaagccagaggcagcagtgtcggcgtggacagaggcggagtcggctcgaaaagaggttttgtcagcccggaagcatgtggcttcccaggccgaggaggtgcaacagcggcggctggagcttggccaggtcgtccgctag

SEQ ID NO: 34306 - DNA, 402 bp, Zea mays
  Peptide Sequence Number=SeqID_76085
atgaacgccgccctaccggcgtgcgacgtcttggacgatcccccggtgcgcatggtgcaacagtcgcccgtgcggtggacggacggccacgcccggatcgagcggcaggaggcagcgtcggaggccgcgacagagccagctgagccaggcacgctggagctgacgacgcttgcggccgaccggtgtcaaaggttcatctacaactatactaaatcgactgttcggaataccgtagattattccggacaggagaagctttttggaaaaacaggccaagcgcggaccgtccgggcccctgcggcggaccgtccgcaacaccaggatgaccctcggtcagaaccaatgcaaaaatccaagtctgcactacggaccgtccggaggaaaggcaaggaccgtccgtga

SEQ ID NO: 34307 - DNA, 213 bp, Zea mays
  Peptide Sequence Number=SeqID_76086
atgaagcacaaccagttcactacaagaacggagctcaaatcactaacacggtcgatcaagtgcgtggaggcggagtgtggaagacttataatgctcaaagaaaacagcgccgctcgccccgctccgactgctgtgccaaccacctgggcaaggttgacaatagccaagttcagcctcgggcgcaacaggaagctccgcctcgcccgaccctag

SEQ ID NO: 34308 - DNA, 729 bp, Zea mays
  Peptide Sequence Number=SeqID_76087
atggcgcctcccgttgacgtggccggcccgcgccctaggttgggcgatgtggaggctcctccgaggtcgaggtcgagtccgtcttccgtggccgaggtcgagtccgagcccctaggtcgggcgaggcggaggccgttggctgaggccagggcggagttcgagtcctggggtcgggcgaagcggagttcatcgtcttctgggctgagcccaaggttgcttcttggcgaagacagggcctcgggcgagccggaaatatgttcgccgctggaggggggcctcgggcgaggcggagatcccccagggtcggctgcccttctttatgctgatgggggttaccagctgagaattaggagccttgaggcggtgtacgactataattcaccggactgtctggtggtgcactggactgtccgtgcccggtgcgccaactgccacaagtttgcaacggtcggctgcgccaggaatggaaagaaatcgcgcaccggacatgaaaagtggttgtccggtggcacaccggactatccggtgcgccacccgacagacgacaagattagccttccaagaatgcctccaacagctcctagctgccttggggctataaaagggacccctaagcgcatggaggagataccgaagcatactttgagcattctaagtcttccacactccgtctccgcacacttgatcgaccgtgttagtgatttgagctccgttcttgtagtgaactag

SEQ ID NO: 34309 - DNA, 858 bp, Zea mays
  Peptide Sequence Number=SeqID_76088
atggctacaagacaattgttacgattggtgatggcacaactgatctggaggctcggcaacctggcggagcagacttgttcatctgttactgcgattaatgtgttcaccactgaaaatcagatatcatacacgagtacgaatgagattaatgattggataggagctccgaacacgagccatagacgggagttgatgccaccaggcgatggatggtcgcatcctcaggacctcggcgtgcaacagcagcggctgtcatttttctcatcgcctacttcaatagcctacaacattagcagctgggatccattgagtatttggagaggtattcaggagatcatggatgaagaaatggaagaagatgttatagtcaaggctgtggactgctcgaaccaatcagagtttaacataccactgttagatcttagagctcctcttattcttgtcggctccccgaaggagatgaatgaagaaaggaaggtcaacttactaggactagcagatatattatcagcctcaattggaggattctcatgggctcccttgatttcaaagatctgcaagaataaagtcaaggcggaggcttggtttactggtcttagtgccttgatatgtcgaggacagcatggatcccaggtccaacatatagatggaatccggatcgctggaattccttttgatggtgcaagagaaagtagcctaagtggtagctctactttcacttcggattcctttgagaataagttgagctcgcttgctcgtcttgctaagatggaggttgagtatcgatgtatccagatcatagagattggtcttccaatgggtaaacatattaggatgagagacaccccgggggtctaa

SEQ ID NO: 34310 - DNA, 405 bp, Zea mays
  Peptide Sequence Number=SeqID_76089
atggagatgaatgaagaaaggaaggtcagcttactaggactagcagatatattatcagcctcaattggaggattctcatgggctcccttgatttcaaagatctgcaagaataaagtcgaggcagaggcttggtttactggtcttagtgccttgatatgtcgaggacagcatggatcccaggtccaacatatagatggaatccggatcgctggacttccttttgatggtgcaagagaaagtagcctaagtggtagctctactttctcttcggattcctttgagaataagctgagctcgcttgctcgtcttgctaagatggaggttgagtatcgatgtatccagatcatagagattggtcttccaatgggtaaacatattaggatgagagacaccccgggggtctaa

SEQ ID NO: 34311 - DNA, 348 bp, Zea mays
  Peptide Sequence Number=SeqID_76090
atggcgagcggaattgagctcgtcggagctaaggaaagggggctggccggtgagggtgagtgcggggcgaagtggggcgcgctcggggaggctttatatgcgcggcgcggtgcacgggcggtcgtggaccggctagggacagggagttgtagcgtcaccaaggtgccagtgtcagaatgcctggtcccgaggtcaagctgcgccaaaaccatgtcaaatgaatttggtttgagttcaaacttttccaggatgtgttcaagggaatttggcacgactttgatatttggatctcctggctttgagtttcgaaaaacagagaacacagatgatctttgggaagaggtctga

SEQ ID NO: 34312 - DNA, 417 bp, Zea mays
  Peptide Sequence Number=SeqID_76091
atggccggagtcggtcggtccacgcgcgcaggcggggatgctcgtcggcggcgaggagaccggccaggtcacggcgagatagttcaatcaaatgggtcagggaggtccacgggatgccagagaagatatgagcgcaaggaattgggcggagactcactggatagctcggtccacgcgcggcggcggaagaccgaagtccggctagggacagggagttgtagcgtcaccaaggtgctagtgtcagaatgcctggtcccgaggtcaagctgcgccaaaaccatgccaaatgaatttggtttgagttcaaacttttccaggatgtgctcaagggaatttggcacgactttgatatttggatctcctggctttgagtttcgaaaagcagagaacacagatgatctttgggaaggggtctga

SEQ ID NO: 34313 - DNA, 417 bp, Zea mays
  Peptide Sequence Number=SeqID_76092
atggccggagtcggtcggtccacgcgcgcaggcggggatgctcgtcggcggcgaggagaccggcctggtcacagcgagatagttcaatcagatgggtcagagagtttcacggggtgccagagaagacatgagcgcaaggaattgggcggagactcactggatagctcggtccacgcgcggcggcggaagaccgaagtccggctagggacagggagttgtagcgtcaccaaggtgccagtgtcagaatgcctggtcccgaggtcaagctgcgccaaaaccatgtcaaatgaatttggtttgagttcaaacttttccaggatgtgttcaagggaatttggcacgactttgatatttggatctcctggctttgagtttcgaaaaatagagaacacagatgatctttgggaagaggtctga

SEQ ID NO: 34314 - DNA, 441 bp, Zea mays
  Peptide Sequence Number=SeqID_76093
atgggcaagaacaacaagcgcaagcgtgagccgactcctccatcggaggagtttggtgactcggaatactcagaggaggagttctcctctgagtccgagggatctccggctcccatccccctgcgagagtcgtctgatgactcagacgactcccaggggcttgcggcggaggtctggacgtacatccgggccgtcgagcgctccgggctcgagggctcggatgagtctgagttctcctcggatgaggaggactcggacggcggcggggacgaagatgatgacgacgacgacggtgacgacgacgacggtggcgacggagacggtgatggcggcaacgacggcggaggcagcggcggccagggcagcaccagaggcggcagtagcaagggcagcaccaagggcggcagcagcacgggcagcggcggcaaggccagtggctaa

SEQ ID NO: 34315 - DNA, 441 bp, Zea mays
  Peptide Sequence Number=SeqID_76094
atgggcaagaacaacaagcgcaagcgtgagccgactcctccatcggaggagtttggtgactcgaaatactcagaggaggagttctcctctgagtccgagggatctccggctcccatccccctgcgagagtcgtctgatgactcagacgactcccaggggcttgcggcggaggtctggacgtacatccgggccgtcgagcgctccgggctcgagggctcggatgagtctgagttctcctcggatgaggaggactcggacggcggcggggacgaagatgatgacgacgacgacggcgacgacgacgacggtggcgacggagacggtgatggcggcaacgacggcggaggcagcggcggccagggcagcaccagaggcggcagtagcaagggcagcaccaagggcggcaacagcacgggcagcggcggcaaggccagtggctaa

SEQ ID NO: 34316 - DNA, 225 bp, Zea mays
  Peptide Sequence Number=SeqID_76095
atggcgagagtagcttgtaccctccgtggtaagagactggatggtggggtgctgtactctcggaaacatggcgggcaccatggcgagagtaacgtgtaccaaccaggccaatggctggacgaatttccgctgcaaatgttggtgtgtgatttgtgtttacttaatcctgcgatcttggcggtttccagatctattaatttttcagatgacaaagatactgcgtaa

SEQ ID NO: 34317 - DNA, 183 bp, Zea mays
  Peptide Sequence Number=SeqID_76096
atggcgagagtagcttgtaccctccgtggcaagagactggaaggtggggtgctgtactctcggaaacatggcgggcaccatggcgagagtaacgtgtaccaaccaggccaatggctggacggttataattttgttctgttgtggatgctgctaagtgccggtgggctcggccttcttatataa

SEQ ID NO: 34318 - DNA, 468 bp, Zea mays
  Peptide Sequence Number=SeqID_76097
atgtccggtgcgccagccacgtcaccaaagccgttgggattcgaccgttggagcactgtcttctgggcccgcctggatgtccggtggcacaccggacatgtactgttgagtgtctggtgcgccagtatgggcgtgcctgacttctgcgcgcgctggcgcgcaataaatgcgctgcaggtagccgttggcgccgaaatagtcgttgccccgcagttacatcggacatttccggtgaattatagcggaacacccgttgcgaattcccgaggctgccaagttccagagccgcgtcctcttggagcaccggacagtccggtgaattatagcgcgccggctctgaaaattcccgaggctgaggagttcagcgcgaagtcccctggtgcaccagacactgtccggtggcacaccggacagtccggtgcgccagaccagggagcctttcgggatgcctttagctctctattttga

SEQ ID NO: 34319 - DNA, 1386 bp, Zea mays
  Peptide Sequence Number=SeqID_76098
atgtccggtggcacaccggacagtgcggtgcgccagacctgggagcctttcgggatgcctttagctctctattttgaacccaacattggtctttttaattggcttgttgtgaacctttggcacctgtgtaagcctaattccctttcaccaccgtttgaggtggcggaggacgatgaggacgaaggggccctccgaggatggagaagtgagaattgtgggggatatgtgccgaggatggagactttgcggagttgggatattcgcggttccaatgttcgtttgaaccgtgttttcgagttaaaccatctgccatatggcgctgaggggttgggggtctcttatcgttttgctgtggatttaatgggaacttgtgcggcccccgggggaaggatgtcttcgcctgagctccgggaatcttcgacgcgaatgctggaggttaccaggggtcgctggccgaggaatgttcagatcccccgggcggtcggtgaggacatgtttacgtctctcttagcccatgagatgaagatttttccttacgtctcgcttagcccccgagaatattgccaagatgcgacgcggaagtgccgggcgttcactagggtcggggaccctagtcgcgaggtcaagaaggcgtggggaatcgcgaagtccgctgcccccggcagtagcaagccaccgccggctgcgaagtctgctgtccccgtccccagcaaaccttcatcgggtgcgagggccgtcgctcccggctcgagcaagccgccttctgctgagcccacgcaggagcgagggccaccgtttccgctgtgcactgctgaggcggtggcgggtgggggcgacctctccatggacatctgtgtggatgactaccgcgtgggtggtgtcatgatgttcgatgcccgcatggggcgaggacttgtcggtaagtttttattctttttttcacggggtctgggtcttggacaagattgtgatgcagggtcggatgctgggcaactggctattgtcccggctccggtggtggccgcgccggccgtggcaacgaccgaggcgaagggtgcttcgcaggacccatggtccaagttttgcgccagcggcgagattacttcggctgccgccgctaaagacgtggcgggttctgttgcgcagcagctgaagcatgcaacgcagcaactgaagcatgcggctgccttcgccgatcatgttgcgtcgggcgctctgacctcagagttcgctgccgagaggcaacgactcgagggcaggattgagcgcctctggacacagcatacggaagctgtgcgggacaagtcagctgcggaaaacaagagccgcaggctgatggagaagttggcggctgcggaggccgagaaggaggacctcagccgttag

SEQ ID NO: 34320 - DNA, 366 bp, Zea mays
  Peptide Sequence Number=SeqID_76099
atggccgagcagcccccttgcagcgagcttctccttttccctcgctgcgcagctccttggcgaaacgccgctgttcctgcagccacggcgtccaagtccctgcgcccagccctccgatccaaaaacagcagccctacgcaaagctccttcccttgctcctttccgattgagcagcacgccgtgaagccccgtcggtggtttgctgtttttgcgcagccccgtcgtcgtcgttgttcacccccggagagaaacctcgtgttttgcgtggagaaggcaagccgctcaatactcgtcgatgtgcggagctatgcacaaatcggaatcgccatcgtccttacaaacgtcgattgggtttgtttatggtga

SEQ ID NO: 34321 - DNA, 378 bp, Zea mays
  Peptide Sequence Number=SeqID_76100
atgccgatgcggaatcgaacaaggatttatgtggcctcaccgggggtgaacaacgacgacgacggggctgcgcaaaaacagcaaaccaccgacgggcatcacggcgtgctgctcactgcgcaacaaaacagcaagccggcagcgcgcggagccgtcgaggctgctgcacatttcgtcgagcaccctgcgcgcatcggaaaggagcaagggaaggggctttgtgcagggctgctgtttttggataggagggctgggcgcagggacttggacgtcgtggctgcaggaacagcggcgtttcgccgaggagctgcgcagcgagggaaaaggagaagctcgctgcaagggggctgctcggccatggagatgtggtcggggtga

SEQ ID NO: 34322 - DNA, 1005 bp, Zea mays
  Peptide Sequence Number=SeqID_76101
atgccccctgcatcaccacagggcatcctggctgctggaggaaacctcgatggagacggagacgacgacaacgccggtggcaattcgagccacatcacggagcgctcagaggagccggagccggagggatggatcgccagacccatcactcgtgacgccgctcgcgggtgtcacttccacgatgctctcgataccctattgcgtcgggcctttgaccgacacacttggtctattgagtattgttgtgtagtctaccagcatcgtcgcgggctatacccggaccagtgggaggctacttgcttggtgcgtcgtctggacgatgatctctggggtgcagaggccttctcagagcactattctatcactgagagggacactgccgaggcagccatgcaagatgcagcacgacgggcactttctcagtattgctcgttgttcagcggggtagctgacggccttgacctgaagtattaccctcgttgttcgaccggcagtgctggaggtgtgattgtttcgccagttggtgagggcaatcctaggctgagcatcatggtcaacttggtcgtcgtgctcaacacagagttggaccacgcccttgacgagttgggcaaggttcgggtggaggttgtggaattgcgtgttgaatgcgcggcatgccactatcttgatggtggttctctcgcccctgttgggattcagcacccataccattcaccgccccgtggtcgcttcgactatgagtcagatctgatatgtatgtggtttcttcagatgtttgagaacaggcgtagaggtgcgaggcgtgctcagccagagcagcaggcaccccaagaggaggcagctccgcagcagcatttgccaccgccacccctgatgactattgagcagatgttcttgatgcagacccaggcagttcaggcaattggtcagacattagcagcgatgcagcaggttcagcagcagccaccaccacctcaacctccagtgcaagcccagatgtcataa

SEQ ID NO: 34323 - DNA, 444 bp, Zea mays
  Peptide Sequence Number=SeqID_76102
atggagctcggtgcaggcggtgacgcagggatgcccggagctggattcttggtcggtgatggcgcgggagcaggagagggtgtcggagatggcatcgcggaggagatattggggctggcgctggggtcggacgaggagcagagtaaccggggggcactgtcgcgtcgagccaacgccggagagcccccgaggtggcgagcagcagagcaggagatccggacgtcggtggccgtgcaaacacaagtgcttaaatgtgaaaatatgcccaaggatgatcaaagtgcaaatcacaagttaagccaaggggctgcttctgtctggggcaccggactgtccggtggtgcaccggacagtgtccggtggtgcaccggacagtgtccggtgcgccaggctgcctcggccgaagaggccgctctcgggtttttctccggcgacttcggctaa

SEQ ID NO: 34324 - DNA, 312 bp, Zea mays
  Peptide Sequence Number=SeqID_76103
atgtcggataggatacaaatggatatcgacatcataaacagatttatttgttctgatatggatgcgattccacaaaatccacacccgtcactagagagacaagaaggaggaatcacagagaattgccaatggaccttggtgcaggcggcggtcggcatctggccaatggagctcggtgcaggcggtgacgcagagatgcccggagctggattcttggtcggtgatggcgcgggagcaggagagggtgttggagatggcatcgcggaggagatattggggctggcgctggggtcggacgaggaggcagagtaa

SEQ ID NO: 34325 - DNA, 1077 bp, Zea mays
  Peptide Sequence Number=SeqID_76104
atggcccagatcacgggaccggtgtttgtcgggctgccccgggataggaatgcttctgtcgacatgctaagccgcggagccgtgcggttgctgttgtatcgtctccggcctccgcctctgcgtttgagttggaatccgagcggtgctatgccatccgccgccgccaaccgctcctgcctctgcaggttcgcctactcgaccgcgcgcgtcgagaggggcaggaccctgccgggcaaggcggtatttcttgatctgggagccgggaggaggttcacgccgagcggcgcgcttagcttgaggggttgcttgggttggcgggatggtggcggcgacggcgagttcaggaggagggtggacggagaggcggcggggatgaaggcgcaggtgctcaccacgcagcggcagctgatgcgcgatccggaggtgctgccgctcgaggaggccgccacaggcaagagcatgaacgtgaatggtgcctgtcggcgagggaagcggctagggtttccggagcaggcagcggctaagatggtggttgctgttgatgtagatgaagttcttggtagcttccttgcggctctgaacaaatttattgctgatcgttattcttggaatcactcagtatcagaatatcatgtatacgagttctttaaggttctaattgatgacaaccccagatatgctctagagtgtgctaatgatggcatgagggtccttctgttcgattacgaaagctcgtatccttggtgcaaaactggagccgatgaactgcatccgctggtgacaaaggcggtgacgcagggatgcccggagctggattcttggtcggtgatggcgcgggagcaggagagggtgtcggagatggcatcgcggaggagatattggggctggcgctggggtcggacgaggaggcagagtaaccaggggggcactgccgcgtcgagccaacgctggagagcccccgaggtggcgagcagcagagcaggagatccggacgccggtggccggtgcctaggcagctggccgagtctgcgaatcaccgagtctggagagggcgaggggcgaatagatctgggctag

SEQ ID NO: 34326 - DNA, 1392 bp, Zea mays
  Peptide Sequence Number=SeqID_76105
atgaaggagagaggcggctccagggcggcagtggacgagcgctacgcgcagtggaagtcgctcatccccgttctctacgactggtttgccaaccacaacctcgtttggccatccctctcctgccgtgcgttggtgggaatggcgtcggaaggggctgggatgatgggcctgtatggtggattagcgttttgtgatgctagggtttatgagcggaccgatgggagtgtgcctaatactctggttatcgcaaactgtgaagttgtgaaaccaagggttgcagctgctgaacatatctcgcagtttaacgaggaagcacgatcaccttttgtaaagaagtacaagactatagttcatcctggtgaagttaacagaatcagggagcttccacagaacagtaagatcatagccacacacactgacagtccagatgtacttgtttgggatgttgaagcacaaccaaatagacatgctgtcttaggagcttctgaatctcgtcctgatctgatgtactattttctagcacaaggcttactagcatctactgtttgtcagatattaacgggacaccaggaaaatgcagaatttgcgcttgccatgtgtccagcagaaccatatgtcctgtcaggaggaaaggacaaatttgttgtcttgtggagcatccaagaccacatatctgcccttggggattcctcgtcttctcccggagcatctggcagcaagcagtctggcaaaattgcaaatgaaaaggagagtcctaaagttgatcctagaggtatattccatggccatgacagtactgttgaagatgttcagttctgcccttccagtgcgcaggagttttgtagtgtgggtgatgatgcttgtcttattctgtgggatgctcgaactggcactgacccagctgttaaggttgagaaagctcacagtggagatgttcattgtgttgattggaatccccttgatgttaactatatcttaactggtctcggattgcagtggtcacctgacagagcatctgtttttggaagttctgcagaagatggtttcttaaatgtttgggaccatgagaaggaaacctgcacaactattggcgaaggtgattgggttcagttgcccgtgattcctcatgttgggaagaagaaaaattctaatgtcccagctgggcttttctttcagcatgctggtcatagggataagatcgtagacttccactggaattcgtcagatccttggacaattgtcagtgtctcagatgatggtgagagcactggtggaggtggaacactgcagatatggcgaatgagtgatttgatctaccgcccagaggatgaagttcttacagagctggagaatttcaaggctcacctggccagttgcgctccgaggaattga

SEQ ID NO: 34327 - DNA, 4873 bp, Zea mays
  Peptide Sequence Number=SeqID_76106
atggacgaagtggatgcataccgcgcgacacatagggcaagtaatgcaaatgatgaagatgcggaatctcctagccatttatgtgtctctgtacatgactactactgctacaaagtccagattcgtcccggggtattcaatccaatacttcatggaaagcggcttttccagcagttcgcggtcgacacgtacataaagattgagagctctcgtttagatttcatacgtaagaatcaagatcggttaagggcagacctataccagggcttggtggatagcatgctagatggagatattagagcagagaagattggcaagcgaactgtactgtcaacatcgtttattggcggtcctcgtgacatgagacgtcggtatatggatgctatggctctggtgcgcaagtttggtaaaccagacatctttcttaccatgacatgtaaccctaactgggatgagataaggagggagcttctccctgggcagacaccgcaagatcgtccggatcttgtagtgcgtgtctttcatgcaaagctacaggagttaaagcataggctgactaaacaggatattcttggtaagaggaagtacaagctcacatgccctgagcagtatgaccctttgatctcagctgagatcccaagcaacaagtaccctgaactacgaaagatggttatcaagcatatgatgcatggcccgtgtgggtcgctaaaccctaattgcccatgcactaagggtcgtaaatcgtgcaagaatcattaccctcggcctttcagtgacacaaccttgcaagggaaggattcgtaccctgtttacagacgtcgtgacgatggtcgtaccgaaaaggttcgagggtgcgaattggacaatagatgggttgtcccttacaacccatacctccttcgtctcttcaactgtcacatcaatgttgaggcatgtgggagcatcaaggctgttaaatacctgttcaagtacatatacaaaggccatgatcgtgcttctgttgttatgagagatgcgagcaaggcagatgatgatgtagatgagatcaagcagtacagagatgcaaggtgggtgactcctccagaagccttatggaggatatatggctttgagcttagtcagatatctccacctgtgatgcagctgcaactccatcttccaaacatgcacatggtggcgtttcacgagcggcaaatggtcgagcgagtcgtcaaccgtccaggtgttgataggtcaatgctcacagcatattttgaggcgaatagtctacacaaggaggctcgtggcatcctgtatcgtgacttccctgaatggtacacttggcagagtggtaagggaaaaatatggcaaaagaggaaacgagatacgggtggacaagtcggtagaatagtctctgctcatccggccgagggggagcgctactatcttcgtgttctcctaaaccatgtgactggcgccacttcctatgtggatctaaggacagtagatggtgtcacgctacccacttttcgtgaggcagcagagagaaggggactgcttgagtcggacaacacactggatgagtgtctcactgaacgtgctcttttccagatgccatcgacgctgcgacggctttttgccacaatacttgtgtactgtgagccaagcgatgtggttgtactctggcagaaacacctagattctatgtccgaggactatcaacacaggaatccatgcaaaactcatgttgagcagatggtattgattgacattaggaacatgttgcagtcaatgggaaaggacataaagacattccctcttcctcctatcatggacgcgtatgacgatgctattggtactgctagggaggtttacgaggaggaaattatcgaaccagcagcagaagatgtggctcttaaagactgtcttaacaaggaacagagggccgcctatgataagattttatctgccgttgacactgatcagggcggattattctttgtggatggacctggtggcaccggaaagacttacctatatagagtgctgctcgcgacgctacgcagccagggcaagattgcagtggcaacagctacatctggcgttgcggcttccataatgcctggaggaagaaccgcccattcacgcttcaagatacctctcactattgacgatggcgctgtatgtagcttcacgaagcagagtggaaccgcagagttgctacggaaagcatctctcattatctgggacgaggcttctatgactaagagacaagctgtggaggcactggacaatagcatgcgcgatataatgggtcggcccagactgccattcggtggtaaaaccattgtcttcggtggggatttcagacaggtcttgcctgttgttcgtaaagggacaagggctcaagtggtcgcttcttcgctacggatgtcttacctatgggagtccatgtcccacttaaagcttgttaccaatatgagggcaaaaaacgacccttggtttgcggagtatttgctgcgcataggcggtggaactgaggacacaaatagtgacggcgacatccgtcttcctgacgaggtatgtgtgccttatagtgggagtgacaccgatcttgacaacctaatagacttcgttttcccaaatctcaacaaaaatatgtccgattcgacctacatcacttcaagggcgatactgtcaacgcggaacgaatgggtggatatgataaatgttaagatgattgatcgttttcaaggggaacatatggtgtaccatagtttcgatagcgccatggatgatccccataactactacccacccgagttcctaaacacactgacgcctaatgggctgccaccacatgttttgaagctcaagattggatgccctgttatattgcttcggaatatagaccctgcgaatggactttgcaatggcaccaggctggtcgttcgtggtttccaaagaaatagcattgacgcagaaattgtactgggtcaacacgctggaaaacggattttcctgccgcgtatacctctgtgtccctccgatgaagagatgttccctttccagttcaaaagaaagcagtttcctgtacgacttagctttgcaatgacggttaacaaagcacagggtcagaccattcccaacgttggtgtatacttgcccgaaccagtgttctctcatggccaactatacgttgctctatctagagcgacagcccgatcaaacataaagattcttgcaatcccacccgtcgatgggaagaaaactttgaggaagggactgagaagtggaatgctgacatctttgagacagtttgaaagcaaacctagaggcatgggtgttcatcaactcctacttcgcgcattgccagagcttgaaggtttcgtttcaaacaaggatcagtcctacgaagatccaattgaagagctactgtatgctgtattcgttgtatcaagtgaaaatgccacggttgctgaactggctacaactttacaagccgacctttaccagctccaggcagctgcatcgtttgcttgccgactaggatgggctgtgaagcttctggataccgactctgttcttagggattcgagcactcctgcactgtccaacaacattctcagcgatgaagttgaaagctctcgtacgagtgtcgcctcagaaaagtctggtcatgagttgcttagcagtgattctgatggacacaagaactccgggatggcttatgtgggcttcattgtcgatgctaatgtaacttcatacttaatgatgggctcactatctccaggtttgaagtcgcatgctgtgacactatacgaggcaggaaagcttggcgattcttgtaaggctgatctatgcaatgatcttgccagtttagaggggaaacggtttgaaggtgttgtttctgttggtcgcttggccagcgaccgtgcaggtggtgccagagctgcttggggtcatggaattgcccctgcacctccctccatcgccctcgtcaatcccgtcatggaaggcccgtcctcgcctccccgcgcgcggcgcctccctggatcttccccaccatcctcgcctctcggcgcgtggggattccctggatcttcctcacctcccgtcaacaaaacaaaaggaaacacaacggcctcttaccatctttttcctcgcctcccgttcctcctcctaccttgtacggcgactccaaacagcaaaagtgaggaggaagatagtggcactgcagcgctcgtggaagaagaagcggtgaagcaggcagaggggttcgaggctgtggaggcaagggcaaagaacgtcgacaagtttgatctcagctaccttgacaaccaagtcttcttttggtctgtccgcgacatcttcaacagggatctcctcaataaaaagggcgaccttgcactcatcgattttattaaggaaatcccttgtgaaccaagggtggaagtcgtgcttattgatgatgcctttgttgaaagaaagtcgatggaatgtttatttcagccgaatgcatatctaggtgacgaggaagaggccccgctcctctccctgctcgctgcacagggactcggcctccgggacggcagacccacaagcgccagcacgctcgagactgtgccgtgggagtgggaggttcctcaggtgctgagcagtcgccggcggcgaccgccggtgtcggagatgaaggagagaagcggctccagggcggcggtggacgagcgctacgcgcagtggaagtcgctcatccccgtcctctacgactggtttgccaaccacaacctcgtctggccatccctctcctgccggtgggggccacagtttgagaaagctacctacaagaatcgtcagcgcctgtacctatctgaacaggcaagtgcatctgcaa

SEQ ID NO: 34328 - DNA, 303 bp, Zea mays
  Peptide Sequence Number=SeqID_76107
atgacacgaaagacccttcggctgaagcttctatacatgctgggtgggagattttactctgatgtgtggatgaagggtgatcatgagatggctgatgaagcgattagaaaaaatgaaaaaaatctcacgacgctcaagaagaagccaactgaactttcacctccactggaaccatataaccccgaagctgacccagccatgaaggaagcgttagatatgataagaatcgctaatgaagctgttgacgaagctgtcgacagactgctaaatgaagctgctgaaaaagtgcttaagaaagagtaa

SEQ ID NO: 34329 - DNA, 1227 bp, Zea mays
  Peptide Sequence Number=SeqID_76108
atgaaggaagcgttagatataataagaattgctaatgaagctgttgacgaagctgtcgacagacagctaaatgaagctgctgaaaaagtcgaagatgcccttctgactgctgatcatgatttggggcaggcgctagtggtggtcatggtggcaactgagcccatgaagcttgagagcggcgtcaaggtcatccagcaggcggcgcgcctgctgggtctgctggcaaatagtgcgcccgtgccaggcgacaccctatatttgtctttctcttccgcaagaagcttccccgggcgggtgcaatccgcccacccggctggggagatttcctctccgacatttggcgcgccagcaagaggttgcatcctccgcgccacgagtgcccgaccgccccgactctgggactactgctgtgcatgccatgcagtagcacacgccagtgcaggcatcctggactccatcgagggcagcgcctacggcgctgtctacggccagagaattgctgcgccaccccctagctccacggcatcaccgggggccatgaagcagtggcgcgacgacgtcgatcggctgctcggaatggcgcattctacttcatccaggtcgaggcctcgatcatcctggcgccaacgcgaggcgacagcgtctgtgcgctcgccctccgtaaggggtgcacagaccgacgacctccgggcggagctcaaccgtaggcgtacgggagaagacgcccgggtctctttggaaaggcaacccgggcccgcctgtcgggaccttcgcccccgcccatgcctcaccggcgcgttcgccgccgaccgcctcacgccccgtcgctttgccattaacgctcgcaccggcctcagcgaccaccccaccactgtacccgagccgtccactcaccccgcgcctgcccgagccgtctcatcgccgtttgctccatccccgggctcgtcggcgctcaccgtcccctccattcctctccctctaccgggcgcctataaaaggggccgctcgagctccgtttccaccacaccagccctggccacctcctccacttctccccgagccaatcgagctagcgccgccgcacctccccgtcgctccgtgcttgtgctccgccacaaactcacggtcacaaggcacccctccccaccccctattgcacccggctgcctcaccggcgacctcaccgccgtgagcacccgccaccgcgccgcggaccggccgccctag

SEQ ID NO: 34330 - DNA, 153 bp, Zea mays
  Peptide Sequence Number=SeqID_76109
atgcggcttcatacccttagaggtattgttgacgcagggaagtgttatacaacctatcgtggttgttcgaggaatgagatggtgtttgttactcatcatggggagtgggaagtagcagcacatccacttcactctcataataacgctgcctag

SEQ ID NO: 34331 - DNA, 105 bp, Zea mays
  Peptide Sequence Number=SeqID_76110
atgcggcttcatacccttagaggtattgttgacgcagggaagtgttatagaacctattgtggttgttcgaggtgcttgttgcttatcaaggaaagtgggaagtag

SEQ ID NO: 34332 - DNA, 150 bp, Zea mays
  Peptide Sequence Number=SeqID_76111
atgaagcattatttgaggttggtattgtatctgaaggcagatgaagcattatttgaggtattgttgacgcagggaagtgttatacaacctatcgtggttgttcgaggaaatgagatggtgtttgttttcctcaaggggagtgggaagtag

SEQ ID NO: 34333 - DNA, 495 bp, Zea mays
  Peptide Sequence Number=SeqID_76112
atgaagacagagccggtggtggatgggctcgacgacgaggtggtgcacaagatcaccaagaccattgctcgtgtacagatcgcagccagtgcaaatgatgtagatcttgaccctggtgttgctgggaagggtgctcccagcccccgttgtgcccctcggcccctcccaaccctcgtcgtcgtaacggagggtgctacgacaagccagcggatgagcgcggcgatcccgctggagcagtccatcacgccggtgcttcaggactttatgaatctcaacatattctatctaccagtgtattactgtgaagaaacataccacttgtctggtgtcaaggttcttcatggccttgataaggttttggaaggtggtgcagttgtcatgactcttagagatcatagtattccttctaatggggatatcaatgaaagtaaagtttcctacctctttccccgttatcttttctccatctgcccatctccaaccatatgtttttga

SEQ ID NO: 34334 - DNA, 387 bp, Zea mays
  Peptide Sequence Number=SeqID_76113
atgaactactttcctgggaagggtgctcccagcccccgttgtgcccctcggcccctcccaaccctcgtcgtcgtaacggagggtgctacgacaagccagcggatgagcgcggcgatcccgctggagcagtccatcacgccggtgcttcaggactttatgaatctcaacatattctatctaccagtgtattactgtgaagaaacataccacttgtctggtgtcaaggttcttcatggccttgataaggttttggaaggtggtgcagttgtcatgactcttagagatcatagtattccttctaatggggatatcaatgaaagtaaagtttcctacctctttccccgttatcttttctccatctgcccatctccaaccatatgtttttga

SEQ ID NO: 34335 - DNA, 1053 bp, Zea mays
  Peptide Sequence Number=SeqID_76114
atggcgggaggtggcggcgccgccacggcggcggcggctggggcggcggttgggatgccgtcccaggccatgctgccggtgcgacggcggtgcgagggcatgaccatgggagccagcacgctcgacctccgctctgggctcggcgtcgaccccttcaccctcgctcgcgtcatgtttaaggtgtacattgttggggatgcaataagggttgtatgtcggttttcacttccaaatgttgatgaagggtctcttgtgctacaaccagtacaaatgatgcagatcgcagccagtgcaaatgatgcagatcttgaccctggtgttgctggtttttccgttgcattagaaaacactggtcttagactattcaacattgatatgattagggagcacataacaagagaccggttttgtgtcatagacatgaactactttcctgggaagggtgctcccagcccccgtcgtgcccctcggcccctcccaaccctcgtcgtcgtaacggagggtgctgcgacaagccagcggatgagcgtggcgatcccgctggagcagtccatcacgccggtgcttcaggactttatgaatctcaacatattctatctaccagtgtattactgtggagaaacataccacttgtctggtgtcaaggttcttcatggccttgataaggttttggaaggtggtgcagttgtcatgactcttagagatcatagtattccttctaatggggatatcaatgaaactaagctttctgagtattcagaaaagattgaagcactagcttctaggctcgctgcttcactgcctgaaaatgaaaagccaattactgaaagcggagatgaaatctcttatgaaggagcaaaggcaaaaagtccaatatctttattatcgggactacaaaggagatcaattcaacaaatggaattaaatagagcccatgctaagtttggaccaagtcatcacgagagaaaggaatctattggagcacctataaaatcggatgtggaagctcatgctcatattcagaagcatagcttcattgttataattgtttga

SEQ ID NO: 34336 - DNA, 1566 bp, Zea mays
  Peptide Sequence Number=SeqID_76115
atgaagccgaaagggtgcacaaccgtggtgcggttgcacgcctcctgcatggcggtccgccctttcgcctgctggtttcagcgagaatgggggaacgcttataaccgcggggtggttacctgcttcgcgcgcagtggtttggcttcttccgtttctgccatcgctcggcttcaaggattttcatcatgcagcccggttgcattccctcaccaatggtcatccaggatgatgaccaccagttcggtggtggggagaagcaagccgggctgcggcctctgccccgccctcagcttcaaggatcttcatcatccttgctgtggcggagggcgagctgagccagggcctgcctccgcttgggccggcgacccgcttcttcctccggcattcgggggagaaaggcatcctccagctctgcggaggaggcgtcgtccagccatgcgggggaaggcgaactactgctgcttggacagtgtgcagctgtccgtcctccacccgggcgacagtcgccggctgcaccagggggtcgcacaacacgtcgtacgccgcaagggcggtactcgtgttccgggatggtcccgttctcgttcttgtggcgagagcgggagtgaggacctgccggtgcgctttggggcggccgccgctcgctggtgcggtgttggtgggcaggtggtcgctgtcgtcagtgctgaggtggtggtcgccataggtgaggctgcttctgatgaagcggttgcccctgttgacgagaccgtcaatgccacctgcgctccgggcctccggctctttggctttaatggctggttctcgtcccccatgaggggacgtgaacgagggccttccagcggtagccggtcgccggcgagccacctggagtttgttgtcccgcaggccctctggtgtagaggttgttcatacccgcgggagtggaaccgaagtcctgtttgtaatggtaccctgagtatgggcaaccttcggctgctctgcgatgagctggagccggaggtagcggtgtcggcgtggacaaaggcggagtcggctcgaaaagaggcttcatcggcccaggcgcaggtggcttcccaggccgaggaggtgcagcagcggcggctggagcttggccaggtcatccgcgagtgggaccaacctcggagtcatgctgccgaggccgtgagccgggctgaggtcctcgggggacagctggctgaggctacggagcggccaaccgagatgtctactcggcccggggccctggcggagacccgggctgcgatggcccaagcgcggtgctggcgtcctccttcgaggtggagatccttccgcccgtgtcgccgtccgaggccgggccagattccgccgatggtggaaacgacgccgagggtgctgatgctccctctgtcgatgtctgaacctgcaggaacaaacttgtttgtcggtagcagaatcgcttatccgagcgagagttacttttcgcggaaggtgatgagtgaggattctgttatcgatatagtcgagaaggcacgaaaatcgttctggcataaaagttttcgagcgttaggacttgttcggtag

SEQ ID NO: 34337 - DNA, 207 bp, Zea mays
  Peptide Sequence Number=SeqID_76116
atgcaggaggcgtgcaaccgcaccacggttgtgcaccctttcggcttcatcgcatctgggatcgggaaaggggatactttgaaagggatccttctccacgaaggaagcgggcccccgagccctcctactgatcaggggttcaaaggctggcccctcggtagggttcgacagccgcccagagcactccggctccaagcttattactga

SEQ ID NO: 34338 - DNA, 750 bp, Zea mays
  Peptide Sequence Number=SeqID_76117
atggagagtgccaaagcggtcgcagcattccaccgggcgctcggatccgcctgggcacgccacggcaccgccctcgccggccccgccggcacggtgctcgtcctcaccgacctccccgcgctatcctacaccccctccggatccgccaagtgggtgaagcatcccctctctctgtcgtccaagccgcggagccccatactggcctccgacgccgtcttcgccgggaagcgggaggagcacctcgccagcgaagagctcgtcggggcaggagggcgaggcggacggcggcggcgcgcgcggcggcggcccctgctgctgtcaggtgtcgatgcgggagaggagggcgtggacctggccgagctccaccgcgaggcggttccggagcgcgcgggcctcgcggagcgcgccagagaggctgttcccctgaaggctgaggtcgtgcagcgccacaagcgaggggagcgacggcgggagcgtccccgccaggccggcgttcttgaggttgaggttgtcgacgtggccctcttgccccagctcggattcgcctgggcgcgccacggcaccaccctcgttggccccgctggcatggtgctcgtcctcaccgagctcgccgcgctatcctacaccccctccggatccgccaagtggatgaagcatcccctctctctgccgtccaagccgcggagccccatactggcccccgacgccgtcttcgcgctctgcgacgtcgacacgccgtggcgcagctag

SEQ ID NO: 34339 - DNA, 954 bp, Zea mays
  Peptide Sequence Number=SeqID_76118
atgggttccaaagcgcctttctgtctcacgctcctcttgctgctcgccgcggcctgtggacctgctgcacatgcccacgatgctgtcgagctcccgcatcatggctcagccttgaaggaacagatttcttcaaccaagattcctgcccgtctcaagagtggcagcggactatgctcggcctgtgaaaacttcacgagcgaagccgtcacttatctcggcaaggaacagacacaggacaggatcatggagttccttcatgatgcttgctcccaatcattctcctttgaacagaagtgtgtcgagctgatggactcttatgcgactctcctgtttgccaagatcacggagatcagaccggaagcgttctgcaaacggtatggcctgtgcagggacacggctcttctctccggtgtgggaagtgacagcacgtgtgtgttctgccaccatctgctcgatgaaatcatgtccaaactgaaagatccagatgcggagtttgagataattcagattcttgtcaaggagtgcaataagatcgaaggtcacgtccagcaggttgagcagatagtggttgaaaggtctgaaggttggcattgtggatatttttgctatcttgcatggattcccagacaatgtgaggacgaaccagaagggcgagttctgggtggcgatccactgtcggagaagtatgtatcctcggctaatgagctgccatgtcaagctgaggaagtttttgctcagcttcccaatccctgccaaggacagcccgatggccagatgcttcacatcatggaggacgacaagggagaggtggtgagagttatcatcgaagtggaggatacgggtccatggttaatgttgtatgcttctctgagaagacctgtcattccaataatttggttctggagcaacctggagctgtatactgatctagcttcttttagtaacaaattctag

SEQ ID NO: 34340 - DNA, 378 bp, Zea mays
  Peptide Sequence Number=SeqID_76119
atggcggttatgactacaaccataaagaattatgggtttatgcaatatgtactaagtgaagataggttgagcagacagtggttgaaaggtctgaaggttggcattgtggatatttttgctatcttgcatggattcccagacaatgtgaggacgaaccagaagggcgagttctgggtggcgatccactatcggagaagtatgtatcctcggctaatgagttgccatgtcaagcagaggaagtttttgctcagcttcccaatccctaccaagtaccactacctgatgtatttcgatagcaagctctacgcgttgatcatcaggtacagcccgatggccagatgcttcacatcatggaggacagcaagggagaggtggtga

SEQ ID NO: 34341 - DNA, 189 bp, Zea mays
  Peptide Sequence Number=SeqID_76120
atggcggagctaaccgaagcactggcgcgacttgggggcgattggagtgggctggccacggtggccgaagctctagcggcaaaggcgggcggaaaagagctcgccggagctaaggaagggcgtctggccggtgatggatttgagttagggatcaaggtgaaaacgcctgatctttggctcaaggtctga

SEQ ID NO: 34342 - DNA, 387 bp, Zea mays
  Peptide Sequence Number=SeqID_76121
atggcgggcggaaaggagctcgtcggagctaaggaggggtgtctggccggtgatggatttgagttagggatcaaggtgaacacgcttgatctttggctcaagcacttgagagaaaccctaggtgacactggggtgtcacaacgagctaaaggaaggtgtttttcggaccttcggcattctgaagccttcgagtttttcgtggatcgagctcgttacgaaaaacgatctagcaccacgaaggggctactattaggggccttcttctccgccaaaggtcctctaagaaaaaacaccttcggcaaggccatatgcaagcaggcacaacacgaaggtatatatcgaagctgtaatcaagggagcttcggcatgatgacgcgactgaaatga

SEQ ID NO: 34343 - DNA, 252 bp, Zea mays
  Peptide Sequence Number=SeqID_76122
atgcaggtgaagcagaaggtctacgagttctacaaaggcacggtggagcgggtcacggccccgcgcaccgtctccgcgttcctcgagaagggcgtcctctccgtccccgagttcattctcgccggcgacaacctcgtcgccaagtgccccacctggtcctgggaagcgggcgatccaagcaagaggaagccgtatctccccgccaataagcagttcctcgtcacccgtaatggtatgctgctactgaactga

SEQ ID NO: 34344 - DNA, 1140 bp, Zea mays
  Peptide Sequence Number=SeqID_76123
atgcaggtgaagcagaaggtctacgagttctacaaaggcacggtggagcgggtcacggccccgcgcaccgtctccgcgttcctcgagaagggcgtcctctccgtccccgagttcattctcgccggcgacaacctcgtcgccaagtgccccacctggtcctgggaagcgggcgatccaagcaagaggaagccgtatctccccgccaataagcagttcctcgtcacccgtaatgtgccctgtttaagacgtgccatctcggttgaggaagagtatgatgcagcaggagcagaggtggttctcgatgaggatggcgaaggctggcttgcaacacatggagtgcaagctgaggggttcacggacaagacaatcatctactgcgagcaatgcgagcgagaatcggagtggtgccgccgactatcagaatcagagggaccagaagaagaatggcggccgtggctttgcagtcatgaatgtggtgaggtgtttcagcatctgcagggccttgctgcgtcgtccagggcaagatccatccccactacagtagagggcgtatcactcagcaccctgcggcggtggcgatacatgtccacggtcacacgaatcacgagatggcagcatgaggaggaggacaccgcagatcacgggcagctgtgcgcggctttggacgtgctccacgagtgcttcgacgacatggtggagccccgcacgcagactgacctcgccgccgacatcgtcttcaaccaagagtcgggtctgcgccgcctcaacttccgcgggtactacgtggtgggcctggagaaagtcggcgagctcatcaccgtgggcacgctgcgggtgtttgggaaccaggtggcggagctgcctctggtgggcactcgcttcgcgcaccggcggcaggggatgtgccgcctcctcgtgacggagctagagaagatgctccgtcaggtgggcgtccgcaggctggtgctgcccgccgtgccggagctgctgcccatgtggaccgcctccctgggcttccacgccatgacccgctcggacgtgatggagatggccgtagagcacgccatcctgagcttcaagggaaccaccatgctcacgagatcaaggatggtgagaaaagaggtattaaactataaatga

SEQ ID NO: 34345 - DNA, 1254 bp, Zea mays
  Peptide Sequence Number=SeqID_76124
atgcaggtgaagcagaaggtctacgagttctacaaaggcacggtggagcgggtcacggccccgcgcaccgtctccgcgttcctcgagaagggcgtcctctccgtccccgagttcattctcgccggcgacaacctcgtcgccaagtgccccacctggtcctgggaagcgggcgatccaagcaagaggaagccgtatctccccgccaataagcagttcctcgtcacccgtaatgtgccctgtttaagacgtgccatctcggttgaggaagagtatgatgcagcaggagcagaggtggttctcgatgaggatggcgaaggctggcttgcaacacatggagtgcaagctgaggggttcacggacaagacaatcatctactgcgagcaatgcgagcgagaatcggagtggtgccgccgactatcagaatcagagggaccagaagaagaatggcggccgtggctttgcagtcctgaatgtggtgaggtgtttcagcatctgcagggccttgctgcgtcgtccagggcaagatccatccccactacagtagagggcgtatcactcagcaccctgcggcggtggcgatacatgtccacggtcacacgaatcacgagatggcagcatgaggaggaggacgccgcagatcacgggcagctgtgcgcggctttggacgtgctccacgagtgcttcgacgacatggtggagccccgcacgcagactgacctcgccgccgacatcgtcttcaaccaagagtcgggtctgcgccgcctcaacttccgcgggtactacgtggtgggcctggagaaagtcggcgagctcatcaccgtgggcacgctgcgggtgtttgggaaccaggtggcggagctgcctctggtgggcactcgcttcgcgcaccggcggcaggggatgtgccgcctcctcgtgacggagctagagaagatgctccgtcaggtgggcgtccgcaggctggtgctgcccgccgtgccggagctgctgcccatgtgggccgcctccctgggcttccacgccatgacccgctcggacgtgatggagatggccgtagagcacgccatcctgagcttcaagggaaccaccatgatggagtcacctctaacaactcccagacttaggcttaccgttgttgtgctgtttcttgctcacgagatcaaggatggtgagaaaagagaagaagttgatgaggaatatgctaagaggatgcctgagacaagccaagttcaaaacgagtgtccatatatatag

SEQ ID NO: 34346 - DNA, 1788 bp, Zea mays
  Peptide Sequence Number=SeqID_76125
atggatatatttaagaccttcattgagctgttacgccaaactggtaatgttacgaaaggacaaggcgacatcgatgagtccagccctcgctggttgctgaagcaagaggtcccaaaagttgtcaagtctatcaacaggcagttacgtgaaaaatcaatcaagacaaaggttggggcattttcagtactgaaggagcttgtggttgtattaccagactgtcttgctgatcattttggatcacttgttcctgggattgagaaggctttgaatgacaagtcttctacctccaacctgaagattgaagcacttgtattaacaaggcttgttatggcttcacattcgccatctgtgtttcatccatacatcaaggcactttctgcacctatactgtctgttatcagagatagatattataaagtcactactgaggctttgcggaaaactgtagttgattttgagccatacattggtccaatctataatgcgatactgggacgtttggccaatcaagatcaggatcagtgcactctcatttatcatgcaaatttgtgttctcccaagagagaattaccagcatgccttcccatactcgttgataggatgggtaatgaaattacaagacttacagctgtcaagtggatgaatatgcctaatcttctggaagttatagatttcaaggacacttttcttgatgccaaccatgttcagcaaagttttccagactaccagagcagaaataatatggccgatggggagcctcagaaagagaaactaattgttgagacttacattccagctgatcctgggccgtatcctcaagataaacctaaacagaactcagtgaggttcacaccaactcaggagatgtacgaggatgcaagccaagtggcggttgatgctgtcggtagtatcagaaccgtggcgtcgttctgcgcagagaaaatagtggtcgcagcgtacagggacaagtgtgaggctctaaggaaacagggcatccgaaacggagtcatcggaggacttggttacggcttctcgttcttgatgttgttcttcacgtatggcctttgcttctacgtcggtgcgcagtttgtgcgccaggggaaaactacctttccagatgttttcaaggttttcttcgcattagttctggcagctattggagtctcgcaggcgagtgcactggcttctgatgcgaccaaagcaagggactctgctatttccatcttcagcgttctggacagggagtccaaaattgactccagcagcggcgacgggatgacgctggaggatgtcagtggcaaaatcgatttcagaaacgtcagcttcaagtacccactgtgtcttgacgtccagatattcagcgacttcaccttgcgcattccttctggaaagacagtggcgcttgtcagagagagtggcagcggcaagtcgacgataatcgctttgctggagcgtttgtacgacccagattctggtagaatatcacaggacggcgttgaatgtacacaaatgacaaatttgacatgctcatattgggtccagtgtcccagtgggtcaagctatggtttgactgaaacttgtgctggagcagctttcactgaatgggatgacacaagtgtgggtcgtgttggtccaccacttccttgctgctatgtgaagtggttggcgagaggagaggcagtggttggcggacacagtacaacaaaaggctataggactaactgtatttcctcgcagacccacgcaggacacataagttcgacggccacgtggccccgtcgaacttaa

SEQ ID NO: 34347 - DNA, 447 bp, Zea mays
  Peptide Sequence Number=SeqID_76126
atgaacatgttcagtgtgcttggtgctggtggtggccttggtggtcgaaatgcttctaatgccctcaccgacccaggcacgacccataagttcgacggccacgtggccccgtcgaacttaaggttaagaacgtgggtgccgtcgaacttatgggaaaaaattcgacggcacccgtcgaacttaaaaacccacgttcttaagcttaagttcgacggtacccacgttcttaaccttaagttcgacggtacccacgttcttaaccttaagaacgtggggggccgtcgaacttacttctttaagttcgtccaaaaatcgccgtcggctatgttcgtgggtaaacccacgttcttatggtaccctcaaggaggatatggtttctgggttgacttggccgtccaccttgccaccgggttggacagtcgagtggaaccccgcctcagcaggtga

SEQ ID NO: 34348 - DNA, 345 bp, Zea mays
  Peptide Sequence Number=SeqID_76127
atggacaggcacgccgcctgcaggacggcctggtcgctgcccgtcagcggagtggacagggctcatttaatgctgaggcagcacatcacctaccagcggagtggacagggctcatttaatgctgatgcagcacatcacccgccagtggagtggacaggcggggtccagcacttctcgtgggggtccagacccaatgttgacaccttggagtatatcgtctcctccggccacgtggcggccccggagccgcccacgtgggggggggggtcgggtgctgtttgccgcgtgactaaagatagccgcttggacatcgtgcctttatactgtagtaaggggtacccctga

SEQ ID NO: 34349 - DNA, 1209 bp, Zea mays
  Peptide Sequence Number=SeqID_76128
atggacgatgagctggacgacatgatggcgccgtcgttggatgtgcatgcctgcaggacggcctggtcgctgcccgtcagcggagtggacagggctcatttaatgctaaggtggcacatcacctgccagcagggtggacagggctcatttaatgctgaggcggggtctggcactttcccgtgggggtccggacccattgttgataccttggagtatattgcctcctctggtcacgtggtgaccccggagctgcccacgtggtgggggtcgggcgctttttaccgcacgactaaagatagccgcatggacatcgtgcccccatactgtagtaaggggaaccggcacccatggaggatgactcatgggcccgggcccccgtgcagtgactgggttgttggtttcagcggaggtgaagaggtgcactaccgcaggcggtggcgtgctcctcacgcggcggttcgccttctccgcacacggaggccgacgcccaaggagtatgactcgtgggcccaggcccccgtgtcagagactggtccgctactagtttcggcggaggtgaagaggcgcactaccgcaggcggtggcgtgctcttcacgcggtggttcgccttctccgcacacggaggccgaagcccaaggagtatgactcgtggaccccggggccccgcgccagaggctgggtcaccctggcacgtgtcaggcgagatcttctgcggcatctcagggcgtcagtgggggaatctttctttaaaaagggactccctcgagcgtgtcgccatggccttgctagaccttcccgagtgcttccagtccgaggtggcactcgacttggtgcgcaacctgcttggatggggtgcaccggcgttcgctggaaggatccgtgtcggcgcctctcctcacggcgaccttgccgccagggagttcgtgcttttcgtctccaacctctcctgcaggttggcgctgtcgatcccgtctttcttcgtgctgctgctggaggagctcggcctccaacctcagcacttcacgccctgcttcatccttcaggcggccatcatcgcctacctctgtaggatgtctgtgggggcgacgctccttcccgcttcttcctccagcattcggagggaaggatacgccgcctgggaggtcgtacaagatgtcgcagagatggtggccgcgtgctaccagcatgaccctactgatgtcgagtag

SEQ ID NO: 34350 - DNA, 1992 bp, Zea mays
  Peptide Sequence Number=SeqID_76129
atggcactattatttaacaaaacaaagactgcctcacagcaactggcttatgtagatctaccactgatgagcctgaaggctactctgctccgatccttctttccaggagcagagcctgaaaggacgacggccgtcggcgtaaggggagcgagcgagcgagcggccatgaagtacgtgctggtgaccggaggggtggtgagcgggctcggcaagggcgtgacggccagcagcatcggcgtcgtgctcaaggcctgcggcctccgcgtcaccaccatcaagatcgatccatacctcaacaccgatgctggaaccatgtcgccgttcgagcacggggaggttttcgttttggacgatggcggagaggtggacttggaccttggaaactacgaacgttttctggacatcaaattgacccgcgacaacaatataaccacgggaaagatcttccaggctgtcattaacaaggagaggagaggcgactacctagggaagaccgtccaggtagtgccgcacatcacggatgagatacaggactggatcgaacgcgtcgcggtggtcccagtggacggcaaggaagggcctcctgacgtctgcgtcatcgagctcgggggcactataggggacaaaatcttttcgccgcataacgacagtggcattcttgatgcaggggatatcgagtcaatgcctttcattgaagcgttaggtcaattctcgtaccgtgttggacctggaaacttctgtctcgttcatgtcagtcttgttccggttctaaatgtagtcggtgaacagaaaactaagcctacacagcacagtgttcgagggcttagagggcttgggttagcgccggatgttttagcatgtcgcagtactgagccattggaggaacatgtgaaggccaagctttcacagttttgccatgtcccggaccagaaggcccatgaagcgattctgaaggttttagacctccagtatgatggaaaggtgcctcgggaacctgagctaacaaagtggactaaaagagccaccaagtttgacaagttgaagactccggtcaagattgccatggttggaaaatacactggcctgtcggattcctacctgtctgtcataaaggctcttttgcatgcatcggttgctatggaaagaaaacttgtagtcgagtgggttccttcctgcgacctggaagattcttcagctaaagagacccctgaagcccataaaaaagcatggaaattgctgaagtccgtctcacggaattccattccatcccagggcgcagatggcgtactcgtccctggagggtttggggacaggggagtccagggcaaaatcctcgccgcgaaatacgcacgcgagaacaacgttccttatcttggcatctgcctgggaatgcaaatcgcggtgatcgagtttgcccgctcggtgatgaagctacgaggtgccaatagcacggagttcgatccagctacgacgtcaccctgtgtcatcttcatgccagagggctcaaaaacccaaatgggagccacgatgaggcttgggtcgaggaggacctatttccatgtcagtggctgcaaatctgcgaagctgtacggcaacgccagctctgtagatgaaagacatcgccacagatacgaggtgaaccctgacatggtcccagactttgagaaggccgggcttcagttcgtgggcaaagatgagagtgggaaacgcatggggatcgttgagcttccctctcacaagttcttcatcggtgcacagttccatcctgaattcaagtcgagaccagggaagccatctccgcttttcttagggctgatagccgcggcgtctgggcagctagaaccattgcttcagcgcagcaatccgacaacgaaagcatgttcgatcagtaaagtcccgaaactgaaactgtaccccactgggcctgtgaataatccactgaacagcttggtgaacgggtactacccaaatggcactgggatccacacctag

SEQ ID NO: 34351 - DNA, 1542 bp, Zea mays
  Peptide Sequence Number=SeqID_76130
gctgtcattaacaaggagaggagaggcgactacctagggaagaccgtccaggtagtgccgcacatcacggatgagatacaggactggatcgaacgcgtcgcggtggtcccagtggacggcaaggaagggcctcctgacgtctgcgtcatcgagctcgggggcactataggggacaaaatcttttcgccgcataacgacagtggcattcttgatgcaggggatatcgagtcaatgcctttcattgaagcgttaggtcaattctcgtaccgtgttggacctggaaacttctgtctcgttcatgtcagtcttgttccggttctaaatgtagtcggtgaacagaaaactaagcctacacagcacagtgttcgagggcttagagggcttgggttagcgccggatgttttagcatgtcgcagtactgagccattggaggaacatgtgaaggccaagctttcacagttttgccatgtcccggaccagaaggcccatgaagcgattctgaaggttttagacctccagtatgatggaaaggtgcctcgggaacctgagctaacaaagtggactaaaagagccaccaagtttgacaagttgaagactccggtcaagattgccatggttggaaaatacactggcctgtcggattcctacctgtctgtcataaaggctcttttgcatgcatcggttgctatggaaagaaaacttgtagtcgagtgggttccttcctgcgacctggaagattcttcagctaaagagacccctgaagcccataaaaaagcatggaaattgctgaagtccgtctcacggaattccattccatcccagggcgcagatggcgtactcgtccctggagggtttggggacaggggagtccagggcaaaatcctcgccgcgaaatacgcacgcgagaacaacgttccttatcttggcatctgcctgggaatgcaaatcgcggtgatcgagtttgcccgctcggtgatgaagctacgaggtgccaatagcacggagttcgatccagctacgacgtcaccctgtgtcatcttcatgccagagggctcaaaaacccaaatgggagccacgatgaggcttgggtcgaggaggacctatttccatgtcagtggctgcaaatctgcgaagctgtacggcaacgccagctctgtagatgaaagacatcgccacagatacgaggtgaaccctgacatggtcccagactttgagaaggccgggcttcagttcgtgggcaaagatgagagtgggaaacgcatggggatcgttgagcttccctctcacaagttcttcatcggtgcacagttccatcctgaattcaagtcgagaccagggaagccatctccgcttttcttagggctgatagccgcggcgtctgggcagctagaaccattgcttcagcgcagcaatccgacaacgaaagcatgttcgatcagtaaagtcccgaaactgaaactgtaccccactgggcctgtgaataatccactgaacagcttggtgaacgggtactacccaaatggcactgggatccacacctag

SEQ ID NO: 34352 - DNA, 921 bp, Zea mays
  Peptide Sequence Number=SeqID_76131
atggaccgaaggtccatgacacctggtatcagctccaggttttcctcaccaccaccagccgcccatccctcaccaccaccagccgccgcgccatcagccgccgcaacgccctcccacccgccctctccaactccagatgcattcactcggctcgaagagagttttggccgtctcgaagagaagtgggatcaattcgttgtgatgttccaccgctacaaggagaagacagagaaggaactccaagcagcggtgcggcttcaggcggcagcgcgagggttcctggcgcgccgccaggtacagtcccttcgtggggagaagcaccttgctgtggcctccagggccaccccatggccgtcatcacatgagcagaccgtggtgcgcctgcaagccgcagtgcgcggcttccttgttaggcgggcggtgcggaagctgcacttgctgatcagctcatcgctgcaccaactcgcagcctgcgcgcccaaccaccaggtctcgtctatactttttgaaccccctgcagaagtcgagatctgggtatgcagtccccctgcacggccaaagagggtcgtctccttcattcgggcaactgccttggtgctggacaggcccaacataagaacgggctggttcctccttcgcctgtcatccaacgtgaagtccgcagttcaactcttcccttgggatccaggaggacaggaggacatagctgcagttcaaatttatattttagtttcaaaattattttgtattttcgtcttaaataataaaggtaagccgagatgtaaaaggcttaaccttaagtcgtgtcaggtaagtctatggcagctcgaggacgagctggtcctcaagggagggggagatgtcatgggcatcatagggagcgagaggcaacagccaggctgggataaggctagagaataa

SEQ ID NO: 34353 - DNA, 432 bp, Zea mays
  Peptide Sequence Number=SeqID_76132
atgaaggagacgaccctctttggccgtgcaggggggctgcatacccagatttcgacttctgcagggggttcaaaaagtatagacgagacctggtggttgggcgcgcaggctgcgagttggtgcagcgatgagctgatcagcaagtgcagcttccgcaccgcccgcctaacaaggaagccgcgcactacggcttgcaggcgcaccacggcctgctcatgtgatgacggccatggggtggccctggaggccacagcaagccgagtgaatgcatctggagttggagagggtgggtgggagggcgttgcggcggctgatggcgcggtggccggtggtggtgagggatgggcggctggtggtggtgaggataacctggagctgataccaggtgtcatggaccttcggtccatggggatagctgtcttctccggctag

SEQ ID NO: 34354 - DNA, 438 bp, Zea mays
  Peptide Sequence Number=SeqID_76133
atgaacgtatgtgagctcactcttgctgtctcacatacaccacaggtcaagaccagaactcctgttatatataaagatgtgacattcgatcctgtgccactttacatcatatgtgtgagacttggtcccagcatacctgtcactcctgtttatgatattaatgttctaaatgagtgtaaaactgatatatcagccgtgctcacggttatgagcagcctggactcctcacatgataatctctactacttacttattaagacggaggcgctcatgttggcatcgctcatcgacgacgagaagaagtttggcgactgccagttcgacctctggaagcagtactacgtggtcgcatgcgtcactgtgttcggcaagctccgtcgcagccgccgcttggacgcggtccagagtggctgcactgcgttgtccatcttcaaatag

SEQ ID NO: 34355 - DNA, 399 bp, Zea mays
  Peptide Sequence Number=SeqID_76134
atgcgtcactgtgttcggcaagctccgccgcagccgccgcttggacgcggtctagagcggctgcaccgcactgtccatctcaaacagggggacctcatggtcgtcatcaatgccggtgactcttgggttgttatgggcaccacatccgacaacggcgccgtcacaccgtccagctcatcatcacttgaagctcaacctgccacgtttaataccagctaccttgttctacaagctatgaccatgtgggggaatggcaggcgaatgaaatttgttggggatgcaaagattcttcgaaggaactttgtgattgatctgttaagttatgaggacaattcgtgccaatatgccatccctgcaaacatacaacagagacttatcgatatcgctaaaaaggattag

SEQ ID NO: 34356 - DNA, 1125 bp, Zea mays
  Peptide Sequence Number=SeqID_76135
atgtgggagcagcaggggtgtggctgcaaggagagcgacgtcgagaccatgccgtggatccacagcgctacaaggcacagcggggcagcatggattgagcagcgcaccggaataaaagtcgacgatgttgtcctcgacacagtgctccacaccgatagtttgacaacaccgaaaagaggcgagcagggctgcgcacaacacaagcaagacaacacgcagtcggctacgcatatcgtcgagcaggtagtgtgtgtggtggagcagcggcatgggaagggacagcgtcgtccagggaaacagggagggcactggttgggagagggactcggcctacagccaccatggctgggcgctgcggcgttgatccgatccctgctgctggatgtttgggacaaagagaaggcagggaagtgccatgagcacatgggctcgccggcgagcaggagcccggcgaggccacgacggcgccctgcaggggatccccggcgagcaacgccatggcaaggtggagatcagcatagggagcagaggctcatccaaagcacagagaaaggaagggctcggcagggggaaacagccatggatggaaaagctcctgcgccgctcctgctgcgtccaagccatagaaaaggggctaggcgtcgagcgcagtggaggagaaagggcgtcgttccctgcacggaggtggagctgagctcgcctgctgcaaggacgccaagtgcagggagcagagggtcagccatgggagagaggggagctcgcaggggaaatcgccatggctgctggccttacttcctgcgcgtggctgctgcgcgtggaacaaggagcagggggcggctggagatacgccggcgccatggacgccagggaggagcttcagcgccgaggaagaaggagcaggggcgccagcttgctgctcgccatggaggggagcacggctccctgctgctgctgccgtgggatgcctgctgcgcgatggagaagaagacagggaggctgcggtggcggctggaaaaaaatgaggggtgggaatgcaaaatagcccaagggcaaggggagagagctcctatttatagacatgggctagggttagggtttcaaatgggcctaattgggccgggctag

SEQ ID NO: 34357 - DNA, 1503 bp, Zea mays
  Peptide Sequence Number=SeqID_76136
atggcgtgctgctggcaggggcgagagaagctcgtcgcgctctggactgcagagggaatggcctgctggcttgaggaagaaataggggaggaggaagaggggagccggctggagttttctgggcgccatccatgggtgagttgctgcgctgctcgccagcaaggagcagggaagggctggagcttggggcgccggccatggaagctctgcgcacgcacaggaaaacagaggggaggagagggacgagctggagatacgccggcgcccatggacgccagggaggagcttcagcgccgaggaagaaggagcaggggcgccagcttgctgctcgccatggaggggagcacggctccctgcgcgctgtgccaggaacagagacggaagaaggggcgctggtggtctgctgctggaggaagaagaagaggggcagggggcaccgcaccatggctggccgaggggaggagcaggcctgggcgccatgggaggaagggagccgagcttcctgctgcgcgtgagggagaagctactgccgtggggaagaagggctgctggaaaatggctgcggcaggcgccggaggctccaaatcgacgaaggctgtgccgccgtccggcagggtgttggaggtcgcgaaggcggtccgagagttgccgtcgtcgggcaagcgcgtcgccgacttcgccaccgatattagtgtggaggactatcttggtgggtcggacgagggccagcttgctattgttgcgcctgccgcggcgaccatggcggctgctgtagtgccgaaggcgaagggcggtgctcttagtgccggaggcgagatgtcggcactagcgaccgtcagggatgaggcgggcgctgcgtcccgccggctgaaggaggtggctgacttcgccaaccgcacggcgtcgggggccctcacggcagttgtgtctgccgaagtcgagagacttcggacgcaacatgcggacgccgtccgtgaaaaatcggccgccgacagtaagtgccgcaagctggcggacaaggtggccgcgctagaggtggagaaggctgacctccggcgccaattggcgggggagaggagggagaccaacgaggccctcgccaaggcgcaggctgcgcaggtggaggccaatctggcgcggacggagggcaatcttgccagggagcgcgccgagcagctgcaggagcggctcatcgccctggagagccgcgtggagagggccgaggccgcgacgtgcgcggaggccgagcggacgcgcaaacagcttttggtctcgtaccataagctgggcgcgcggaccggtgacttcgaagtgccggaccgagagtccggacttcgctgcctggagtgggtacaggaggagttgcaggcgctccccactatcgtggaggggttcatgtcgtatgcctctctggtcacctacgagggggcgatgaacgcgctctcccgcgaagggtgccggcacttcgaggtcttcgaccaggctgatgaagactttgagtga

SEQ ID NO: 34358 - DNA, 666 bp, Zea mays
  Peptide Sequence Number=SeqID_76137
atgggcaacaagccaagtggcagcatcgggtctccgcctgagcggggagcgcaagcgcacaggataaagcctggacacatgtcagtaccggacccttgcttaggccaggttatcccctgtcccgggacctcgttatgggtggcccggacctcgctcagaggggttcggaccttacccaaggggtccggctcgcttgcatgggagccctggaccatactcggagacccgggtcgtgagtacaggggtccagcgctttctcgaggagtaaggggtacccctaattcagggtaccaacagcatcgaaactcgaagccaaacgtgacaaaaccctgcccttgccccgggaaaacgcctgttggacatatcacacttgagtggggaagatctactcagtcagtggacaaaatccgtcgacccccacaccttatctctagcttagagtataagcaacagatcgtatacaaagatttagctcagatagggcttgaacaagcgacaaaatggcaaagaaaggggctcggcgaacacttgccaggtgttcgacgtcggttgacagaagccgagcgggctctgtccgcctgtccgtgcgccaaccagcgcgcctgccccctcctatgccacgacaggggaaaccgcagcatcgtgagcgcccgcgcctataagtag

SEQ ID NO: 34359 - DNA, 585 bp, Zea mays
  Peptide Sequence Number=SeqID_76138
actcagcctcgacctcggaagacggactccacctcgcccgaccccagggctcggactaaacctcgacctcggaagacggtctccacctcgcccgaccccagggctcggactcagcctcgacctcggaagacgaactccgcctcgcccgaccccaaggctcggactcagcctcgacctcagaagacggactccgcctcgcccgaccccagggctcggactctacctcgacctcggacgacggtctccgcctcgcccgaccctggggctcggactcagcctcgacctcggaggagtcaccgcctcgcccgacctcgggctcggaccgaccacatcacaggggaggccatcattaccctacccctagctagctcaggctacggggaacaagaccggcgtcccatctggctcgccccgggaccccccggggtcgaaacgccgacacctggcgtcgcctgccagcggagtggacaggacgcattaaatgctgagggggcacatcgcctgtcagcaggggggcaggcggctacaagccatgcggcagcaacgggtctccgcctgagcggggagcgcaagcgcacaggataa

SEQ ID NO: 34360 - DNA, 351 bp, Zea mays
  Peptide Sequence Number=SeqID_76139
atggtgagagaacgaagaacacaaacaaacacaatgagcaagaacacaagagacacaagatttatcccgaggttcggtcacaccaccaaggtgccctacttcctcgttgaggcgcccacaaagagccgggtctctttcaaccctaatcctccctttgccgaccacagagacaaaaaccggttgagtgtccggctgaaccagtattttcaaaaaggtgaacagtgcaaaaaccggttgaacctgtttttccaaaaaacaattttggccaagatagacttaaaaaggttgtactacatactttcactaaggattaacaagggtaaaatggaagttttagatcaaggattttga

SEQ ID NO: 34361 - DNA, 219 bp, Zea mays
  Peptide Sequence Number=SeqID_76140
atggtgagagaacgaagaacacaaacaaacacaatgagcaagaacacaagagacacaagatttatcccgaggttcggtcacaccaccaaggtgccctacttcctcgatgaggcgcccacaaagagccgggtctctttcaaccctaatcctccctttgccgaccacaaagacaaaaaccggttgagtgtccggctgaaccagtattttccaaaaaggtga

SEQ ID NO: 34362 - DNA, 591 bp, Zea mays
  Peptide Sequence Number=SeqID_76141
atggtccacatcgtcgagcaccatgacttcgttcccgaggacttcccgatggaggaagaagctgcgtcttccacgccacgggccgtcaaccgccctgcgcctagtgctgctgctgtgcactctacgcggcagcacaccgctacgcagacatccagagcgtcaagggctgcgcctggggcgctgtctgcagctagggaattgctgtgccaccctcctagcttcacggcctcgccgagggccatgaagcagtggcgtgacgatgtcgaccgtctgctcggcatagcgcattctagctcagccaggtccaggcctcggtcgtcccgacatcaacatgaggcgtcggcatcagtgcgctcaccctcagtgagggccgccctgactgaggacctgcgggcggagcacaaccgccagcgagcgggcgaggacgctccagtctctctagagagatctagtgacctgcgggcagaactcaaccacagacgcgcgggcgaggatgcccgcgtctctctagagagggcgcgtgagcgccgactaaacttcgagggtcgcaacctcaactacgacttcgctgcgatattattttttatctaa

SEQ ID NO: 34363 - DNA, 816 bp, Zea mays
  Peptide Sequence Number=SeqID_76142
atgacggcggcggctctcagctctcttacggaagcagatggacgtcagcaaggactcgaccgctccgacagctgtccttccgccaagctccgttgctcctccgacagccacgacatcacgccagcagggtgccaagatctctccggctgccacattggcatggccttcttagagaaggttggccgcgcgggaccgaggacgggacaggcgctctcttggggccgctcgcttccctcacccgcgtggacgcttgtaacccccctactgcaagcgcacccgacctgggcgcgggacgaacacgaaggccgcgagacttccacctctctcacgcccgtctccggccacctcgcctctccccccttcgcgctcgcccacgcgctcgacccatctgggctggggcacgcagcacactcactcgtcggcttagggaccccccggtctcgaaacgtcgacagtgtcggacccctggtcccgcgattctggggcaaagaatacccaggccttaatcaaggccagacgggggtccggagccgacacgtgtccggaccttaccgtatacgcttctgctccccgctcaggcggagacccgatgctgccacgtggcctactgcgcgtgacggcgagtgcgttccgccacccggccagagaatctcctctccgacatttggtgcgccaagtagggggcttggcattaggtttttgcttgttttcctgctcgacaccatggtccacatcgtcgagcaccatgacttcgttcctgaggacttcccgattgtcggtgtttcgaccccggggggtccctggaccgacgagtaa

SEQ ID NO: 34364 - DNA, 252 bp, Zea mays
  Peptide Sequence Number=SeqID_76143
atgtcgcgcgtgttcgacgactactatatcaaggattgtggcgtcatctcggcgccggagcccagatgggtcggcgcgaggccgagcgcgaaggggggagaaaggtggccggagtcgggcgtgagagaggtggaaatcccgcggccttcgtgttcgtcccgcgcccaggtcgggcgtaaggagaggatccaggtgtacaatgggggtgtagcagagtgctacgtgtctagcggaggagagctagcgccctaa

SEQ ID NO: 34365 - DNA, 306 bp, Zea mays
  Peptide Sequence Number=SeqID_76144
atgggcgtgagagaggtggaaatcccgcggccttcgtgttcatcccgcgcccaggtcgggcgtaaggagaggatccaggtgtacaatgggggggtgatgatggtgcctcctgttgacgtggctggtctgcgccctaggttgggcgatgtggaagctcctccgaagccgaggtcgagtctgtcttccgtggccgaggtcgagtccgagcccctagttcgggcgaggcggagaccgtcggctgaggccagggcggagtccgagccctggggtcaggcggagcggagttcgtcgtcttctgggggctga

SEQ ID NO: 34366 - DNA, 936 bp, Zea mays
  Peptide Sequence Number=SeqID_76145
atggcgcccgctttgcctgccggaggtgtcgcttgtcctgccaaggagttaatgcggcgggacggggctgccttgagtcgctgtgctggtttcgcagtcgagaagacgcagcattggcgcaagcggtggtgtagtttccttgcacgcagtgaccggcgcgccggttatatgacatgtgggaccgggcctccgtgctggaccactggatgcgacgaagctgaaagggtgcacaaccgtggcgcggttgcatgctccctgtgcggcggaacgcgaccccgtgggggttggcgctctccggtcaccgctcggcttcaaggattttcatcatgcagcccggctgcattcccccatcggcggtcacccaggatgatgaccgcaggcctcgtggcggggaagagcgagccgggccgtggcctcccccctaccctcagcttcaaggatgttcatcatccgtgctggggaggagggtgcaccgagacggggtctgcctccacgtgggtagcggcctgcttcttcctccagcatttgggggagcagggcatcctccagctctgcgaaggagacatcctccagccatccgggggaaggcgaactgctgctgcctggtcagggtgtagctgtccgtcctctacccgggtgatggtcgtgcgcgtgcgcaggtggctgctgtcaccggtgctgaagtggtggccgctgctggtgaggcttcccaccgcagcggttgcctccgccgacgagaccgttagtgccacctgcgctccggacctccggctcttgcccgtgaagggacgtgaacgagggccttttcacagtagcgttttccctgaggccatcgctactgctgtctatccgcccgagacggaggttgttgtcgcgctgctggtgcagtggtcgctggcgagccgcttggagctcgttatcccgcaggtcttctag

SEQ ID NO: 34367 - DNA, 393 bp, Zea mays
  Peptide Sequence Number=SeqID_76146
atggatcctggcacacatatggtgggcggaagcagcggtcacgtcgtcagccaagcttatgtcccatccacggacagcaagggaaccctctccccacggcgtgaagacggcgtgcccggggaccgggaaagggggataccccgaaaagggatccttctccgcgaaggaaacaagccccgagcctccctactgatcagaggttcaaaggctggcccctcggaggggttcaacagccgcctcagagcgcttgggctccacgcccactactggttagaggttcgaaggccggcccctcggaagggttcaacggccgcctcaggcaactcgggcttcgcgcccactactgatcaggggttcgtaggctggccctcgaagggttcacagccgccttag

SEQ ID NO: 34368 - DNA, 501 bp, Zea mays
  Peptide Sequence Number=SeqID_76147
atggcggtgacaggcgggcaggagcagcggtcacgtcgtcagccaagcttatgtcccatccaggggcagcgagggagccctctcccacggcgtgaagacggtgcgcctgtgatccgttcctcgaacggctcgcgcacgcgcaacgaccgcctcgcgaactactcgccccgtcgcattaactccgcggcaggacaggcggcgcctcaggcgggagaagcaagcaaccgcttcgcctttgccataatgaccgcgtcgaaaaagggaccgggaaagggggatacccccaaaaggacccttctccgtgaaggaaacaggctccgagcctccctactgatcagaggttcgaaggccggcccctcggaggggttcaacggccgcctcagatcgattgggttccacacccactactggtcagaggttcgatggccggcccctcgaagggttcaacggccgcctcaggccactcaggctccgcgcccactactgatcaggggttcgtag

SEQ ID NO: 34369 - DNA, 228 bp, Zea mays
  Peptide Sequence Number=SeqID_76148
atgagactgaggtccgtcctctggtttcggatcctcgtctgtttgatcttcagcgtgctactgcagcacgggtacgtcggttcagccggtgctgagtctgaggcgcatctcacctatctgcctggcctcctgtcccttctgactatcagcggcagatatgttgaggagtgggtccgcgtcttctacgcctctgtttggattgacccggatcatcattggatgagctga

SEQ ID NO: 34370 - DNA, 300 bp, Zea mays
  Peptide Sequence Number=SeqID_76149
atgagactgaggtccgtcctctggtttcggatcctcgtctgtttgatcttcagcgtgctactgcagcacgggtacgtcggttcagccggtgctgagtctgaggcgcatctcacctatctgcctggcctcctgtcccttctgactatcagcggcagatatgttgaggagtgggtccgcgtcttctacgcctctgtttggattgacccggatcatcattggatgaggccgaggatgcagctctacgacagtttgacactcagggtacagcagctgatgatgatgatgatgatgatgatttga

SEQ ID NO: 34371 - DNA, 654 bp, Zea mays
  Peptide Sequence Number=SeqID_76150
atggcggaactgggtgcattggtgagaacgaggagactgcgatgcccgatttatactccagtagcgaagtccgagcgaggcacgaggagcgacatccccgacgaggatgttcatcagcctcgcggtggtggagagcgagctgagctgtggctccgcctcccacatgggctggtgacccgcctgttcctccagcatttagaggaaaaggatgatcaccagccttgtgaaggaggcaaacttcgggagggcaggggcgagggcctcttcgccatggcgcgcacgctgaggtggttgccaccgctggggaggctgcccggcgtagaggtggctgccgccgctggcaagccgttcggtgcagaggtggtcgccaccgctggcgagccgctcggagctagctacccacgcgaccctactagtgtggagaccagcatacctaagaaagagttggcaatggcccccaggaggcccacggtacgggaccaggctgagcggctacacggctccggaccaccccaggagacaagtgtccattctctagttccggaccccaggctaagcggccacaggctccagaccaccccatggaacgggctcccgttctttagaaccgcccccaggctgtcgggccctcctgctttcgcaaagaggtcctaa

SEQ ID NO: 34372 - DNA, 777 bp, Zea mays
  Peptide Sequence Number=SeqID_76151
atgcccgaggttggaccgctggttatggcgaagacgaggggcgcactaccgcggggcagtagcacgctccctgtgcggcggttcgccttcatgaccattggtcacggcaaagatgaagggggcgcactaccgcggggcggtagcatgctccttatgtggcggttctccttcttcgcactcgaagaccagcgcgccagctgtatgacttgtgggaccaggtcctcgtgtcataggatggataccccggtgtgcatcgggggagacttctcgcgacgtttcgaggcgggagcgggggagtctgcctttaaagaggggttcatccctcgagtagcagccatgccttgcttctctcccactcgcggtgccctttcgccttcgagctctctacgcccctttgccttcaaggtttctgctttgtgtcaccatagtttaccatggccttataagttcatcccgagcgtgcccatactgagtgagtgctcgacatggtataccgcctacttggatgggatgcgctggcgttcggcggaaggatttgcgccggcgccatcctccccgacgaacttgccgccagagagttcgtgccttttgtcctccccagcgggttggtgctgccggtcttgtctttcctttgctggaggtgtgtggccttgtgggagcggcgctcttccaccgatgctcggcttcaaggatgttcatcagcctcgcggtggtggagagcgagctgagccgcggctccgcctcccacatgggctcgtgacccgcctcttcctctag

SEQ ID NO: 34373 - DNA, 177 bp, Zea mays
  Peptide Sequence Number=SeqID_76152
atggccaagagggggagcggcagtggtggtagctcacgtttacatgggaacatattcttggctaagaagtttgtagatgaagatatgatgctgaactccatggatgctagtctagtgatacccccaatcatcttcctgtggaaggatgtccatgtttcgctgtactttgatgaataa

SEQ ID NO: 34374 - DNA, 255 bp, Zea mays
  Peptide Sequence Number=SeqID_76153
atgggaagtcttatgttgggtgctggtcgtggtcgacaggaacgggggcatctggcaagctcttatagttccggctcaggcagattggatacgggcatagttcccaaagctttaccctgtagtctggactataagttggttacgaagcttgcagatgaagatatgatgctgaactccatggatgctagtctagtgatacccccggtcatcttcctgtggatggatgtccttgtttcgctgtactttgatgaataa

SEQ ID NO: 34375 - DNA, 255 bp, Zea mays
  Peptide Sequence Number=SeqID_76154
atgggaagtcttatgttgggtgctggtcgtggtcgacaggaacgggggcatctggcatgctcttatagttccggctcaggcagattggatacgggcatagttcccaaagctttaccctgtagtctggactataagttggttacgaagttgcagatgaagattatgatgctgaactccatggatgctagtctagtgatacccccggtcatcttcctgtggatggatgtccttgtttcgttgtactttgatgaataa

SEQ ID NO: 34376 - DNA, 366 bp, Zea mays
  Peptide Sequence Number=SeqID_76155
atgccgctaccgaaattccttgctgttgtgctgtcgcaactgcttctctgcttgccaccgtctgacactgccgtctgtcaccgcgctcgccgtatagatatttttctattcacgggaagtcttatgttgggtgctggtcgtggtcgacaggaacgggggcatctggcaagctcttatagttccggctcaggcagattggatacgggcatagttcccaaagctttaccctgtagtctggactataagttggttacgaagttgcagatgaagattatgatgctgaactccatggatgctagtctagtgatacccccggtcatcttcctgtggatggatgtccttgtttcgctgtactttgatggataa

SEQ ID NO: 34377 - DNA, 219 bp, Zea mays
  Peptide Sequence Number=SeqID_76156
atggaacgggggcatctggcaagctcttatagttccggctcagacagattggatacgggcatagttcccaaagctttaccctgtagtctggactataagttggttacgaagcttgcagatgaagatatgatgctgaactccgtggatgctagtctagtgatacccccggtcatcttcctgtggatggatgtccttgtttcgttgtactttgatgaataa

SEQ ID NO: 34378 - DNA, 255 bp, Zea mays
  Peptide Sequence Number=SeqID_76157
atgggaagtcttatgttgggtgctggtcgtggtcgacaggaacgggggcatctggcaagctcttatagttccggctccggcagattggatacgggcatagttcccaaagctttaccctgtagtctggactataagttggttacgaagtttgcagatgaagatatgatgatgaactccatggatgctagtctagtgatacccccggtcatcttcctgtggatggatgtccttgtttcgctgtactttgatgaataa

SEQ ID NO: 34379 - DNA, 255 bp, Zea mays
  Peptide Sequence Number=SeqID_76158
atgggaagtcttatgttgggtgctggtcgtggtcgacaggaacgggggcatctggcaagctcttatagttccggctcaggcagattggatacgggcatagttcccaaagctttaccctgtagtctggactataagttggtcacgaagtttgcagatgaagatatgatgctgaactccatggatgctagtctagtgatacccccggtcatcttcctgtggatggatgtccttgtttcgctgtactttgatgaataa

SEQ ID NO: 34380 - DNA, 201 bp, Zea mays
  Peptide Sequence Number=SeqID_76159
atggggacgtattcttggctaagcctggaccctcacatgataattgaacttgaagatgaaaataaatcatggtcctttatggttcaagtgaagtttgcagatgaagatatgatgctgaactccatggatgctagtctagtgatacccccggtcatcttcctgtggaaggatgtccatgtttcactttactttgatgaataa

SEQ ID NO: 34381 - DNA, 126 bp, Zea mays
  Peptide Sequence Number=SeqID_76160
atggctctggctttgaagtttgcagatgaagatatgatgctgaactccatggatgctagtctagtgatacccccggtcaccttcctatggatggatgtccttgtttcgctgtactttgatgaataa

SEQ ID NO: 34382 - DNA, 213 bp, Zea mays
  Peptide Sequence Number=SeqID_76161
atggcggaagctagggatgccgtggtccgcgtcccctcgcttgcccttgccgtcggcgagcctcttgccgaccattttgctctcactttggaggtgtctagagaagttgcagatgaagatatgatgctgaactccatggatgctagtctagtgatacccccggtcatcttcctgtggatggatgtccttgtttcgctgtactttgatgaataa

SEQ ID NO: 34383 - DNA, 192 bp, Zea mays
  Peptide Sequence Number=SeqID_76162
atgtttgaccatttccagcatttacgtaatgaggactctagggagaagcctcgtagtgagaccctggccattcacctcggaaaagttgcagatgaagatatgatgctgaattccagggatgctagtctagtgatacccccggtcatcttcctgtggatggatgtccttgtttcgctgtactttgatgaataa

SEQ ID NO: 34384 - DNA, 447 bp, Zea mays
  Peptide Sequence Number=SeqID_76163
atgacctttttaaaagatatcatatttaacaagtcactcccgcttatgatattgatgttccaaatgggaagtcttatgttgggtgctggtcgtggtcgacaggaacgggggcatctggcaagctcttatagttccggctcaggcagattggatacgggcatagttcccaaagctttaccctgtagtctggactataagttggtcacgaagtttgcagatgaagatatgatgctgaactccatggatgctagtctagtgatacccccagtcatcttcctgtggatggatgtccatgttcgctgtactttgatgaataaaggtggcaatgagattgttggttttggtattgactctggtaatggttgtccgcattgcaaccactgctcaggagaagatgaagccgtggaaggagacttccaggagttccaagaatacgacgagttctag

SEQ ID NO: 34385 - DNA, 378 bp, Zea mays
  Peptide Sequence Number=SeqID_76164
atgaaggccaagtcacaccatcaaccaatcatcctaaggaatacctgcaaaaattatgccacaagcaaggctgagtatactaatactcagctagacttacccggttacaatggatcaagcagtctcattagctgcgagaagcagacgattcgaatcgagtttttatccttgcaagtgaccgcacttgtacccaccataaccggaatgggagaccacgtctcaggtcgcgtgaggggatatgtctgcgggcaggttcactcaggtatccgcacgttaatccttattccaatttcatctcgtagaccacgcatccccatggatccgtgtccacagaccaatcatccatatgatatgaaagtgggtacaaccaattcctga

SEQ ID NO: 34386 - DNA, 405 bp, Zea mays
  Peptide Sequence Number=SeqID_76165
atggaggccaagtcacaccagcaaccaatcatcctaaggagtacctgcaaaaattgtgccacaagcaaggctgagtatactaatactcagctagacttacccggttacaatggatcaagcagtctcattagctgcgagaagcagacgattcgaatcgagtttttatccttgcaagtgaccgcacttgtacccaccataaccggaatgggagacctcgtctcaggtcgcgtgaggggatatgtctgcgggcaggttcactcagactgtaatcttgctgacggagagtacatcctcgtgccggagcaaggagctgctcaggaggtagccccagatccagcaccagagcctgcaccagaggacctgcctgccactgctttggaaggcaagccccggttttatgcataa

SEQ ID NO: 34387 - DNA, 309 bp, Zea mays
  Peptide Sequence Number=SeqID_76166
atggaggccaagtcacaccagcaaccaatcatcctaaggagtacctgcaaaaatggtgccacaagcaaggctgactatactaatactcagctagacttacccggggcactccgtccccacacacatcaaccgtccccatcgattccccgtcagcagatcagggctcaccgccttggcgtacaatgcctcactgaccccgactggccgtcgtgcagtgaccgcacatgtacccaccataaccggaatgggagacctcgtctcaggtcgcgtgaggggatatgtccactgccaggttcactcaggtactag

SEQ ID NO: 34388 - DNA, 174 bp, Zea mays
  Peptide Sequence Number=SeqID_76167
atggaggccaagtcacaccagcaaccaatcatcctaaagagtacctgcaaaaattgtgccacaagcaaggctgagtatactaatactcagctagacttacccggtcgtccaccaactgcatcttgtgggtggcaccacatcactgctcgatcatcatctctcggtcctatatga

SEQ ID NO: 34389 - DNA, 213 bp, Zea mays
  Peptide Sequence Number=SeqID_76168
atggaggccaagtcacaccagcaaccaatcatcataaggagtacctgcaaaaattgtgccacaagcaaggctgagtatactaatactcagctagacttacccggcctcaccgccttggcatacaatgctccactgaccccggccgccgccgtgcagtggccgcacttgtacccaccatatctagaatgggagacccagtctcatgttgcatga

SEQ ID NO: 34390 - DNA, 216 bp, Zea mays
  Peptide Sequence Number=SeqID_76169
atggcgcccaagaggaaaatctcgagttcgtctgccgcggtgattcctccaatcgaccccaacagccagttgcctttcgcagggatgaaggccaagtcacaccatcaaccaatcatcctaaggagtacctgcaaaaattatgccacaagcaaggctgagtatactaatactcagctagacttacccggtgtgaggagtctactcctctacctctag

SEQ ID NO: 34391 - DNA, 213 bp, Zea mays
  Peptide Sequence Number=SeqID_76170
atgaaggccaagtcacaccatcaaccaatcatcctaaggagtacctgcaaaaattatgccacaagcaaggctgagtatactaatactcagctagacttacccggcctcaccgccttggcatacaatgctccactgaccccgaccgccgtcgtgcagtggccgcacttgtacccaccatatctagaatgcgagacccagtctcaggtcgcgtga

SEQ ID NO: 34392 - DNA, 450 bp, Zea mays
  Peptide Sequence Number=SeqID_76171
atggggctcggtgtatgcgccttgctctaccaaggtggtgatgaggatgatggatttggttatgactatggtaatggtaagtggtattctttccgtttggaaaggatggttcgtcttagacacactgcacggaagtccatcattcctttcttgccttctcgtctcgcggagtgtccgcttcgccgtctggtgactgtaggagatagagtctatgaggagctgctctcctgtgctcccgctggaggcgcccctgcaccaccactggacgccccagccgctggagtagctgctggaggagacccagacgatggaggtggcgacagcagctcgagccacagcaccgacctttcagaggagcaggagctggaaggatgggttgctcgacccatcactcgcgacgccactcgcgggtgtcactttcacgacgcgctcgacaccctgctgcgctag

SEQ ID NO: 34393 - DNA, 1419 bp, Zea mays
  Peptide Sequence Number=SeqID_76172
atggcgaactgtcacgcaaggagcgaaccgcctcgcctcttcatctctgccgaaagcagcggcccagcctctgacacgggggcccgagtccacgagtcattctcctggggaatcggtctccggagaagtcgaactgccgctcgcgccagtgccacgcctcctcggggccaccgcagaggacagagaaggcatggcagttggcgtgaccaagggcgggctggcagtgattacgtcagcaagcgcacgaaagcagcgcgccaatcaagctttggccccacctacaggctcgtatcatcccctgagcacccgaccccaccacgtggacggctccggggctgccacgtggccgaaaaagatgatacactccaaggtatcaacgatgggtctggacccccatgggaaagtgtcggatccctgcatatacgaaccggacctccaggcagggtccaggacctccatgggttcagacgggacccccgagacgggtctccgacctccctgtatggggtccgagccactctcagcagggtcccgggattctgggacaaagaatacctaggccttaatcaaggccacacgggggtccggagccaacacgtgtccggaccataccatgtacgcttctgctccccacccaggcggagacccgatgaagccacgtggcctactgcctgtgacgtgagccaacgggcggaacctgacacgatgtgctgcctcagcattaaatgtgccatgtccactccgctgacggacggtgaccaaaccatcttgcaggcgacgtgcctgtccattctgttgaggaaatggggtgtagttcgcttcaccgtcgtgccgttaatggggctcggtgtatgcggctcgctctaccaaggtggtgatgaggatgatggttttggttatgactatggtaatggtaagtggtattctttccgtttggaaaggttcctctccgagcggtcccaactcgagcgggactgtaaggagtacaagagggacctccagaaggtgtgcgccagggagctggaggcgtcccggagggagaagaaggtgaccaggagggaggaggccgtgtctcagcgggaggtcctcgcaacagagttctgggccaagctgagtgccctggaccagaccctagaagcccagcgggtccatcagacccaggctgtggagaggctgcaaaagtggcagcaggagctcgagggcaaggccagtgacgccgccctcaccgaggagaacctcaaggcgaaggagcagtccttggacaggcgggagacggacctctccaggcgagagacggatctcgtcttcagggaagaaatgctcactcggcggggcaagctgttggtcgagcacgagcttgaggcggaggagaaagagaagaagctagaggagcggatctggcagttccaggcagcatag

SEQ ID NO: 34394 - DNA, 501 bp, Zea mays
  Peptide Sequence Number=SeqID_76173
atgaccggacatggtaaggcgagtcactgcgacaaagtactgcgtttaggcacgtggcacctgagcggcaagcggccaactccggcgaggtgccaaaggttcatatacaactatactaaatcgactgtccggaataccgtagattattctggacaggagaagctttttggaaaaacaggccaagcgcggaccgtccgggctcttgcggcggaccgtccgcgacatcggaatacccctcggacagaaccaatgcaaaaacacaagtttccactacagactgtccggaggaaaagcaaagaccgtccgagccctcgcgcggaccgtccggcctcaggcgcggatcgtccggtcggtaagaaaccgaaaaacccgaagccgttgatcaacaagggcggaccgtccggacctgactcgcggaccgtccgcgctcatcaaaaaggtgcaacggctaggaagtggttgggggctaaaaataccaccccgaccacctccattcagtag

SEQ ID NO: 34395 - DNA, 543 bp, Zea mays
  Peptide Sequence Number=SeqID_76174
atgaccggacatggtaaggcgagtcactgcgacaaagtactgcgtttaggcacgtggcacctgagcggcaagcggccaactccggcgaggtgccaaaggttcatatacaactatactaaatcgactgtccggaataccgtagattattctggacaggagaagctttttggaaaaacaggccaagcgcggaccgtccgggctcttgcggcggaccgtccgcgacatcggaatacccctcggacagaaccaatgcaaaaacacaagtttccactacagactgtccggaggaaaagcaaagaccgtccgagccctcgcgcggaccgtccggcctcaggcgcggatcgtccggtcggtaagaaaccgaaaaacccgaagccgttgatcaacaagggcggaccgtccggacctgactcgcggaccgtccgcgctcatcagaaaggtgcaacggctaggaagtggttgggggctataaataccaccccaaccacctccattcaatacatccaagcattccaacctttcaacattcaatacaagagctag

SEQ ID NO: 34396 - DNA, 186 bp, Zea mays
  Peptide Sequence Number=SeqID_76175
atgcagtacaatggatcaagcagtctcattagctgcgagaagcagacgattcgaattgagtttttatccttgcaaggcctcaccgccctggcatacaatgctccactgaccccaaccgccgccgtgcagtggccgcacttgtacccaccatatctagaatgggagacccagtctcaggtcgcgtga

SEQ ID NO: 34397 - DNA, 279 bp, Zea mays
  Peptide Sequence Number=SeqID_76176
atggggaagcctggcccatcactcctcatgctcctcctctaccgaggtagggtcccactcgactgtccaccccggtgccaagatggacgaccaagtcacgccagcaaccatgtcctccagagaacctgtaaaaattatgccacaacaatcattttagcaatcaacatcttttgccaagtcaacatctttccacttgttactcaatgttgcagcatggatcaagcagttctcattagctgcgagaagcagacgattcgaattgagttttatccttgccag

SEQ ID NO: 34398 - DNA, 525 bp, Zea mays
  Peptide Sequence Number=SeqID_76177
atggcggctgacggcgacgtgccagtggcagcgagctgcactttcctgctcgaacggtggcggcgcttccttgccagttcgatagggaaaggtagaagaaacacgctgttgggccaggcttctttcaagagactgatgttgaagcagcaaggaatgcgaactacgtgggagtacccctttgcggtcgcagggagctgctgggctttctcaacaatagcagctgtggaaggcatcaaccagattgttacaggcgacttgatctccttgtctaagcaagagcttgtcgactgtgacacttcatacaatcaggggtgcaatggaggtctgatggactatgtgtttgagttcatcatcaacaatggcggaatcgacaccgagaaggattacccttacaagggcacagacggacggtgtgatgtcaacagggtatttttttcgcttccatacacaacagcaaaactgaatactcccgtcggccataataattcccgtcggtttttagggttgccgacgggagttaattaa

SEQ ID NO: 34399 - DNA, 1080 bp, Zea mays
  Peptide Sequence Number=SeqID_76178
atgggcaacagagctaatgcaatcaaccttgacttctcagatgtaattgttgacatctatgcttctttcaagagactgatgttgaagcagcaaggaatgcgaactacgtgggagtacccctttgcggtcgcagggagctgttgggctttctcaacaatagcagctgtggaaggcatcaaccagattgttacaggcgacttgatctccttgtctgagcaagagcttgtcgactgtgacacttcatacaatcaggggtgcaatggaggtctgatggactatgcgtttgagttcatcatcaacaatggcggaatcgacaccgagaaggattacccttacaagggcacggacggacggtgtgatgtcaacaggaaaaacgcgaaggttgtcactattgacatctacgaagatgtaccagcgaacgatgagaagagtctgcagaaggcagttgcaaaccagcctgtcagtgtcgcaattgaggctgctggcacaacatttcagctctacagctcggtgcacgagacgagatcacgggtgcacgcagctgcccaggaacaaggcaagctcgccttaaaaaagcaaaaaccaaataatgaaatccaagaaagggaccagaatgggccctccaagaacaagaagtctgccgataatgaagggcaagacagggagccagagcttgaatttaaggagtggaaatacaagtgcactgggaactgcactgggaactacaccgagtgggcacgctgtactttcagaactgacgatccttcaaggagaagtggtcctataaaagttcctgatgacataaaagatgattttatccgcaagtggctgaagcaacaagaaggaaaaggaaaggagtttcctaaacatgatgttgatgaagaggcccatatcttgtctagcatgatgattgacttctgctgcccccatgactaccccatctgcaacgtcaggcagggaacctgcctcatgggcaaggacagcccactactgtcagtgaaggctacgaagcgaacccgggctaagccgcactgtgctttctccggcaacacagctgacggcatgaagagcagcgcatga

SEQ ID NO: 34400 - DNA, 1656 bp, Zea mays
  Peptide Sequence Number=SeqID_76179
atggcgccttcaagcccccccatggtggatgcgcgatgcaaactcggaggtcttgcaatgtgtcggcgtgttcgttcaaggacgagagggggaaacagcggattcatccccgccaggcttcaggtcaggattagtgtcagtatattggttcctgcgatgctggtgttcgtttctgggattatcaagtatggggagagggaatcatatgctctttggacggtgcttatagctcgaggattttttgtggggcgaactatgctcctgatgggacaggggcctgcatcaacactatggttttatttaaagacaaagtatcaaggtagagaagagaagctgaagatggtaatgatggtaatgatggagcttggcatgatgttcgatctcctctacaccaaagccaacgtgctccagagaaggattggtgtcctattccggtgtgcttcccaggccttgatggtcgttgccctggttctcttcatgatacgacgtgaggaaggcgcccacaataacaaggttaatgtcgcgattacctacacattattcagtggcgccatttttgtggagacctgttgtgttgctgcggcgattgcgtcgccttggacaagggcacacttgaaggagagcagctgccttcatggcctcagtgactccttgtttgaggttgttcatctgtgcaaatccaccgctaataacatggcacagtttaacttattggatcactgcatctctgtcaactccaaaccaagagttttctcaaaggccctcagtgctattggtctggataagcaatggtacgtccaccacatggataagcaatgctactggtggattatcaaccgtgttttggaacatttggccacattgcccgacgaattctcaggtctagcaactgtacactttacaattaatgcacccactgaacatccagtatggttcaaccagctgagtacatccttcgagcaagtcctctacggcttacacctatacactgacctacatctaagcaggcacttcaacaactgcagcactggtagcgtcgtacaaccacctccacctgagattatgcgacttaaggaagaatgcgagacactatcaaactacatgatgtacctgatggtggtgcatccttccatgttgccagtcaacacggttgcggcaggagatcttgttcaacaacttattggctgggttactaaccaccctggacatggggcgacgacgaccaagctagcaattctgcgagggtactcaaggaccttttacattctggtcatagacgaaccaggccaacacagatcattttattatttgcatcacttacttacgcagatcaaggagatgtgggtgaggcttctcatgtatgctgctggcaaatgcagcggagaggtgcatgcacgccaacttggtgaaggacgtgagctcatcacctttgtctggctactcatgctgcatcatggacttggagacatggcagctgagttcaagcttttaagatctaatgatccaaatgtagccgagcggggggcgtggattgtttcacctccaggaaattatcaagagccgacttgtgccttcaaccacgtgacctttgtagtccattgtaaaagaaatgtctctatgctatttactcatacattacaacagttttttttgtaa

SEQ ID NO: 34401 - DNA, 1467 bp, Zea mays
  Peptide Sequence Number=SeqID_76180
atgctggtgttcgtttctgggattatcaagtatggggagagggtgtgggctctgaagactcgaggattttttgtggggcgaactatgctcctgatgggacaggggcctgcatcaacactatggttttatttaaagacaaagtatcaaggtagagaagagaagctgaagatggtaatgatggtaatgatggagcttggcatgatgttcgatctcctctacaccaaagccaacgtgctccagagaaggattggtgtcctattccggtgtgcttcccaggccttgatggtcgttgccctggttctcttcatgatacgacgtgaggaaggcgcccacaataacaaggttaatgtcgcgattacctacacattattcagtggcgccatttttgtggagacctgttgtgttgctgcggcgattgcgtcgccttggacaagggcacacttgaaggagagcagctgccttcatggcctcagtgactccttgtttgaggctgttcatctgtgcaaatccaccgctaataacatggcacagtttaacttattggatcactgcatctctgtcaactccaaaccaagagttttctcaaaggccctcagtgctattggtctggataagcaatggtacgtccaccacatggataagcaatgctactggtggattatcaaccgtgttttggaacatttggccacattgcccgacgaattctcaggtctagcaactgtacactttacaattaatgcacccactgaacatccagtatggttcaaccagctgagtacatccttcgagcaagtcctctacggcttacacctatacactgacctacatctaagcaggcacttcaacaactgcagcactggtagcgtcgtacaaccacctccacctgagattatgcgacttaaggaagaatgcgagacactatcaaactacatgatgtacctgatggtggtgcatccttccatgttgccagtcaacacggttgcggcaggagatcttgttcaacaacttattggctgggttactaaccaccctggacatggggcgacgacgaccaagctagcaattctgcgagggtactcaaggaccttttacattctggtcatagacgaaccaggccaacacagatcattttattatttgcatcacttacttacgcagatcaaggagatgtgggtgaggcttctcatgtatgctgctggcaaatgcagcggagaggtgcacgcacgccaacttggtgaaggacgtgagctcatcacctttgtctggctactcatgctgcatcatggacttggagacatggcagctgagttcaagcttttaagatctaatgatccaaatgtagccgagcggggggcgtggattgtttcacctccaggaaattatcaagagccgacttgtgccttcaaccaccacactctaaaagattctgtcctctatatattctcagtctccagcaacgtcctctaa

SEQ ID NO: 34402 - DNA, 888 bp, Zea mays
  Peptide Sequence Number=SeqID_76181
atggacccttcggtctcctcgtcgcctctccggctctccgtcggaacccgcgccagcccgggtgcaggccccgcccccgcccctaccccgaggccgcccagcctcgtcgtcgcggccggccgccaacagcccgccaagatatatagaagcgcttgggaccacggtgtctgcgccgacgcgcacctctacaacgcgctgatgaaggcgagcgtcgcggcgtacgaccctgggccgtcctcaggcgatttctctcccttccgtgttgcggcgaacgcgtgggagatccgccctatgtcgtctgatccctcgccccacctcccctcgccggtgtatatgttgcttcgacctgtgcagtttatggatgaagacgaagctgacctacagatgacaagagtggggttcgacgacgttgtcattgacatggcgtttctcttggacattatgtcgaacagtttgagggcattgcggagaaaagcgaggagcactgactatgggctgcaggaaatggtggtgttcgccgcgggggacctgcgcaggcgagctgcagctgggccgtcgaagggagctggccatagcacgtcggctaagggcgagctcgccggcattgagggagaagcccgtaacgcgcggcggccgcgcagggcccgttacaatgggccggatcgcacgtgggcctctgggctggacgaggccgcactgtgggatgacttcgtcgccggtcttcgtctggtgccgatcaagcgaagggtgtccctgcctgttttgtctgtcagaccagcggctgcagcgaagacttcgagcgaagggtggcgtctttgccttcgccccaacatttgccctccgagggaccagttcgacaaagtcacctggtgccgaagacgtcgctag

SEQ ID NO: 34403 - DNA, 708 bp, Zea mays
  Peptide Sequence Number=SeqID_76182
atggaggaggggaagcgcgaagaagccatcgaagtcgacgacccccgcggcgtcgccctaagcgatttctctcccttccgtgttgcggcgaacgcgtgggagatccgccctatgtcgtctgatccctcgccccacctcccctcgccggtgtatatgttgcttcgacctgtgcagtttatggatgaagacgaagctgacctacagatgacaagagtggggttcgacgacgttgtcattgacatggcgtttctcttggacattatgtcgaacagtttgagggcattgcggagaaaagcgaggagcactgactatgggctgcaggaaatggtggtgttcgccgcgggggacctgcgcaggcgagctgcagctgggccgtcgaagggagctggccatagcacgtcggctaagggcgagctcgccggcattgagggagaagcccgtaacgcgcggcggccgcgcagggcccgttacaatgggccggatcgcacgtgggcctctgggctggacgaggccgcactgtgggatgacttcgtcgccggtcttcgtctggtgccgatcaagcgaagggtgtccctgcctgttttgtctgtcagaccagcggctgcagcgaagacttcgagcgaagggtggcgtctttgccttcgccccaacatttgccctccgagggaccagttcgacaaagtcacctggtgccgaagacgtcgctag

SEQ ID NO: 34404 - DNA, 243 bp, Zea mays
  Peptide Sequence Number=SeqID_76183
atgcccacctatgggatgccgcctccggaatttgcactgccgatgccaatgcttgcgcctccacctccgcctccgtcacaattccctacgggatttcagacaccccccgcttcagttgcagcatcaggagatgagtctggtcaagacgacgcatcgcattcttgggtaaataacattttcaacacgcatagtccagtaggaggaggtggctactcgaaccatccaggcgatggatatgattga

SEQ ID NO: 34405 - DNA, 498 bp, Zea mays
  Peptide Sequence Number=SeqID_76184
atgggcaggagtacgattggaggagccagccaatcgaccctcaggcagcatatgctagcgcaggaggacaagcccatggatgattctacaattgattccagagagctgagacgccgtggacgacagtccacatcgtcgtcttcacagtcgtcccgttcacgatcatccgcccaggagatagagcttgcagtgttgcgtcaacagaggcaacaatctgagtaccagagacaacaagccgagtaccagaagaagagggacgagtattatgcaaacctccagacccaaaatcaagctcttctctcgcaactagcccaacagcgggcgtcccgatgcccacctatgggatgtcgcctccggactttgcactgccgatgccaatgcttgcgcctccacctccgcctccgtcacaattccctacgggatttcagacaccccctgcttcagttgcagcaccaggagatgggtctggtcaagacgacgcatcgcattcttgggtga

SEQ ID NO: 34406 - DNA, 1479 bp, Zea mays
  Peptide Sequence Number=SeqID_76185
atggtgaacaagggcaaggtcatctcacttccttgtcatgcaatcatccatgttgtccatcccaaaggccactactccgaagttgacatacagacaaggaatgaccaaggtggtgaagatgataactttgctattgtgtttgctgccatgggagtgaacatggaaaaaactcaattcttgcaacgtggttttgaagagaacaattccatggaacgggacaccctttttctaaatctgggaaaagcgagcctggcagaacgtctgctccatccgccaacgggattacctcgcacaggtttttatttcttggactcaaactcgaaggacaatgatgggaaggaagatggcgattctcagaacagcatgtcttattcagcatcgcaaggagtgttttcaatcacacggttcaaatatcgtttactgttctctagcgagcgtgactggtgctctcttactaaaacacttttggatattcttgccaagagaagcttggtcagcgaggaattatcaaaggaaactatggagatgctggctgagattcaccttctgaacagagcagtaaaaagaaagagtaggagaatggtgcatttgcatgtacagtttgttgtactatgccttgataattccaaggtttaccccttcctcccaaactttcctggccatactcatagatacaagcagacagaacaagaaaccggaccatacttgtcactgcagctgtttggcagcacgcaggaggattttccacctaagatggactcagtgaataagtacttatcttatgagagtagcaatcctctggatgagagatctccttcatctctgcctataacccgcaagtttttccccatacactcggttgatgaagaggttcggcaccctcatattacagattatggggaagatgctatgatgggtgaagttagcacaaatcaggcatggttggcaccaccacttgatcacttcaaggattcagagcgtcccatcaagaacggatcgccaccaaatcctggttaccaatcctgttatgcctcaacatcttgttcagatcattcaacttcaacctcaaactcagatggacagcttgaagaaaatctcctccagagagtaaactcattagttcaaagttctgatttggatttctggagaaaaggaaggtttttagttcgaaccaactcccagttggtatcatataaagcaggtgttgagacatttgacttgacaggaaaaccagatcttattattgggcgctgctttgttgaggtagaaaacaggttcaggggtaacagcttctctgttatcggtggactatgcacgctatgtttttttgaagaggatgtagtgttgactattacgacgcctagggaacttaacaactaccctcgcaaagacactttttacttgtgtttaactgttcaagttgcaattgttcaacaattcacagacattttcatcaaggacaggttatttacagtttaa

SEQ ID NO: 34407 - DNA, 321 bp, Zea mays
  Peptide Sequence Number=SeqID_76186
atggttacaaattttggcaccaaaacagtgcaaatagcagtaaatgctgtggtaacttcacacctactcgtctgtttatatagtgccgcagcatttgagaacaagtccccaacaagtgaccaaggtggtgaagatgataactttgctattatgtttgctgctatgggagtgaacatggaaaaaactcaattcttgcaacgtggttttgaagagaacaattccatggaacgggacaccctttttctaaatctggactcacactcgaaggacaatgatgggaaggaagatggtgggcgattctcagaacagacgaatctctag

SEQ ID NO: 34408 - DNA, 462 bp, Zea mays
  Peptide Sequence Number=SeqID_76187
atggctgcggcggcaatcctaccggagctggggacgcatgtgctcatcccggtcgcggcggccgtgggcatctctttctcggtggtgcagtgggtgctggtgtccaaggtgcggctcgcccccgagcgacgcgcggacggcggcggagccgtcaagagcggccccagcgactacctcatcgaggaggaggaagggctcaacgaccacaacgtcgtggtcaagtgcgtcgagatccagaatgccatctccgaagtctctccgccctctagctcaagatcgcaagcgcacataaagccatggagcccgcagccgaggacaccacatctgctgtgccagactcgtgggagggccgacatcgacggtcacatgagtcggctcatcctctccgcgtgtcgtgtgtcctcctcgctggacctcgccttctccatgaagaagacagtcaccttcgttacccgaggatag

SEQ ID NO: 34409 - DNA, 462 bp, Zea mays
  Peptide Sequence Number=SeqID_76188
atggctgcggcggcaatcctaccggagctggggacgcatgtgctcatcccggtcgcggcggccgtgggcatctctttctcggtggtgcagtgggtgctggtgtccaaggtgcggctcgcccccgagcgacgcgcggacggcggcggagccgtcaagagcggccccagcgactacctcatcgaggaggaggaagggctcaacgaccacaacgtcgtggtcaagtgcgtcgagatccagaatgccatctccgaagtctctccgccctctagctcaagatcgcaagcgcacataaagccatggagcccgcagccgaggacaccgcatctgctgtgccagactcgtgggagggccgacatcgacggtcacatgagtcggctcatcctctccgcgtgtcgtgtgtcctcctcgctggacctcgccttctccatgaagaagacagtcaccttcgttacccgaggatag

SEQ ID NO: 34410 - DNA, 1083 bp, Zea mays
  Peptide Sequence Number=SeqID_76189
atgtaccgagaggcgttgtggcagaagagaggtcgtcctcgggagttatatccggacgtatctagtaaggatgctcctgttcctcctgaactccccgtgcctaactgtgactgtggcagactggcttggggacatcagaagtgtttctttttccagtggatcgatggtcctgataaatttgaccctcgatatcttcttttcgttaattggttgagtggaaagacaagtcatgagcgttttaagcgttgggtacctcctcccccgaatcctccaccaatgacggatgaggagaaggaggtagcaacagaaagacggatggactcaccgcctcgatgcgattgtggagaccgtgctgtcatcgacgaagactatgacaagcagttctgttgtccgaacattgattatccatacgggtggcgtaagtgtcgtttcagagagtggttgtatggtcctttgtcccattggccagagccagaggtaaaggaaaagagatacatggggtgggcggcagaagaggtgaaatttgatccagtactctgcaaatgtggtattgaagctaagtatggattagttccttcggagcttggcgttggatatttttgtggacatatggtcgattacgatgaggagacgaggaaatgcagttgggagagttacgacgacaaaggagaggtgatgcgcacaatagagtccaagagaataatgggacagaagatgcgttgtggatctcagctcgtcgattcgtacattaacgatcgcatacgcgacatgcgtagggaagcaaaatctgccttttatgatagcccgaagcgtgcagagtataggaggttgaaggcggcagatgagaagagagcacaggatgcaagggaatgggaagcggctcaagccgagaaacagatgttggataatcttgctgatcgcctcaagggaaagattggaagcggcgtaaactatttggccgatgaggcgcatgcgagatatgttcaggataaaatggcaacggttgagctgatggaggaggaggacgacgacacatctagattgagtgagcttatcgccctcgcagaggcaggattacattaa

SEQ ID NO: 34411 - DNA, 813 bp, Zea mays
  Peptide Sequence Number=SeqID_76190
atggggtgctccagcgccgccttgctcttgctgtcgttggaggagcgcggcctcatggagatcggtacctttcagccatcgctcggcttcaaggattttcgtcgtgcaactcagctgcattccctcaccaatgggcagtttggtggggagaagcaagtcgggctacagcctccgccccgccctcagcttcaaggatcttcgtcatccgggctgaggcggaggagcgcaccgagtggggggttgcctccgcgtgggccggtaacccttttcttcccccagcgtttgggggagaaaggcatcctccagccctgcggaggcgtcctccagccatgcgggggaaggcgaactgctgctccctggacagggtgcagctttccgtccttcgcccgggcggcgctcgtgccgcaagcgggccggccacgtccaggtcctcctcgcaccgtcaaccgcaccggggggtcgcccagcacgtcgtacgccgcgagggcggtgctcgtgttctggggcggcctcggcgaggacgggagtgaggacctgccggtgcgctttggggcgaccgttgttcgccggcgcggtgtcggtgggttcgaacccacggtcggcgccctccgactctttggccttagcggcttttcctcgcccctcaggtcgccggcaagccgcttggagttcgtcatctcgcgggccccctgtttttgggactctcggctgctctgcgatgagccggagccggaggcagcggtgttagcgcggacagacacggagtcggctcggaaagagactttgtcagcccgggagatggcggtttcctag

SEQ ID NO: 34412 - DNA, 1280 bp, Zea mays
  Peptide Sequence Number=SeqID_76191
atgaggccgcgctcctccaacgacagcaagagcaaggcagcgctggagcaccccatccgggggctcaaaagaaaccggtggtcgaaagggtggactgccacgcggcaggcatccaactgcaccacaactgtgcgccccttcggctccgtccacatccggcggaccagcgcaaaggaagcgggcccgcatgtcatgacccaacagtgccagttaaaggtgacagccacgggccgatcagccgcgggggaccgggaaaggggacgttgtggaaagaatccttctcggcggaggaagcgggccccgagccctcctactgatcaggggttcgaaggctggcccctcggaaaggtttcgacagctgccccagagcactcggacttcaagcgcattactaatcaggggttcgaaggctggcccctcggaagggctggcccctcggaagggttcgacagtcgccccagagcacgcagagtgagggatgactctgggtatgttcgatacatagccgaggctcgggctacgcgcccgaggtaccttaggacatttccgagaccggcgggaacgatttgtaacgcaatcccaccggagggaggcatcgagccctcggaccctgtcgaaggggtctgggtccggcgaatcacctgtaggtacttttggagcgtgcctctgggccaccagccgacccctaacgaatggggcacgggcgtccactcggatcacccgttagcagctcactggaaacaccatgttcggcgccctccgagggcaacatggcgctttccccctcctccttgtggaaaggcgacgcaggggcgtataataaaagtcgggaaagaaaacagcgccgctcgctccgctccgactgccgtgtcagctaccccggcaacgactgacaacaagtcacgatcaaccaccgagttcagcctcgggcgcaacaggaagctccgcctcgcccgacctcatgctccggcctttggaggaggtctccgcctcacccgacccccggactcggcctcgaccccggtctcgggaggaatcgcgtcctcgcccgaccccggcctcggcctcaagagaagtcttcgcctcgaccgaccctgggctcgaactgaccgcgctaataggggatgcatcatttccctattcctagcctgctcaggctacaaggaacaagacaggtgtcccatctggcttaccccggcgacgggactcaggcgctcctccgacggccacgccatcacatgtacagggcccaagctctcctccaacggccacgttggcat

SEQ ID NO: 34413 - DNA, 822 bp, Zea mays
  Peptide Sequence Number=SeqID_76192
atgtgcgtcggcccgttctcccgcgtggccaccttctcgtacgagagccctggaccttccttttataggcgtaaggagagggcccaggtgtacaatggggggtgtagcaatgtgctaacgtgtctagcagagaggagccagagccctaagtacatgccgtcgtggctgtcggagaggttttggcgccctgttcatgtgatgtcgtggccgtcggaggagcgcttgagccctgtggaagtacagctgtcggggctgtcggatccttgcttacgtctccttgcttccggtaatgatggccccccttgtgacgtggtcggtccgagcccgaggtcgggcgaggcggaggctcctccgaggtcgaggctgagttcgggcccgggggtcgggcgaggcggagaccgtcgtccgaggttgaggttgagtccgagccccgggggtcgggcgaggcggagaccgtattccgaggtcgaggctgagtccgagccctgggatcgggcgaggcggagtccgtcttccgaagtcgaggctgagtccgggcccgggggtcgggcgaggcggagaccgtcgtccgaggtcgaggttgagttcgagctccgggggccgggcgaggcggagaccgccttccgaggtcgaggtggagtccgagctcaggggtcgggcgaggcggagattcttatggcgcctgaggccggtcttggcggctgtcagcctcaccctaacgggtggcacagcagtcggagcagggcaggcggcgctgttttcctgtcaggtcggtcagtggagcggcgaagtgactgcggtcacttcggccctgtcgactga

SEQ ID NO: 34414 - DNA, 978 bp, Zea mays
  Peptide Sequence Number=SeqID_76193
atgaccgtgaccggggtgggtggcacactggcggacgcgtcggaggagtggttgacgttgaactcgtccacgatgaacttgaaattgagagacatggacaataggaaaggaaagttgcagcgagctcgcaccgacagcctgttcctcgacattgagcgtgcacaaaatcttgagcgacgtcacggtgtcccgtatctttccggcgagtccgttcctgctgaggtcgatggtgctgagggagccgcaacccatgagctcccttgggattccgcccgtgagcgcgttgcctctggtgttgagcctgctaaggttcctgagcctgccgatctccggatgtgtgagatgaacatagggatgaacgtatgtaggaagaagaagaagctaggagcgacggtgtggagtgtttgcgtgttatttcctcagtcttatgtggtgtttggctcaccaaaatataacgtaaatggattatataggtgtcggcgtttcgaccccagggggtccctggaccgacgagtaaattgtcgttgtgtgtcccagcccagatgggtcggcgcgagacagaacacaaaggggggaagaacagcaaaggggaagccgcggccttcgtgttgtcctgcgcccagggcggatgcgcttgcagtagggggttacaagcgttcgcgtggcagagagagagagaggctgtccgccagcccgttctcccgcgtggccacctcctcgtacgagagccctggaccttccttttattggcgtaaggagagggcccaggtgtacaatggggggtgtagcaatgtgctaacgtgtctagcagagaggagccagagccctaagtacatgccgtcgtggctgtcggagaggttttggcgccctgttcatgtgatgtcgtggccgtcggaggagcgcttgagccccgtggaaggacagctgtcggggctgtcggatccttgctgtcgtctccttgcttccgtaaggggctga

SEQ ID NO: 34415 - DNA, 1392 bp, Zea mays
  Peptide Sequence Number=SeqID_76194
atggacaaggatcgccaaggcgcggcgcgaaaacgccaggcgactgtgagggttcacgaagcccggccgaaaaggcagcggggaacggcgaaggctgaggcctctggcggaggcaagccgccgctgccgacgaaggtgggcgcctccgcgcctggcaaggcgccggagacgacggtgggcgccggaggccccaagctgtcgaaggtggtgccgtctgtcagcggggtggcggaggctgcgaaggcggcccgatcgctaccgccgcctggcaaccgcgttgccgacttcggcaccgagattgatgtggaggattatcttggggggtcggacgagggcccgcttgctctagttgtgcctggcgcggcgatcgcgatggctgcgccagcgccgaaggcggggggagagacccttggcgccggaggcgaggtgtctgccctcgcgctggtcagagacgaggcgggcgtggcgacccgtcggctgaagggagcgacggaggcgctgagtcgagcgacggaggcgctgagtcaggtggctgacttcaccagccgcactgcgtcgggggcccttacggcagcgttgtctgccgaggtcgagagacttcggacacaacatgcggacgctgtccgtgagaagtcggcctctgacagcaagtgccgcaaactggcggagaaggtggccgcccttgagaaggagaaggctgacctccggcgccagctggcgggggagaggagggaggccaacgaagccatcgccaaagagcaggctgcgcaggcggaggccaggctggcgcgggcggaaggcaatatcgccaaggagctcgccggagagctgcagcggcggcttactgcccaggagagccgcgcggagggggccgaggccgcgatgcgagcggaggccgaacggacgcgcacgcagctcatgacttcatatcgcgagctgggtgtgcggacgggtgacttcgaggtgccggagcgagaggccgggcttcgctgtctggaatgggtgcaggaggaactgcaggagctccccactgtcttggcggggttgatggcgttcacctccctggtcacctgcgaggcagcgatgaacgcgctctctcgcgaaggctgtcggcactttgaggccctcgaccaggtggatgaggattttgggcgtgatatctttgaggtcgaagaccccgcggtgaaggaatccgccggggccctctatgaccggatgtggggttcatacggtcgtgaggtggtccgggcgcgggccgaggctgcgagggctcaggcggagcgcggcgagcgggtggatgtaatactcaaaagtgtaataaaggtggatagagaaaaaaaactcatttgttgtggcctctactattcattgcatgtgatcgacactagttaa

SEQ ID NO: 34416 - DNA, 652 bp, Zea mays
  Peptide Sequence Number=SeqID_76195
atggaggacgcacccatcggtcttggcgtggcgctggcggttgctgcggcggtgcagcagaagacgacgtgcggcaaagtcagcgcctcgccggcgacgatggccaccgttcaaaaaccgaaggatgaagacttcggcgccggtccgcgagcagatcaacagatggccacggcgacctacctctcctcctccttctcctcgccgccgccgccgtcatcacgcgcccgcctgcggcggcagacgaccagggcgggcgcgtcggcggcgacggaccgcccgcgcgaggtgctgtccccgaaacgccggctcccgctgcgggaggtgccgggtgactacggcccgccggtgctgggcgcggtccgcgaccggttcgagtacttctacgggccgggcggccgcgacggcttcttcgcctcccgcgtgcgcgcgcacggctccaccgtggtgcggctcaacatgccgccgggccccttcgtggcgcgcgacccgcgcgtggtggcgctcctggacgccgcctccttcccggtgctcttcgacacctcgctcgtcgacaagacggacctgttcacgggcactttcatgccctccaccgacctcaccgggcggctaccgcatgctctcgtacatcgtgccccgccgagcccaggccagg

SEQ ID NO: 34417 - DNA, 843 bp, Zea mays
  Peptide Sequence Number=SeqID_76196
atggcttttggccactcctttagtgtctcattctcttgtataaatatcaaaagcaataaaggataccgtgccccttttcatttcattctcgcacaacagtttccattctacacgttatcagcacgagcttttacaaaagagagaaaaggccaaaacaagaacagcggaggcaagaagttcttcatcaaaaggaaaaaaacagtcgggtacgtaatgatctacaaagatctttctgttgcccttcttaccttcatccttcggtttttgaacggtggccatcgtcgccggcgaggcgctgaccttgtcgcacgtcgtcttctacgtgctgcgcatcgacatggtcgccaccatgccaagaagcgcagcaagaaggacggccgggccacacttgaccctgagcgcgtccgccggaccggtggtgatcctggcgctgatcccagcaacgttgtggcacctgccgcaccgtcgcagcaaccaccagcgccacgccaagaccgatgggtgcgtcctccatcgccttcgccggagcgggttgcagagcggttgcgtgagtccgagacccagcagccgctccgtcccgatgcggtactgccccctccatggatgggggtcgtgtcctgctcgccaaccgcgggctcctccaacggatgcagacaccaccgcccccgctgttcgatcaagcggactgctcgttcaagtcgcctctcctgcgcgccctcgtgcccggacacggctgactgcgcggaaatcaaccggccctcgcggtcgccccgtcggccagatcgcatccacgtccactgcgacggttgccgtcgacgccacctcttcctcctccgacgatga

SEQ ID NO: 34418 - DNA, 834 bp, Zea mays
  Peptide Sequence Number=SeqID_76197
atgagccgccgctgcctgtgcaagccgccaagggcagaggtcgcgccgtcctcgtccgtcgcagagaatcctcgcaggccagggctgccgtcgtgtcggtcagggcgtagggcatccgcgcggccgcgggtctgggcgagccgccgcgggccctgccaaggccgcgccgcctgctgccgggcgtgggcgagcagccgcgccgcctgctgccggggcgggcagagccgcgcaggccagggcgagccgccgcgggccctgccgaggccgcgccgcctgctgccggggcgggcagagccgcgcaggccaaggcaagccgccgcggtccctaccgaggccgagccgcctgttgccgggcgcgggcgagcagccgcgccgcctgctgccggggcggtccacgcgcgcagggccgagcacgccgtggccgagcgaggccacactcatggaagacgacgaggcggcgagcgcgagcgctcacggacgtcgtcgtcggacggtcttgcggttgcagaccacgaccccggagcacttggccgtggggaaaggtggtgcgcgagccgacggaccactctgttgccgcttgggctcaagagcgccggcggtgagaccgttccggatgggccgtcgtcgggagtcggagtaggcagtcgctgctgcaccccgtcgccgaggactaaggcgatcctctcatcgtcggaggaggaagaggtggcgtcgacggcaaccgccgcggtggacgtggatgcgatctggccgacggggcgaccgcgagggccggttgatttccgcgcagtcagccgtgtccgggcacgagggcgcgctggagaggtgacttga

SEQ ID NO: 34419 - DNA, 663 bp, Zea mays
  Peptide Sequence Number=SeqID_76198
atgcaggcggcatgcaaccgcaccaagggggcgcaccctttcgacttcgacgcgtccagcatggaggcccaggcccacacgtcatgcgggcggaagcagcagtcaaatcgactgcaggctcacgtcccctcctggagcagcaggagagccctctcccacggcgtgaagacgacgcgcccgtgttccgttcctcgaacggctcgcgcacgcacaacggctgccccgcgaaccactcgtcccgtcgcattaactctgcggcaggacatgcggcacctttggcaggcgaagcaggcgacgcttcacctccgccataatgaccgcgtcaaaaaagggaccgagaaaggggatactccgaaagggatccttccctgcgaaggaagcgggccccgagccctcctacttatcagaggttcgaaggctgacccctcggaagggttcgacagccgcctcagagcactcgggctccgcgcccactactggctgacccccgaagggttcgacagccgcctcagaacacgcagagcgagggatgactctgggtacgtccgatacatggccgaggctcgggctacgctcccgaggctcgggggctgctctcgcaaacccggctccggccaaaccgttgacagcgtcaacataccagcccgagaactcggaacctga

SEQ ID NO: 34420 - DNA, 528 bp, Zea mays
  Peptide Sequence Number=SeqID_76199
atgaccctgggtacgtccattacatggccgaggctcgggctacgctcccgaggtaccctaggatatttccgagaccagcgggaacgatttgtaatggaatcccaccggagggaggcaccgagccttcggaccctatcaaatgggtccgggtccagcgaatcacctgcagagcctgactatgcacccgggctgcggctaggccgcatgagagaacaacaaggccggccaaggaataacaagaagagcattaagacctcagaggagtcaaaccactcctccgaggcctctggggctacaccccgacgggataacgacactattcaccccgttccgaccactgtgccaaccaccggggtaagactaacaacagtaagttaccgcctctcccgagttcagcctcgggcgcaacagggagttccgcctcgcccgaccccagcctcggcctcgggaggaatcgtcaccatgcccgacccaggcctcggcctcagccttgacctcgggaggaggtcttcgcctcgcccgacctag

SEQ ID NO: 34421 - DNA, 753 bp, Zea mays
  Peptide Sequence Number=SeqID_76200
atgtggggttcagcgaccgccctagagcactcgggctccgagccctctactgatcaagggttcgaaggctggcccttcggaagggttcgacagccgcccagagcatgcagagtcagggatgaccctgggtatgtccgttacatggccgaggctcgggctatgctcccaaggttgcggccaggccgcatgagagaacaacaaggccgaccaaggaataacaagaagagcattaagacctcagaggagtcaaaccactcctccgaggcctcgggggctacacccgacggtagaacctccaagcgagtgcctacactccctttgaggctcgggggctactgtcgggataacgacactattcaccccgttccgaccactgtgccaaccaccggggtaagactaacaacagtaagttaccgcctctcccgagttcagcctcgggcgcaacagggagttccgcctcgcccgaccccagcctcggcctcgggaggaatcgtcaccacgcccgacccaggcctcggcctcagcctcgacctcgggaggaggtcttcgcctcgcccgacctcggcctcgggaggagatcttcgcctcgcccgacctaggcctcggcttcgggagaaatcaccgcctcacccgagatggcctcggaccgactacacgaacagggaatacaacactatccttcccctagctagccacctcaggctacgaaggaacaggaccggtgtcacatcaaattactccagtaacatgtaa

SEQ ID NO: 34422 - DNA, 531 bp, Zea mays
  Peptide Sequence Number=SeqID_76201
atggcgctcggcagcgcgcggcccttgtgcgcggtggcaatgagaatggtggttttggcattggctatggtaatgatggctcgtcttagacacactgcacggaaatctgtcatccccttcttaccctctcgtctcgcggagcgtccgcttcgccgtccagtgaccgatcagtccagccatttggagaggctacaccaccgcgtgcacgaggagcaggagcgtcgacgacaggagctggagcagcagggctcttctttctcgctccagcaggagatagagtctgtgtggagctgctcccccgtgcaaccactggaggcgccccctgcaccaccactgagcgccccagccactggaggagacccagacgatggaggcgacaacgacagctcgagctttagcaccgacctttccgccgaccaagagccggaaggatgggttgctcaacccatcactcgcgatgctgctcgcaggtgtcacttccacgacgcgctcgacaccctactacgccaggcactcgaccgacgtacttag

SEQ ID NO: 34423 - DNA, 423 bp, Zea mays
  Peptide Sequence Number=SeqID_76202
atgttcggattacaagtggcaatgagaatgatggttttggcattggctatggtaatgatggcttgtcttagacacactgcacgaaagtctgtcatccccttcttaccctctcgtctcgcggagcgtccgcttcgccgtccagtgactgcaggagatatagtctgtgaggagctgttccccgtgctcccgctagaggcgccccctgcaccaccactgagcaccccatcccctagagtagctgctagaggagacccagacgacggaggcagtgacgacagctcgagcttcagcaccgacctttcagccgaccaggagctggaaggatgggttgctcgacccatcactcgcgacgctgctcgcgggtgtcacttccacgatgtgctcgacacctgtggcagaaccacccgaattattccagcttaa

SEQ ID NO: 34424 - DNA, 366 bp, Zea mays
  Peptide Sequence Number=SeqID_76203
atgacggcgttcgagcccgagatcgagtccctacgggtacccaatcttccagggcggcgtgcacgtctgctcagcagagagctcgccatcatggagatgaagtccgtcatcgtctccgtcgtgcagagcttcgacatcgaaacgctcgtgccaacgaatactacttcagcaaccacagacgagagaaatggaggcaggggcaagaagggaaaccaaccttggccgtgctcgacgaaggggatcagcagcaggaggggacgaagtggattattggccgtgctcgacgaagggcgtgaggcagtggtggactggcggctgctgctcgacggagggcaacggaggccgggcgcgaccgcgcgcgggtga

SEQ ID NO: 34425 - DNA, 612 bp, Zea mays
  Peptide Sequence Number=SeqID_76204
atggagatgaagtccgtcatcgtctccgtcgtgcagagcttcgacatcgaaacgctcaaccgtagctcccaccggccaaagtttgcgccaagtcttgccaccacattcgtcgggggcgtgcttgttagagcgcacccactcagcggcggcaatggcggggcgccccctcccccctcgctcgtcgtcggcggccggccgggatgcgtgagatctcggcggcggatggggaaggacgccggcgaggcgcagcagcagccggacggggcgggcggtggcgcaggcggcggcgcaggaggaaataggggcggccgcttctgcttctgcggcggcggaggagcggcgagggtggttcggctgcaatgcgtggcagcgctcgtgctcggggtggccgtgctgctgtcggcgctcttctggctcccgccctttgccgggtggggcggcggcaaggagggcccggatccgggcgacgagttcggaggtgagccccccctccgtattgcgagatctcggtcccgttcgcccgtggtcgccgagtggtgctcgatctgcgtttgctctgcgctgggagctcgttggtggacggtcggctttggatctggatgtgtgcgatga

SEQ ID NO: 34426 - DNA, 369 bp, Zea mays
  Peptide Sequence Number=SeqID_76205
atgggtcggcgcgagacggagcacgaagaggggagaaacagcaaaggagaaacccgcggcctccgtgttgtcctgcgcccaggtcggcctgaggtcgggcgaggcggaggctcctccgaggtcgaggctgagtccgggcccgggggtcgggcgaggcggagtccatcttccgaggtcaaggctgagtccgagccctggggtcgggcgaggcggagtccgtcttccgaggtcgaggctgagtctgagccctggggtcgggcgaggcggagcttcctatggcgcctgaggctggacttagctgttgtcagcctcactctatcgagtggcacagcagtcgaagcggggcaggcgacgctgttttcccgtcag

SEQ ID NO: 34427 - DNA, 882 bp, Zea mays
  Peptide Sequence Number=SeqID_76206
atgggcgcgattaaggtcaagactcagtccactcaagggacacgatctcgcctcgcccgagcccagcctcgggcaaaggcagccgacccaggaggattcacgactcgcccgaggctaagtctagcctcgggcgccataggaagctccgcctcgcccgaccccagagctcgggctcaacctcgacctcagaggacggtctccgcctcgcccgaccctagggttcggactcaacctcgacctcggacgacggactccacctcacccgaccccagggctcggactcagcctcgacctcggacgacggactccgcctcgcccgaccccagggctcggactcagcctcgacctcggaagacggtctccgcctcgcccaaccccagggctcagactcgacctcgacctcggaggagcctccacctcgcccgacctcgggctcggaccgaccacgtcacagggggcgccatcattaccctacccctagctagctcaggctacggggaacaagaccgacgtcccatctggctcgccccgggctctcgtacgagaaggttggccgcgcgggagaacgggctggcggacagtctctctctcccccccgcagacgcttgtaaccccctactgcaagcgcacctgacctgggcgcaggacaacatggaggccgcgggtttcccctttgctgtttctccccccttcgtgcttcgtctcgcgcgcgacccatctggactgggacacgcggcgacaatttactcgtcggtccagggaccctccggggtcaaaacaccgacagaaggcctctgtccaatagcgagtataggagtgaatgttggtgttggtgctgatctggcgccaatcactaggataagtcacgagaccaagaactaa

SEQ ID NO: 34428 - DNA, 582 bp, Zea mays
  Peptide Sequence Number=SeqID_76207
atgtttggtttacaggtggtgatgaagatgatggttatgattatgcttatggtaatggttgtccacattgcaaccactgctcaggagaggatgaagccgtggaggaggactgccaggagttccaagagtacgatgagttctaggcgtgggagaagctttttggaaaaacaggccaagcgcggaccgtctgggcccttgcggcggaccgtccgcgacacaagaatgaccctcggacagaaccaatgcaaaaacacaagtttccactacggactgtccgaaggaaaagcaaagaccgtccgagccctcgcgcggactgtccggcctcaggcgcggaccgtccggtcgccgttgatctacaggggcggaccgtccggacctggctcgcggaccgtccgcgctcagcagaatggcccaacggctaggaagtggttggtggctataaatacaaccccaaccacctccattcacttcatccaagcattccaaccttcaacattcaatacaagagctagcaatccattccaagacacattcaaagcctccatctctccaagtttcacaattgagaaaagagatcattag

SEQ ID NO: 34429 - DNA, 180 bp, Zea mays
  Peptide Sequence Number=SeqID_76208
atgtgcataggacccacaaaaaaatcaaaggcaacctacaacgttgtcttgaagaacgtcgtgctgctaccaaagccagtggaaaagaaaggtgaggcaccagcactgcgagtgttgggaacaaaggcaaccttctacaattgcaccatcgaaggcggccagggtgctctgtacgactag

SEQ ID NO: 34430 - DNA, 828 bp, Zea mays
  Peptide Sequence Number=SeqID_76209
atggaagcggcgccgggcgtggacctcgacggcatggagacctaccatggccacccctataggaacatctcccatgttgccttcatcaagaagtctctgagtcgcgtggtcagccccaacggctgggtagcgtggaacatgaacaaggtcatcgaggataccacctggaccgtcgtctacctcaaatatggcaacgacagcgtcgttgccgacacgtccaaccacgtcaagtggctgggcttccacgtcctaaacgccaccgaggcggtcgcgtacacggtggacacgttcataaacgcgagcaagtgggtccctgagcctatccattttatgcgatgcataggacccacaaaaaaatcaaaggcaacctacaacgttgtcttcaagaacaacgtgccgctaccaaagccaggggaaaagaaaggtgaggcaccagcactgcgagtgatgggaacaaaggcaaccttctacaattgcaccatcgaaggcggccagggtgctctatatgaccagacgtgtctacactacttcaaagcatgtgccatcaagggaaccatagactacatcttcggatctgccaagtcattttatgaggaatgcaaaatcgtttcggtgttgaaggaggtggtggcattgccaacggcgccaccggagcaggaccggtctagaaatcccatcaaaatcgcccaggcaagagcgggttggcattcaagacttgcacaatcaagggggaaggagaaaaaatttacttgggcaataccctttatcgggatacactacatctcgggggagtcgtggaccccgtccctaccacccgctgaagaataa

SEQ ID NO: 34431 - DNA, 2649 bp, Zea mays
  Peptide Sequence Number=SeqID_76210
atggcccacccgccattgattctagggataagacgcaagggggccgacggggtgctcatgggccggacccggaaccgaggaggcggttgtgccgcccctgcgttctcctactcgttagagaccgagacctcgatcttctccaccacggcggccgaacgccgagtcccctaccccgtcgcgagaggtgtctcgaattcagccgccctccaggcccatccacattccggaacatcagtgatgaagaacgtagaccgaccaccttccaatccaaaacggatcataatccagtctactcaggagtgcttcagcgttgacataccccgtgctccggcggggactgttagacccgaaacaaggcatgttgctgatgaggatgatgactttataccattatccaagaagcgtaacttggacgacagccctgggaaagttttgaagaagcagaggctgaacgtcagatgcaacccccaagatgtgttagtaagcatacagatattaaatgacagacagcaacaagcaattgcacgtaggggattttctagtattcttgatatgagactggacgcactcggcagcagatcacacttagcttggctgatggaaaagctccaccacaatgacatgacaattcgagctggccctggaaaggagctgaaaattacaaaggatacggtgcacctaattttgggtttaccgaatgctgggggaggaactgcattgggcatcgatgaagttgttgctgccaacaatttgagagctgaacttggtctatcgaaagaagattttggggttacagctcttcaagatcgtttgaggaaaggttctgacgatgatttaagcatcagatgctttttcttgatattgttcaataggttgttgttccctactgccagctggggaataacaaaccatgaggttcttttaaccgaggagatggatagtttccaccagatggactggtgccagcttattttcaatgatttatgccaagctgccaagaagtggcataataggagcgttacgaacgtttctacaaccatctatggatgttccatcgttattcttctgtattatttggatcatttgcatgactcagcggcaccccagaacaaacgtggaacaccacaaatcaaatactttgatagtaatattattcaagccctgacaagagctgacaagggcaagatacgcaaaggagaagaagcatttggacattgctcgcataagaccaggaccaacacttttgatgttcctcgtcctgacccatctggacagcactcaattcacatcgaactcccgctcatcagggatttgatatcaagcaagcttaatcagcttccatcccgccaccgcatgggtttcatagagaagctgtcacattttgatgcggaggttggtaaggcgtgttcagttattaaacagactcttcagcagattgttgagaaacaattcaatctatctgatgtttttggcgagttaattgatgaggtcctccgtgccgaggcgggtgacaacgaagatgcttatgatgtgcagaaaaccacatcaaaatcagatgatattcttccccagacagctgaaggatgtacgtgtccggcccccccaactgtacccaatatgtctactccagtttctcagctggatacgcagtttacagacacacagggtaaacatggtgacggtggcaagaacatgccgaccaatacaaacgtcactcctaaagcaacaccacacatggatcctgacgcgccgatatttgatgcgactccgcaaatcaagtctactggcggcgtacaacaagtggcagaaacagacttgcctgacagtggtccatgctttgatcagactccatctgaacatgtttatgttgaaaccgatccagctacaaacactccacaggttggccaggcttctcttgattcggagatgcaaactgtgttagctctacgcgaatatttgtgtggtctgcaatctgacaccggcaggaccataatagattatggtgaatattcagcgacatgttctgacatatatgaatcttttgccgatgggaagtgtctcgacaatgtattcatgcagtgtttcatccaatgtgttattgatgatgcaaaaaatcagcagacttccatgagttcgaacagtttggttcttgatgttaatgttgggatcatggtccccatggtaagcagggggcattggacattgtatgttgtcaacaaggtcaagaagtgcattcatattttagattccaacccatatggaccaacacttggtggaactacatggaaggactatcattttgcacatttgggctcaggtggcagaaagttaccatgggctaaggttattatgagcagattaaacaaagcaatacaacatgtacggcccagtacatgctttcccaagtttggtaacttcacaattgacttgtgcccaaattgtcctaacatggcagctggatcaaatgactgtgggttttatgtcatgggttacattctattttatcaatgcgatgaaggatctttgcggtcagacatagaagcaggcaacaccagtgagatacggtctcttgcgctgcattacatcacattccacccgaagaacaaagcattatcgctgctccaagacatccaaagattcaaggtctaa

SEQ ID NO: 34432 - DNA, 758 bp, Zea mays
  Peptide Sequence Number=SeqID_76211
cgtggcgtgcctggcgtgggcgcgacgagttcggctacggctcccgcgtcgcctacttcatcttcggcacctgcgacgacgacctcgccaagctgctcgaggagtacgacgaggctaccaagaaccgcctccagtcgctcaagatccggtatcccttctatgtatcccttctaaattctaaaagtaacgagcagcagaagaagatctggctggacgaacaggcgcgctgccgagattgtgttggccagcatcgcaataggtccgtcagaagtcagaacccatgtcttgttatcaacaatgataggaataaggaagcaaaaggatatagacataaggttgtgaagttttgggatctactcagcctagtgtacaataaagaccaagcaaatggagagggtgctaaaacagcagctgaaagttcaaaggaaatggcaaaagagaatgataccggaggcaaggatgctccatattctgtatcttcctcgagtagtttaaaaagacaaagatcagatgattcatttaactctatatggtgtgataagtttgacatgcttacatctgcattgaaagatgatggtccaaagctaccctcttccgctgaagttctcgccgcattacaagaggttgaaggacttgatgaagacacagaacttgagctttatgacatcctcacctctaatgcacgcaagtttgagtcaatgatggcactcccaatggaaaggaggaagaggtggcttatgatgcagctaaggaagtga

SEQ ID NO: 34433 - DNA, 831 bp, Zea mays
  Peptide Sequence Number=SeqID_76212
atggcgcctcccgttgacatggtcggtccacgccctaggttgggcgatgtggaggctcctccgaggccgaggtcgagtctgtcttccgtggccgaggtcgagtccgagcccctgggtcgggcgaggcggagactgtcggctgaggccagggctgagtccgagccctggggtcgggcgaagcggagggctgagccagagtctgagccctgggtcgggcggagcggagttcaccgtcttcaggggctgagcccaagggctgagcccaagtccgagccctgggtcgggcggagcggagttcgccgtcttccggggctgagcccgagttcgagccctgggtcgggcgaagcggagtttcctacggtgcctgaggccgggcctgactgcctgtcagcctcactctgtcgagtggcgcagcagtcagagcggcgcaggaggcgctgtccttctgtcaggctggccacctttgcattaaatgcccctgcgatttggtcggttggcgtgacgacttggccagggttgcttcttggcgaagactgggcctcgggcgagccggaactttgtgctgatgggggttaccagctgagaattaggagtcttgaggcgtggcgtgcctggcgtgggcgcgacgagttcggctacggctcccgcgtcgcctacttcatctccgacacctgcgacgacgacctcgccaagctgctcgaggagtacaacgaggctaccaaggaccgcctccagtcgctcaagatctggtatcccttctatgtatcccttctaaattctaaaagtaacaagcagcagaagaagatccggtatccagtcgctcaagaataa

SEQ ID NO: 34434 - DNA, 684 bp, Zea mays
  Peptide Sequence Number=SeqID_76213
atgccatttctgaatgttattcttgcactctgtgtacaagaaccagttcaacaggtcaatgaaggcgatagtttggatgatggaaatgatgacatggatgagcaagctagatcttcacaacacctgtcctcatcaacagctgagatttccttgcccccatctgaggatagtgatcgaatgagtgggcaagtagagaatgatgatgggctgggattagttcagagtgacactccagttggagcagcagatggtgacagtacccagatcacctcgactttgactactttttcggcttattgtcataaagatcctaatattcatacaaccaatgaggcccagctatatgaactggtggagcctaatgtacatccacaagcattagcttcctcttctcaggctcttaaagtcccttactctcatcagggatacccttcagaaaatccagaagcagataatgttgtgcaagtctacaggatgccagattctaatgttcactcacaagttctcccgtccacatctgagcttccttccggtggttggggagaaagctatttatcatctcaagaccaggcttgcagctacatgaccaacattttgaagacaaccaatttgtacataaggttctgcattttccttgaggacaaccaatttctccttaacggaaatccatttcttcaatcataa

SEQ ID NO: 34435 - DNA, 576 bp, Zea mays
  Peptide Sequence Number=SeqID_76214
atggtgttccctgttcctgcagaatttgcttgttcgatatgtcgggcggtgattaaagaaccacttacgactccatgtgcccacaacttttgcaagacttgtttgcttggggcatatgatagccagtcttctgtaagggaaagaagctgtggtggtcggactctaagggcacagaagattgtgaagacgtgcccttcctgcccaactgacatctgtgacttcttagagaatccccagatcaaccgagaaatggagttgattgagactttgcaacacaaggctgttgaagaaagcaagatggttcagatgatgctgaggaatgtggtgatgtctgttgatgaagatgcccgcaaggttgatgctgaggctggcaccaacggtggcaagaggatgaagagcagtaatatcgtggaagagctgacacagctcctaacagagaccggaggcatgcaggggcaattaaaatcaaaatgcagtgctacctcagaatggactataggagagcagttagaatctggcatcctgaagacttgcacaacattatctgcttctggattttctaaagggtatccctga

SEQ ID NO: 34436 - DNA, 321 bp, Zea mays
  Peptide Sequence Number=SeqID_76215
atggctcggggagcttcactggagttcaaggatgtcgtaggtacaagtaatcgacaaatggcttaccgtgtggctcggtctacgtgcgacggcggccgattgaagtccggcgacgtcaatccagcgtctccggccataggtgcagatattaagccagggccttgggtaacacctggggtgttacaacgattctccgtcagacgtccaagaccagtcagtgctggtgtcggagtccagttccccgtcaacgaggaactggaggtcattgtaacaccccgggatccacaaacaccccagaatgctactaaactacacatctaa

SEQ ID NO: 34437 - DNA, 468 bp, Zea mays
  Peptide Sequence Number=SeqID_76216
atggtgaaacgtaaccttagatacgaaacgtggctacacactactctctcacatgaattgaaacgacaattatatcgccgaacacaaagcgggacttttgacgcctctttgctcctcgaagttcaagtaaacgtcgatccaattctcgattttaatatatttaaatgctcatcggccacatttccattcatcgcaactcagaaaaaaccgtggcgcctagctttacccatgtcgacatcatcgagtgattcctctgcttcttttgtctcccattcctctagccgtgaaccaaccccagagtgggatcctatagcggcatatgagaaacaggcacctttgcactgggatgcagatggatgggactttgaggttgcattggaatccaatggcgacctcaccgacggggacgacctccagttcctcgttgacggggagctggactccgacaccagcactgagtggtcttga

SEQ ID NO: 34438 - DNA, 432 bp, Zea mays
  Peptide Sequence Number=SeqID_76217
atggcgcagagacttacccggtctacgtgcgccggcggggttccgaactctggcgagcgcgattacgcctttccggtggcgagggtccctggttcaagctctggcaagcttcacgacctcctagggaaggagggcaggaaacggttcagccatggtggttgtcctcgggcggctctggcgggtcgcggagaggtcgcaggagctaggggcgagctccggggagtttggcgtgggacagaggatgcaacggggaagatagtcgggcactggggcgggctttatagccgtggcgcgggcgtggtcacgggcggccgcgggcacgcgggggttcgtgcacgggcgtgctctgagcgcgcccccgagtgtcagcccgcgtcgaacacgtgtgtgtttgcttctgccatggttcaacggccgattggagcaccttag

SEQ ID NO: 34439 - DNA, 294 bp, Zea mays
  Peptide Sequence Number=SeqID_76218
atggcgcgggcgtggtcacgggcggccgcgggcgcgcgggggttcgtgcacgggcgtgctctgagcgcgcccccgagtgtcagcccgcgtcgaacacgtgtgtgtttgcttctgccatggttcaatggccgattggagcaccttagcgtgcagatcttggcaaaaccactatggggtgcattagggttttgggcaatttctcccccttctatgtgcatggtaagccaaggtaaagaagaaggcgttgaggcggatctccatgagttccaggacttcgacgagttcgaggattag

SEQ ID NO: 34440 - DNA, 1854 bp, Zea mays
  Peptide Sequence Number=SeqID_76219
atgccgtacagcgttccattggctgcggggccgccatgcccccagtggcgctgcccggcaaggaggctgggatttggggattatcagcaaagcatcatggctcccgacgaagcaggggctacgaccaacgcactggacgttgctggggggccgcctgatgctggcgtcggctgctgcctgggggcagcggcagagcttatgattgtcgagacctttgataccagattgcgtgttggttctgactcccgaatcctgggcccatgtaacctgcttgttgggccagcttggcccgtctccttcatcgtactcctggagcgcctggcctgcaagcctgaggcgtctctttggaatggtcgatcccaacctttcccccttcaccgccggacgatggccgcctctcgccgcctcgcgcggaagctgccgtctctgatctcccggtatgagcgcctcatctccccggagactgacgcgcctgaactcaccgaagcccccaccacctccgcatccatcccgtttgacccctcactccctgtccttccgctcgccgtctcccacctctcgccgcctaacccgctcccggtgctcccctccgctcacgcttcctcccccgcctctctctttcgtctcctccgccgagcccgccaccacccccgactcgtggcgctcgacctccacatcctgctggccgccgcagacgcgtcctccgctttccgacccgaccacagcctcacgtccctcgtcgccgcccgcctcgcggcttcccgccgcctcccttcgctccagcgcctcctggagctcgtcctcacccgcccctgcccctgtgccgacgactccatctttgcatgccccgagctcctccccaccttccgcaaggccatcgtcgccttcgccgcctccggcgacatcccctccgcatcgcatgccctcgcctctctccggcgcgtcgctgactccccactacccgccgagttctacaacatcatcctccaagctctctcccgcctccgtcgccacgacgatgccattcgcttctacggcgaaatgacctccgtctaccgcgtcgctccggatgtccacaccttcaacatactcatcagtagctcatgccgggtggaaggcgtagacgccgccatgcggtggtttggtgagatgcagcgccggagctgtgcaccgacggtcgttagtttcaacacacttatgcgtgggttcatcagagaaggcaggtataaggagggaacaaaggtggcacgcgagatgcttgagcttggggttgggctgtccgttgcgtccatggagattttgatcggtggattgtgccgtggtagcaaggctctagaggcggctgagctgtttgttgagtttttgggggatggggtggtgccagaagggtttgattgctttgaagtcgttgaggctctttgccgtggtgggaaggtggacagagcagtggaagcagtagacatggtattagagaggaataccaaatgctgtatgagtgcacctgctggcgccacagttttggagtgcctgatggaggcagggaagctggatgaggtttaccggttgatgtggagaatgattgatcaagggattgttccggattcaatttcttgtaactgcatctttgaggcgctttgcgaagctgggaggacagctgatgctaaccagctaagggtgttcgctaaggagaagggttttgaggctgacggtgaaacttatcgtatgctggtgcaaggatttgggaggcaggggaaaagaaaggaagggaaggctgtgttggatgaaatgcttgatttaggatttataccaaatattgcctcttataataggcttcttggtggcttgcataagtga

SEQ ID NO: 34441 - DNA, 987 bp, Zea mays
  Peptide Sequence Number=SeqID_76220
atgggcagcaacactggtggtgccagtggtggcttctaccagcccttcaacagcaacttagctggtgcaggggctagcactggcatccaaaactttccaggtgtacggctgcgaggtctcccttttgattgcaatgacattgatatctgcaagttctttgtgggactggacatagtggactgcctcctggttaacaagaatggtcgcttcactggtgaggcttttgtggtcttcccaacagctatgcaaacagaatctggtctgcatcataacaggcagaacatgggccggaggtatgttgaggtgttcagatgtaagaagttggagtactaccgtgcaatagccaacgaggtgagccagggtggttactttgagtcggagtatcgccgctcctcacctcctctgaggccccctaagaagcctgctgaagacaagggcagcatggagtacactgaggtgctgaagctccatgggcttccctactctgcgaccactgaggacatcatcaagttcttcctggagtatgagctgacagaggagaatgtgcatattgcgatcagctcagatgggaaagctaccagtgaagcctttgttgagttcccaacagctgaagttgccaagacggcgatgtgcaaggataagatgactatcgggacgagcaggctgctgcgctcttgggagagcagcccgtctaccatgccgtacagcgttccattggctgcggggccgccatgcccccagtggcgctgcccggcaaggaggctgggatttggggattatcagcaaagcatcatggctcccgacgaagcaggggctacgaccaacgcactggacgttgctggggggccgcctgatgctggcgtcggctgctgcctgggggcagcggcagagcttatgattgtcgagacctttgataccagattggtaggagttgcattccctataccgatgatatgtttccgttgcaacgcacgggcatccacctag

SEQ ID NO: 34442 - DNA, 486 bp, Zea mays
  Peptide Sequence Number=SeqID_76221
atgggcatggtgccggatgcatctgcggccggtggcaggaaggtcgagctggatggggacatgcgatggacatcacaggttggcccctccagtgatccatctcaaacactagccagggctagaataatgaacgatatgaagatcagcggggacgacgctaagtcgagcaatggcgaagcggcccgtggtggcagtaacggtggagagaagcagggggatgaatccaacggtggcgggatacttagcgctgtggcttccaggattggcgtggtcgtgtccagcgccaacggggaccgcagcggcagcgctgaggatggtgccaagacgagcgctggcgacgctggtcacggtagcaagggcgaggagaaggggcgtggtgtgaacggtggtagaatagtcgagcagatcatttccaatctgccctcagatgatcaggcgcctgatgccgatgaagcttccttgctcatcgccattatcgaagattag

SEQ ID NO: 34443 - DNA, 601 bp, Zea mays
  Peptide Sequence Number=SeqID_76222
caaggccagctacggcacatccccgcgcagaagcttgggcctggccacatcagctgagtatcccggcggcggaatcttccggaagctgctgcacagctcgccccctgcgccgccgcatgtgtcaggagcaatggaaacagaggaggaggtgaaagatcgggatgtggcaggtggtgagcaagccaggattctgagcgccatggccaccaagatcggcatggccatgcctggtgcaaacagtgacgacagccatggcggcagcggggacgacgctaagtcgagcaatggcgaagcggcccgtggtggcagtaacggtggagagaagcagggggatgaatccaacagtggcgggatacttagcgctgtggcttccaggatcggcgtggccgtgtccggcgccaacggggaccgcagcggcagcgctgaggatggtgccaagacgagcgctggcaacgctggtcacggtagcaagggcgaggagaaggggcgtggtgtgaacggtggtagaatagtcgagcagatcatttccaatctgccctcagatgatcaggcgcctgatgccgatgaagcttccttgctcatcgccattatcgaagattag

SEQ ID NO: 34444 - DNA, 336 bp, Zea mays
  Peptide Sequence Number=SeqID_76223
atggagctcacctcggacggcgacggcgaaggtagagtacgaacaaggcgagctccaacggacgatggggcaccaaagcagcttcggaaggtagacgagggcgcatctggcgattactggggcgaggaacgaggcaacgggagcgccagttcctatttttgggagatgtgggcaagatggacacgcacatcgcggggaggcgcgactaacccccttaacaggagtgttgatatgcatttggtgaagatgttgtcgactctgatcttgactgatttggaggagttggaggttgacaaatggacaggtgcaagagggaagaatagcgagaaaagctaa

SEQ ID NO: 34445 - DNA, 222 bp, Zea mays
  Peptide Sequence Number=SeqID_76224
atgaagatactaccgactctgatcttgactgatttggaggagttggaggttgccaaatggataggtgcaagaggaaagaatagcgagaaaagaactagcaaggtgtcaaagaaggggggagcagtcaatgatgaaatagatgtggcattatccccgaacagggatggaaaagtggaggcttcaaagggtaggttcaatgtaagcatgtgggcaagggcatag

SEQ ID NO: 34446 - DNA, 165 bp, Zea mays
  Peptide Sequence Number=SeqID_76225
atgtcgcgtcttctcgactgcagaaccagtgcaacgattcgaggcagccccgcgcgtgacccaacagtgccaactaagtgcgacgatcacggggatcgagaaaggggatatttcgaaaaaggatccttctcagcgaaggaaacgggcctcgggccctcctactga

SEQ ID NO: 34447 - DNA, 897 bp, Zea mays
  Peptide Sequence Number=SeqID_76226
atgaccgcgtcaaaaaaaaagggatcgggaaaggggatatttcgaaaaaggatcctttctcagcgaaggaaacgggccccgagccctcctactgatcaggggttcgaaggttgcgccctccggggttcggcaaccgccccagagcactcgggctccgagccctttaccgatcaggggttcaaaggctggcccctcggaagggttcgacagccgcccagagcatgcagagttagggatgaccctgggtacgtccgttacatggccgaggctcgggctatggtcctaaggtaccctaggacatttctgagaccagcgggaatgatttgtaatgtaatcccaccggagggtggcatcgagccctcggaccctatcgaatgggtccgggtccagcaaatcacctgcaggtacttttggagcgcgcctatgggccactacccgacccttatcgaacggggctcgggcgtccactcggatcacccgttagcaactcactggaaacaccatgttcggtgccctccgagggaaaatagcgctattcaccccgttccgactactgtgccaaccaccagggtaaagctgagtcacgacctcccccgagttcagcctcgggcgcaacagggagctacgcctcgcccgacctcaggcctcagcctcagcctcggcctcggcctcggaagaaggtctccgcctcgcccgaccctgggcctcggcctcgggaggagtcacaacctcgcccgaccccagcctcggcctcaggagaagtcttcgcctcgcccgacctcggcctcggaccgactacgctacaggggatccatcattaccctaccactagctagccaccccttgctacgatggaacaagaccggagtcacatcaaactactccgatagcaggtaa

SEQ ID NO: 34448 - DNA, 480 bp, Zea mays
  Peptide Sequence Number=SeqID_76227
atggcattaactccttggcagggcaagcgacacctccggcaggagaagcgggtgccgtttcgcctccgtcatgatgatcgcgtcaaaaaaggttcgaaggctggcccctcggaagggttcgacagccacctcagagcacgcagagtcagggatgaccctaggtacgtccgttacatggctgaggctcgggctacgctcctgaggccactagccgacccttatcgaacggggctcgagcgtccaatcggatcacccgctagcaactcactggaaacaccatgttcggtgcccccgagggcctcggcctcagcctcggcctcaggagaaggtcttcgcctcgcccgaccccaggcctcggcctcgggaggagtcacatcctcgcccaacctcagcctcggcctcaggagaagtctccgcctcgcccgacctcaggctcggaccgactacgctacaggggatacatcattaccctactcctag

SEQ ID NO: 34449 - DNA, 621 bp, Zea mays
  Peptide Sequence Number=SeqID_76228
atggccgtgatggattcaacatcggaaaagatgtacctctgccaggtaattttacttaacttgacaaataaaattggatttttaaggatccactttagtaagcatttctgcaaaacagagtctttgattattgaaaagccttaccttgactcccatataaccagcatacccttgagagtcttttctttagtcggtttatgtaatcgcttccgcatttctttatctccgatgttctgtaatgtctgcaagacgggtgagacgttcctggatcagcttgctgatcgagacttagcacttgactgggccgtacagtctcgtttgctagtatgtgctaaggaagcaagggctcaggcccgaattaaagaacttagctcaactgtcgacaacctgcaggtctactgcaatacgttgcatgaggaagtccatatactatactcacaattacaccctagtgtgcctacacaccctgctgaggcggaagccggaccatctcacgttgcgggacgcgcgctgggtggggagttagacctttttgagccccctccttctttgaggttggttgatgtctggactcccacacctgacgatgaggccgccaagagtaatggaaagcaggaataa

SEQ ID NO: 34450 - DNA, 336 bp, Zea mays
  Peptide Sequence Number=SeqID_76229
atggccgtgatggattcaacatcggaaaagatgtacctctgccaggaccttgtcgatgtaggcctgctgaccgaggaccctttaactggtcacatgcctcgtcatgggtctactgcaatacgttgcatgaggaagtccatatactatactcacaactacaccctagtgtgcctgcacaccctgctgaggcggaagccggaccatctcacgttgcgggacgccgcgctgggtggggagttagacctttttgagccccctccttccttgaggttggttgatgtctggactcccacacctgacgatgaggccgccaagagtaatggaaagcagggctaa

SEQ ID NO: 34451 - DNA, 441 bp, Zea mays
  Peptide Sequence Number=SeqID_76230
atggacgccgtcgggccacccgtctcctatctcccctcgccctcatcctctggctgctgccccttcctattcctggtggctgagtcttcttccatggatgttggccgtgttgccctccctggtgctcacctctgccccctgcgttggatgattatcctcatgcccggccgcggtacaacagcaacagccatgaaaccccatcgtgtcacgccctcgacgtgttcgacggaatatcgcagcacgtgccgacccgatctgcagccctggttgcgaggacgtcgaaccccgctaccgtcgacgttgtgcctcgcgcttcaccaatgcgatgaaatgtctgagcgaatagacgacatgcgacccgagtttgattctgccaggttgtttgatgtgtattttactcattgtgatttagttgatgatgtgtttgtatgtgcgaggtga

SEQ ID NO: 34452 - DNA, 1263 bp, Zea mays
  Peptide Sequence Number=SeqID_76231
atggacgccgtcgggccacccgtctcctatctcccctcgccctcatcctctggctgctgccccttcctattcctggtggctgagtcttcttccatggatgttggccgtgttgccctccctggtgctcacctctgccccctgcgttggatgattatcctcatgcccggccgcggtacaacagcaacagccatgaaaccccatcgtgtcacgccctcgacgtgttcgacggaatatcgcagcacgtgccgacccgatctgcagccctggttgcgaggacgtcgaaccccgctaccgtcgacgttgtgcctcgcgcttcaccaatgcgatgaaatgtctgagcgaatagacgacatgcgacccgagtttgattctgccaggttgtttgatgtgtattttactcattgtgatttagttgatgatgtgtttacagtgagctacatggctgagcgcattgtaggtcaaggttcttttgggattgtcttccaggctaagtgtttggagacgggtgagactgttgccataaagaaggttcttcaggataagcgttacaagaaccatgggattgtgattagttacttcattgcaaaaaaaattaggaacagtattaatgtgtgtacccattgcttgaagcttcatatcgatggagctcgcatcttccatgcgtctgcggcacttggagttcttgtagatagactcgtgaaagctgctgattcagttttggtatgcctatcgaaagggttaggcgcacccgtcggatcagtgattgttggttcaaaggccttcattgacaaggccagaattctccggaagaccctaggcggtggaataagacaggtgggagttctttgtgctgctgctcatgttgtcgttcgtgacactgtgggaaagcttgcggatgaccacaaaaaggctaaagctttggcagtttgggtattgaagcttttatgtcttgttgggttcattttcttagagggactgaagaaaatcgagcagattacagtggactcagcttcggtcgagaccaatatgttcaagctctgcaaggtgaggtctgttctgtttggccagaaaggcatcccctacctgaacacctacgatggctgcaccatgcgctaccctgaccctctcatcaaggccaacgacaccatcaagatcgatctggagaccaacaagatcatggacttcatcaagttgtatttgctctttcatggactttatcaagttatatacttagttaggctcaatgttagcacaaacagttga

SEQ ID NO: 34453 - DNA, 432 bp, Zea mays
  Peptide Sequence Number=SeqID_76232
atgaacgaattaatgtgcatgaaaatgaaacaagattgcagcaatataggtaccttgaggctgctgcgccgccgttcccgtccccgtctccgagccgtgagcgcccgccacgccgtcgccgagcccgagcccaagcgccaccgtctccgagctgggcgcccgccaggccgcgccgtccccgagcccaactccgccgtccccgtccccatctccaagcctctgatccctgcctttgttgcgatctcaattttgattaatggcatcggcggaatgcctgaatcggcggaccccaagaagagattaagtcctgtagtctaccacctcccgttatttgtgggcttcaccgatggctggaaacatttggtgatatcaaacgaccttcgggctgaagacgtctacgagcttgttaagaggccagacgatgttgagccg

SEQ ID NO: 34454 - DNA, 733 bp, Zea mays
  Peptide Sequence Number=SeqID_76233
atggaaaaagagccacttgacatggttgagagctcagttcgagtcatcgagacacatgttgacatcattcgcagtctagtgactgatggggttgtggatactagtgaaccggaatcagtgtacacacttaagaccactttgtttcaaattggagatgtatgcgacatgcttgagaagtgtgctctgtccatcaaaaagtatgctgactccaagagggctaaaattattcaagatgaagccctgcaatatgctgaagatgatgaagctgcagatgatttggaggaactcccaagcccagatctccttactcaagccgacatattggaaaaatattttggaattgaagagaatgtattttgtatgaacctcttagagagtgccaagtcaatgaactatcttcgaaatggcatcggcggaatgcctgaatcggcggaccccaagaagagattaagtcctgtagtctaccacctcccgttatttgtgggcttcaccgatggctggaaacatttggtgatagcaaacgaccttcgggttgaagacgtctgcgagcttgttaaggggccagacgatgccgacataagagaagagaagcgcacagatgaagccggcgctttaaattttggaccacatcccgacagagtacccgctcaccctcttctggcccataccagccgcgccgacctatgccaggagtccctaatgtcacggatgcgtcgcgccctccagaaatacg

SEQ ID NO: 34455 - DNA, 707 bp, Zea mays
  Peptide Sequence Number=SeqID_76234
atgaacccgagcgccgtcgtccccgtccccgagctcgagcgccgccgtccccgtccccgagcccgagcgccgccgtccccatccccgagcccgagcgccgccgtccccgagcgcccgagcaacaccgtccccttcaccgagcccgagcgccgccgtccccttcaccgagctcgagcccccgccgtcctcgtcctgagaccgagcccgagcgccgtcgtccccttcaccgagcccgagcgcccaccgtcccccgagcccgagctcgagccccgccgtcctcgtccccgagcccaagggctgccgtcacggtccccgagcccgaagcgccgccgtccccaagctctttcttcttcctctcgtaagatggaaaaagagccacttgacatggttgagagctcagttcgagtcatcgagacacatgttgacatcattcgcagtctagtgactgatggggttgtggatactagtgaaccggaatcagtgtacacacttaagaccactttgtttcaaattggagatgtatgcgacatgcttgagaagtgtgctctgtccatcaaaaagtatgctgactccaagagggctaaaattattcaagatgaagccctgcaatatgctgaagatgatgaagctgcagaagatttggaggaactcccaagcccagatctccttactcaagccgacatattggaaaaatattttggaattga

SEQ ID NO: 34456 - DNA, 271 bp, Zea mays
  Peptide Sequence Number=SeqID_76235
atggagaagcctgctggcggccatggagcaaagagcagggaaggtcgcggccaagaggaggtcaggggcgccgatgtgctcccagggagctcctgctcctgcggcaagaagcagagggaggaggagcggccgccatgggagggagcttgctgccggagaagaggggcgccctgctgcagccgtggagaggaagggagagctgctgttgccgtgggaggactcctgcgcgaggtagaagaaggcaggggaaatcggctggagaagagagaag

SEQ ID NO: 34457 - DNA, 348 bp, Zea mays
  Peptide Sequence Number=SeqID_76236
atggagaagcctgctggcggccatggagcaaagagcagggaaggtcgcggccaagaggaggtcaggggcgccgatgtgctcccagggagctcctgctcctgcggcaagaagcagagggaggaggagcggccgccatgggagggagcttgctgccggagaagaggggcgccctgctgcagccgtggagaggaagggagagctgctgttgccgtgggaggactcctgcgcgagatgcgccatgattacgacagcatggtaaaggactacgacgtggcatatttggggtcgtcggcgtaccacggcgacaccggtgatccgaccacattgcgcggctgtaggcgcggttga

SEQ ID NO: 34458 - DNA, 567 bp, Zea mays
  Peptide Sequence Number=SeqID_76237
atgacgactcaaggaggtttgcagccgacaagcaatgaagctaatatgtgcaccaacgacaatggtagccaacttggtacacggattgtggacgagattatggccgggaagaacgtcttctttgatcttcctgacaagttgactgtaaatattgataaagcttatgttgccttttacaacgtggtgtacataaaatcgaaacttggatattctgggagggacttcttgttttacaagaaacgatgtggcattgatcgatccaggctattggcacttgattacatccaccaagaagaggccatgctgtctgataacatggatgagagaaaaataagttttgtgctcacaaaagatccacccagtgatctagaggtaagcataactcccatcaagcgtccaaggcagcgaacaaatgttgatgaagaaactatagaagtgtcgattgatgcatataaggagtggcttgcaatactacaacatgataatccagaaatggatttaatggatgacttcagggaggatacgatcaaaacatataaagaatggttaaggcacgaatcaagctga

SEQ ID NO: 34459 - DNA, 567 bp, Zea mays
  Peptide Sequence Number=SeqID_76238
atggagtgggattctatcaaagagtattactatcatacactggaggaaaccaaagactatgaaccatgtgcaacagacttcaacccaagaatcaccaagcattgtgattttaggggcgagggagtggaaaaatggagttgcttgcgatttggcagagggaatttttatcgggagtgttttgctttgagtggaataggaattgagggagctggtggggggctttataggcgagcgcttgttccaggcttcaagggtaagcttcccggtgtcttcttgggcaagtgtccaacacaagtgcctaagtgtaaaatggtggacaaagtacaaatcaaggataaaggaaaaatccaattgaaaatgccttggctcgagcagccaagtttctgctcagtctggaagcaccggactgtccggtggtgcaccggacagtgtccggtgcgccaggctggtttgagcgaagtggccgctctcgggaattcaccggcgacgtacgtctataattcaccggactgtccgtgtaagggcgagaggctccaagttgtggagattcctcgcaaacgagattga

SEQ ID NO: 34460 - DNA, 567 bp, Zea mays
  Peptide Sequence Number=SeqID_76239
atggagtgggattctatcaaagagtattactatcatacactggaggaaaccaaagactatgaaccatgtgcaacagacttcaacccaagaatcaccaagcattgtgatcttaggggcgagggagtggaaaaatggagttgcttgcgatttggcagagggaatttttatcgggagtgttttgctttgagtggaataggaattgagggagctggtggggggctttataggcgagcgcttgttccaggcttcaagggtaagcttcccggtgtcttcttgggcaagtgtccaacacaagtgcctaagtgtaaaatggtggacaaagtacaaatcaaggataaaggaaaaatccaattgaaaatgccttggctcgagcagccaagtttctgctcagtctggaagcaccggactgtccggtggtgcaccggacagtgtccggtgcgccaggctggtttgagcgaagtggccgctctcgggaattcaccggcgacgtacgtctataattcaccggactgtccgtgtaagggcgagaggctccaagttgtggagattcctcgcaaacgagattga

SEQ ID NO: 34461 - DNA, 501 bp, Zea mays
  Peptide Sequence Number=SeqID_76240
atggtggcaacatacttccagctacatcgtcctcacagccatcgtcgaccatactttcgcaaggtcttttcactgcgccctctccccatcaactgcaactcttctggctctaacctatttttttgtctgcctgctaactccgcagcaggacaaggatcaggtgtcgcacaaaacaaggggactgccttcatccgcgagccgtcgctgacaccagagagtcacaaagtttcgtctagcgccaagtgtgatttacagacagcctcacatcagggagccaatctactgctaggaacagagattatcacttctccgcctaacgtgcagacaccatcaggagctgcttacagtgtgctagatgggtctacaaacaagactcataaaagtgttactggaaaaaggtctcgcacatcgccttccaagaaggttgccaagaaactttttagagatgataccacaggagatgacgatgctgctggttccgcagacgttgatgctgagtaa

SEQ ID NO: 34462 - DNA, 297 bp, Zea mays
  Peptide Sequence Number=SeqID_76241
atggcgcagcgcctcattaaaaaaaatgtggacgccctcatctcgactaatccacctggtttcattccaagagaaattacaaatctactggaaaagtctttcgagtggaatgttagcttcaccgaaagcacaattatttatagcactgtttccttccaagtgaatgctataaacgcggaaattgatggtggcaacatacttccagctacatcgtcctcacagccatcgtcgaccatactttcgcaaggtcttttcactgcgccctctccccatcaactgcaactcttatggctctaa

SEQ ID NO: 34463 - DNA, 1269 bp, Zea mays
  Peptide Sequence Number=SeqID_76242
atggggaagaagcggcagcttatctgcctcgcagccgccgtcgccgccgcggccatcctcctgacagcctgtggcgccgaggtaacacagctcggcgccataggctatggcgccgaggaacggcatgcatgtggtctgctggtggtaatatcccccgtcaaggagtggtcaaagaccacagcgataatagagctcggcgccatgatctatggcgccgagctcggtaccacgtcggcgccacgacgtccgtttgtgccaacgcagcacgaccaaaatgcaaaaaattcggcagcgtcggccaagaagtccagcgacgtcaccgagcttcagatcggcgtcaagggggcactcactgacggatcagtttttgattctggctatgacagaggtgacccgtttgaatttactcttggaaacggccaagtgataaaaggctgggaccaaggattgctaggtatgtgcgtcggtgaaaagcggaagctaaagatacctgcaaagatgggctatggcgagcgaggctccccaccgaagattccagcgactctggtattcgacacggagcttatcgccgtcaacgggaagacatctggcggtgcgaatccagaaactgaaagatcagaaggcaacaagctgactgcgcgcctgctgcggcataggctctgcttctgctgcgtcctctccagcgacgcgagctgcgggcctgagcccggacctgtccgttcgctcagcacactgttctcgctccacgcgatgacgagggcaacagtggctataaaacttaaaaggcagaatggctgcagtcccctgacgcagcattgctcgagactgttccacaatgaagttcgtgccgccgagcgcatggaccagtgccgtctgattgaacgagctgttctcctgacgtgtcagcgtaggagtaatgagacaccgttctccctccgctccgcccgtggctttggcgtccacgacgacgcacgggtgacgagaccgctgggagtcagcgacgtagggactgaggacgagctggagatctgcgctctgtgcccgggagcctggagaatgcttgtggcgttgtgggctgtggcgatgtggcccgtgggcctgtgggatgggtgtaattttaacggatattcgggtattcagggttcgtcgaccatcaacatggtggcggggctcgtcgacggtaggctcggtgaccgtgagtacaacgaggagactgtcgccgccgtggagcctgcctcacgggaggttagggtttttgagaaaggatag

SEQ ID NO: 34464 - DNA, 1068 bp, Zea mays
  Peptide Sequence Number=SeqID_76243
atgatctatggcgccgagctcggtaccacgtcggcgccacgacgtccgtttgtgccaacgcagcacgaccaaaatgcaaaaaattcggcagcgtcggccaagaagtccagcgacgtcaccgagcttcagatcggcgtcaagggggcactcactgacggatcagtttttgattctggctatgacagaggtgacccgtttgaatttactcttggaaacggccaagtgataaaaggctgggaccaaggattgctaggtatgtgcgtcggtgaaaagcggaagctaaagatacctgcaaagatgggctatggcgagcgaggctccccaccgaagattccagcgactctggtattcgacacggagcttatcgccgtcaacgggaagacatctggcggtgcgaatccagaaactgaaagatcagaaggcaacaagctgactgcgcgcctgctgcggcataggctctgcttctgctgcgtcctctccagcgacgcgagctgcgggcctgagcccggacctgtccgttcgctcagcacactgttctcgctccacgcgatgacgagggcaacagtggctataaaacttaaaaggcagaatggctgcagtcccctgacgcagcattgctcgagactgttccacaatgaagttcgtgccgccgagcgcatggaccagtgccgtctgattgaacgagctgttctcctgacgtgtcagcgtaggagtaatgagacaccgttctccctccgctccgcccgtggctttggcgtccacgacgacgcacgggtgacgagaccgctgggagtcagcgacgtagggactgaggacgagctggagatctgcgctctgtgcccgggagcctggagaatgcttgtggcgttgtgggctgtggcgatgtggcccgtgggcctgtgggatgggtgtaattttaacggatattcgggtattcagggttcgtcgaccatcaacatggtggcggggctcgtcgacggtaggctcggtgaccgtgagtacaacgaggagactgtcgccgccgtggagcctgcctcacgggaggttagggtttttgagaaaggatag

SEQ ID NO: 34465 - DNA, 330 bp, Zea mays
  Peptide Sequence Number=SeqID_76244
atgaggtgcatgagcataaggagccctcaattggtgacaacaggtgctctcactccacactacctaaaaagaatgaatctcatagcattcaggtggatagggaagatgagcaagaaatggagcaatcaggacctgggtacctccacaagtcgagtaattgagacaaccgatcaagccaaggatggaggcaagaagagactcgaggtaccgagtgcatgggagaaggtcaaggagaccaggaacccaaagccaggggtgaagaagaagacttgcaaagtcaaggatgatcgagttaagaagagttatggtgcatcaaggatcactacataa

SEQ ID NO: 34466 - DNA, 624 bp, Zea mays
  Peptide Sequence Number=SeqID_76245
atggtgaagaaccttgaggaagaagaaatcgcagcaagggtcaaactccacaagaaagaagttcctaaggcaataagtgaagcaatcaacatgaaacaagaaaaaggtaaagattcaattagtcatgttttttgcactgatcatctctctatgtcatccaagagcaaaaagggaagaggaaaaaggaggtgcttcaagtgcaaggaattaggccacttctttgtgtcttgtccacacaaagacaaggatgaaggaatgaggagatgttttggatgcaacgataaggaccatatgatcacttcatgtccgctcatgaagaatcaaagacgtgcaccctccaagatgaacctcactaagaaaaaagacaaacaaaaagtgtcatgtcaggttgagcgacgcttcttctacatgtgtgatgagcatggtcatctacctaagaccaagtctcaaggtggaaaagggaagatgaggaagaaatggagcaatcatgacttgggtacctccacaagtcgagtaattgcatctaaagttgtgagtaattgcgtatttaaagattgctcgtgctctataatagttggtgatcctagatgcttatctttaaatatcatggagctatggcagtga

SEQ ID NO: 34467 - DNA, 456 bp, Zea mays
  Peptide Sequence Number=SeqID_76246
atgcaggtggcgtgcaaccccaccacgagggcgcaccccctcggcttcgtcgcatccagcatgaaggcccaggcccacatgtcatgtaaccgtcgcgccggttactacgtgcaagcaaccgcatcgccacttgcgccaatgccgcgtctcctcgactgtggaaccggtgccgcgagtcgaggcaaccctgcgcatggcccaacagtgccaatcgagcacatcgatcatcgggaccgggaaaggggatatttcgaaagggatccttctccgcgaaggaagcgggccccgagccctcctactgatcaggggttcgaaggctggcccttcggaagggttcgacagccgccccagagcactcgggcttcaggctcattactgatcagaggttcgaaggctggcccctcggaagggttcgacagccgcctcagagcactcgggctccgcgcccactactga

SEQ ID NO: 34468 - DNA, 951 bp, Zea mays
  Peptide Sequence Number=SeqID_76247
atgccggatgcgacgaagccaagggggtgcgccctcgcggtgcggttgcatgccacctgcatggcggtcctccctttcaaccgctggtttcggcgaggatggaggagtgcttggggagggccctggagtacgttggtgaagactttgtccgtgacgcctgaggacgcgagtggggagagctgccttaaaaaaggggttgatcccccgggcggtagccatgtcttcgcactcccctcatgcatcgcgcccttccaccttccgagcccccggatggggagcgcccgcgttgccttcgtcttgttgttggaggagcgcaacctcacggaggttggcacccttcagccatcgctcgacttcaaggattttcatcaggcagcccggctgcattccctcaccaatggggagagggcgctcaccggcctagcggagggggcagacttcgacaacgcggggccggtcggccgcaagcgtcgtcagctccagcatgcctggctcgctggctcagctggctctggtgctgcttccggtgccacctcccaccgctggggcggagcgtggctcatgacgcctccgtgcggaggtcggtgcctgcccgtccgcgagaacttgagtggggatctgccggtgcaggctagggcggccgccattcgttggcgtagcgccggcgcgcaggtggccgctgtcgtcggtgttgaggtggtggtcgctagaggaggtttctccgccgacgagactatcggcgccacccacggacagacctccggctctttggctttgacggcttgtcctcgcccctcgtgtggggacgtgggcgaggaccttcctagagcagcatttgccctgaggtcatcaatgctgctgtttagccgcccgaggcggaggtcgttgtcgctgttgctgcagtggtcgccggcgagccatctagagttggttatcccgcaggccctctag

SEQ ID NO: 34469 - DNA, 288 bp, Zea mays
  Peptide Sequence Number=SeqID_76248
atggccgtggaaataaggaattttagggtatttaaagtggttaaagaacacgaagaagaagaagaagtcactgaagaagggacaccaccatcctcagatcctcaagcaggcaactgcttttacttcgatatttgtggatccgagcaggactcacctgataacaaaggcaagccccggatccactttagtaagcatttctgcaaaacagagtctttgactattgagaagccttaccttgactccctaaaagccagcatacccttgagagtcttttctttagtccggtga

SEQ ID NO: 34470 - DNA, 531 bp, Zea mays
  Peptide Sequence Number=SeqID_76249
atggccgtggaaataaggaattttagggtatttaaagtggttaaagaacacgaagaagaagaagaagtcactaaagaagggacaccaccatcctcagatcctcaagcaggcaactgcttttacttcgatatttgtggatcggagcaggactcacctgataacaaaggcaagccccggatccactttagtaagcatttctgcaaaacagagtctttgactattgagaagccttaccttgactccctaaaagccagcatacccttgagagtcttttctttagtcggacgtaccttcggtcctgagagaagacacaggacgcagcctgtgacgaattacaattatgccctttacaaaagtttacaacattatcttagacctctatggataaaaaggtcattctatctttatgtcggtttgcaacgccgaagctctataaaaaggaaccttcggccatttcctggggacaatttcagccgaagctgcttcttcacgcaagaccttcggcgcaacgaagcatgggcccaacagtag

SEQ ID NO: 34471 - DNA, 294 bp, Zea mays
  Peptide Sequence Number=SeqID_76250
atggataaaaaggtcattctatctttatgtcggtttgcaacgccgaagctctataaaaaggaaccttcggccatttcctggggacaatttcagccgaagctgcttcttcacgcaagaccttcggcgcaacgaagcatgggcccaacaaccgggaaaggggatactccgaaagggatccttctccgcgaaggaagtgggcctcgagccctcctactgatcagaggttcgaaggctggcccctcggaagggttcgacagccgcctcaggccactcgggctccgcgcccactactga

SEQ ID NO: 34472 - DNA, 411 bp, Zea mays
  Peptide Sequence Number=SeqID_76251
atggttaaaaattttggcagcaaaacagtgcaaatagcagtaaatgctgtggtaacttcacacctactcgtctgtttatatagtgctgcagtggaccgcaaagaccaaacagtgactctgcaaggtgggaccgacacgatctcgggaaatgaatcgtttctcggcaacgagctcagggaaggtgtttttcggaccttcggcttcccgaagcttgagaggattttttcacggttcaagctcgttacgaaaaacgatctagcgccgcgaaaggggctactgttggggccatgcttcgttgcgccgaaggtcttgcgtgaagaagcagcttcggctgaaatcgtccccaggaaatggccgaaggttcctttttatagagcttcggcgttgcaaaccgacataaagatagaatga

SEQ ID NO: 34473 - DNA, 411 bp, Zea mays
  Peptide Sequence Number=SeqID_76252
atggttaaaaattttggcagcaaaacagtgcaaatagcagtaaatgctgtggtaacttcacacctactcgtctgtttatatagtgctgcagtggaccgcaaagaccaaacagtgactctgcaaggtgggaccgacacgatctcgggaaatggatcgtttctcggcaacgagctcagggaaggtgttttttggaccttcggcttcccgaagcttgagaggattttttcacggttcaagctcgttacgaaaaacgatctagcgccgcgaaaggggctactgttgggcccatgcttcgttgcgccgaaggtcttgcgtgaagaagcagcttcggctggaatcgtccccaggaaatggccgaaggttcctttttatagagcttcggcgttgcaaaccgacataaagatagaatga

SEQ ID NO: 34474 - DNA, 411 bp, Zea mays
  Peptide Sequence Number=SeqID_76253
atggttaaaaattttggcagcaaaacagtgcaaatagcagtaaatgctgtggtaacttcacacctactcgtctgtttatatagtgctgcagtggaccgcaaagaccaaacagtgactctgcaaggtgggaccgacacgatctcgggaaatgaatcgtttctcggcaacgagctcagggaaggtgttttttggaccttcggcttcccgaagcttgagaggattttttcacggttcaagctcgttacgaaaaacgatctagcgccgcgaaaggggctactgttgggcccatgcttcgttgcgccgaaggtcttgcgtgaagaagcagcttcggctgaaattgtccccaggaaatggccgaaggttcctttttatagagcttcggcgttgcaaaccgacataaagatagaatga

SEQ ID NO: 34475 - DNA, 435 bp, Zea mays
  Peptide Sequence Number=SeqID_76254
gcttcaagatgggagcttcgttcaaaacctgacaaaacaagcttcggtgatggtaagaaggcgaagcggcagggtttttacaccaggcgggcagtaacttgtactcgctgcgcagtggaccgcaaagaccaaacagtgactctgcaaggtgggaccgacacgatctcgggaaatgaatcgtttctcggcaacgagctcagggaaggtgttttttggaccttcggcttcccgaagcttgagaggattttttcacggttcaagctcgttacgaaaaacgatctagcgccgcgaaaggggctactgttgggcccatgcttcgtcgcgccgaaggtcttgcgtgaagaagcagcttcggctgaaatcgtccccaggaaatggccgaaggttcctttttatagagcttcggcgttgcaaaccgacataaagatagaatga

SEQ ID NO: 34476 - DNA, 738 bp, Zea mays
  Peptide Sequence Number=SeqID_76255
atgccatcccaagcttcgcagcttgagacccaactgggtggtactcagtttgaagaaattcacgaaagacaacagcatatccgtagagtgcttgagacgtgtcccgacgaatcggatgtggtttcagatcaacagagaggtgaaatggcaacagaggaaatggaacacaatgacagtgggccagtttttgaccagaccccaactcctcatgatgatacactgaaaggtactacaaactctggatctgatccaccccttacagagcaagagtgtgttcgttctctgtgggacttaatttgttccaaggacattgaccaaagcagggttgttatagattacagtgaatacagtgcaaattgtatggatatttatgaatctttcgcggagggcaaatgtcttgagaatgtcttcatgcagtgtttcattgagtgtgttcgagatgattctaaaaatcatcgtcgaactctgacatctaacagattaatacttgatgttaacgttggggctttgttaaattttgaagaacaggaacgtcacagcaagaatcctcagccgtttgatcaaaatgtcttacagaattgcttgcacaacacattgcctgctttggtaaatctggataaatgcaagtcggtgtcatatcttctttcaatcaaccaaacaattcccgagacctacgtgctcatgcccttcatcaactcacattccatcgcatcaacaaggcgttgccacttccattag

SEQ ID NO: 34477 - DNA, 1260 bp, Zea mays
  Peptide Sequence Number=SeqID_76256
aggcttaatgtgaggtgcaaccctcaagatgtcattgcaagcattaacattttgaatgaaagacaacgtgaggctataagacgcaaaggcttctcttccattcttgatatgacagtagatgcgctgtgcagtagatcacacctccaatggttgatggacaagctagaccccaaggatatgacaatacgtcctggtccaggaaaggaactcaagatcacaaaggatattgttcatcttattcttggcgtgccaaatcatggaggtggtaaacctttgggtattgatgaagcagttgcagcaagcaacttgagggcagagcttggtgtggccaaagatgagttcaatgtggcatttctacaggatcgattaaggaaaggcgaggatgatgacctttcaatcagatgtttcttcctcattctattcaacagattgctgtttccaactgctagctggggcatcacatatcatgaggtgcttctcacagaagaaatgcaccgtttccatgagatcgactggtgccagttgatttttaatgatctatgtgaagctgccaagaagtggcacaaccggatcaccacaaatgtctccacgactatctatggatgctccattgttgtcctttccgctgccccccataataagagtggcacacctcgcattaaattttttgataagaatagcataaaagctttgaccaaagctgacaagaggaaggttcgccatggggctgaatctttcggacactgtgaaaatacgaaggtggacatggattcttactattttttgctgaacaaccagccggagtgcaggaccaatatttttgatgcaccgcgccctggccccatgcctcggccaacttttaacatcaaacttccatctatcaaagagatgatgtcaagtaagatcaacgatctcccccatcgtcatcgatctaaattcacagatattcttgctgcatatgacttggaggttgacaagtcatgcgtagccataaaagacagcatcgacaaaattattgtcaagcaatatgacatagcagacaagtttatagaattgatagacgaggtactacgtgccgagtctgaaaatttggaaaacgagacggatgagccacagcaaccggtgaattcggctgattcagcaggacacacagttgatgccacccagcccacacccgatatgccatcccaagcttcgcagcttgagacccaactgggtgctactcagtttgaagaaattcacgaaagacaacagcctccc

SEQ ID NO: 34478 - DNA, 879 bp, Zea mays
  Peptide Sequence Number=SeqID_76257
atgcctatcctatctcgttggaaagattacaaggacgaccagaaatactacaacaactttgtgtcacagctaaatgggcgcttgtccgttaacactgaggacaaggcaacaaaggaagcttgcaccgatatgctacgctctgcggtaaaaaaccagcgttatcggctcaagcagaaatacttcaatggtgtacctgcaaatgagattaggacaacttctcctgtatcttacatgactgatgaacagtggagggcattagttgcaaagtggtctgatccaaagaacatggaaataagtgaaaagaacaagcagaaccgcaatcaagtcaagtttcatcaagctacgggttctcgctgctatgtggcacacttacatgcatataagcagaagagaaaccgagaagaacccagcttagatcagactgaagaactagatgcagtggacgccttcaagacctgtcataccagctccaaacgtggcctgagtgaaccggcaagagaagcacttataaagttgtccttggctttggccatcaaattattacctccatttgtctgccatcaaatttctgaaatgaaaagcagctcacaccaattcctgaagagcgtcggcatcaaaacatcggcaacctccaaggcatcatcatcaaatcaaagtgagcttcgggaacaacttgcagctgaagcgacgactgctgttcaaggtgaactcgaccagctcaggaagaaatgtgaagaagctgaggaacaacaggcgaggacacaaagggagttggaggagtacaagaagataacagagaagaatagcaaggagatggaggaaaccaatgtgctcatcaagaagctcttgtccttgcatggtaactcttcttcgacatga

SEQ ID NO: 34479 - DNA, 747 bp, Zea mays
  Peptide Sequence Number=SeqID_76258
atgcaggaggcgtgcaaccgcaccacagttgtgtaccctttcggcttcatcgcgtctgggaccagaaaaggggatatttcgaaaaggaaccttctcgacgaaggaaacgggcccccgagccctcctactgatcaggggttcgaaggctggcccctcggaagggttcgacagccgccccagagcactcgggctccgagcctattactgatcaggggttcgaaggctggcccctcggaagggttcgatagccgccccagagcacgcagagtgagggatgactctgggtacgtccgttacatggccgaggctcgggctacgctcccaagggacgcaatctcgcctcgcccgagcccggcctcgagcgggaacagtagtcccggacggattcacgcctcgcccgagggcctcctcaggcagtgggcgcaccctcggctcgcccgaggcccagctcgagtaggcttcgacgagaagcaaccttggccaaatcgcctcaccaaccgaccgtatcgcaggcgcattcaatgcgaggatcgcctgacaccttatcctgacacgcgcgcctcagtcggcaaggtcgaaccttgggcacaacaggaagctccgcctcgcccgatcttaggcccggccttgggaggaggtctctgcctcgcccgaccccaagactcggcctcagcctcggcctcgggaggaatcgcgtcctcgcccgacctcggcctcggcctcaggagaagtctctgcctcgcctga

SEQ ID NO: 34480 - DNA, 1347 bp, Zea mays
  Peptide Sequence Number=SeqID_76259
atgaccgtgagcacggttgatataccagttttacactttgcagaggttgcgcgtctttacctgtcgggtcaaggcctcgtctaccaagggacgcaatctcgcctcgcccgagcccagcctcgggcgggaacagtagtcccggacgaattcacgcctcgcccgaggacctcctcaggtggtgggcgcaccctcgactcgtccgaagcccagctcgggcaggcttcgtttcgacaaggtcgaagtgaccgcagttacttcgccctttcactgaccgacctgacaggaaaacagcgtcgcttgccctgctccgactgctgtgccaccctccgggcctcggcctcgggaggaatcgcgtcctcgcccgaccccggcctcggcctcaagagaaggctcaggtacttctccgacggccacgttatcacgtacacagggctcaagcacttctccgacaaccacgttggcatctgccgcgtgtccggctctccggcccgagcggcttcggcgctgctttcggtgccaccttccgccacgacagtcagaagaggtttctccgccgacgagatagccggtgccgcccacggactgacctccaactctacggccttctgctcgtcctcgcccctcgagtggggacatgggcgagggccttatggcagcagcatccgccctgaggtcatcgctgctgctgttcggccgctcggagcaggagtcgtcgtcgctgctgctgaagcgggcggcggcgagccgtccgtcggccttctgttgctccgcaggccctccaatcgtggggggttgttcgtacctgcggaggagtccctcggctcggtcggccttgccgcccgaggcttctcttgcttagttaaaggaaatcctcggccgctctttgatgagccgaagccggaggcagcggtgtcagcatggacagaggcagagtcggctcgaaaagaagatttggtcggccggagcctggccgggccgtccactggcgggaccgacgccggagtcgagttgccgaggccacaagccgggctgatgtcctcgggggacagctggctgaggcttcggggtggccggccgagctgtctgttcgagccggattcctggatgagaccctggcggcgatggcccgggcgcggtgctgatgtcgtccttcggagtggagatcctccgaccacattgccgtccgaggctaggtcggacttcgccgaaggtgtagttgacgccgagggtgctgttgctcccttcaactgtcaaggtctgagcctgcaggatcaggagtcccttggctcggtcagccttggctgcttacgtgtactccgtcgttttcaggatccactttcgaagtag

SEQ ID NO: 34481 - DNA, 354 bp, Zea mays
  Peptide Sequence Number=SeqID_76260
atgcataggaaagcagtgtcgacgttgtggacctccttcgcagaggtctcgaagtatggaatatcacccttggaggcgcaccattccctcgctttcttctccggaacctacgggaaaggcaaagagactgcagggtattatgcaccagctttggggttcttgatgtttgctgttggtgtaaactcaagcgtcaaggatttcactgaagcaataaaaaggccagatgctattgctgcgggctatatcggacagtttgtcattaagcctttgtttggattcctttttggcactcttgcagttctagttcttatcatcttgctggaatgcaaagcagccttcttgctcttgctttag

SEQ ID NO: 34482 - DNA, 354 bp, Zea mays
  Peptide Sequence Number=SeqID_76261
atgcataggaaagcagtgtcgacgttgtggacctccttcgcagaggtctcgaagtatggaatatcacccttggaggcgcaccattccctcgctttcttctccggaacctgcgggaaaggcaaagagactgcagggtattatgcaccagctttggggttcttgatgtttgctgttggtgtaaactcaagcgtcaaggatttcactgaagcaataaaaaggccagatgctattgctgcgggctatatcggacagtttgtcattaagcctttgtttggattcctttttggcactcttgcagttccagttcttatcatcttgctggaatgcaaagcagccttcttgctcttgctttag

SEQ ID NO: 34483 - DNA, 222 bp, Zea mays
  Peptide Sequence Number=SeqID_76262
atgagtttgcggtatggccgtatttatacgctcggtgcgtcgaaagctgaaagaccccacttgtcattgaatgttgctattctagcaaagggaaggtatcctcggactaaagtcggcattgcagtggaccggaataatacgaatgttgactcagagccgaaggtgcgagcaggaaagcttcggcgcgacagcaaagagtgcaaccgacttaaagatgaaaag

SEQ ID NO: 34484 - DNA, 792 bp, Zea mays
  Peptide Sequence Number=SeqID_76263
atgggggataccccgaaaaggatccttctccgtgaaggaaacaggccccgagcctccctactgatcagaggttcaaaggctggcccctcggaggggttttacagccgcctcagagcgcgtgggctccacacccactactggtcagaggttcgaagtccggcccctcggaagggttcaacggccgcctcaggccactcgggctccgtgcccactactgatcaggggctcgagctacgctcccgaggtaccctaggacatttccgagaccagcgggaacgatcttataacagaatcccatcagagggaggcatcaagccctcggaccccgtcgacaggggaccgagtccggcagatcacccgcagaggctcgggggctactctcgcaaacccggctccggccaaaccattgacagcgtcaacataccagcccgagaacctgggacccgaccgtgcacccgggctacggccagctcgcatgagggaacgaccagaccagccgaagcattgcgcaaagcattaataccgcggaggagtcaaaccactcctccgaggcctcaggggctacacccggtgggtgcgctcgcgcgcacccaatggatcatctctcaaccgagaaaggctggtccccttgcaaaaaagtcagacaaaagcctccaagcgagtattaacactcccttcgaggctcgggggctactgtcggggaccataattaggggtaccctcaaggctcctaattctcagctggtaacccccatcagcacaaagctggaaaggcctgatgggtgcgactaa

SEQ ID NO: 34485 - DNA, 546 bp, Zea mays
  Peptide Sequence Number=SeqID_76264
atgctggtctccccaatgggcatgtgtacagctggccgggccctattgcgtgatagttctgggagaaggcttacttcgggttcattgatagcaatactgtcgcggaccataattaggggtaccctcaaggctcctaattctcagctgccttgggcaagggcagccgaccccggagaatatccatatcgcccgaggcccccctccagcgacgaacatacttccggctcgcccgaggcccagtcttcgccaagaagcaaccctggccaaatcgccacgccaaccgaccaaatcacaggggcgtttaatgcaaaggatgacagcgccgcctgcgccgctccgactgctgtgccactcgacaggggctcggactcgggctcagccctggaagacggcgaactccgctccgcccgacccagggctcggacttgggctcagccccggaagatgacgaactccgctccacccgacccagggctcggactcgggctcaaccccggaagacggcgaactccgctccgcccgacccagggctcggactcgggctaa

SEQ ID NO: 34486 - DNA, 591 bp, Zea mays
  Peptide Sequence Number=SeqID_76265
atgagaatgggaatgagctttgcggggagggggaatgagaatgatagatatagaatggtggcaggacatgggaatggactatgcgcggggaggagggaatcggaaagacagaacaggaatggtggcagaacacggaatgggcagaacagggaatggccgactactattgcagccttaataagtagtagagattatgatcctcgtaatgcccagaacaacccgagagtcaccgacgttggcgacgaccatgaggtccctctgcttgacgatggacagcgcggagcagccgctctgcaccgcgtccaagtggcggctgcgccggagcttgtcgtacataacggcacatgcggccacataggactgtttctagaggtcgaagtggcagtcgccaagtttcttcttgtcgttgatgagcgaccccaacgcgagtgcctcctgctaatggtgtttgttcggggttttcaactaggcgtcggatgtacgagggaatatgaatgggaatgggctttgcgaggagagggaatgagaatgatagatatagaatggtggcagaacatgcgcggagaggagggaatcggaaaggcggaatga

SEQ ID NO: 34487 - DNA, 267 bp, Zea mays
  Peptide Sequence Number=SeqID_76266
atggcgtcgtcgtcaaatgcgatgcctagaacaacccgagagtcgccgacgttggcgacgaccatgaggtgtagacataaacacgcatgtggtgtagcagtaactattgctggcatttgcttgagaggtcctagacgtcggctgtacgggagaatgagaataggaatgaactttgctgggagggggaatgagaatgatagatatagaatggtggcaggggagaagggaatcggaaagacagaacaggaatggtggcagaacacgtaa

SEQ ID NO: 34488 - DNA, 360 bp, Zea mays
  Peptide Sequence Number=SeqID_76267
atgagggtggactgggatgcccttagattaataattagaggaactgggtgtagttcgcttcgtcgtcgtgccgttaatggggctcggtgtatgcggctcgctctgccaagtttggagaaaaatgtgcccaaaggcgagctgtcagactgctttaagtctgaaattcagactgacaaaaacaaggaggaaatagaagttgaagaagcgaggacatcaccaccaccacctgaagaacctcaggcaggaaactgcttttactttgatatctgtggagcagtgcctgattcacctatcactcaaggcaagccccggtgcatttgccacctccttgttattttggaatctttctcacttacttga

SEQ ID NO: 34489 - DNA, 264 bp, Zea mays
  Peptide Sequence Number=SeqID_76268
atggctaagtttgaatttcagtggtataggctcaactttgaagccctatatcttccaaattatgaagattttgccctagaaaacaaggaggaaatagaagttgaagaagcgaggacatcaccaccaccacctgaagaacctcaggcaggaaactgcttttactttgatatctgtggagcagtgcctgattcacctatcactcaaggcaagccccggtgcatttgccacctccttgttattttggaatctttctcacttacttga

SEQ ID NO: 34490 - DNA, 867 bp, Zea mays
  Peptide Sequence Number=SeqID_76269
atgaggctcactgatgctggtgatggtcaggttactcgactgataccagatgcaaaaggaacatcatgcaatcaacggcttgagagaattagtggaacacaacatacttacattttacgagttcccttcagaaatgaaaacgggatacttaagaaatggatatcaagatttgatgtgtggccatatctggaaacatttgctgagcttcttttaatgaaaaaaaatctgaggaaagtaccttatgacttcatggatgctgctggtgaaattgctactgaattacaaggtactccagacttcataattggaaactacagtgatggaaatcttgtggcatcgttgctatcttacaagatgggaattacccattgcaacattgctcatgctctggaaaagactaagtatccagattcagacatattttggaagaattttgatgagaagtaccatttctcctgtcagttcactactgatataattgctatgaacaatgctgattttatcatcaccagcacataccaagaaattgctggaagtgggcatctggatgaccggtcaaagcccatcctcttctccatggcaagactcgacagggtgaaggacataacaaggctggtcgaagcttttgctaagtgcgctaagctgagggagctggtaaaccttgttgtcgttgccgggtacaatgatgtcaagaagtccaaggacagggaagagatcgcggagatagagaagatgcatgaactcatcaagacccacaatttgttcaggcagttccgctggatctctgcccagacaaacagggcccgtaacggtgagctctatcgctacatcgttgatacccatggtgctttcgtacaggcaatgtga

SEQ ID NO: 34491 - DNA, 1935 bp, Zea mays
  Peptide Sequence Number=SeqID_76270
atggagagagtacatattaagaaaaggtccaacactcaaaaggatgctgctggtgaaattgctgctgaattacaaggtactccagacttcataattggaaactacagtgatggaaatcttgtggcatcgttgctatcttacaagatgggaattacccattgcaacattgctcatgctctggaaaagactaagtatccagattcagacatattttggaagaattttgatgagaagtaccatttctcctgtcagttcactactgatataattgctatgaacaatgctgattttatcatcaccagcacataccaagaaattgctggaagtgggcatctggatgaccggtcaaagcccatcctcttctccatggcaagactcgacagggtgaaggacataacagggctggtcgaagcttttgctaagtgcgctaagctgagggagctggcaaaccttgttgtcgttgccgggtacaatgatgtcaagaagtccaaggacagggaagagatcgcggagatagagaagatgcatgaactcatcaagacccacaaattgttcaggcagttccgctggatctctgcccagacaaacagggcccgtaacggtgagctctatcgctacatcgttgatacccatggtgctttcgtacagatctcgcctgcactgctcccgcccgtgacagcctgtaaggaggctgccccaacctccgcagatctcgcctgtgctgcccccgcccgcgatagcctgtacctcacgcccagcctcggcgctgccctccaccggcgccgtctgctccccatgttacaccatgccctcttctccgcagatctcgccgtgacagtaagtgagctctctcgacctcttgtggcaaccagcttcgtcgtcttctccttgatgtgccacctcctcccgcacgccgtctcaggctgcgctccaagcgaaaggatgacactcgctaacttctctaacaatctcgacacacggaccatcgaccgacgatggccaggcgcggggaactactccgacgactgttgccggtggaccggcgtccgctgtcgccggttcggagtcggagcgtaccatcgacaacagcagttccaggttgtcagcctagacctcgccggcataggccttgctggccccgtcgtgtcgaggacgctggaccgcctggacatgctgtgcgtcctcaacctctcccggaactcgctgcacggaagtgtcctgtcggaggtgctgcgcatgttgcggctgcagcctgacgagcctgggggcaacgtattccagtggctcccgctgctgcgcaacttctcggccgagtccaaccggctcacgagcgtcctgccagggtcgctactctggtcatgcccggagctcgagcacctgcttgtaagatgcgtcgtccgcatcgcagaaacaaaggagacagccgcggcggcggcgtcatccgcctgtggcggcctcgctaggccccctgcaccccgcgctcgcccacgccagacgtcaccaccgccccatcttacccctccctgctcctgctctctccgtcgggactccgagcagatcgaggccggagaggaggatgagaagaacacgccagataccaacgccgcacaccgtgctgcccctggcgtggagccgcgagcaggcccagggtcaccgaagcctggtgttgagcaccgtttgtggcactcggcacgaccggacggttcgacctgcggacgagaagactccgctcctgccacaggtcgcggaccgtccggccctaggccgcggactgtccgcgcctccgcagagagcaccgccgcgcgcaacatcatcgagccagcatgggaaaccctgccgactgaagaccagcaggagttcgaggagcataaggaaaggctgatcaaggaggctcaggcgaaatttctgaccaacttcaaagtggacagaaattag

SEQ ID NO: 34492 - DNA, 342 bp, Zea mays
  Peptide Sequence Number=SeqID_76271
atggtgacagcaccggctgaggatggacaacaacagatgtctcctacggaagttgtttctgaagtgctatcaggctctagtttgttcctacggaatgttggtctgcaagctacctccaagaaaagcttcacaactatttatgcaaaggttcaagaacttcaggatcaattggagtctgagaggcaagaaaaagacggacttcgggaggaagtcgaaaccttaaaggctcaggcgcaggcctcaaaggagactatggacaatatgaagagatcgatggaagaaaataatgttttcctccgccaaatgataagcttcaatcgaagccaagtgcctccatcttaa

SEQ ID NO: 34493 - DNA, 324 bp, Zea mays
  Peptide Sequence Number=SeqID_76272
atggacaaacaaccaaatgtctccctacggaagttgtttctgaagtgctatcaggctctagtttggttcctacggaatgttggtctgcaagctacctccaagaaaagcttcacaactatttatgcaaaggttcaagaacttcaggatcaattggagtctgagaggcaagaaaaagacggacttcgggaggaagtcgaaaccttaaaggctcaggcgcaggcctcaaaggagactatggacaatatgaagagatcgatggaagaaaataatgttttcctccgccaaatgataagcttcaatcgaagccaagtgcctccatcttaa

SEQ ID NO: 34494 - DNA, 903 bp, Zea mays
  Peptide Sequence Number=SeqID_76273
atgtttgatttctggatccaagttgttgaagtcccaaatgtctcttgggaggatattggtgggctgaagaatgtcaagagagagctccaggagatgttaggtagctggaatgccacctcggggacggcgtcgggcgccggtggcaggccgggctcgcgggcgcacggggcgccgctgggcggcctagtgctggtctccaaggatctagacaacatccgcgagatcgatgcgttcttgccacttttgttacaaccatgttcttggacagagctgggcaagtccaagcaggccacctgggggagctccatccgccccatatacaccttctccaccgtcgaggaattatgggggttcttgccacttttgttacaaccatgttcttggacagagctgggcaagtccaagcaggccacctgggggagctccatccgccccatatacaccttctccaccgtcgaggaattatggggaatttacatggccgagtaccgccaacccttggtgaagatcgagggcgccagcctcagcatcgcgcaggtggccgtggtggccaccagcgctggtgaggcccgggtcgagctggacgagtccgcctgtagccgggtcaaggcaagcagcgactgggtcatgaacagcatgatgaacggcaccgacagcatgatgcggggcggggccgcgggcaggatccgcgtccgctcgcttcggctcctccgttcccaaacctcctcaaccagcatctctagggttttcgcagccaccgcctatggctgccactctggaccgcgtcaatgccgaccttcgtcgtcgcctcgccgtcgacaccccatcgccgccccaggtagcgaaagatgctacatgaatcggttgtccagctacttggcatggtttaaaatgtatatttag

SEQ ID NO: 34495 - DNA, 624 bp, Zea mays
  Peptide Sequence Number=SeqID_76274
atggtcgttggagggagaaaactgaaagggaccatgctcgtgaaaagagctggagagagagaaaaaaccaatggagaagtagaatgtcgtattgtttcacagctactgactcttatggatggactcaaatctcgttcccatgttattgttatgggtgctacaaaccggccaaacagtatcgatcctgctcttagaagatttggaaggtttgaccgggaaattgacattggagttctcgatgaagttggccgacttgaggttctccgtattcacactaagaacatgaagctagttgaagatgttaatttggaactcatttcaaaggatacccatggatacattgttgctgatcttgctaccctttgcactgaggctgctcttcattgcattcgtgagaagatggacatcatagatcttgaggatgagacaatagatacagagatattgaactcgatggctattacaaatgaccatttcaagactgcgcttggaacaagcaacccatctgctctccgtgaaacttttgatttctggatccaggttgttgaagtcccaaatgtctcttgggataaaataaaaaatcgtggttgggaaggttatagtagcaaaagccattggaattaa

SEQ ID NO: 34496 - DNA, 354 bp, Zea mays
  Peptide Sequence Number=SeqID_76275
atggctgaaaggtaccaactcccacggagttgcgttcctccaacgatgaggcgaaaagacggcgggtatcccccatccgggggcttggaaggtggagagacgcgatgcataagggagcgcgaagacatgggaccgggaaagggggataccccgaaaaggatccttccccgtgaaggaaccgggctccgagcctccctactgattagaggttcgaaggctggccccccgaggggttcaacagccgcctcagatcgcgtgggccctacacccactactggtcagaggttcgaaggccggccccccgaagggttccacggccgcctcaggctactcgggctccgcgcccattactaa

SEQ ID NO: 34497 - DNA, 1275 bp, Zea mays
  Peptide Sequence Number=SeqID_76276
atgaacaaacacactagcattcaaggtgccatcacaaacggaactccggttccccctccgcaggtacgaacaaccccactccacgggggaaggcctgcggagcaacggaagaccgacgaacggcgcgccgtcacctgctccagcagcggcgacgacgacgacttctgctccggggggccgaacagcggcagcactgaccccagggcggatgctgctgccaggaggcccccgcccatgccaaaactcgtaaggcaaggatgggcagaaggccgtagagttggaggtcagtccgtggccggccctagctatcacgccggcggaagaacctcttccagctgccgtggcagacgccggtgtcgcgagtggctccgaagccactcgcgtccgaaagccgtgcacgctgcagctgccagcgccacggacgacaaccgctcctcccccccatcactaagtgaaggagcgggccaccgcccacgcaggggccgaccccaactcggcacactcccctccccagccttagtgatgaaaatccttgaggctgagggaggggcagaggccgcagcccggctcgctttcccccaccatcaagctggagagttgcgttcctccaacgatgaggcgaaaagacggcagatgccccccatccgggggcttggaaggggctgggtcccgcatgtcatgcaaaccggctcagagcagaagaagccaaagcgccgcgcgtggtgcacacaaccgcccagcggttacaagcgaccccccacttttgcccagaccaacgggcggaaggagtgggcaaccatgcaggcggcatgcaaccgcgccaagcaactgcaccgccacttgcgccaccgtcgcgcctcttcggttgcggaaccaatgccgcgactcgaggcgacccagcgcacgacccagcggcgccagcctggcgcgacggtcaatgcggccgaaagagggccggcagtaatgacggtggcaggcgggcgggagcagcggtcacgtcgtcagccaggctcacgtcccatccaggggcagcaagagagcctcctctcacggcgtgaagacggcgcgcccgtgatccgtccctcgaacggctcgcgcacgcgcaacggccgccccgccaaccattcgccccgtcgcattaactccgcggcgggacaggcgacgcttctggcaggagaagcgggcgacgcttcgccttcgccggaccaggaaagggggataccccgaaaaggatccttccctgtgaaggaaccgggctccgagcccccctactga

SEQ ID NO: 34498 - DNA, 288 bp, Zea mays
  Peptide Sequence Number=SeqID_76277
atggtggatacaaaaagggtgaaatggatttctacaagagggtgcttgggctacataaaatattttgatgcacatttcacaaacttcactggtggtgtggagacaattgagaactatgtttgtttgcatgaggaggatcatgggatcctttggaaacaccaagactggagaactggtttagcagaagtaaggcggtcaaggaggctcactgtttcatttatctgtacagttgcaaactatgagtatggtttttactggcacttctatcagaagcagaaactagtgtga

SEQ ID NO: 34499 - DNA, 354 bp, Zea mays
  Peptide Sequence Number=SeqID_76278
atgccggtgcaccggacatcaaacagtacatgtccggtgtgcaccggacacccaggcgggcccacaagtcagaagctccaacggctagaatccaacggcagtgatgacgtggcaggggcaccggactgtccggatgggaaaatagaggcagaagtaaagcttactggaattctcagtttaggggccttgatgcctggggaatcgaggaaatatggcacaactattgcccctggtctgtatgcaccagttcatcagcatttctttgttgcccgtatggacatggctgttgattgcaaacctaatgaagctcataaccaggttgggggttgccatctatttgcaccttttttttaa

SEQ ID NO: 34500 - DNA, 909 bp, Zea mays
  Peptide Sequence Number=SeqID_76279
atgggttcgaaaaccctgagtatgaagtgtactttcgcaagtcttacccgtctaaggaaaaagactctcaaggatatgctggctgttgggaatcaagaccaggttcacgccaatcgagagcacagatacaccaccgtccagcctcttgccatggagggtcaaggctccgtccactcaagggacacgatctcacctcgcccgagcccagcctcgggcaggaacaatagaccaaggcagattcacgcctcgcctgagggcatcctcaagagcattcaatgcaaggatcgcctgacaccttatcctaacgcgcgctcctcagacgacaaggccgaacagccaagtccagcctcgggcgccataggaagctctgcctcgcccgaccccagggctcggactcaacctcgaccccggaggacggactccgcctcgcccgaccccagggctcggactcaacctcgacctcggacgatggtctccgcctcgcccgaccccagggctcggactcaacctcgacctcgaaagacggtctccgcctcgcccgaccccagggctcggactcagcctcgacctcggacgacggtctccgcctcgcccgaccccagggctcggactcagcctcgacctcggaggagcctccgcctcgcccgacattgggctcagaccgaccacgtcacaggggggtacatcattaccctacccctagctagctcaggctacggggaacaagaccggcatcccatctggctcaccccgataaaacaagtaatgatgacaccctgcatgctccatgacgacggcggttctcagccccctacggaagcaaggagacgtcagcaaggtcccgacagccccgacagctgtgcttctacagggtttaagcgctcctccgacggccacgacatcacatga

SEQ ID NO: 34501 - DNA, 1221 bp, Zea mays
  Peptide Sequence Number=SeqID_76280
atgggtcgagcaacccatccttccggctcatggtcagcagagaagtcggtgtcgtggctcgggctgtcgtcgccacctccgtcgtctggatctcctccaacagctactccagaagctgggacgccagtggtggtgcagggggcgcctccaggggaagcacaggggagcagctcctcacagactctatctcctgttggagcgagaaggaagagccctgctgctcctgtcgtcgacgttcctgctcctcatgcaggcggtggtgcagtctctccaagtggctggactgtccggccacgggacggcgaagcggacgctcagcaaggcgggaggctcggcatcaacctcatggccttcatgatcggacaccttctgcactacttcgtgtggtccctgtcagaaggcatcagaccagaggacgttaacatgatggagtcccccaggctcgtcacgttcatgggcacactgctgcaagctatcgcgaagccgtgcctggagaaggagctgtacaatagggcacaccgctgcaagataccgtccgtgcaccatggttctgcctccctccccctcgccccctcgcgcatgcctcgctacctccgaaatgtcgtccatgcctcggacgccacacgcagcctcgaaaccttgtcgtctccccggtcctcggcgtcccctatcccagccgccgttggcctcagtgtcgtcccccactatccaacaaatgtgcgccaggccaccgctgctcaccatccctctgccccacggctttcttggcgagggcgacgaggaccgctgcaaggacccactgcgctagatgtgcgccctccgctgcgacctcgaccatcatcgcccatcggtgggtcctccgccccgcgaccttcaaccgtcgtggcttcccagatgagggcgactaggacagttgtgaggacccgactcgctggaggcactccctgcgctgcgtcctcgactgccgagcctgcaccggtcgtgtctttcgagatcgactacgaattcatgtgcttgttggccgctgggacatcgtcatggcgtggcgcgcttgtgccggtactcgacacggtagcaggtgctgaccgaggtgcgcaagctggtggagctgtaccacatgcggggcgggtaggagctaggcgtgctgccgagttcatggagcggaccgtgcagctcttccgcgccgaccccaacgtcacccgctacgtgacgaaatattga

SEQ ID NO: 34502 - DNA, 282 bp, Zea mays
  Peptide Sequence Number=SeqID_76281
atgaaggagaacacgcacaccagcgccaccctgtcgtcgccccgcgacacattggcacgtgtctccacgacgttgaaggcgcacaacatcgccagcgtgctgcccaggctatggcccttgaccgtcacgctcacctacccgccccgcatgtggtacagctccaccagcttgcgcaccttggccagcacctgctaccgtgtcgagtacctgcacaagcggcagaaccctctatccgccttcacgttggggtccaggcacgacaatcccgtctcgcgcaggtga

SEQ ID NO: 34503 - DNA, 336 bp, Zea mays
  Peptide Sequence Number=SeqID_76282
atgaaggccaagtcacaccagcaaccaatcatcctaaagagtacctgcaaaaattatgccacaagcaaggctgagtatactaatactcagctagacttacccgtgaccgcacttgtacccaccataaccggaatgggagaccacgtctcaggtcgcgtgaggggatatgtctgcgggcagtacgttcaaacgcttgactcacggtaccacaccttaatccttattccaatttttatcccgtggacaaccaatccccatggattgttgtccacaaaccagcatcattatgataagaaagtggatacaatcaatttcctgacctcgcgcgagtgctag

SEQ ID NO: 34504 - DNA, 321 bp, Zea mays
  Peptide Sequence Number=SeqID_76283
atggcgaagcctgggccacgctactcctcctggtcctctcctacggaagcaataacccactcgaccgtctatcccggtggcagggatgaaggccaagtcacaccagcaaccaatcatcctaaggagtacctgcaaaaaattatgccacaagcaaaggctgagtatactaatactcagctagacttacccgtgaccgcacttgtacccaccataaccggaatgggagactacgtctcaggtcgcgtgaggggatatgtcagctgccaggttcactcaggtaataacatgcttctgtgccaaaaatcacagaaggttacttag

SEQ ID NO: 34505 - DNA, 972 bp, Zea mays
  Peptide Sequence Number=SeqID_76284
atgtcttctcgctcccttatgcatcgcgtctttccaccttccaggcccccggatgggggatacccgccgtctttttgcctcatcgttggaggaacgcaactccgtgggagttggtacctttcagccatcgttcggcttcaaggattttcatcacacagcccggttgctcccctccgctggtggtcacccaagacggtgacctccagctcctggatggggagaggcaagccgggctgtgatcccgccctcagcatcgggggtgttcgtcatcctcgctggggcggggagcgaggcgagccggggctctacctcctgcgcgggtcggcgggccacctcttcttccagcttctggtggtggcaatcgccctcccgccctgcggcagagacgtcctccagccatgccggggaaggcgaactgttgctgcccagctaggatgcaacattccgccctctccctcgcattcgcggcgaggacggcagcgaggatctgccggtgcgcttgggagcggcccgctctttggctttaatagctggttcgcgtcccttaagcgggaccgcgaacgagagccctctggtggccgcgtccacccgggaccatggctgctgctgcagaggtcgctggcaggtcccccgacgctcgtcgccccgcaggctcgagccgggttgtccgtcagcgggaccgacgccggagttgatcagccgaggcctcgggtcgggctggcgcccttggaagatggttggccgaggccccagagggatgtttgtgcgagcgagagttgcttctcgcggaaggtgatgagtgagaaggtgaagagtgaggatccactcttcgaagcagtcaaaaagcacgaaagatattctggcagaagagatcttttttcgaggaaaatttcaacgcatagggggttccccccccttttagcccccgagggagggtcgggctttgccgaggcgaggccgacccttccttga

SEQ ID NO: 34506 - DNA, 144 bp, Zea mays
  Peptide Sequence Number=SeqID_76285
atgacagggcctatggtcgcggaggccatgttcgtgaacagggaagagatccctgtgtacccgctgtacagagatcctgtgccattaagtttcttaagtatgatgagattcagctggcacctgaagcagcatcagtcgggctag

SEQ ID NO: 34507 - DNA, 1257 bp, Zea mays
  Peptide Sequence Number=SeqID_76286
atggggtccctccgccccacgcctccaccaccggagaaagtctcggcccgaacccgggcaggtcccctcccgcctgtcgctgctaggccgcgccgctcctgccggcttcgaagccgggttacagcagcgacggccggccgggacggagcgcgcgcggggccccgcagcgggaggcgggcggcgacggtgaaggtggcggccattgaggggcgccgcctggcccgggagaggaaggctggtggatgggagagaggtggcgcccggcgcgcgggcacgtgtggcgccggcggctgtgaatgcgcgcaggtcgcagggttccgtggccgcacgggagcgcccccacggcgccagcaggcgaccggcggcgaggggcagcgggtgcgtgtgcaggcgggggacgcgctgccgctgtcgatccgacacacgaacctcatcttctcgacgttgttcgccgcgtcgctcgtgtacctgatgcggcggtggcgggagaagatccgcgcctccacgccgctccacgtggtcttcctcgccgagatcttcgcccctccactttattacacatcccggcgaattcccggacccgacgcgatcaaccccctcccccccacgcgatccagccaacccgtgccaccgccagcgcacgcgtgccctaactaccgctcggatctgggagcagccggcggcgctccctcacgtggtccccggcggcaagggggcccggaaggcggcgcagctgagatgcgacgcgacacggttccagaacgagctgcggcggcagcagcagctgcacgggcgatcgctggattgccacctcacgagaggatcaacctgccatccaattcggaggatttggtctccatctatgggagcaacccccagggccaggccctggaggagctcgaggaggtgttctatgaggaggagtttgatccaataaagtacattctgcaaagtattccggacgaaggcagtgatgccacctatttcgatgagcaggactctatgccttacaatctttacgcctttgacaccgaggtcgcaggcgccagctacgccacgggtttcgtcgttgacatgtcccgcggcataatcctcactaaccgccatgtagtcaagccagggcctgtggtcgcggaggccatgttcgtgaacagggaagagatccctgtgtacccgctgtacagagatcctgtgccattaagtttcttaagtatgatgagattcagctggcacctgaagcagcatcagtcgggctag

SEQ ID NO: 34508 - DNA, 1437 bp, Zea mays
  Peptide Sequence Number=SeqID_76287
atgccgaagctttcctgcttcacagcttcggcgctgtgtcaaccttcgtatcttttgagcttctccctctctgatacgagtccgaagatacctgttcacacattatactctagaaacactgttaaatcatgttttttgaggaccttcggaagccgaaggcccccaacactgacggacagggtggccgccctggagagggagaaggctgacctccggcgccaactggcggcggagaggagggaagctaacgaggccgtcgccaaggggcaggctgcgcaggcggaggccaagctggcgcgggcggagggcaatcttgccaaggagctcgccgaacatctgcaagagcggctcgccgccctggagagccgcgctaaggaggccgaggccgcagaaggagctgctggaacttccagccgtcgtggggggggggggttgatgtcgtacgcctccctggtcacctgcgagggggcgatgaacgcgctctctcgcgaagggtgccggcactttgaggccctcgaccaggtagatgaagattttgggcgagatatctatgaggtcgaagaccccgtggtgaaggagtccgccggggccctctatgaccgaatgtggggtctgtacggtcgtgaggtggtcagggaacgggccgaggctgcgagggctcaggcggagcgtggcgagcgggtggacgacttcggggcactgaacagcgcgctgcctggcccggagccgacccctgcggaggccgcgactggagtcgccctggaaacaaccccggagcctgcggaagacgcgccgagcgtgcccacctctgctgtggccggcgaagacctgcccccaaaggtggccgaaggcgcgcctgacgcccccgcagctgctgcgccgagcgctgaagattccgcggcggtggtggcggaaacagcggcggaggagacagcggaggctcccgcagcggcagggccttcgcaggttcaagattttgggcctgcgcacgcaaccgctactactgggtttttggcggcttcgaccgcggaagatggaaatgaatatggtgggtctgtatctgagttttttgattttactgattctgggagctcggttgagtggactgaggagtcgtcggaggaggacttggattattttgcggccttggacgtggctgcggcggaggcttcgccacacgccgcggacgcgccagacgtgctgggtcctagcaccgggcgccgacgacgaagggcggttgcaaagcgtagggttagtgcggaggaaggggctcggcttcgcgtgagtaggggtggtcggcaggaactgttgtctttgccggccgccacgagcacaggggaaggggaactgcgaagtctttttgcgggtgaggagcttaggataatgttatttaattatagggagatggggattattcctaaggtggagccgatgtag

SEQ ID NO: 34509 - DNA, 216 bp, Zea mays
  Peptide Sequence Number=SeqID_76288
atggagaaaaagaagaaggcatgtagcaagcttgtgaagaaccagatcatcaaagcatataagtttctggatgagaagtggtatcttcggactcgtatcagagagggagaagctcaaaagatacgaaggttgacacagcgccgaagctgtaaagcaggaaagcttcggcatgttcgcagaaaaaggaaccgacttgaagatgaaaaggccatttag

SEQ ID NO: 34510 - DNA, 1320 bp, Zea mays
  Peptide Sequence Number=SeqID_76289
atgaacaaacacactggcattcaaggtgccattacaaacggaactccggttccccctccgcaggtacgaacaaccccactccaagggggaaggcctgcggagcaacggaagaccgacgaacggcgcgccgccacctgctccagcagcggcgacgacgacgacttctgctccggggggccaaacagcggcagcactgacctcagggcggatgctgccgccaggaggcccccgcccatgccaaaacttgtgaggcaaggactggcagaaggccgtagagttgaaggtcggtccgtggccggccttggctatctcgccggcagaagaacctcttcaagctgccgtggcggacgccagcgccgtgagcggctccgaagccactcgcgtccgagagccaggcacggtgcagctgccagcgccacggacgacgaccgcccttccctccgatcactgagtgaaggagcgggccgtcgcccatgcgggggccgacctcaactcggcacactcccctccccagccctggtgatgaaaatccttgaggctgagggaggggcagaggccgcagcccggctcgctttcccccaccatcaagccgaaggtcaccaccttggctctccctacgtgcgcccccaaacgccacgggctgagtcttctccaacacgctccaaggccctcccctgcggcatgggggctgggccccgcatgtcatgcaaaccggctcagagcagaagaagccaaagcgccgcgcgtggtgcccacaaccgcccagcggttacaagcgaccctccacttttgcccagaccaacgggcggaaggagtgggcagccatgcaggcgggatgcaaccgcgccaagtggacacgcttcttcgactcccaacgcgccagcatggaagcccaggcccacgcgtcacgcaaccggcgcgccggatgctgcatgcaggcaactgcaccgccacttgcgccaccatcgcgcctcttcggttgcggaaccaatgccgcggctcgaggcgacccagcgcacgacccagcggcgccagcctggcgcgacggtcaatgcagccgaaagtgggccggcagtaatgacggtggcaggcgagcgggagcagcagttacgtcgtcagccaggctcgcgtcccatccaggggcagcaagagagcctcctctcacggcgcgaagacggcgcgcccgtgatccgtccctcgaatggctcgcgcacgcgcaacggccgccccgccaaccactcgccccgtcgcattaactccgcggcgggacaggcggcgcttctggcaggagaagcgggcgacgcttcgccttcgccgtaa

SEQ ID NO: 34511 - DNA, 810 bp, Zea mays
  Peptide Sequence Number=SeqID_76290
atggctgaaaggtaccaactcccacggagttgtgttcctccaatgatgaggcgaaaagacggcgggttccccccatccgggggcttggaaggcggcgctactggcaggagaagcgggcgacgcttcgccttcgccgtaataaccgcaccagaaaagccgcctcagatcgcgtgggccctacacccactactggtcaaaggttcgaaggctgaccccccgaagggctccacggccgcctcaggctactcgggctccgcgcccattactgatcaggggttcgaaggctggcccccgaaggatcacccgcaggtacttttgggcgtgcctctgggccccaagccgacccccaacgagcggggcacggacgtccactcggattacccgcttgcagctcaccggagacaccatgttcggtacccatcgagggctaagccccggaagacggcgaactccgctccgcccgacccagggctcggactcgggctaggccccggaagacggcgaactccactccgcccgacccagggctcggactcgggctcagccccagaagacgacgaactccgcttcgcccgaccccagggctcggactccgccctggcctctgccgaaagacctccgcctcgcccgacccaggggctcgggctcggcctcggccatggaagacagactcgacctcggctttggaggagcctccacgtcgcccgacctagggcgcaggccagccacgtcaacaggaagcgccatcatcaccctacccccgagccgactcgggccgcagagaacaagaccggcgtcccatctggctag

SEQ ID NO: 34512 - DNA, 333 bp, Zea mays
  Peptide Sequence Number=SeqID_76291
atgtccccgcgaagcccgcccctgcgcccacctcatccccattatttggcagcgccgccggcacgtaccgacccccaggcgctccacaggccggcgccgccctccgaccgcgaccgcccgggtaccagcggcctcactgccgaggagactgccgcgtggttcccggacaccctcgacgacccgctggagaaggacctggagagctacgccttgccgagcaacggccgtgcgatcagaggtgcgcacctgggcatgtcgcttgatgtcatgttgattgagattgatgagaggttcaacgccctgaagctgctcatgggctccgtgttccggtag

SEQ ID NO: 34513 - DNA, 549 bp, Zea mays
  Peptide Sequence Number=SeqID_76292
atgacatcaagcgacatgcccaggtaccccgcgcactgggcctgcgcgttcgcgtcgaagaggtaccggttggagcgcgacgccgtcgctcagtcaggccattctgaggaggaggagcagttttcggggctggagctggacatcaaggacagcagcctgggcgtcaccgccggcgagtcgtcggatgtcactgacccgctgctaaaccgggtagcgcaggccttggtggtgtcgaggaaagagccgcagcgtcagcagcgtcggaaggtcgacgacgtggcgggtgagcgggttgaggaggcgcacgacgagactcctctcgtcgcgcaccaccagcatgccctccgacgccgcggcgggtcgtcgagggtgtccgggaaccacgcggcggtctcctcggcagtgaggccgctggtgcccgggcggtcgcggtcggagggcggcgccggcctgtggagcgcctggggctgctacgacgctcccattgtgccacaacagctccacgacggccaacagtatcagagggcgcagatccatggacacgagtag

SEQ ID NO: 34514 - DNA, 405 bp, Zea mays
  Peptide Sequence Number=SeqID_76293
atgacccgtagcgtggcagcagtcggcatatgctacggagttggtggtggtgttgtgtcgtttcggcgggtccagggctgggaagacactcacattctctcgcccttctcggactgtcgcctggtgcgggtgcctcttgatgcccaggtcttcgtcgtgtccttctccggcaacgaacagcctatggcggctcggattggagcggacgggaaggcgatggcacgccgcggccgcgtggagctgcggcggatcgaggaccgggtgagccggcaggtgcgcttctccaagcgccgctcggggctcttcaagaaggccttcgagctctccctgctctgcgacgccgaggtcgccctcatcgtcttctcccccgccggcaagctctacgagtacgcctccaccaggtaa

SEQ ID NO: 34515 - DNA, 411 bp, Zea mays
  Peptide Sequence Number=SeqID_76294
atgtacagcgcgggaaagtcgggtctctgtggtggttactcgctcgacattgttgggccgtctgggtttgcgccgatccggcctttggacccgggggatttctgtcccccacacttcccagtcctggacccgccgaagcgacacaacaccaccaccaactctgtagtatatgtcgactgctgccacattacgggccttggttgtccaatatctcagaccttgactcctcatcgccaagataacctaagtgtgctaggcgccaccatatcctactcgacggcacgcactgagatggccaggagcatgaccgacgacgagcgtcgatggcttgctgctgcgaccgtgggcgggcagcaggttcgggaggaagaacagggcgaaggccaggaagacgaacgggacgtccgatga

SEQ ID NO: 34516 - DNA, 393 bp, Zea mays
  Peptide Sequence Number=SeqID_76295
atgaggcggaaagacggcgggtaccccccacccgggggcttggaagatggaaagacgcgacgcataagggaggaagaagacatggtcgccttccgaaagggctcaccggagacaccatgttcggtgcccatcgagggtaacatggcgctctcccccctcctccttgcggaaaggcgacgtaggggcgtatgtaaaaaagtcgagtctgtccctgatcgccctctcgccctgtgcggaggctcgggggctgctctcgcaaacccggctccggccgaaccgttgacagcgtcaacataccagcccgagaacttgggccccgaccgtgcacccgggctacaaccagttcgcatgagggaacaaccaggccagccgaagcattacgcgaggcattaa

SEQ ID NO: 34517 - DNA, 804 bp, Zea mays
  Peptide Sequence Number=SeqID_76296
atgtcttcttcctcccttatgcgtcgcgtctttccatcttccaagcccccggatgggggtacccgccgtcttttcgctcatcgtggaggaacgcaactccgtgggagttggtacctttcagccattgttcggcttcaaggattttcatcacacagcctggttgctcccctccgctggtggtcacccaagacggtgacctccagctcctggatggggagaggcaagccaggctgtgatcccgccctcagcatcgggggtgttcgtcatcctcgctggggcggggagcgaggcgagctggggctctccctcctgcgcgggtcggcggaccacctcctcttccagcttctggtggtggcaatcgtcctcccgcgctgcgacggagacgtcctccagtcatgccggggaaggcgaactgttgctgcccagctaggatgcaacattccgtcctttccctcgcattcgcggcgaggacgacagcgaggatctgccggtgcgcttgggagcggcccgctctttggctttgatggctggttcgcgtcccttgagcgggaccgcgaaccagagccctccggtggccgcgtccacccgggaccatggttgctgctgcagaggtcgctggcgagcctcccgatgttcgtcaccccgcaggctcgaggtcgctcatacccgcggggacggaaccggagttccgtttgtaagggcactttgaatgccagtgtctttgttcattgtggctgtcaaggcctgaacatgtatgtaattttggcacggagccgtgtttttttcctcattttcgagcactaa

SEQ ID NO: 34518 - DNA, 1710 bp, Zea mays
  Peptide Sequence Number=SeqID_76297
atgccgaccacggttggaggcgaggtggccgccgcggcgaatggccgtgtccggaagcgcgcacccaaggataaggacggcagcaagccggagccgtccaagaagcccagcctgcccaggcagagggccgccagcaagcagcgaacggctggagacatgaacgcggtcgccgccgacgcgaaaacccccggtgtcgagaaccagacgcccagcaacgatcttcagatcgtccctgttgtgccgccgccaacgccgaccaacagaaggaagaggaagcagaagtcgccgagcagcagcgtggtcgccaggaggagcagcgcggtcgcggcggcgaagaggcacaccatactggcatggctgatcgacgccgggttcctgtccgacggggagaaagtgttctacgttccagtggacggcaaggtcgtctcgggcgcggtgaccaggacgggagtccactgcggctgctgcgacgccgtggtgccgctgccgtcgttcgaggcgcacgccgggcgcgaccccgggcggcagcggcggtcgtgggagaagctcctgctcgtgtccgggagctccctgctgaggcgcatgcaggaagcgtgggagaaggagcgggtcaagatgttcctggtgcaggagaaggcgagggcggcgctggagcaggagcaggagaggagcgcgcaggccaagaggaggctcctcgcgaagcagaagaagggcgccgtcgaaggggtcgtgacgcctcctagacccagaacgaagatgaggcccggcgcgaaggattccagcgacgacgcctgcggcgtctgcggcgacggcggcgagctgctctgctgcgacagctgcccgtccaccttccacccggcgtgcctcgccatgaaggtgtctgctcggttatcagacatggtaggcgtaacaaaccacaccgaagatggtttctcatgggctctgctgaagatccagaaagacgaggccgtcagttcacaggacactgctgctgttcttgaatgcaacgtgaagcttgcggtggcgcttggcgtgctgaacgagtgcttcaacccggccaaggatcgccgaactaagatcgatatgctccaccaagctgtctacagcctcggatcagaattcaaacgggtgagctacgaaggattctacaccatggttctggacaaggatggggaaaccattgcagcagccctgctgaggatccatggcacaaaggtcgccgagatgccgttcgctgccacgctgccagcttaccggaaacaagggatgatgcgtcggctggtgaacgctgtcgagcaggtgctggcgtcagtgcaagtggacaagctggtgataccggccatagctgctctggtggacacctggacgaggtccttctccttcaggcccctgctggaccccgagtcgagggaggaaatcaggaggcggagtctggtggtcatcgccggcaccaccctgctccacaaacccgtggccgccgcgcggccgccgtcgccacacagacacgctgaagcagcggcgccgaagaatgcagggctgccgtggtggtggaagtacacgcagcaggcgccgccgctcacggacgacgagcgggccttcctggacacggcgccgctcgcctgcagcttcaccgacctgctggtcaccggcgagctgcgcctgtgcgcggggaactcgatcgcctgctgttcctcagcctccgtgcggtaa

SEQ ID NO: 34519 - DNA, 1182 bp, Zea mays
  Peptide Sequence Number=SeqID_76298
atggttctggacaaggatggggaaaccattgcagcagccctgctgaggatccatggcacaaaggtcgccgagatgccgttcgctgccacgctgccagcttaccggaaacaagggatgatgcgtcggctggtgaacgctgtcgagcaggtaggaggagcacgacactgtctgcctgcctgcctttctgtatgccactgtcactgttcaccaggtgtgagtgtgaagcaggtgctggcgtcagtgcaagtggacaagctggtgataccggccatagctgctctggtggacacctggacgaggtccttctccttcaggcccctgctggaccccgagtcgagggaggaaatcaggaggcggagtctggtggtcatcgccggcaccaccctgctccacaaacccgtggccgccgcgcggccgccgtcgccacacagacacgctgaagcagcggcgccgaagaatgcagggctgccgtggtggtggaagtacacgcagcaggcgccgccgctcacggacgacgagcgggccttcctggacacggcgccgctcgcctgcagcttcaccgacctgctggtcaccggcgagctgcgcctgtgcgcggggaactcgatcgcctgctgttcctcagcctccgtgcggcgtccacaagtgcgtcatgttctgccccgacatcctgccctcgcgcaatctcaggaatcaccgcctcgcgccatcatcgcccctcgggcaccttcaaccttccatcggcgcagtcacagaatcccaggaatcatccatcgcctgcgcgccccctcgcgcaatcccaggaaacgctccatccccgcccagtgcgacgtgctcatgccccgcgcacccgccaccgacatcctccccacctctgtctccatacaccggcacctgccgaccgggtcgagggcccgggcctccaactccgtcaggttctcgccgcgcgccgtccgctccgtgtcgcacgagtgcctccaggcgtcgttccacgccgacctgccggcgccgtccaagaagcccactgccattgccgtccctaggcacgctgcggcgccgcgcaagtctagcggcggcggcaagaagcagctcaacctgttccagcgcgcggcggcggtcgcgctcgacgcgttcgaggaggggttcgtggccaacgttgatagtcgcctagagggggggtga

SEQ ID NO: 34520 - DNA, 300 bp, Zea mays
  Peptide Sequence Number=SeqID_76299
atggccgtcacgccgctcgacctcgtcaaatgcaacatgcaggtgagcgggcagcggcctagatctgtgtcccccggtggtattaatggagaaagatcagaaatagctgaaaatgaagcaacatcaacaggtgaagctgctcggcttagagctgctctccggcgtgctccacccggcgctgttcggcaacctcaccagccttttgaacggttattaaagaaagaaatgtcctcacttccttcgaaaaatatagtatctcatgggttaatttatgatattagcacttgctacggcctatag

SEQ ID NO: 34521 - DNA, 417 bp, Zea mays
  Peptide Sequence Number=SeqID_76300
atggcgagtggtcattgttgtcggtccacctctgctcacctccggtgtcgagatgacgccacaatctttgatataatagtcgtcgaacgcgcgcgatatggtgagtaccgatcactcttggctgggctgccaaatgaagtgcaccccgggctcatcagcgaggtagtacacctggtcgttgcaccaccggatgtgctactcctctacatacatcttgttcgaggacactcacacaacaacaacaatggtcatcattccagcgcacaagaagtcatggtcggttgcgatgcccagaacaacccgagagtcgtcgacattggcgacgaccatgaggtccccatgtttgacgatggcagccgctcccaagcggcggctgcgccggagcttgccgtacacagcggcgcatgggccatgtag

SEQ ID NO: 34522 - DNA, 573 bp, Zea mays
  Peptide Sequence Number=SeqID_76301
atggccgttggaagtgtgctgtcgtatggcgcaccggacagttcggtgcgccaccggacactgtccgacgaccgttgcgcgcgaagtagtcgttgctccgctggcacaccggacagtccggcggcacaggcagcatcgggcccccaggcggtggaggcgatgcagaagacacttgaagatctcaaggcggagcagcgcgccggggtccagcccatcgccgcatgggccggcgaggcaagcatggcactggtgccgctagtggtgagccccatcccggtgtcggagccgccgacgtccatctccgacgcgctcccggtgctggattccgccgccgaccgcctccgtcgcctggaccagatccttggcgcccgcctggaggccgagggtggtaggctctaccaggcagtgattgagtacatcctgacgtgcttccggagccacgacccggccatctccttggagccggtgattgctggtccggtggccgacaccgaagacgtcgcccgggagggcgtacaaggcactgtggaggtggtggccgggcgcttccaacgggatcctgccgatgattag

SEQ ID NO: 34523 - DNA, 444 bp, Zea mays
  Peptide Sequence Number=SeqID_76302
atggcactgctcttaaaggaactgccattttttcttcttttcgcagctggcctttggtattggtttttgttgctaggttttgaagatgccttgcagggaattggtacagttctacgacttctttcaaaccaagcgtccacacatatcttgaggtatgtttctgatcttaagtacttatttacaacttctctcaccacacatatcttgaggtatgtgtgggaagcggaggccgacgacagctcttacgttatcaaggaacaaacttatcctgagaaagtgctcacacgtggaacacagactactctttatttgagagatgatgacaagtatgagtttactgaccctgcaagaattgaaagcttagttaagaactgctcacaatttgtgtcattccccatatatacatggaaggagaaatcaagaacatttgggggggttgattga

SEQ ID NO: 34524 - DNA, 834 bp, Zea mays
  Peptide Sequence Number=SeqID_76303
atgcatcctctgcgcctgctgctccacctcctgcccatcctactgaaacaaggatttgaagcaaaacaaccatatttttcccttttctcatccccatatttggtgatatggagatgtccatacaacacccctctttggtatgtgtgggaagcggaggccgacgacagctcttacgttatcaaggaacaaacttatcctgagaaagtgctcacacgtggaacacagactactctttatttgagagatgatgacaagtatgagtttactgaccctgcaagaattgaaagcttagttaagagctgctcacaatttgtgtcattccccatatatacatggaaggagaaatcaagaacatttggggatgaagttgctaaatccaagcaatcaactgtctccacaaaaacaaagaagtttaaggaaattcaatttcagaaacttcagagattgccagatgggtgccatcctgattttgataatgatcatctgtgttctgtaaataatcatgacctgcttcctgaaatgagtactccaagtgctgaccttcatctacttcctgagacaggagtggaaaacatgaggacacctaaaagtcttcacgctgaacttaagcgtgagctgttaaagctaaatacggtgttaaagctaccattccttgaatatcttttaaataatcatttagttgtgcgggagccacggagcatactgcatgcgttcaacatagccttgtgttggcgtgctgcttcttttctgaaatacactgagttggatcgtcgagaatcactttcccttgcttcagatggactgaattatgaatgcaatgaggctccatcatag

SEQ ID NO: 34525 - DNA, 204 bp, Zea mays
  Peptide Sequence Number=SeqID_76304
atgggtaaagagaagttacacatcaacattgtggttaatggccatgtcgactctggcaagtcgaccaccactggccacctgatctacaagcttggaggcattgacaagcgtgtgattgagagatgtattgtgacctatgaattggaatttgtctgccacaattttggtcattggatatgtaaatttgtgaaatatgtcatgtga

SEQ ID NO: 34526 - DNA, 852 bp, Zea mays
  Peptide Sequence Number=SeqID_76305
atgggtaaagagaagttacacatcaacattgtggttaatggccatgtcgactctggcaagtcgaccaccactggccacctgatctacaagcttggaggcattgacaagcgtgtgattgagagttcattatcctggagctgcagagggactttatgtagcatgatccatgctcagaattttccagcaacttcgatgggaggaattttgtttgagcttgtgggcccaattcatatcagtcgcgaccctgggactatctcacgtcctgcggcgagcttgcagcgctgctgtgcctcggatacgcggacaagtcactacttgggactatttacacccctaaaagggaaacacacagatgaagttgctaaatccaagcaatcaactgtctccacaaaaacaaagaagtttaaggaaattcaatttcagaaacttcagagattgccagatgggtgccatcctgattttgataatgatcatctgtgttctgtaaataatcatgacctgcttcctgaaatgagtactctaagtgctgaccttcatctacttcgtgagacaggagtggaaaacatgaggacacctaaaagtcttcacgctgaacttaagcgtgagctgttaaagctaaatacggtgttaaagctaccagataatgtactctttctggccaaccagttccttgaatatcttttaaataatcatttagttgtgcgggagccacggagcatactgcatgtgttcaacatagccttgtgttggcgtgctgcttcttttctgaaatacactgagttggatcgtcgagaatcacttgcccttgcttcagatggattgaattatgaatgcaatgaggctccatcatag

SEQ ID NO: 34527 - DNA, 279 bp, Zea mays
  Peptide Sequence Number=SeqID_76306
atggcagaagcaagcttccacgtgttcgacgcgagctggcatccgggggcgcgctcagagcacgccccccaatcgtgctcaccggagttcaagaacccgccgacgcacgtggaccggccgtggtttggccggagcaggagccgccgacgacttccgccgcctgtgctcgtggccagggtagctccgaccacctccgacaccgacccgcacatcggcgtgaccgttgcgacctcccggacgtcactgaccaccccgccggagctctactgccgcctgtaa

SEQ ID NO: 34528 - DNA, 267 bp, Zea mays
  Peptide Sequence Number=SeqID_76307
atggcagaagcaatcttccacgtgttcgacgcgagctggcatccgggggcgcgctcagagcacgccccccaatcgcgctcaccggagttcaagaacccgccggcgcacgtggaccgggagctgccgacgacccccgccgcctgtgctcgtggccagagtagctccgaccacctccgacaccgacccgcacaccgacgtgaccgtcgcaacctcccggacgtcactgaccaccccgccggagctctactgccgccgatagctaaataa

SEQ ID NO: 34529 - DNA, 615 bp, Zea mays
  Peptide Sequence Number=SeqID_76308
atgcggcttcatatccttagtggtatgaaggcagaagtcatccttgcatttgcagacatttgcactcatgaggaatatatgaagtgtgacattactatgttactattgtggtttctacctgcgaggggatgctgccgaaattttatatatggacgtcggaagtgtagttcagtagcattccgggttgtttgtggaacccggagtgttacaacgcccactactgatcaggggttcgaatgctggccccccgaagggttcgacagccgccttagaacacgcagagcgagggatgactctaggtacgtccaatacatggccaaggctcgggctacgctcccgagcacaaagctgcaaaggcctgatgggcgcgacacaggacaaagctctgtccgctcaagggacacgatctcgcctcgcccgagcccagcctcgggcaggaacagcagacccaggcagattcacgcctcgcccgagggcctcctcaagcaaacggggcacacctccgactcgcccgaggccccagcttgggcaggtttcgcggagaagcaaccttggcccaagatcgcctcgccagccgaccggatcgcaggagcattcaatgcaaggatcgcctga

SEQ ID NO: 34530 - DNA, 279 bp, Zea mays
  Peptide Sequence Number=SeqID_76309
atggccggagtcggtcggtccacacgcgcaggcggggatgctcgtcggcggcgaggagtccggcctggtcacggcgagatagagcaattggatgagtcagagaggttcacgggatgccagagaagatatgggtgcaaggaattggacggagactcaccgagatatggagccaggaaatccagtctgtctccctgctcaaacccgaggcaaatccagggttttgtcgcgtctagggctcgcgtcccaatgccatcttctggcacacgacagaggggttag

SEQ ID NO: 34531 - DNA, 549 bp, Zea mays
  Peptide Sequence Number=SeqID_76310
atgacaaccgtccccatcgattccccgttcgcgtccaggcctcaccgccttggcatacaatgctccactgaccccggctgccgccgtgcagtgaccgcacttgcggggatgctcgtcggcggcgaggagtccggcctggtcacggcgagatggagcaattggatgggtcagagaggttcacgggatgccagagaagatatgggtgcaaggaatcggtcggagacacactggatagctcggtccacgcgcggcggcggaagaccgaagtccggtgaggtcgatctcgggcctccggtgaagtccggccgggtccgagggcttggcaagcttcacgggctactggcggagctagccgaagcactggcttgcccagaggatggctggggtgggctggccacgatggccgaggctctggcggcaatggcgggcggaattgagctcgccggagctaagggaaagtggctggccggtgaggagatatggagccaggaaatccggtctgtctccctgctcaaacccgaggcaaatccaaggttttgtcgtgtctag

SEQ ID NO: 34532 - DNA, 690 bp, Zea mays
  Peptide Sequence Number=SeqID_76311
atggacaggcacgccgtctgcaggatggcctcatcgccgcccgcggtgtgccttatccgcaataaatgcagcgccgcgctgcccagaggccttacgtcaggctccgctcgctggctcacgtcacgggtagtaggccatgtggcagcatcgggtctccgcctgagcggggagcagaatcgtacgcgaccctgtacaggggggtccgggacccatcctaggggtccgggcacgcccgtggaggttctggatcttacccagaggtctggtccgtacgtacaggggtccggcactttcccatgggggtccggacccactgttgatatcctggaggtaccgacagtggccctcgggcccacctcaagggaggatacgagcctatacgtggggccaaagcttgattggcgattggagtgctgcttccgtgcgctcgctgaccggccccaaggaggtgtggtactggcgcgagcggtggttcgacttctctgcaccgaggaaccggtgcccaaggaggatgactcatgggcctgggcccccatgtcagacactgggctgttaatttcggcggaggtgaagaggcgcactactgcgggcggtggctcgctcctcacgcgatggttcgtcttcctcgcactcggagaccgatgcccaaggagtatgactcgtggccccgggccccgtgtcagaggctag

SEQ ID NO: 34533 - DNA, 231 bp, Zea mays
  Peptide Sequence Number=SeqID_76312
atggcgaagccgagccacgctactcctcctgatcctctcctgcggaagcagcaacccactcgaccgtctatcccggtggcagggatggaggccaagtcacaccatcaaccaaatcaaggagggctcaccgccttggcatacaatgctccactaaccccggctgccgccgtgcagtggccgcacttgtacccaccatatccggaatgggagatcacgtctcaggacaagtga

SEQ ID NO: 34534 - DNA, 189 bp, Zea mays
  Peptide Sequence Number=SeqID_76313
atggtctcccattccggttatggtgggtacaagtgcggtcactgcacgacgacagtcggggtcagtgaggcattgtacgccaaggcggtgagccctgttctgttgccagggaaccgatggggacggctgatgtaccttcttgatttggttgatggtgtgacttggccttcatccctgccaccgggatag

SEQ ID NO: 34535 - DNA, 441 bp, Zea mays
  Peptide Sequence Number=SeqID_76314
atgtcgggccgtgctgagagggcgcaccacactggggccgcgccgccggggaccgcgctgacgggggccgcgccggaggctgggagtcagccgccggggcagggggcaccgcgcccgaggacgggccacgtcgctggggttggggggccgcgcgcactggatctgggggccgtgaagatcctcggtggcaggctcgggagctggctcctggacttcctcttggacagctccttgctcgggaatgagcacatactctccgtcagtgaggttgcaatcggcggcgagatggctctgatgaggcgtccagggaggtcggggaggttacggcggtcacgtcgaggtacgggttggtgtcagaggtggttggagtcggctggtccacgtgcgcaggcaggggagttcgtcgatggcgagtacttcggcctgctcacggcgagatag

SEQ ID NO: 34536 - DNA, 1008 bp, Zea mays
  Peptide Sequence Number=SeqID_76315
atgccgaagctcacaaatcaatcaaaatctgacagagcaagaaaatccaagcttgaaaaaatagcacaagcgtttgagatggcgcaccaaatgctatcaatgcgggttcctatttatatgcccagcgcattacaacttggtgggccctacatgtcattgacgttcgctattctagcgaagggaagagaaaaatggaaatacttctatactggtctggagaaaaattgtagagctcatactccaattaaattaaaggaaagactaaaaaggtgcaacagtgagcaaaccaatttttacccgattactcatgatgaaaaccaccaggagaaatatgaaactaagattgcaacctcactggcggagagtatgtactcattcccgaacaaggagttgtccaagaggaagtccaggagccagctcccgagcctgccaccgaggatctccccgcagccccagcttctaaaggcaagccccagttttatgcataacaaatttatatatgctactttactacacttaatgattgtaggtacactacagggcatggttgatgatgacttcaccacccccatcaacggaggagacactcgtttcagttccgagtacctttcccacgagggtttcccctccattttgtgggaggtgctcagctccatcggttaccctacaccccctctgtacacggtgcatttgtacgaggagcatcgggtgccccgttgccgagtctggctagctctggaggctcaccctttgcagccgggttggcgttcctttgactccgagactattggattcagggcaaacgacaccaccgaggctgcagctatgaataccctgacgactttctacggataccatcccttggagatggtaatgcgcccactaggactcttccctgctgagaagagggatgaccccatgtggtgcaaccgagtgagccacatgaaggacgtgtcggccatgcatcccgaccaagttgggaggatcaccaccataacatttgtatga

SEQ ID NO: 34537 - DNA, 243 bp, Zea mays
  Peptide Sequence Number=SeqID_76316
atggcgagagtggcacgtaccctcctggcaacggatcgcctaaaaggggtggtgtactctcgggtggcgtggacctgttcatgcagtggaggatccgtgggaatagtagacatcaagcatacccttgagagtcttttccttagtcgggtgaggaagcgacaaacttttgttgcttttgctccaaggtggtaccaaatgaggaaaaacaagactgaagtacgggggactcggtcctccacttag

SEQ ID NO: 34538 - DNA, 297 bp, Zea mays
  Peptide Sequence Number=SeqID_76317
atggcgagagtggcacgtaccctcctggcaacggatcgcctaaaaggggtggtgtactctcgggtggcgcggacctgttcatgcagtggaggatccgtgggaatagtagacatcaagcatacccttgagagtcttttccttagtcgggtgaggaagcgacaaatttttgttgcttttgctccaaggtggtaccaaatgaggaaaaacaagactgaagtgcgggaggactcggtcctccacataggatcttttgtttatagcttatcgggaggagtttgtgcctcccttggtttgtaa

SEQ ID NO: 34539 - DNA, 543 bp, Zea mays
  Peptide Sequence Number=SeqID_76318
atgatttcaaattacaaatgtaccttcggtcttgaagaatacaagtgtgatgtgaaggccaatgacagacacaggacgcagcctgtgacgaattacaattatgccctttacaaaagtttacaacattatgttagacctctatggataaaaaggtcattctatctttatgtcggtttgcaacgccgaagctctataaaaaggaaccttcggccatttcctggggacgatttcagccgaagctgcttcttcacgcaagaccttcggcgcaacgaagcatggccccaacactatggtcttattctggatatgatgatatacttgtggcatttaaggggactcgggctgtttcccgagtacctctcctatttcctctccgaggaggttgtccacattgcaaccactgctcaggagaagacgaagccgtggaaggagacttccaggagttccaagattacaacgaggtctaggtgtgggttggcggaaaacccccagtcagctgcctgtgaaggccctatctttactgcgtttctcttagcactttga

SEQ ID NO: 34540 - DNA, 231 bp, Zea mays
  Peptide Sequence Number=SeqID_76319
atggggattagctctccccagacagaaagggaatcacgactcatgggtaaatatttcctctccgaggaggttgtccacattgcaaccactgctcaggagaagacgaagccgtggaaggagacttccaggagttccaagattacaacgaggtctaggtgtgggttggcggaaaacccccagtcagctgcctgtgaaggccctatctttactgcgtttctcttagcactttga

SEQ ID NO: 34541 - DNA, 129 bp, Zea mays
  Peptide Sequence Number=SeqID_76320
atggctgagcccagcgcgcagtcatcgcctcgccaccgtttcctggccgaggggccaccgtgcgcacctggaagcctcgacgccgtgcctgcgcagcacgtcgatgtggatgccatggctgttatttaa

SEQ ID NO: 34542 - DNA, 483 bp, Zea mays
  Peptide Sequence Number=SeqID_76321
atggctgagcccagcgcgcagtcatcgcctcgccaccgtttcctggccgaggggccaccgtgcgcacctggaagcctcgacgccgtgcctgcgcagcacgtcgatgtggatgccatggctggtaagacccgtagatcccgtctttcctccatgtggtgttccttccctggaccatggtacttttcgctctgccgccttgcggttgcctctgctggcgtggtcggccgacccggtctcgcccgcccagccacgtgcacaacaacaacctcgcctccatcgcgcaacctgcgcaagtcgccgaacccagtcccaaaccgtgtcgtcatgcttgtgctgtggacgtacccgcatccgcgtgtgcacaaacgtgtcgttcttgccgtccgcgtgcgccgtcaccttccactcgcgctgtttcgcgagtgtcgcacacacgatccgcgcacattagttaatcacttcgctataatcgctcatgcttag

SEQ ID NO: 34543 - DNA, 1092 bp, Zea mays
  Peptide Sequence Number=SeqID_76322
atggggggctcggagcccggttccttcgcggagaaggatccctttcgggcggttattacggcgaaggtgaagcgccgcgcgttcctcctgccagaggcgccgccaactggtgcgccggttgctcgacgcgtgggcctgggttcccaagctggcgtgtcagaagtcggagaagcgcgtccatctggcgcggttgcatgccgcctgcatggctgcccgccccttctgcccgttggtctgggcggaaatggggggtcgcctgtgaccgccggacggtcgtgcgcaccacacgcggcggtttggcttcttctgccctgggctggcttgcatgacatgcgggacccagcccccgagtcgcaggggagggccttggagcgtgttggagaagactcagctcgcggcgcctgggggcgcacgaacgcaactccatgggagttggtacctctcagccatcgttcggcttcaaggattttcatcacgcagcccggtcgcgccccttcaccggcggtcacccgagagggcgacctccagcttgatggtgggggaaagcgagccgggctgcggcctctgccccttcctcagcctcaaggattttcatcaccaaggctggggaggggagagtgccgagttggggtcggcccctgcgtgggcggtggcccgctccttcactcagtgatggggggagaagcgggcattgcccgtggcgtccggcagctgcagcgtgcctggtcttcagtcgcgagtggcttcggggccacttgcggcgccggcgtctgccacgacagctggaaggggttcttccgccggcgcggcggccgggaccggccacgggctgacctccaacctctacggccttctgcccgtccttgcctcacgagttttggcatgggcgggggcctcctggcagcggcatccaccctgaggtcagcgttgccgctgttcggccccccggagcagaagtcgtcgtcgccgctgctggagcaggaatccctcggcccgttcggccttgttgtctggggctcctctagcttagttgaagagacccctcggccgccctttggtggaccgaggccaggggtagcgatatcagtatga

SEQ ID NO: 34544 - DNA, 1307 bp, Zea mays
  Peptide Sequence Number=SeqID_76323
gaggcggcgacggcgacccgctgaggccgacgcggaagcgcaggaagggcccgctgtacaagctcaaggcggcgatccagggctggggatccctccgcgccgccgaggtgtacgggggagagtaccagtaccagcgcgccgtcgagaaggcggaggaggctattcttctcgtcaccttctcgcaggttactactcagctaggcagatatgttatcactatgatgagcagcggtgttgtacttggggttggattccagctgtcaggtggagacagccaaatgaacgaactaatttggtatagctggcttggtggggtgattatcggcacaatgataggtgcaaacagtgtcctagaggaacactgcaaagctggacctcgcaatgtcgtcataactggaagtcctgaatcagtccttcagactataaaagaacttgaagagaacatacaggaagggttatctgttgccaaaaagaagcagaggaatattctatcgcatgccaaggttgttggtacagattgtgatgtctgtaaacctgaagatgtgaaggagttagtgaattttgctattaatgagcttggttcagttgatatttggataaataacgctggcacaaataaaggttttaggccattggtaaccttttcagatgatgacatcactcagatcgtctcaacaaacctagttggttctctactgtgcaccagagaagccatgaatgtcatgcaataccaagagaagggaggccatatattcaacatggatggagcaggttctggaggatcaagcacaccactaacagctgtctatggttcaactaaatgtggactaaagcagttccaaggatcacttctgaacgaaagcagaagatcaaaagttggagtgcatactgcttcacctggtatggtcctcacagaccttctgttaagtggttcatcgctcagaaataaacagatgttcaatttaatatgtgaacttccagaaacagtagccagaactttggttccaaggatgagagttgtaaaaggaagtggaaaggcaatcaactacttaacaccaccaaggatcttgcttgctctggttactgcatgggttcgacggggtcgatggtttgacgacgagggaagagcggtgtatgcagctgaagctgatagaattcgcaactgggctgaaagtcgagcacgcttctcgttcaccgacgccatggagatgtacacggaaaacacatgggtttccgtattctcgctctcggtggtctgtgcgttcataatcctctctagctccggtggacctcttccaggcacatga

SEQ ID NO: 34545 - DNA, 978 bp, Zea mays
  Peptide Sequence Number=SeqID_76324
atgataggtgcaaacagtgtcctagaggaacactgcaaagctggacctcgcaatgtcgtcataactggaagtcctgaatcagtccttcagactataaaagaacttgaagagaacatacaggaagggttatctgttgccaaaaagaagcagaggaatattctatcgcatgccaaggttgttggtacagattgtgatgtctgtaaacctgaagatgtgaaggagttagtgaattttgctattaatgagcttggttcagttgatatttggataaataacgctggcacaaataaaggttttaggccattggtaaccttttcagatgatgacatcactcagatcgtctcaacaaacctagttggttctctactgtgcaccagagaagccatgaatgtcatgcaataccaagagaagggaggccatatattcaacatggatggagcaggttctggaggatcaagcacaccactaacagctgtctatggttcaactaaatgtggactaaagcagttccaaggatcacttctgaacgaaagcagaagatcaaaagttggagtgcatactgcttcacctggtatggtcctcacagaccttctgttaagtggttcatcgctcagaaataaacagatgttcaatttaatatgtgaacttccagaaacagtagccagaactttggttccaaggatgagagttgtaaaaggaagtggaaaggcaatcaactacttaacaccaccaaggatcttgcttgctctggttactgcatgggttcgacggggtcgatggtttgacgacgagggaagagcggtgtatgcagctgaagctgatagaattcgcaactgggctgaaagtcgagcacgcttctcgttcaccgacgccatggagatgtacacggaaaacacatgggtttccgtattctcgctctcggtggtctgtgcgttcataatcctctctagctccggtggacctcttccaggcacatga

SEQ ID NO: 34546 - DNA, 474 bp, Zea mays
  Peptide Sequence Number=SeqID_76325
atgcagtacaaggaatcaagcagtctcattagctacgagaagcagacgattcgaatcgagttttatccttgcaagggaggtccacgggatgccagagaagatatgagcgcaaggaattgggcggggactcactggatagctcggtccacgcgcggcggcggaagaccgaagtccggtgaggtcgatctcgggcctccggtgaagtccggccgggtccgagggcttggcgagcttcacgggctactggcggagctagccgaagcactggcttggcttgagggtggctggagtgggctggccacggtggccgaagctctggcggcaatggcgggcggaattaagctcgccggagctaaggaaaggtggctggccggtgagggtgagtgcggggcgaagagagagatatggagccaggaaatctggtctgtctccctgcccaaacccgaggcaaatccaaggttttgtcgtgtctag

SEQ ID NO: 34547 - DNA, 453 bp, Zea mays
  Peptide Sequence Number=SeqID_76326
atggagagcacatttctcatgcataccgttcgagctcagctatgtgatataggtatccaattaagcgtggaggaagcagagaaggcagggagggacgcgaagggaaaaaaatattggtgcagccccgatgcaaaccgtgctccgaccggcggccaccgcgcggacgacgcacaagggagggcgagctgcccgggtgggctcagctgtggaaaatgtgcatacggctgcatgaggcttctttcacgtgtgaggccggcattcctgtatacaagcaacacaaatgcacctaaaaatcttgtttttttgcttgatcatagatccatgtacacaatgtttgctaacgtcatcgactcgagccaggtgagggttcagcgtggaggttcgtcgaggtctgctgctcgtagctcccatcactccactcaagatccagtagaagtggagcaactgcgataa

SEQ ID NO: 34548 - DNA, 711 bp, Zea mays
  Peptide Sequence Number=SeqID_76327
atggtgctagaggcgacgagggtggccaatgaggacttggagaggctggagcgcctcgcggcgcgcgagctgcaatgggagcctgctaacctgcgcgaccaccttttcagtcccaccgtgttcgccacatgctcgaccacgtcgtctccacctccggcaagctcgtacacaatgtttgctaacgtgatcgacttgagccaggtgagggttcaacgtggaggttcgtcgaggtctgctgctcgtagctcccatcgctccactcaagatccaacagaagtggagcaactgcgagaagaagttaggcgacatcaggattacttgaggcaacaagctgcacagcatgaatactatgctacacagattcaacaccatcaaacactcatacaacaactagcacaagcccaagggatacacatcctggtgcccccacctcccgtacattatccttggtcttcacctccatctatcgaacatcagcaatatcatttgtacatgtatatcagacctctccagctaccttgccaacgcaaacgagatgacgtgttagactttgtcgaagccctcttcgctgtggagttgacaattttggtgaggcaatggggttatagggccaagattgatcctgttttggtgcttaatgccaaagggggagaaaataaggccatagcaaaaggatcagctactacttgtgaaatttttgaaaaagagtag

SEQ ID NO: 34549 - DNA, 343 bp, Zea mays
  Peptide Sequence Number=SeqID_76328
ttggctgctgtcgccggtgctgaagtggtggccgccgctggtgaggcttcccaccgcagcggtggttgcttccgccgacgagaccgtcagtgccacctgcgctccggacctctggctctttggctttaatggctggttctcgtcccccccgtctgagacggaggtcgttgtcgcgctgctagtgcagtggtcgccggcgagccacctggagtttgttatcccgcaggccttccggtcgggacaactgccgagggcgctgccgacgtctaagtctaggtaccattgttaccccaaaatcacttatccgagcgtaagctacctttcgcggaaggtgacgagtgag

SEQ ID NO: 34550 - DNA, 339 bp, Zea mays
  Peptide Sequence Number=SeqID_76329
atggagctcaagtataataaaactggcagagagaatgactgcttgcctagagttgggcattggaatatgatgaacaagggaccgacgaagagggacgcgatagcactggacccggagctgctgcagctggtggagcttgccccgggcgtgctttgtgagaactccatcgctgatgtgttgtattcacactggctcgtgctacccgagacgaccaagctgttgggatccattgcaattgggttgaagacaaaggatggtgttgttctcgccattgagaaacgtgtgacctcaccactgctggtactgagtcacttcttatctggtcatggtgtcaaatga

SEQ ID NO: 34551 - DNA, 570 bp, Zea mays
  Peptide Sequence Number=SeqID_76330
atggggctgtctttgccgccgtctctggctctgcggacggcgccctccgcgactgccttgctggctgcgtggcttgctccttgcgctggagagtggagacagggagagagccgtagccaccgctggacagcgatacccctttcgcgtacacattttcataagaaccctctgggaattagagaattaacccatggttcatcgttgttgcaaactgagtctggtgaatcttgcgagttagcccctggacttttaagtattattgcgcgcaacccaggaacagaggaatctgtactacttattaaggagccgaatgttggcttcaatccaggcaagaattttacttgctcctcggtcttttatattttacttatgatgaagctcaagtataataaaactggcagagagaatgactgcttgcctagagttgggcattggaatatgatgaacaagttgggatccactgcaattgggttgaagacgaaggatggtgttgttctcgccattgagaaacgtgtgacctcaccactgctggtactgagtcacttcgtatctggttatagtgttaaatga

SEQ ID NO: 34552 - DNA, 492 bp, Zea mays
  Peptide Sequence Number=SeqID_76331
atggcccgcgccggcgcctataaagcccccagggaccttgactgtacccctccgcacgcgctcgacctcaccggagcccaaacccaccggtgtttgcccgtgcacggcgtgtccgcggccgcccgatccccctgccaccgtagaccggccagcagaacccttcccaacgccgtccgaccctcgaagaagactgagcacacctcggtgaagcaccccgagcgaggaatcggagtttgcttcgctggagaggccagtccatggtcgccggactccactcgaccgccggcgagcgtagaccgggttaaagaaaatagaaaagactgtaacctcgctgacggagagtacgtcctcgtgccggagcaaggagctgctcaggaggtagccccggatccagcaccagagcctgcaccagaggatctgcctgccacagctttggaaggcaagccccggtttatgcataacctgttatttatgctattttactacacttaa

SEQ ID NO: 34553 - DNA, 273 bp, Zea mays
  Peptide Sequence Number=SeqID_76332
atggcccacgcctataaaacgcccagggactttgaccgtacccctccgcactcgctcgacctcaccggagctcaaacccaccggcgtttgcccgtgcacgactgtaacctcgctgacggagagtacgtcctcgtgccggagcaaggagctgctcaggaggtagcctcggatccagcaccagagcctgcaccagaggatctgcctgccacagctttggaaggcaagcctcggtttatgcataacctgttatttatgctattttactacacttaa

SEQ ID NO: 34554 - DNA, 777 bp, Zea mays
  Peptide Sequence Number=SeqID_76333
atgattcccagccgagcatcccgtcgcccgcccccgccccccgcctccgcccgcccgcccgcccagccgggaaacccccaccgcgatctctctgcaatccacccgcccgccagccgcatgccccatcaagccctcggagacaccgccatctacccctcgcccacctacctcccgacctcaagcatagacatccatgccaccgtcgccaaggccgctgagctgcacgcggcgctcctccagggcggcagcgccgccgcgtccattgttggggcatacgccagcgctaggcggagcctcgctctcatctgcctacagccggccgcgtcgtgggtgccaacgatcaccaggtcaggcctcctggccatggccatcgtggactaccccgtgtttgccctgattaatccaaaagctgcagagtctctagcagatccttctgaatatccaaatctatttgaagactggcaggttgctctaactgtagaaaaaagtgttgcgtctcagaggggcaattatcttcctgctgaccagtatgatgctagggtccccctggacactgtgttcacagcttcagttatgaagattatgaatcaccagaagtgctggcaaatgaatgccggcgccccttgtgtccagctcccctgttcgatgggcttcatgcccagtttcttctgctgcttccgttctacttgtcgaggcatcacctccaagatgaagctgccaccgttccatgtcgaggcgcacaccttgagtatcaggaacaccacgtgcatccggtag

SEQ ID NO: 34555 - DNA, 219 bp, Zea mays
  Peptide Sequence Number=SeqID_76334
atggccctaacggtccctatattcctgtcctaccggatgcacgtggtgttcctgatactcaaggtgtgcgcctcgacatggaacggtggcagcttcatcttggaggtgatgcctcgacaagtagaacggaagcagcagaagaaactgggcatgaagcccatcgaacaggggagctggacacaaggggcgccggcattcatttgccagcacttctggtga

SEQ ID NO: 34556 - DNA, 387 bp, Zea mays
  Peptide Sequence Number=SeqID_76335
atgaaaaaacataaaactcaatgtttatcttatgaacggtttgtcagagagctctcaaagaaagcacagaaagcaaacaacatctggtggaggctgagcggactgctgggtgaccggaaccggcaggtcatgtacatactgctccaggcgctgttcacagtggcaacaatggccctaacggtccctatattcctgtcctaccggatgcacgtggtgttcctgatactcaaggtgtgcgcctcgacatggaacggtggcagcttcatcttggaggtgatgcctcgacaagtagaacggaagcagcagaagaaactgggcatgaagcccatcgaacaggggagctggacacaaggggcgccggcattcatttgccagcacttctggtga

SEQ ID NO: 34557 - DNA, 717 bp, Zea mays
  Peptide Sequence Number=SeqID_76336
atgtatgcaatgttgatgagctgtcagttaatcggggtgacatggtttccagttcttaaggattttacgcacccagaccaatataattttggtgtgaaccaaggatcaagtagcttccatgagttacacccccagttcgcgggttatacacgtggcaaattacatgaactagtcatgaaatatttcaagagcagggaacttactttagctataaatgaggtcttggatccatggatttcagcaaagcaaccaaaaaaagagtttgaagcatacttttctcacaattcagcatctaggaatttcctgccagaagatggtgggtctgcaaaaagggcaagattgctacctgaccagagtgacgaaaatattcatttgtcacaagacattattgctagtcggaaggaggacatctgttttgaagagttatgtgatggagcatcgtctgttgataatgattctgtgaatcccagagcaggaaatgcaagctggggtctactaaatgaccatctgttagcaagaatctttcattttatgagggcagatttgaaatcacttatttcttctgcagctacctgtaagagctggaatgctgctgcgaagtattacagaaacatgtgtagattcattgatctgtcttctgttggtcctctttgcactgattcggtgttttgtgatattatgatgcagtatcgatctgtattttggggtactggttga

SEQ ID NO: 34558 - DNA, 6747 bp, Zea mays
  Peptide Sequence Number=SeqID_76337
atgccggataagggggagaaggctcatggacaccaccaccagcagcagcactggaagaaccagcagtcagcgtcagctactgacctggaggagggggagctgctcagtggggaggcggagaccaatgggttgcctgagaggagcatgccacctaagaagtggaggaaggtgctggcagcctccgcagctgctgtggaggtggagcctggggagattgtgagtacgaagcaagcagtgccattgaagaaagcaaggagaaatggggaggttgacaaggtagagctgctgccggagaggcagaggaaggtaaaatcttctgggaagagcaccaggaagtctatcaaggatgacatggagccaggggagattgcaccgccagaaaaaaggcgagatgccaagtcccaacgggctgatgataacagcaggaggccaagttcatctgcccagaaaagctccttgcgggattctgatgaagagcctggtgaaattaagccagagagcagcaccagtggcagtctaaggaagaaccagccaacagagccccacagcattaaccacaagcaccacactgacacctctgaccagtcaggatcaaaaagtcataggaagggtccgaagggagaagggaagagatctgctgccaggcatttgtctgggagaaaccgtgagatatcatcaccaacacgggatcggcgtgatcggcacgagaggagcccaggcatcttgggtcgttttcctcatgagcgctctcgtcatgacaggtatgacaggagcccgagccgcttagagcgttccccacatcgagagcgtgctcgccactacgaaagcagagaccacagcccatatgtttcacctcgacatagagctcgtcagccccatttcagggataacacgccaagtcgtgttgataatttccctcgtgggagagtccagcgtgaggatgtcagagaccgtagcccatttcttcacgacagatcgccttctgaacgttttcggcctactgatactcatgaagcaagcaagaagagcagaagtggcaacaactcagaaaagtcacagcacaaaagcaaatcagcgaagcaatcttcaaagaccaagagtggtagcaatgagaagaatgagaaaatctccaatgaaaagcccactgaaagcagtaagtacactgaactgccaccgccacctccactaccgctgccaccaccgccgcctccaccacctccacctccacctctgccacctgctgtaccgcctcccctgcctccaccaccagaacctgagccaactggagttctagccgaagatatgatagaagacatggatatctgtgacaccccacctcacactagtgcagcacctgaacccacggatccaatttatgatatagggaggtggttttaccttgatcacttcggtatcgagcaaggaccttccaagcttgctgtattgaagaagctggtggaagatggatatcttctttctgaccatttgataaaacatgctgatagcaaccgatgggtgactgtagagaatgcagcttcaccactggtgccatctgatttcccctctttttattcggacacttcaacacagatggttaacccaccagaagcaccaggaaatttgctcgatgaagctctagaggaggcttctaacttggcatcaggttctgaggataaacaaatggtggaagcttctgcagaagatagtgaagaattctatattaatgatagggttgaagcactgatggatggatcaattttggtgcatggccaggagctcgagatcattggagagcttttaggtgcagattttcagcctgctgattggcaaagattgagtcaccctgaagattttactaggttccatgtgcacatcgaaggagacgatgaaatcattggaggcacagaattcttagaaaatagaacaacagatgcttatggccttgtttctgtggacaacttccatcattatgtcgagtctagcgaatggttttctgggagatggtcttgcaaaggtggtgactggaggagaaatgacgaattgggccaagatactccattcaggaaaaaacttgttctcaatgaagggtatcctctatgtcagataccaaaaggtagctatgaggatccacgccggccctgcaaggatgagttgtactaccctgtacgtggtaaaaagcatgacttgccattgtgggcattctcatcgacagaagaagatattgacggtgttaatgacaccactaaaaacactgttgtgcctgggaggccaggtcagaccagacagcctcctagcgaagtgaaggtgatgcttcaagtggttagtataaattatcatgttattaaagaccaatcatctgtcgaaccccgtacaaaacccagaggaactgatcgaccaccgtcgagatcttcacgctcccattcaattggggctgagagaagttctatccatgatggttcgtcgcatttcaggaagcaccatgaccatgattcacaaagttttcacaagtccaagtctgttccaaacattccgaaggaccatgtatgcactgttgatgagctgtcagttaatcggggtgactggtactaccttgatggcactgggcatgatcaaggcccattttcttattccgaattgcaagaattagttaaaaaggacactatcattgaacaaagtagcgtgttccgtaagatcgataacacatggtttccagttcttaaggatttaaaacctggaagctctgttcccagtgcagcaccaagctcaaacttaattgctgcttttacgcacccagaccaatataattttggtgtgaaccaaggatcaagtagcttccatgagttacacccccagttcgcgggttatacacgtggcaaattacatgaactagtcatgaaatatttcaagagcagggaacttactttagctataaatgaggtcttggatccatggatttcagcaaagcaaccaaaaaaagagtttgaagcatacttttctcacaattcagcatctaggaatttcctgccagaagatggtgggtctgcaaaaagggcaagattgctacctgaccagagtgacgaaaatattcatttgtcagaagacattattgctagtcggaaggaggacatctgttttgaagagttatgtgatggagcatcgtctgttgataatgattctgtgaatcccagagcaggaaatgcaagctggggtctactaaatgaccatctgttagcaagaatctttcattttatgagggcagatttgaaatcacttatttcttctgcagctacctgtaagagctggaatgctgctgcgaagtattacagaaacatgtgtagattcattgatctgtcttctgttggtcctctttgcactgattcagtgttttgtgatattatggctggctttgagaagcaaaatattaggactcttattttagctggttgttcgaaccttagttcacatgcccttggcagagtacttgaacaccttccacaaatatcttatgttcatattcaaggttgcagtcatctaggggatctgaaaaataaatttcagcatgtaaaatggatcaggagctcattgaatccagaggggtcatatcggaaaatgaaaaccttgaagcagataggtgatgggaacaactatgcatccaaagttgcaaggaacttcgaccagctagatgattctgatgagcttgatggttattttgctgatatttcaaaaatcgagggtgctagccttttttcatttggacaaggtttctataaacgatcgaaattgcttgatgctagaaagtcctccgcggttttgtcgagggatgcagaaatgaggcgtttgatgcagagacaggcagagaacagttacaggaagatggaagagtttgtcataaacaggctgagagaaattatgaggtgtaacagatttgattttttcattccaaaggtttccaagatcgaaggtaggttgaaaaatgggtattatgctcgccatggttttcgtaccatcaagcatgacatccgtaccatgtgccaagatgcattgagatataaagatggcaatgatttggatgatgtaaagcaaattgttgtctccttcatacaactagcaaagagactagggaacccaaggtacatttctgagagaaacggagcagcagcccaggacagcctggacattagtcaatattcattcgatactaaactcaaaaagaagcaaaacaaaacaagagcaaatttggtggctgctggagcagataattcatctcgcgcatttgaccttgaaatcaaaagaagcctgtctaaattaaagaaaaaggatgtctgctctggtagtgaaacatctgatgatgatggctactctgaaggtgatgaaactgagagtgaaactactgtttctgatactgagagtgactttgatgtaaattctggagcctgggatttaaaaggaaattgcctaaagttaactgaacatggggagtctgtgatcgatgatcgtatattaggtgcccgcatgacaaaggccagccttgttcctccagttactaggaagtatgaagttattgaggagtaccttattgtagcagatgtggaggaagtacaacgaaaaatgagagtttctttacctgatgactattctgagaagttgctttcacagaagaatggcaccgaaaatttggagcttccagaggttaaggattatcaaccccgaaaagtagcaggggatgaaattcttgagcaagaagtatatggcatagatccatatacacacaatctactgagtgacattatgccttctgatcttgagttgtcacctactgacaagcatatctttattgaggagttgcttctgaatgcattgaataagcaagttaggcatttcactggtttgggaaatacccctatgacttacaacattaggcctgtcattgaagaaattcaaaggtctgcggaggatagtggtgacagacgaactttgaagatgtgcttggggatgctaaagtccatgagaaatcgctctgatcagaactttgttgcttatagaaagggtcttggtgttgtttgcaacaaaaaaggtggatttggtgtagatgactttgttgttgaattctttggggaggtctacccttcttggagatggtatgaaaagcaagatggtattaaacatatacaaaataacagtgaagatcaagctcctgagttttacaacattatgttagaaaggccaaagggagaccgacatggatatgacttggtttttgttgatgcgatgcacaaggccaactacgcgagtagaatctgccactcctgcaaccctaactgcgaagcaaaaaaaaaaagaatttatacgtatgattatgcaaaagctgacatgagagctatagtgacagcagtggatggtaaataccagattggagtttacacacttcgaccaattgcagaaggcgaggaaatcacttttgattacaattctgtaactgagagcaaagaagaacatgaagcatcagtctgcctctgtggaagtcaagtatgccgcggcagctatttgaatttttctggtgaaggagcctttgagaaggtattaatggaatttcatggtgtgctcgataggcatagcctactgctacaggcttgtgaaacagactctgtctcccagcaagacttgattgacttgggtagagctggtcttggtacctgtttgcttgctggtttgcctgtatggcttgttgcttacacagctcacctggtacggtttatataccttgagaggcagaagctccctgatgagatcttaaggcacaatgtggatgagaagcgacagttccttatagaaataaacatggattctgagaagaatgatgctgaggttcaggcagagggagtactaaattcaagattacagcaaatagtgcatacacttgacaaggtgagatatgttatgagatgcatatttggagacccaaagaatgctcctcctcctatggtaaggttgtctgggaaaagtttggtctctgccatctggaaaggggacagttcgatagttgctgaacttcttcagtcgatggaacctcatgttgaagaagaggtacttagtgatctgaaggccaaaatctgtgctcatgacccatcagattctgaagatattgagggaggcatccgtaattctctcttgtggctgcgtgatgaattacgaactcttccatgcacttacaagtgccgtcatgatgctgctgcagatttgatccatttgtatgcttatacaaagtgctttttccgagtccgggattacaagacagtaaaatctccaccagttcatatcagtccgcttgacttaggccccaaatatgccgataaactgggaccaggctttcaggagtactgcaagacatacccagaaaattactgcttagcccagcttatctattggtatagccagaattcagaacctgaatctagattgacaagagctagaaaaggttgcatgtcattgcccgatgtctcgtccttctatgtgaagtctctaaaaccattgcaagagcgagtttatgggaacagaactgtgagattcatgttatcacgcatggaaaaacaggcacagagaccatggccaaaggataggatatgggtgttcaagagtgatccgagatactttggcagtccaatgatggatgccgtgttgaataattccccccttgacaaggagatggtgcattggctcaagacgagaccaaacgttttcctaggctag

SEQ ID NO: 34559 - DNA, 456 bp, Zea mays
  Peptide Sequence Number=SeqID_76338
atgggcaagaacatgaaaggtttgggttcaccgcgtcactccgacgacaaacggaaacacgagctgagtccttcgtcggaggacttcggtgactccgagtacttggaagaggagttctcctccgagtctgagggatctccggtctacgcttcccctccggcgtcgtccgatgattcggacgattcccaggggatagctgccgaggtgtggacgtacatccggtccgtcgagcgcgccgggcttgagggctcggatgagtcggaggtctcctcggacaaggagaactcttccgactcgtctgaggaagggagcgacggcgacggcggcgatggtgatggcggcggcgatgatggcggcaagggtggcgtaggcgacgacggtggcaaggacgacagcggcgacggcaaggccagtggcaaagcgccactgggcttaaatattagtatagataattag

SEQ ID NO: 34560 - DNA, 435 bp, Zea mays
  Peptide Sequence Number=SeqID_76339
atgggcaagaacatgaaaggtttgggttcaccgcgtcactccgacgacaaacggaaacacgagctgagtccttcgtcggaggacttcggtgactccgagtacttggaagaggagttctcctccgagtctgagggatctccggtctacgcttcccctccggcgtcgtccgatgattcggacgattcccaggggatagctgccgaggtgtggacgtacatccggtccgtcgagcgcgccgggcttgagggctcggatgagtcggaggtctcctcggacaaggagaactcttccgactcgtctgaggaagggagcgacggcgacggcggcgatggtgatggcggcggcgatgatggcggcaagggtggcgtaggcgacgacggtggcaaggacgacagcggcgacggcaaggccagtggcaaagcgccactggcttaa

SEQ ID NO: 34561 - DNA, 1536 bp, Zea mays
  Peptide Sequence Number=SeqID_76340
atgtccatcccatccatgtcgagctcgagcccctccgtggggagccctttgccgccggcgcgcgacggcgggccgggcccgttcgtgtggcggcagaaggagcagccgcagccgcagccgcagccgcagcatccggactacagcttcaccggccgcgtcctgctcacggccgtcgtcatactcgccatactcaccgtcgtcttcgtcctcatccgcctgctcctgtaccagttcgtggcgcgcggacggggccgcctggccgtgggcgtccgccgctccttcggctccttcgccaggaggagcgcccgccacgggctcgccgcgtccgcgctcgccgcgctgccggtcgccacgtaccgcgtccgcggggcggacgacgacgggcctagctccgcctccgacggcgccgggaccgggacggcggactgcgcggtgtgtctgtcggagctcgcggacggcgagaaggtgcgcgcgctcccgggctgcagccacgtcttccacgtcgattgcatcgacgcgtggctgcggtcccggaccacgtgcccggtgtgccgggccgaggtgcggcccaaggcgacggcggacacgcgcccctcgccgcctccggcgttgatcgatgccgctgggggcacgttggtcgtgaccgtggtaggcggcgccgcggagaccggggacgcacaccgcacgtccgtgctgggctccggtcaaccggccggtgccgttgggtcatcttggtcctcgctacccgccgccgccagggggtaccgcgcgcgcgtcgaggccgagctctccgggatctgcacggggatcctgcgcctcctcgacgggcgcctcgtgccagcggcggcggccgtggacgccagggtcttctacctcaagatggaggactaccactgctacctcgccgagttcaagaccggcgccgagcgcaaggacgcctactcgcctcgtcttctccaatctccacacacactctcactgcgcaaagcgagcaggcgggcgggcaaccaaccaaccaaccccactcgcctccctctccctcgccgttgccgccgagcaccgcgccgcgggttccccgtcgccatggagagcgcccacaagatcggaggcgggagcgtgcccggagcgggagccggaggggagggcgtcctgtgccacgcgtgcgggtaccagtacccgaacgggcacccgagcgccaagcagcggcgcgcgcaccggaagcactgcggcaagccggcgtccgccgcggcggcggcggagggctccggggagcgcgaagccagcgagctgcttctagggctttggttccaggcattcgacgaagctatttcagagctggatagtcttggggaagagtcgtacaaggatagcaccctcatcatgcagcttcttcgtgacaacctcaccttgtggacttctgacatgcagtacgtaagtgatgctaatcatgctatgtatcaggaggatggtggcgatgaaatgcgggaccagtacaggatcatttacatgtataggaacattcaatttgtacgataa

SEQ ID NO: 34562 - DNA, 1725 bp, Zea mays
  Peptide Sequence Number=SeqID_76341
atgtccatcccatccatgtcgagctcgagcccctccgtggggagccctttgccgccggcgcgcgacggcgggccgggcccgttcgtgtggcggcagaaggagcagccgcagccgcagccgcagccgcagcatccggactacagcttcaccggccgcgtcctgctcacggccgtcgtcatactcgccatactcaccgtcgtcttcgtcctcatccgcctgctcctgtaccagttcgtggcgcgcggacggggccgcctggccgtgggcgtccgccgctccttcggctccttcgccaggaggagcgcccgccacgggctcgccgcgtccgcgctcgccgcgctgccggtcgccacgtaccgcgtccgcggggcggacgacgacgggcctagctccgcctccgacggcgccgggaccgggacggcggactgcgcggtgtgtctgtcggagctcgcggacggcgagaaggtgcgcgcgctcccgggctgcagccacgtcttccacgtcgattgcatcgacgcgtggctgcggtcccggaccacgtgcccggtgtgccgggccgaggtgcggcccaaggcgacggcggacacgcgcccctcgccgcctccggcgttgatcgatgccgctgggggcacgttggtcgtgaccgtggtaggcggcgccgcggagaccggggacgcacaccgcacgtccgtgctgggctccggtcaaccggccggtgccgttgggtcatcttggtcctcgctacccgccgccgccagggggtaccgcgcgcgcgtcgaggccgagctctccgggatctgcacggggatcctgcgcctcctcgacgggcgcctcgtgccagcggcggcggccgtggacgccagggtcttctacctcaagatggaggactaccactgctacctcgccgagttcaagaccggcgccgagcgcaaggacgcctactcgcctcgtcttctccaatctccacacacactctcactgcgcaaagcgagcaggcgggcgggcaaccaaccaaccaaccccactcgcctccctctccctcgccgttgccgccgagcaccgcgccgcgggttcccccgtcgccatggagagcgcccacaagatcggaggcgggagcgtgcccggagcgggagccggaggggagggcgtcctgtgccacgcgtgcgggtaccagtacccgaacgggcacccgagcgccaagcagcggcgcgcgcaccggaagcactgcggcaagccggcgtccgccgcggcggcggcggagggctccggggagcgcgaagccagcgagctgcttctaggtaccgtgggttccgtgcctccgtcaaggagctaccgcggtgccgcccacacatcccatcaggctcgccctcgccctcaacttctctgtcttctactacgagatcctcagctcgccggaccgtgcctgctcgctggccaaacaggttccccttctccccttctcctggtgatttgagggatgacatgctgttttatgattgggcattcgacgaagctatttcagagctggatagtcttggggaagagtcgtacaaggatagcaccctcatcatgcagcttcttcgtgacaacctcaccttgtggacttctgacatgcagtacgtaagtgatgctaatcatgctatgtatcaggaggatggtggcgatgaaatgcgggaccagtacaggatcatttacatgtataggaacattcaatttgtacgataa

SEQ ID NO: 34563 - DNA, 276 bp, Zea mays
  Peptide Sequence Number=SeqID_76342
atgggaacaggaacaaactctggacgtcaggacgaaaggctttggttccaggccttcgacgaagttatttcagagctggatagtcttggggaagagtcgtacaaggatagcaccctcatcatgcagctttttcgtgacaacctcaccttgtggacttctgacatgcagtacgtaagtgatgctaatcatgctgtgtatcaggaggatggtggcgatgaaatgcgggaccagtacatgatcatttacatgtataggaacattcaatctgtacgataa

SEQ ID NO: 34564 - DNA, 588 bp, Zea mays
  Peptide Sequence Number=SeqID_76343
atgtcttcttcctcccttaagcgtcgtgtcttcccatcttccaagcccccggatggggggtatccgccgcctttccgcctcctcgttggaggaacgcaactccatgggagtgggtacctctcagccatcattcagcttcaaggattttcatcgcgcagcctggccacaccccgccaccggcggtcacccaagatggtgacctctagttcgacggtggggaaagcgggccaggccgcggcctctactcctcccttggcctcaaggattttcgtcatccaggccaagatggaagatgaggcgagtcggggggccgcccccgcgtgggtcggctgcccctttcttccccctgcgcccgggggccttccccctcggaggggggttgttcgtacctgcggaggcgggaaccggagttccgttggtagtggcatctcgaatgctagtgttcttcgttcattgcggctgtcggggcctgaacatgaatccctcggcccgttcggccttgttgtctggggctcttctagcttagttaaagagacccctcggccgcccttcggtggaccgaggccaggggtagcgatatcagtatga

SEQ ID NO: 34565 - DNA, 1677 bp, Zea mays
  Peptide Sequence Number=SeqID_76344
atggagcccgcagccgaggacgccgcagccgctgcgccggactcgtgggagacggccgacatagacgggcccatgagtcggctcatcctctccgcgcgacgcgtgtcctcttcgccggacttcgctgacgaccaggacccgccccagccgccgcccacactgcagccgcagggcgcgccttcggctccctcagatgcgcgcgaggatgtggtagcccaggtcgatcagttcctacgagaggccctcgagaagccaagggagaggctttctgtgctaagaatggagcaagaaattttgaagttcattcatgaccctagtcgtacagagtatgaattcaatggccttccaacttcgtatctgcgtcttgctgcacatcgcctggcgcagcattacttcctgcagtccattgccataccagacaacagtttgcctgatggaactggttcacgtatcatcctccgtaagacaacattcgactgccgactgcctgctgtccgccttgcagatattccagttaacctgccacaagaagacatctctgtggcgaaagtagctattaaacagaggcctcaaaagaatttacatggcatgaacagctcaagtgctcactcttctagagacaacctccaaaaaagcgtcgaagaaagaaaagaggaatacaacaaggcacgagcgcggatatttaacaacagcaatagcagtactgctactgatgagagatcagctgaggaagtgactttacccagtactcttcacaggtccacttccttggagttgaactcaagcaatagaataggtcaaggggctgaaattactcttgagaggagcttgactaccacttcagctagcagcaggtcaaatagaagcaagattgataaggagcctgcagtcaatagaaacaagcagaacaatagggttgcaattttcagagatcgtgagtcagagcgcaaggatcctgattatgacagaagctatgacaggtatatgcaaagatttgatcctggatttggatttagtggaggcccatacacaattcaacccctctatgcccctgctgttaactacaacaccgaattcccccagcttgggtcagcacaccgatcacctgttgctgtcgaacagcaacctcgtccaatagctcagcacatgcctgcatcatggtcagtggctcaagcatctaatgcaattggctatgggccagatggtgtcatgggaccttacagccctggtgcacctgtgagatcgtctgttttcatgcatgcttcacagcaatatgctataccttctcgccctggagtcccatttgcacatccacaggaatcaatgggaccatttgcacagatttttttgttggtacagactcaccaacaacaacctgatgctagtctacgctttgcccggccccgtgagcgggtgattggcaaggggaaagattgggatggtccagtatgtgaacaggcgacagggatgtgggcctatttactacagaagtgtttggtgttggaacaatctgatggagtgatgatcttggatttgtgcgtttatgcgatggatgtgttttacctcaaccgtaagaatggctttggctcatctaaagaagtggcttcatctcgtgagccagagccaaagccgtttttggagaagccagagccctgccaaagggacccttatacttag

SEQ ID NO: 34566 - DNA, 480 bp, Zea mays
  Peptide Sequence Number=SeqID_76345
atgacagggaaagagagagagattccaggcagtctcgtagttatgattccagaagccaccgcaggtcatattcaccaaggggaagttctagggattatgatcgatctgggcgtcatgaacgccgtgatcggtactaggagcaaggaagcctccttgaaatttaggaatggttttagctcatctaaagaagtggcttcacctcgtgagccagagccaaagccgtttttggagaagccagagccctgccaaaagggccctaagggccctttgaatggttttggctcatctaaagaagtggcttcacctcgtgagccagagccaaagccgtttttggagaagccagagccctgccaaaagggccctaagggccctttgaatggttttggctcatctaaagaagtggcttcacctcgtgagccagagccaaagccgtttttggagaagccagagccctgccaaaagggcctagctcctctttag

SEQ ID NO: 34567 - DNA, 432 bp, Zea mays
  Peptide Sequence Number=SeqID_76346
atgggagcacgaatacgcagggcggacattaagaccttgattaacaggctgaagatccccgcccgcgacgcgcggcggaacccgaggtacgattccgagtggcccggcctcgaccaccctcctccaagccggaggaatcccaaggacaccctgcggcgagtcagggattacccgcagtggcgccctgcgcttggtttcactggtccctcgtgcgacataatttcatacgatgcagacgtgggtggtgaagaggatgcacccaggcgcaggtacggctttatatcgtggcgaagatggcggccgattgaccacgtcagggtccgcagatctcggcacgccaccgccatgcgcggcaagcccgttgcgaaggattggttgaccgcccggtcccgcaaggcagccgatgttgacgtgttgacgcggggaaactga

SEQ ID NO: 34568 - DNA, 627 bp, Zea mays
  Peptide Sequence Number=SeqID_76347
atggcggtggcgtgccgagatctgcggaccctgacgtggtcaatcggccgccatcttcgccacgatataaagccgtacctgcgcctgggtgcatcctcttcaccacccacgtctgcatcgtatgaaattatgtcgcacgagggaccagtgaaaccaagcgcagggcgccactgcggtcacttcgcccttccactgaccgacctggcaggaaaacagcgtcgcccgcttcgctccgactgctgtgccacccgccagagtgaggctggcaacaaccaagttcagcctcaggcgcaacaggaagctccgcctcacccgaccctagggctcggcctcaacctcgacctcagaaggagggctctgcctcgcccgaccccaaggctcggcctcagcctcggcctcagagggtggtctccgcctcgcccgaccccagggctcggcctcaacctcgacctcgggaggaatcgcgtcctcgcccgaccctggccttggcctcaggaggagtctccgcctcgcccgaccttgggctcggaccgaccacgccacgagggatacatcattaccccagccctagctagctcaggctacaggggaacaagaccggcgtcccatccaggctcgccccggtaa

SEQ ID NO: 34569 - DNA, 231 bp, Zea mays
  Peptide Sequence Number=SeqID_76348
atggggtccaggcacagtgcttgctctgccgaggctgagtgtcgaggttctttcgttttgctttcgttagtcaccctcctgcggggagaggttgcctttggtgcaatctatgctcaggtatcttcggactcggatcagagccactgtatgaagaagcacaaagaacacgaaggtacgtctttcatgaccttcgtcctagattcattatatccgaagggaaataatgattag

SEQ ID NO: 34570 - DNA, 216 bp, Zea mays
  Peptide Sequence Number=SeqID_76349
atggggtccaggcacagtgcttgctctgccgaggctgagtgtcgaggttctttcgttttgctttcgttagtcaccctcctgcggggagaggttgcctttggtgcaatctatgctcaggtatcttcggactcggatcagagccactgtatgaagaagcacaaagaacacgaaggttggcgcagagccgaagctgtgtgtagaagagcttcgaagtaa

SEQ ID NO: 34571 - DNA, 330 bp, Zea mays
  Peptide Sequence Number=SeqID_76350
atgaagctgtggaaggagacttccaggagttccaagattacgacgagttctaggtgtgggttagcggcaacccccagtcggctgcctgtgaaggccgcggttatctacgtttcttttccgcactttgatttattatggctcgacttagacacactgcacgaaagtcagtcatccccttcttaccctcccgccttgctgagcgtccgcttcgccgtcccgtggccggacagtccagccacttggagagactacaccaccgcctgcgcgaggagcaggagcgtcgacgacaggagcagcagggctcttccttctcgctccaccaggagatag

SEQ ID NO: 34572 - DNA, 172 bp, Zea mays
  Peptide Sequence Number=SeqID_76351
ccgtgctcaaggttatgagcggccaagggagctccagagattagtggtacttgatcagagatactttggtacaggtggatatgagatcgatgattctggttatgattatggtgctggcgaagatgaagtggaaggcgacttccaggagttccaagattacgacgagttctag

SEQ ID NO: 34573 - DNA, 468 bp, Zea mays
  Peptide Sequence Number=SeqID_76352
atgcagcttgctgcgcaggtcggcgatggagctcgctgcgcgacgagggagcgagagctgctgctcaaacatgggagagagggggcgctggggaagctgctgctccctgcgctgaatcggatcggagggaagctcggcgtgtgctgctggagatggtcggctggagcagagggacctgcgcccatggagcagggaggggcgccgagggaggtgcctgctgctcgccagaagggggcgccggccatggagaggaaaggagccgtgctccctgttgctggcgtggggaatccagggaggaagatggcgcctgctgctgcgcgagggaagccggggaggagggcgccatggggagctgctgcgtcgccaggacatggacctcaccgaggtcgatccaagaagctccagcgcgcaagggagaaaggctccctgctgcagccgctctccaggaggagcagggaggacgcttga

SEQ ID NO: 34574 - DNA, 315 bp, Zea mays
  Peptide Sequence Number=SeqID_76353
atgggaatggctgcttgctgccgtgctgcgggaggaagaaggggaggacgccatggggagctgctgtgtcgccaggacatggacctcgccgaggtcgatccaagaagctccagcgcgcaggggagaaaggctccctgctgcagccgctctccaggaggagcagggaggacgctcgacctgcaacagaggggcgccgcgtcgggtaccggcagcttgagctcatccatggggaaagggcgtccgcgtcatggctggaaatggagctgccgtggggaagaagagggtggcatgggagagatggctgatggcggctag

SEQ ID NO: 34575 - DNA, 393 bp, Zea mays
  Peptide Sequence Number=SeqID_76354
atgaaggatgctaagcccgcaaagacactgatgggaattgacggacatcttgacctcaacaaaggagagaacgatctggttgaagagcctgaagaactcacaggagaagcccctgagcagcagctagttggtggcaatgagaatgatggttttggtattgactctggtgatggtaagtggtattctttccgtttggaaaggatggctcgtcttagacacactgcacggaagtcagtcattcctttcttgccttctcgtctcgcggagcgcccgcttcgtcgtccagtgaccggtcagtccagccacttggagaggctgcacgtccacctgcatgagaagcaggagcgtcgacgacaggagcaggagcagcagggctcctctttctcgctctag

SEQ ID NO: 34576 - DNA, 1422 bp, Zea mays
  Peptide Sequence Number=SeqID_76355
atgccagagcacacggcaagggagcttcacagttcgacgagatcgtggtcgagcgaactctatggcgcggactgcttcgcggtcaagacagctgtcgcgacgcgcacgacatcgccacaccacaacaccaccacggccaggctcgtgcctgccatcgctgaacaacgagagcagggcgaggtgctggaatttgaggctggtggtccgtacagaggagcgcacggcccgaaaagtttcgacggcgcggacagctgtaacgcccagaatttggggggtttggagggtaatcgccggagtttggatccccagaggtgtggatgtatgtatgtttgcgctcgtatagagaacgatctggttgaagagcccgaggaactcacaggagaagcccctgagcagcagctgatggctcgtcatagacacactgcacggaagtctgtcatccccttcttaccctctcgtctcgctgagcgtctgcttcgccgtctagtgaccggtcagtctagccacttggagagactgcaccatcgcttgcatgaggagcaggaacgtctacgacaagagcaggagcagcagggctcttctttctcgctccagcaggagatagagtctgtgaggagctgctcccctgtgctcccgctggaggcgccccctgcaccaccactgagcgccccagcccctggagtagctgctggaggaaacccagacgacggaggtggtgacagcagctcgagccacgacaccgacttttctgctgaccaggagctggaaggatgggttgcccgatccatcacttgcgacgctactcgcaggtgtcacttccacgatgcgctcgacaccctgctacgtcgggcacttgacggacgtacttggttcatcgagtatcgctgtgtggtcttccaacacagacgcggggtctacccggaccgctgggaggcgacctgcttggtgcaccgtccggagagcagtcttttgggcgctgaggtctgctcagagcactattccatctctgagcgggactcagctgaggcggccatgcaagatgtcgcacggcgtgcgctttcgcactactgctcagtgctcggtggggtagccgacggtctcaacctgaagtattacccccgccgtccatctggcagcacaggaggcgtgattgtctcacctgttggtgaggacaatcctaggttgagcagcacagtcaacctagccgtcgtgctaaacatggagctggaccatgcactagacgagctgagtagggctcgtgctgagatcgcccagctacgggctgagcgcacggagcgtcgtcacctggatgatggctcccccgctcccatcgggactcagcacccgtaccggtcacctcggcgtggacaccagtcctatggcaaccccgactgcaagaccaagataaatttagaaccatag

SEQ ID NO: 34577 - DNA, 435 bp, Zea mays
  Peptide Sequence Number=SeqID_76356
atgacggtgggtggtgccgaagtctccctggatatttccgtggaggactaccttatgggcggggtcgcaatattcgacgcccacactaggcgaggacctgctatagcggagtctgggcaactggctattgtcccggctggccccgttgttgcggcggctgggatgaaggggtctacgcaggacctgtggtccaggttttgcgccagcggcgaaattgcttcgtccgccgccgcgaaggacgtggctggctcagttgcgcagcagctgaagcacgtcagagacgaggtgttaaagctttacgataggatgtggggcccgcacggacgtgataccgtccgggagaggtcagaacgggcgctggagcagatggtgaatgatgaagaaatcgacgacttcagaggcctggaaagctcggtgacccggcgaaagatgtga

SEQ ID NO: 34578 - DNA, 648 bp, Zea mays
  Peptide Sequence Number=SeqID_76357
atggtccaggttttgcgccagcggcgaaattgcttcgaccgccgccgctatggacatggctggcttagttgcacagcagctgaagcattttttatgacaggcggccgccttcgccgagcacattgcatcgggggccctgacctcagagttcactgccgaaaggaggaactggagctacttccggcgattgtgatgggtgtcatgtccttcgcctcgctcatcaccagtgaaggcgccgcgaatgccctgtcccatgagggatgcaggcacttcgaagtctttgaccgatccgacgaagacttcgaccgcggaattttccaggtcgaagacgaggtgctaaagcggtccgctggggcactttacgacgggatgtggggccctcacaggcgtgaaaccgtctgggaaaggtctgaccgggcgatggagcagttggcgaacgatgaagaggttgatgacttcggaggtctggagagcacggagcccctggcggaagatgcgagggctggggagcaaccggtgccgccgactggtgctggcgaggaccctgtggcagccgccgcgccgtctagtgaaggcacttcggtggtatccgcgccagctgctgaagaccccgctgcgccggctgccccttcgcaggtggcgggatag

SEQ ID NO: 34579 - DNA, 288 bp, Zea mays
  Peptide Sequence Number=SeqID_76358
atggagaagaagctctctgctgaaattctgggcgccatccagggagcttcaacagtggggcgcttggctactgggctgctcttcgtggacagcagagggaggcaccatggtaatttgctgctgcgccaaggagcgaggagagagcacgcagggcggtggaggcgccatgggagggggcgagcagagctactgctcagccatgggagagagggggcgctgggaaagctgctgctccccgcgcttgctgctcgctggaggaagaagaaggcagggaaaagtggcggctga

SEQ ID NO: 34580 - DNA, 213 bp, Zea mays
  Peptide Sequence Number=SeqID_76359
atggagaagaagctctctgctgaaattctgggcgccatccagggagcttcaacagtggggcgcttggctactgggctgctcttcgtggacagcagagggaggcaccatgagctactgctcagccatgggagagagggggcgctgggaaagctgctgctccccgcgcttgctgctcgctggaggaagaagaaggcagggaaaagtggcggctga

SEQ ID NO: 34581 - DNA, 726 bp, Zea mays
  Peptide Sequence Number=SeqID_76360
atgacggaaaataacgtcaatgcggaatcgaacaaggagcgtcgcggtctcaccggggtgaacgatgacgacgacggggctgcgcaaaaacagcaaaccaccgacgggcatcacggcgtgctgctcactgcgcaacaaaacagcaagccggcagcgcgcggagccgtcggggctgctgcacattttgtcgagcaccctgcgcacatcggaaggagcaagggcaggggctctgcgcagggctgtcgttttttggatcggagcgctgggctgctgttctcctctacgccatggaagttgcaaaggggaactcgacggggtggctgggacagcaggcgtggtgttgtgctgctggcgttgatggctgctgctgggcgccgacaagaggtaatcctcggcgccgtggctgctggccagagctggagctcggcagcaacagaggggcggttggccatggagaagaagctctctgctgaaattctgggcgccatccagggagcttcaacagtggggcgcttggctgctgggctgctcttcgtggacagcagagggaggcaccatggtaatttgctgctgcgccaaggagcgaggagagagcacgcagggaggtggaggcgccatgggagggggcgagcagagctgctgctcagccatgggagagagggggcgctgggaaagctgctgctcgctggaggaagaagaaggcagggaaaaggaagtggcggctga

SEQ ID NO: 34582 - DNA, 1971 bp, Zea mays
  Peptide Sequence Number=SeqID_76361
atgcgcggccccggggggaaggatgtcttcgcccgagctccgggagttttcggctcggatgctgagggttaccgggggatcgccagggagctgcacaaaaagcgccaggcggttgtcaggctcgttgaagccaggccgaagaaggcagcgggggtctgcgaaggctgcggctcccggcggaggcaagcccgccgctggcggcgaagtcgggcgtccctgcatctagcaaagcgccggaggcaacggcaggcgccggaggcaacggcaggcgccggaggctccaaatcgacgaaggctgtgccgccctccagcagagtgccggaggtcgcgaaggtggcccgagcgttgccgtcggcgggcaagcgtgtcgccgacttcgccactgatattagtgtggacgactatcttggtgggtcggacgaaggccaacttgctatagttgcgcctgccgcggcgaccacgacggctgccgtagtgccggaggcgaagggcggggctcttagcgctggaggcgagatgtcggcactcacggctgtcagggatgaggcgggcgctgcgtcccgccggctgaaggaggtgacggaggcgctaagtcaggtggctgaattcgccaaccgcacagcatcgggggccctcacggcagctgtgtctgccgaagtcgagagacttcggacacaacatgccgacgccgtccgtgaaaaatcggccgccgatagcaagtgccgcaagctggcggacaaggtggccgcgctggagggagagaaggctgacctccggcgccaattggcgggggagaggagggagaccaacgaggccctcgtcaaagcgcaggctgcgcaggcggaggctaatctggcacgggcggagggcaatcttgccagggagcgcgccgagcagttgcaggagcggctcatcgccctggagagccgcgtggagagggccgaggccgcgacgcgcgcagaggccgaacggacgtgcaaacagcttatggatacataccatgagctgggcgcgcggaccggtgacttcgaagtgccagaccgagagcccagacttcgctgcctggagtgggtgcaggaggagttgcaggcgctccccactgtcgtgggggggtttatgtcgtatgcctccctggtcacctgcgagggggcgatgaacgcgctctctcgcgaagggtgccggcacttcgaggtcttcgaccaagctgacgaagactttgagcgagatatctacaaggttgaggaccccatagtgaaggaatccgccggagccatctacgaccggatgtggggtccgcacggtcgcgaggtggttagggagcgggccgagacggcgagggctcaggcggcgcgtggcgagagggtggatgacttcggggcgttgaacagcgcgctgcctgacccggagccgaccccggcggaggccgtgtccggggccgccctggagccgccgccgacgaccgcagaaagcgcaccggatacctccgcatctgctgcggccggcggagacctgcccccagagaccgccaaaggcgcgcctgatgcccccgcaaccgctgcgccgagtgctgaagatcctgcgatggtggcggcggaggcgacggcggaggcaacggcggaggcaacggcggaggcaacggcgaaggctccgcaggttcaagattttgggcctgcgcacgcaaccgccactactaaatttttggcggcttcgaccgcagatggtggtaatgaatgtggtggatctgcatctgagttttctgattttgctgactctgggagctcggttgagtggactgaggagtcgtcggaggaggacttggactactttgcggccttggatgtggctgcggcggaggcttcatcgcacgccgcggacacagaagatgtggctggtcctagcaccgggcgccggcgacgaagggcggttgcgaagcgtagagttagtggggcggagggggtcagcttcgtgtga

SEQ ID NO: 34583 - DNA, 1290 bp, Zea mays
  Peptide Sequence Number=SeqID_76362
atggccaaacgggccggcccggcccggcccggcccgggcccggtgaagcccggccaaaaccgggccgggcctgctgtgccagcgggcttaagtttctgtccaagcccggcccgcagcgggcctaaacgggccgggccggcccgtttagcacgaaaaaacgggccaaaaagcgggctaaacgggccgcgtactacctcgtttgtgtcagtcaggagcaagatgggtgccggcggcaggatgaccgagaaggagcgggagaagcaggagcagctcgcccgagctaccggtggcgccgcgatgcagcggtcgccggtggagaagcctccgttcactctgggtcagatcaagaaggccatcccgccacactgcttcgagcgctcggtgctcaagtccttctcgtacgtggtccacgacctggtgatcgccgcggcgctcctctacttcgcgctggccatcataccggcgctcccaagcccgctccgctacgccgcctggccgctgtactggatcgcgcaggggtgcgtgtgcaccggcgtgtgggtcatcgcgcacgagtgcggccaccacgccttctcggactactcgctcctggacgacgtggtcggcctggtgctgcactcgtcgctcatggtgccctacttctcgtggaagtacagccaccggcgccaccactccaacacggggtccctggagcgcgacgagctcaccctcgggtggccgctgtacctggcgaccaacgcgtcggggcggccgtacccgcgcttcgcctgccacttcgacccctacggccccatctacaacgaccgggagcgcgcccagatcttcgtctcggacgccggcgtcgtggccgtggcgttcgggctgtacaagctggcggcggcgttcggggtctggtgggtggtgcgcgtgtacgccgtgccgctgctgatcgtgaacgcgtggctggtgctcatcacctacctgcagcacacccacccgtcgctcccccactacgactcgagcgagtgggactggctgcgcggcgcgctggccaccatggaccgcgactacggcatcctcaaccgcgtgttccacaacatcacggacacgcacgtcgcgcaccacctcttctccaccatgccgcactaccacgccatggaggccaccaaggcgatcaggcccatcctcggggactactaccacttcgacccgacccctgttgccaaggcgacctggcgcgaggccagggagtgcatctacgtcgagcccgaggaccgcaagggcgtcttctggtacaacaagaagttctag

SEQ ID NO: 34584 - DNA, 1017 bp, Zea mays
  Peptide Sequence Number=SeqID_76363
atgtctcctcgctcccttatgcgccgcgcctttccaccttccaagcccccggatggggggaacccgccgtcttttcgcctcatcgttggaggaacgcaactccgtgggagttggtacctttcagccatcgttcggcttcaaggattttcatcatgcagcccggccgcacccctccaccggcggtcacccaaggtggtgacctccagcttgatggtgggggaaagcgagccgggctgcggcctctgcccctccctcagcctcaaggattttcatcaccagggctggggaggggagtgtgccgagttgagcgtgcctggctttcggacgcgagtggcttcggggccgctcgcggcgccggcgtctgccacggcagccggaagaggttcttccgccggcgtgatagccaaggctggccacggaccgccctccaactctacggccttctgcccgtccttgccttacgagttttggcatgggcgggggactcctggcagcaacatccgccctgaggtcagtgccgccgctgttcggccccccggagcagaagtcgtcgtcgtcgccgctgctggagcaggtgacggcgcgccgttcgtcggtcttccgttgctccgcaggccttcccccatggagtggggttactcgtctgttgattatctgaatcgcttcaccaagcatgagtcgccccgtgtcaaggtgacgagtgagccgggttgtccgttggcgggaccgacgtcggagttgatcagccgaggcctcggactgggctggcgcccttggaagacggttggccgaggccccaggggtaaccggccgagccgcctgctcgggctggattcccggagaagtccctggcagcgattgcccgggcgtggtgatgacgtcgtccttagagatggccaaacgggccgcccggcccggcccggcccgggcccggtgaagcccggccaaaaaccgggccgggcctgctgtgccagcgtgcccaagtttctgtccaagcccggcccgcagcgggcctaa

SEQ ID NO: 34585 - DNA, 579 bp, Zea mays
  Peptide Sequence Number=SeqID_76364
atgaactcgagactcccgaaacggagcagcgtcccgggctggagaggttgctggagactacccatctggagcttgacgggaagctgttcgtcaacacgcagcacgtcccctacctggcgcgccaactgtcggcgttttgaccccggggggtccctggaccgacgaggcggatgcgcttgcagtagggggtttcaagcgttcgcgagggagagagagagcctgctcgtcagcccgtcctcccacgcggccaccttctcgtacgacgaccctggaccttccttttatagatgtaaggagaaggcccaggcgatccttgcattgaatgctcctgcgatacggtcagttggcgaggcgatctggcccaaggttgcttcaatgcgaagcctgcccgagctgggcctcgggcgagtcgaagcttgtgctgatggtgtttaccagccgagtttaggagttttgggggctggaaagggatcacgacttgtgggtaaagtgtacaacctctacagagtgttaaaaactggaggtgatgctggcagcatggatgacttcgaggagttccaggaatatgacgagttctag

SEQ ID NO: 34586 - DNA, 201 bp, Zea mays
  Peptide Sequence Number=SeqID_76365
atgaagacaaacgatccgggacatgcacaactctgccaatactgcactgctgtagttggtcttgacagtgcggaattacgaaccgtagttgataagcctacacaggcagctgactgggggtttgccactaagaaagaactagaactcgtcatattcctggaactcctcgaaatctcccatgttgccagcatcacctcctga

SEQ ID NO: 34587 - DNA, 834 bp, Zea mays
  Peptide Sequence Number=SeqID_76366
atggactgcagctctgacgagtcgtcagagctaagcgagacagatatcgacgactacgccgacaagtcgtactcggacctcaagtccggcaagttcgtggcgaggctgggcagcgacaggttcaggtgcccgttctgtccggggaagaagaagcaggactaccgctacagcgagctgctccagcacgccgtcggggtgggcgcatccaaccgtgccgcgaaggtgaaggcgaaccaccaggccctggcgaaacttctcaaggaggaccacgccgacgcggcggccacactgccagcatggcaggccatcgcgctaagcaacgcgccgaagccggcgcaggaccaggaagcgttcgtttggccctggacgggcgtcctcgcgaacgtcccggccggacaagcccaggagggtggagctacactgatggagcagctagctgagttcaaacccgtgcagatcactgccgtgtgcggtgccgatgggtatgccggctacgtcgttgttctgttcaccaaggattggatcgggttcaagaacgccttggcattccagaactgtttcaagtcacggcgcttggttttttggatgaatgctgaccaaaatgattccctcaacatggctagaattgagcaacagagagctgacgaacgggcgctacagcttcttgagaaacataagaaagagaaggaggacgctctcaacagaatcctgcagctagagaggcaggtggacgagaagcagaagctggagctggatatcgagcagcttaaaggcaaactggaggtggtgaaacacatggcgggagaaggcgtggatgtgaagaaacgtttctga

SEQ ID NO: 34588 - DNA, 2433 bp, Zea mays
  Peptide Sequence Number=SeqID_76367
atggactgcagctctgacgagtcgtcagagctaagcgagacagatatcgacgactacgccgacaagtcgtactcggacctcaagtccggcaagttcgtggcgaggctgggcagcgacaggttcaggtgcccgttctgtccggggaagaagaagcaggactaccgctacagcgagctgctccagcacgccgtcggggtgggcgcatccaaccgtgccgcgaaggtgaaggcgaaccaccaggccctggcgaaacttctcaaggaggaccacgccgacgcggcggccacactgccagcatggcaggccatcgcgctaagcaacgcgccgaagccggcgcaggaccaggaagcgttcgtttggccctggacgggcgtcctcgcgaacgtcccggccggacaagcccaggagggtggagctacactgatggagcagctagctgagttcaaacccgtgcagatcactgccgtgtgcggtgccgatgggtatgccggctacgtcgttgttctgttcaccaaggattggatcgggttcaagaacgccttggcattccagaactgtttcaagtcacggcgcttgggtaaacaggactggaaggagacgaagggacacgtagagcaagtgtttggatggctagcaaaggaagaggattacagatcggatgacccagtcggtaggttcttgtcagcgaatggtgacctgaagacggtgtctgaactggagcaggagatgtccagcaagactgacaacctcatagatagtctggctcgacagatcaccgctaaaagcaagtacctgcaggaactggagtgcaagtgtaaccaaatgaatctctcccttcagaaagccatggaagagagcgatttgctgcacaaacgttataatgaagaaatgaggaatatgcagtctgctgtccgtgagcatacacggagggtttttcaggagactgaagaactcagaaatcagctggttgagaaagagagcaacatccagaggaggtccagggaactaaatgaactagtcgctcaaactgacatggaaagaagaaaactggaggaagagaggaaaaagaatgctgaccaaaatgattccctcaacatggctagaattgagcaacagagagctgacgaacgggcgctacagcttcttgagaaacataagttttcacccacccgaaacttaatttgggtgccaaatctcaaacagaaagagaaggaggacgctctcaacagaatcctgcagctagagaggcaggtggacgagaagcagaagctggagctggatatcgagcagcttaaaggcaaactggaggtggtgaaacacatggcgggagaaggcgtggatgtgaagaaacgttctgaggagctgacagcagaactgaacgaaaggatcgaagagatggaagacctggaagctctcaaccaaactcttgttgttaaacataggatgaccaacgatgagattcaagatgccaagaaagagttgatcacgggtttgacagatatgttaggtcctcgtagcaacattgggatcaagaggatgggtgagctggacgagaagcccttcgttctgtcctgcaagcagaggtacggacaagacgccgaaatgaaagccgctgaactcgtctccctgtggcaagagcatctgaaggaccctaattggcatcctttcaagatagtgaccacaggctcaactaaagagcaaatcatcgatgacaaggatgagaagctggcgggcttgaagaagcagctcggcgagaaggtctacgaggccgtggctaccgcgctgctagagatcaacgagtacaacgctagcggcagctacgtggtgtccgagctctggaacaacagggagaaccgcaaggccagcaagagaaaccgacggaaggcccccatagacaacctaaacaacgacacccccacacaaatcctatccagagtcattgttgctgagctcaacacaagggacaagcaccccagactttccaagaagtgctgcacacagccaaaggaactcgacgacgcctacacccaaacaccggcacacaaggaggaaggttgtggcattgccatcattgccaagccacgacacaccccaggcgaggaagctccaattctccaccaacgagcttggatccacaatgccgatcatcgggagcaagcagacgcccagagcgacaaaggcccaggcaccgccgagccaagcagagtgacgaaaaagcttacgcttggggccatggatgttttgatgattaggtaccttggagaggaccagcaaggacttgggaaagtccaaggtgttgaggaggagcagcaagggcgcccacaacaggaaggagatcaagtccgacttggctgcgactccatctcggggataagccttcgtggcgaggtcattcgtgtgtcacgggtgataaccaacggagccgtggtgtag

SEQ ID NO: 34589 - DNA, 945 bp, Zea mays
  Peptide Sequence Number=SeqID_76368
atggtggtcaagcgatccaacgacggcgacacttatacccgacggcggagtccaagtccaggaagccgagtccgcggtggagcacgtgcttcggagcagcgacagggagcgcccgccatggatctcggcgcccgggtgaggagaggatctctcgggttgttgggatacgaccgccatggcttctaccaggagaagaagatcctggcaaatggggccgacgtggtgccccactctgatgatatgtcccgagttgtggaccaactcttaaagttgatcgccacctttatagaggaccgggacgcttcaggtggtatcagagctgttagaagtcagatggaggtccgctgccaaaccagcttgtgccagaatgaagatggtttccccaagttactgagagcatgcacagttcacctcagaatcaggagtcagccagagtatgatggtcgtgaattcgtcgagcatggcacagagaagtgtgtcgtgactgtatacattggatccagtccgcaccatgtggaatggagtgtcactactgttgggcacagatttaaagacacctgccaagtcgtcgcccgcaaggcattgagggccctatgtcagatctatgaagaagaagtggccgacacaccgctcagattctttccgccctttcagagagaccgtccagtttggatggccaggatgcgtgcattggaagggaagcagctgcttgaggatgaccccacagtcgtgcacctcactgcatacctgctcaccctggatgcacaatatgatttcttggctcgacaccagcgtcagatgattgcccgagcagaagacgcagagaagcgcaaccgtcagctccatgtggatctcaccacagctcaagcccatgcaactgcattggaaagtcgtgaagtcattgcggttgaagccctgaagcaagccaaggatgagcatgtctag

SEQ ID NO: 34590 - DNA, 531 bp, Zea mays
  Peptide Sequence Number=SeqID_76369
atgaagctcccaggtgactcaaccacggcgcacgacagaattattcgaagacgggactccgatgaggaatttgtcgcgctccgatcactgattccgcacgtggaggccccggttatactcgtcgcacccagacgagttgccaagaccccacggcgacaccgaaacgatggtggtcaagcgatccaacggcggcggcacttatacccgacggcggagtccaagtccaggaagccgagtccgcggtggagcacgtgcttcggagcagcgacagggagtgcccgccatggatctcggcgcccgataatggtgtctttgtgcccacggcaagctactctagtccctatggatgagggagggcgcggacgacttgtttatataccccggagaccgagtttgcacgagcgcagggtgaggagaggatctctcgggttgttgggatacggccgccatggcttctaccaggagaagaagatcctggcaaatggggccgacgtggtggtgagagcacgacacggtagagttagtggctga

SEQ ID NO: 34591 - DNA, 414 bp, Zea mays
  Peptide Sequence Number=SeqID_76370
atggtctcccattctggatatggtgggtacaagtgcggtcactgcacggtggcagccggggtcagtggagtattgtatgccaaggcggacgcatgtgccctcagctacctaggttatccccagaatattcccacaaagcaggacgaggccgcactgtgggatgccttcgtcgtcggtcttcgtctggtgccgaacaagcgaagggtgtccctgcctgctttgtctctgtcagagcagcggctaagcagcggagacttcgagcgaagggtggcgtttctgccttcgctccaacatttgcactccgagggaccagttcgacaaagtcacctggtgccgaagacgtcgcttgatggcggagacgctgccctcgctcgaagtggttccgcgggggtttttgatgtgaccgttgattga

SEQ ID NO: 34592 - DNA, 1148 bp, Zea mays
  Peptide Sequence Number=SeqID_76371
tccgcaccacatcaaacacaactgcacagggtcaagttcatattatggacaagaagagtgaggatgagaagcagaagcaacaaaaaaaggaggcatcccctgaagaatgtgatcaggcagtggaaggattaagcactgcaaaagcgaaagcaaaagctaagctggaggaagtgcaaaagactgaccaatcagtggtacagaaattatgggcaaagcttcttggtattggccctgctttacgaattattgcttcaatgagcagagctgattgggctgcaaagttgaagcattggaaggatgaatttatttctacactgcagcattattggttgggcactaagctactctgggcagatgttagaatctcatcaaggctgttagttaaacttgctagtggaaagagcctcacaagacgagagaggcagcagctcacacgcacaacagcagatctattcaggctagtaccttttgcagtttttattatcgttccattcatggagctcttgctgccagtgttcctcaagttgttcccaaacatgttgccatccactttccaggacaaaatgaaagaagaggaggccctaaaaaggaaactgaaagcaaggatggaatatgcaaagtttttacaagacactgctaaagaaatggcgaaggaagttcaaacatcacgcagtggagaaatgaaacagactgctgaagatctggatgagttcttgaataaggttaggaaaggtgggcatgcctccaatgacgaaattttgagctttgcaaagctatttaatgacgagctgactttggataacatgagcagcattaagaatgatgataagatgattcaagctgagggtgtggagtctctttctgaatatgagcttcgacaagcatgtcgtgagcgtgggcaccttggtttgttgtcaacagaggagatgcgtcaacaggtacctgagcgcccagcgccttgtgctaaggacgcatgtgccctcagctacctaggttatccccagaatattcccataaagcggggttacagactaccagcggctgcagcgaaggcttcgagcgaagggtggcgtctttgccttcgccccaacatttgccctccgagggaccagttcgacaaagtcacctggtgccgaagacgtcgctag

SEQ ID NO: 34593 - DNA, 822 bp, Zea mays
  Peptide Sequence Number=SeqID_76372
atgcaggcggcatgcaactgcaccacggggacacaccctttcgacttcaacgcatccagcgtggaggcccaggcccacacgtcatggaccgggaaagggaatactatgaaagggatccttctctgcgaaggaagcgggccccgagccctcctactgatcaggggttcgaaggctggcccctcggaagggttcgacagccaccctagagcactcaggctccgcgccccagtactggggttcgaaggctggccccccgaagggttcgacagccgcctcagaacacgcagagcgagggatgactctgggtacgtccgatacatggccgaggctcgggctacgctcccgaggggcacgatctcgcctcgcccgagcccagcctcgggcaggaacaatagacccaggtggattcacgactcgcccgagggcctcctcaagcaatgggagcaccttcgactcgcccgaggcccagctcgggcaggcttcgcggagaagcaaccttggccagatcgcctcgccaaccgactgtatcgcaggagcattcaatgcaaggatcgcctgacaccttatcctgacgcgcgttcctcagtcgacagggccgaagaaaacagcgccgcctgccctgctccgactgctgtgccacccaccagggtgaggctgacagcagccgagtccagcctcaggcgccataggaagctccgcctcgcccgacccaggggctcggcccccgcctcgacctcggaagacggtctccgcctcgcccgaccccggggctcgacccacgcctcgacctcggaagatggtctccgcttcgcccgaccctag

SEQ ID NO: 34594 - DNA, 2098 bp, Zea mays
  Peptide Sequence Number=SeqID_76373
atgatatgtttgggcctcggcggccacaaaaaacatacgcacactacagataaactactcctgcaggttcaaacatcaatagggggagcagcagcaccctcggcgtcggctccaccttcgacggagtccgacccagcctcggacggcgacacgttcggagggtctccacctcgaagaaagatgtcagcaccgcgcctgggccatcgtcgccggggtctcctccaggaactcggcctgagcagacggctcgactggccgctccgtagcctcatccagctgccccccgaggacatcagcctggctcatggcctcggcaacccgactccggcgttggtcccgccagtggacggcccggccaggctccggccgacgaagcttcttttcgagccaactccgcctctgtccatgctgacactgctgcctccggctctagctcatcgcaaagcggtcgagggcgagtctggtgctcgaaaggaggaagaaacacggctttacgcccaaatacacacatgttcagggcccgacagccacaatgaacaaacaccggcactcaaggtgccattacaaacggaactccggttccactcccgcgggtatgaacaacctccacatcggagagcctgcgggacgacgaactccgggcgactcgccagcgacctctgcagcagcagcgatggtcccaggacggacgctaccgctggaaggctcttgttcgcgtccccactcgagggacgagaaccagacattaaagccaaagagccggaggtcggtccgcgggtgacgctgatggtctcgtcggcagagaagctttctccagctgccaccacctcagcatcgacggtgacgtccacctgcccaccaacaccgcaccagcgggcgccggccgccccaaaagcgcaccggcaggtcctcactcccgtccttgccatgaaaacgagaatgggaccgtcccagaacacgagtaccgccctcgcggcgtacgacatgttgggagagcccccgagctggaggatggtttccacccccaaaagctggaggaagaagggggacgctgacccacgcgaaggcaggccccggctcagcccggcctccgccccagcaaggatgatgaagatccttgaagctaagggcggggcagaagccgcaacccggcttgcttctccccacatttccgcgaaaggtaccaacttccgcgaagccgagcgatggctgaaaggtaccaacttccgcgaagttgtgttcctccaacgacagcaagacaaaaacaacgcgggcgctccccatctgggggctcggaaggcgtcgcggactgagtcttcaccgacacgctccaaggtcttccccctacgacacgggggatgggtcccacacgtcatgcaagctggcccaggacagaagaagccaaaaccgccgcgcgcggtgcgcgtaactgcccagcggttacaagcattcctcaatcttcgcctaaaccagcgggcgaaaggacggacatccatgcaggcggcatgcaactgcaccaagggggcgcaccctttcgacttcgacgcgtccagcatggaggcccacacgtcatataaccggtgcgccgccgcgggagaaggcgcgacggtcgatatggccaaaagtgggccggcagtaatggcggtggcaggcgggcgtaagcagcagtcaaatcgactgcaagctcacgtcccctcctgggacagcgagagaaccctctcccacggcgtgaagatgacgcgcccgtgtttcatacctcaaatggctcgcgcatgcacaacggctgccccgcgaaccactcgtctcgtcgcattaactctgcggcaggacatgcggcacctttggcaggcgaagcaggcgacgcttcacctccgccatgatgaccgcgtcaaaaaaggtaccgggaaaggggatactccgaaagggatccttctccgcgaaggaagcgggccccgagccctactgatcagaggttcgaaggctggcccctcggaagggctagcccccgaagggttcgacagccgcctcagagcacgaagagcgagggatgactctggtacgtctgatacatggccgaggctcgggctatgctcccgag

SEQ ID NO: 34595 - DNA, 708 bp, Zea mays
  Peptide Sequence Number=SeqID_76374
atgaggaaacaactccacgaggcgagagaacagctggtgagacaaaggttgttgcctcccaagactggccctaggtggctaactataatggcattatccgtgcacaaggtcaccgtcaagagctcatcgatgggctggaaaacattgtcaagtacgatcatcatcaccatctctgaaattcaaatggcaccccatacccgattgagagagttccttaatttgcaaaatatttttagggaactcctacttgcattcgtggaacggtctaagcagagacccaagcagctgatcttctacagggatggcgtaagtgagggccaattcaaacaagtgctggagcaagaaatccatgagatagagaaggcatggacagctctttacaatgagaagccaaagatcaccttcgtagtggtgcagaagaggcaccacacaaggctcttccccagcaaaccaaaggatcgccaatacgcggacaagagtgggaatattcgagctggcaccgtagttgataataatatctgccacccaacagaatttgatttcttcctgtgcggccatgctggggccaagggaacaagtcgtcctacgcattaccatgtgctacgagatgacaacaagttcaccgcagatgcttacgggctgaatgcatcttcttttctatgcgttgcaattctgggtacttatctggaagcagcttgctccaattga

SEQ ID NO: 34596 - DNA, 1572 bp, Zea mays
  Peptide Sequence Number=SeqID_76375
atgaggaaacaactccacgaggcgagagaacagctggtgagacaaaggttgttgcctcccaagactggccctaggtggctaactataatggcattatccgtgcacaaggtcaccgtcaagagctcatcgatgggctggaaaacattgtcaagtacgatcatcatcaccatctctgaaattcaaatggcaccccatacccgattgagagagttccttaatttgcaaaatatttttagggaactcctacttgcattcgtggaacggtctaagcagagacccaagcagctgatcttctacagggatggcgtaagtgagggccaattcaaacaagtgctggagcaagaaatccatgagatagagaaggcatggacagctctttacaatgagaagccaaagatcaccttcgtagtggtgcagaagaggcaccacacaaggctcttccccagcaaaccaaaggatcgccaatacgcggacaagagtgggaatattcgagctggcaccgtagttgataataatatctgccacccaacagaatttgatttcttcctgtgcggccatgctggggccaagtggggaggaagaacagcaagaggtggtggtggagccgtgggaggtggagggaggctgcgcggtcttttaaccgcttggcaccatgccatcgccgacgccgtgcggggctgcgccggcatcttctgcatgttcaacacgcccgacgaccaggcccaatgtgatataattgaactactctctgtccgtcctcctattgatgcaaagttgaaactgatgaaagaaatagctgaggaacatattcctgctggtcagttgcatcttgtgaaaccatatatggttgcagttcagagtaacaatgtctctgccatgaatgaagccttgaatgaactttatgtcgaagatgaggactacgagagactccgtgaatcagttgacatgcatgacaactttgaccagattggtcttgcccagaagcttgagaagcatgaattgctggagatgaggaggatcgccgcctacatttacaagaaggctggcaggtggaagcagtcgattgctctatcgaagaaagacaacatgtacaaggactgcatggagacatgctcacaatctggcgaccgtgaactgtcagaggacttgctcgtgtatttcattgagaagggtaagaaagaatgttttgcttcttgcctcttcatttgctacgacctgatccggccggatgtcgctcttgagcttgcatggatgaacaacatggtggactttgccttcccgtacctgttacagttcattcgtgaatacactagcaaggtggatgatttagtgaaggacaagatcgagtcgcagaaggaagaaagagctaaggagaaggaggagaaagaccttgcggctcagcagaacatgtatgcgcagctgcttcctctcgctttgccagcgccgccaatgcctggcatgggtggccctccacctccgatgggtggaatgggcatgcctcccatggccgggatgggtatgccgccgatgggtcctggtccgatgccagcattcggaatgggaggctactga

SEQ ID NO: 34597 - DNA, 1953 bp, Zea mays
  Peptide Sequence Number=SeqID_76376
atggcggagtatatgctgaacatccagttgttcagtaacttgtacatcccagtcttttcatccatcgttttacaaaacgagtcttacgaacaagaatcatctgacagcagtgatgaagagtggtccacacttagcacaccacgaaaaacaaaattacaaggcaacgaaaaagtatcacttactgaatcagtacgttctgcaaagcggtgttctagaagagcgccagctagggagcagaataatgaacatactcagagtgagcagcttcatggttctgcaagtgagcagcaagctagagagcaacttcatggttctgtaagtaaacagcaaactgaagttcttcgctccaatgtcagcagtagcgatgcctcaaaatgtcattttggccctatagttactcagaagctgaaggaacattttgaaaaagatccatatccttgccatgcaacaaaagatggtctggcacaagagctaggactgacatttaatcagatcagtaagtggttctctgccacccgttattattcaagagttgctgttgccaagaaccaaaaatacacaggagaaaatactactgagaataatagtagcgcaatctttgatggtatacaagtaatagaacccaattttggtttgatagataaaccagatgcagatacaaatgacatgatttctgaaaagttgatggtacaaattaatcttaacgaaggcattgaagaggatatcccaccgagccaatatgctaccaggtgtgaagagaaattaactatgactcaagctgccatctcaagggaagttggacctccaggttatgatcctggagaaaactttcttcaggtgttggatgaaattcaccgtcaacccgcatcactttcactttccatggtgtctgttcaggctcctgaatctgtagttgattcgttgccatgtaagagctacaaaaagcttgagacaccccaatgcagtgatgatatggaacagtgccatatctgcctaaccgaatatgaggacggagaccagataagaacccttccgtgcaagcacgagttccacctgcaatgcgttgacaagtggctgaaagaaatacacaggtatctatccatcctgggtgtgccctctgtgccgtggagacgtctgcgaagtcgcctcgtgaagaccttggcgctgcatccttccgttgcagcaccggtggatagggcaccaccgccaggcgccagctgttccgtggttgaagctggttcgaaagatgcagagcctaaccttccaatcttggaagataaggatggcctgatactggaaatggacgattttgaactcccgcttgtatggaatttcaagtacagcatgactgtttacttgtttgcaaaggaagagctcaactgtaatctaacagcagtgaaagaaaacctaatgaagcccgttactgttagcttcaaagagggtcttggtcaaaaattcaggcaaccttcaggaacaggaattgacttttcagtgtttgaagaatcagatttattaaagcagggggacatggatgtatatccacttgcagttaaagctgaaacagcattacctgttgatcagccaccagaaggggatgaccaaaagatgaaaactcctaactcacagatcacccaagccgtgtttgaaaagaaagaaaatggggattatcatggaactccgtggaaggtgatgctgatgcaaatgatccagggaaagaatgtgttatttgcctctcagaaaccaagggatactactgtcctcccatgtaggcatatgtgcatgtgcagtgagtgcgccaaggtcctgaggtaccaaaccactcggtgccccatctgcaggcagcctgttgagcgtctcctcgagatcaaagtgaacaacaaatctgaagatcagcaacagatgccccaatcgccaccgctcccagcactggctccgcagcaggaagaggtgtag

SEQ ID NO: 34598 - DNA, 402 bp, Zea mays
  Peptide Sequence Number=SeqID_76377
atgacggagtatatgctggtggtgcagagcaatcttaaccaatgtaataatgaagatatcctgctttctggaacagaaattgagatggagtcttacgaacaagaatcatctgacagcagtgatgaagagtggtccacacttagcacaccacgaaaaacaaaattacaaggcaacgaaaaagtatcacttactgaatcagtacgttctgcaaagcggtgttctagaagagcgccagctagggagcagaataatgaacatactcagagtgagcaacttcatggttctgcaagtgagcagcaagctagagagcaacttcatggttctgtaagtaaacagcaaactgaagttcttcgctccaatgtcagcagtggcgatgcctcaagagctaggactgacatttaa

SEQ ID NO: 34599 - DNA, 948 bp, Zea mays
  Peptide Sequence Number=SeqID_76378
atgggcttagcaaactactgtgttccagcaggagaggcttaccagaaggctcttgacattgcctttgagataactcagaaggacttgctggctcggaatgcaatgttagcagaagagttactgagaactggtggtggtatgaccacagatacttcacagaaaccgagcagtggccgagaaagggtccagattgaagctctcagacaagaactggagggggcaaaacgacagataggggcactcaaaagtgagaagtcccagattgaagctgaagctaacaaccaaagaaacctttcagtaaaactggagtcggatctcaagagcttgtcagaagcttacaacagcatagagcaggccaactaccgcttggatgccgaggtaaaagccttgcggcagggaggcagcgtgccatatcctgacgtggaagcaataaaagcgcaagctaaggaagaggcggagaaggacagtgaggcagaatggaatgatctactcgtctgccttgggcaggagcaaacaaaggtcgagaagctgagcacaaggctgacagagctcggcgaagatgtggatacccttctgcagggtattggcgatgacactgccattccagatgatgacgatgaagatgaagatgatgaagagtttatcagtacactatacaacttacttgatggttcttctgaggagaagcccgcggcggagaagacgaccgccgggaagaagcccaaggcggagaagcgggtccccgcgggcaagtctgccggcaaggaggacggcgagagcaagagtggcaggaagaagggaaagaagagcgtggagacgtcgcgcccacatttatcctcatcgaagtggagggagtggagcagttcaaagagagagatcgtggggggattgcagttggaagctgcaatggagatcgtggcgcgcgggggtggggagccctggcgatga

SEQ ID NO: 34600 - DNA, 681 bp, Zea mays
  Peptide Sequence Number=SeqID_76379
atgaggcgcttgagaatccgctggactccactaaagctccggggcttagcaaactactgtgttccagcaggagaggcttaccagaaggctcttgacattgcctttgagataactcagaaggacttgctggctcggaatgcaatgttagcagaagagttactaagaactggtggtggtatgaccacagatacttcacagaaaccgagcagtggccgagaaagggtccagattgaagctctcagacaagaactggagggggcaaaacgacagataggggcactcaaaagtgagaagtcccagattgaagctgaagctaacaaccaaagaaacctttcagtaaaactggagtcggatctcaagagcttgtcagaagcttacaacagcatagagcaggccaactaccgcttggatgccgaggtaaaagccttgcggcagggaggcagcgtgccatatcctgacgtggaagcaataaaagcgcaagctaaggaagaggcggagaaggacagtgaggcagaactgaatgatctactcgtctgccttgggcaggagcaaacaaaggtcgagaagctgagcacaaggctgacagagctcggcgaagatgtggatacccttctgcagggtattggcgatgacactgccattccagatgatgacgatgaagatgaagatgatgaagagtga

SEQ ID NO: 34601 - DNA, 544 bp, Zea mays
  Peptide Sequence Number=SeqID_76380
atgttgcgcgcggttgatctacccgatcgcttcgaccgcgtcgcgccaccgacggacaatggcgccggcagcgaggaagcggcggtgaaggacacgggcccgaagccggtggtgccgctgctcaacgtgtccgccggcggccgcgtccacgagatccagacgttcgcgcactacgtcgccacgcaaatcggtttcgaggatctgaacgagtgcccgcacctgtgcgcgctgtcctacgattacctcaagaagacggagggctacgagcagaacctgctcgccttcttccacaacaagatgaacccggacgccctgctcgtgcagctcatcgaggagatggacaagtgcatcctcggctacttctccttccactggaaatatgcgacccacataatcacgcaggttctgacccacgagcagcctagaagaaagctcagaagaatggtaatggaggccactaggaagatgaggttcgagagggtgacgagagagctgaaggttaccaggctgttcaccactctggtggaggagctcaaggccatcg

SEQ ID NO: 34602 - DNA, 417 bp, Zea mays
  Peptide Sequence Number=SeqID_76381
atggccgccgccggccgggtggctgtcaggcgagctatcatatccgggagagccgtgcgggtgaactcgcagctcaagtcgcacaagcgcttcgccggcgcgttccgcaagtactgcgacctcgtggacaacgccaggctctacagcaccaataccatcgccggcgcaaagctgatcgggtggaaggacaaggacagccagctactggtggacgtggacgagatcgggctgctggaccgggtgagccggatcaatgatgacgccaactgcgtgcacgagctgtacccggacgggcaccccacgggcggcgctggctctgtgtgggatgagctgatggcgtcgccggtgagggcttccatacagcgggagctcaaggaggccatcttcgacagcgaggcgtgcttcccctccccgtag

SEQ ID NO: 34603 - DNA, 1882 bp, Zea mays
  Peptide Sequence Number=SeqID_76382
gacgcacatgcatttccctctccacagcccccgatcacaggcgacgccgcgtagctcctccgggccggtagatgggcccatgttgcgcgcggttgatctacccgatcgcttcgaccgcgtcgcgccaccgacggacaatggcgccggcagcgaggaagcggcggtgaaggacacgggcccgaagccggtggtgccgctgctcaacgtgtccgccggcggccgcgtccacgagatccagacgttcgcgcactacgtcgccacgcaaatcggtttcgaggatctgaacgagtgcccgcacctgtgcgcgctgtcctacgattacctcaagaagacggagggctacgagcagaacctgctcgccttcttccacaacaagatgaacccggacgccctgctcgtgcagctcatcgaggagatggacaagtgcatcctcggctacttctccttccactggaaatatgcgacccacataatcacgcaggttctgacccacgagcagcctagaagaaagctcagaagaatggtaatggaggccactaggaagatgaggttcgagagggtgacgagagagctgaaggttaccaggctgttcaccactctggtggaggagctcaaggccatcggtgtgcactgccagcacgaccacaaccgggcgggcacggacgtgatggtcccggctgcgcacagcgaccgcagcccggtgctgctcctgatgggcggtggcatgggtgctggcaagagcaccgtgctcaagcaaatcatgaaggaggtgttctggactgaggcggcggcgaacgccgtggttgtggaggccgacgcgttcaaggagtcggacgtgatctaccaagccatcagctcgcggggccaccacaccgacatgctgcagactgccgagctggtgcaccagtcgtcgacggacgcggcggcgtcgctgctggtgacggcgctgaacgaggggcgggacgtgatcctggacggcaccctgtcgtgggagccgttcgtgcggcagaccatcgcgatggcgcggtccgtgcaccggcagcgctaccgcatgggggtcggctacaaggtcgcgcccgacggcacgaccacggagaagtactgggagcccgtggaggaggacggcgagcagcaggcaggaagggcaggcaggacgaggaagccgtaccgcgtcgagctcgtcggcatcatctgcgacgcctacctcgccgtcgtcaggggcatcaggcgagctatcatatccgggagagccgtgcgggtgaactcgcagctcaagtcgcacaagcgcttcgccggcgcgttccgcaagtactgcgacctcgtggacaacgccaggctctacagcaccaataccatcgccggcgcaaagctgatcgggtggaaggacaaggacagccagctactggtggacgtggacgagatcgggctgctggaccgggtgagccggatcaatgatgacgccaactgcgtgcacgagctgtacccggacgggcaccccacgggcggcgctggctctgtgtgggatgagctgatggcgtcgccggtgagggcttccatacagcgggagctcaaggaggccatcttcgacagcgaggcgtgcttcccctccccgtacttctttgccgtgtgttctaaacacacggcaacggctattttacactcggcaaaggctttgccgagtgtaacactcggcaacgaacgctcggcgaactgtacatcggcaacagcttctttgccgagtactttttgtcgggcactcggcaaagactttgccgagtgccaaatggcactcggcaaagaaaagtcatcgtcacggcgccaagtgacggtgacggatcctttaccgagtgccaacggcgacactcggcaaagactggtctag

SEQ ID NO: 34604 - DNA, 1846 bp, Zea mays
  Peptide Sequence Number=SeqID_76383
gacgcacatgcatttccctctccacagcccccgatcacaggcgacgccgcgtagctcctccgggccggtagatgggcccatgttgcgcgcggttgatctacccgatcgcttcgaccgcgtcgcgccaccgacggacaatggcgccggcagcgaggaagcggcggtgaaggacacgggcccgaagccggtggtgccgctgctcaacgtgtccgccggcggccgcgtccacgagatccagacgttcgcgcactacgtcgccacgcaaatcggtttcgaggatctgaacgagtgcccgcacctgtgcgcgctgtcctacgattacctcaagaagacggagggctacgagcagaacctgctcgccttcttccacaacaagatgaacccggacgccctgctcgtgcagctcatcgaggagatggacaagtgcatcctcggctacttctccttccactggaaatatgcgacccacataatcacgcaggttctgacccacgagcagcctagaagaaagctcagaagaatggtaatggaggccactaggaagatgaggttcgagagggtgacgagagagctgaaggttaccaggctgttcaccactctggtggaggagctcaaggccatcggtgtgcactgccagcacgaccacaaccgggcgggcacggacgtgatggtcccggctgcgcacagcgaccgcagcccggtgctgctcctgatgggcggtggcatgggtgctggcaagagcaccgtgctcaagcaaatcatgaaggaggtgttctggactgaggcggcggcgaacgccgtggttgtggaggccgacgcgttcaaggagtcggacgtgatctaccaagccatcagctcgcggggccaccacaccgacatgctgcagactgccgagctggtgcaccagtcgtcgacggacgcggcggcgtcgctgctggtgacggcgctgaacgaggggcgggacgtgatcctggacggcaccctgtcgtgggagccgttcgtgcggcagaccatcgcgatggcgcggtccgtgcaccggcagcgctaccgcatgggggtcggctacaaggtcgcgcccgacggcacgaccacggagaagtactgggagcccgtggaggaggacggcgagcagcaggcaggaagggcaggcaggacgaggaagccgtaccgcgtcgagctcgtcggcatcatctgcgacgcctacctcgccgtcgtcaggggcatcaggcgagctatcatatccgggagagccgtgcgggtgaactcgcagctcaagtcgcacaagcgcttcgccggcgcgttccgcaagtactgcgacctcgtggacaacgccaggctctacagcaccaataccatcgccggcgcaaagctgatcgggtggaaggacaaggacagccagctactggtggacgtggacgagatcgggctgctggaccgggtgagccggatcaatgatgacgccaactgcgtgcacgagctgtacccggacgggcaccccacgggcggcgctggctctgtgtgggatgagctgatggcgtcgccggtgagggcttccatacagcgggagctcaaggaggccatcttcgacagcgaggcgtgcttcccctccccgtacttctttgccgagtactttttgtcgggcactcggcaaagactttgccgagtgccaaatggcactcggcaaagaaaagtcatcgtcacggcgccaagtgacggtgacggatcctttaccgagtgccaacggcgacactcggcaaagactggtctagtggaccccacagccagtccctgtgccgagagccctagtaggcactcggcaaaggaggtttctttgccgagtgtctaa

SEQ ID NO: 34605 - DNA, 399 bp, Zea mays
  Peptide Sequence Number=SeqID_76384
atgtctttgccgagtgccgttgccaaggcactcggcaaagggactggcaaaggggcccactggagggttctttgccgagtgccagtccaccagacactcggcaaagaaacctcctttgccgagtgcctactagggctctcggcacagagactggctgtggggtccactagaccagtctttgccgagtgtcgccgttggcactcggtaaaggatccgtcaccgtcacttggcgccgtgacggtgacttttctttgccgagtgccaaatggcactcggcaaagtctttgccgagtgcccgacaaaaagtactcggcaaagaagctgttgccgatgtacagttcgccgagcgttctttgccgagtgttacactcggcaaaggctttgccgagtgtaaaatag

SEQ ID NO: 34606 - DNA, 411 bp, Zea mays
  Peptide Sequence Number=SeqID_76385
atggagtgggtatttctcaagaggaaaatacttggagatatatcggtggaatatctgggcaatatttctggaaagaacttgagggggatcactggggaaatatctgggcagtatttctggaaagaatttgaggggagcgagtttgagaaaattttaggatttgaatttttgggatgctacaaatctaccccacttaaaaggaatctcgtcctcgagatttggcttagaagggttatgggtatagctttacttcagctacatatcttcactttgcagactcttcgaggagatggaacttcaacaaaatcctggcctttgaggagcatctggttactgattgcaaacgctgattctggctactcaaagatcatcttcaggcttcttgcttttgcttggcaactagcttattga

SEQ ID NO: 34607 - DNA, 228 bp, Zea mays
  Peptide Sequence Number=SeqID_76386
atggagaaaaagaaggcctgtagcaagcttttcaaagaccagatcatcgaagcatataagtttctggatgagaagtggtcatacaaagttctgttgatgaagcaccggaagaccaatcaagaaaggaatccatgtgggagttcacaagaggaagatgctcctcaaaggccgaattttgttgaagttccatctcctcgaagagtctgcaaagtgaagatatgtagctga

SEQ ID NO: 34608 - DNA, 433 bp, Zea mays
  Peptide Sequence Number=SeqID_76387
tttcccctaaggctatggataagcaagagcaccttgattcctcccaagatcccccgccagagttgtttgagcccctcgccatgaagaagattctagcaccgtcccttgaggtcaaggaagaagctgcaagcaccccgccagcaccaccgccctctgaggagctacaagagccagtccagcttgaagaagagttcgaccgcgtcttgccatctcagtcgccgccagaagaagtcatcaacatcagctccctcttgacccatccaggagatgtctcagaatcaaccctgtgtcagtcatttctccgcatcctgctcaagcagcaacagcagaagaaggcccccaaggttcctgctatggagaagaagaagaaggcctgtagcaagcttgtggaagacgagatcatcgaagcatataagtttctggatgagaagtg

SEQ ID NO: 34609 - DNA, 561 bp, Zea mays
  Peptide Sequence Number=SeqID_76388
atgatgtttaaagtggtgttgcttctgtggtgttgtctcagaatccaaagacataggaactccggaggaataagtggcaaaaaggaagaagttattgtcattgctgatgatgtaggggctgatcaggagcattcgatgatggaatacaatagccaatatgaagttgaagatctaaggaaatcgtttctgggggctaattctgctttgaagttgcatcgctctaacaagttgtatttttcagtgtgccatgcaaaccattggtttttgttcattgttgatttgaagaataagcgttttgtttttatggattcatattttgatgaggaagatccttttcaatgcattgttagagacaagcttattcgggtgttcaaagtcctatggttattatattctgattcaaacatagatatatcatcattcaaaattttatatcccgcggtaccaaaacaggaaaatacgcatgactgcggtattttcacactacaatacatggaatattgggatatatctgttgatatattgctcaagttccgcactgaggacatccctcaaatctga

SEQ ID NO: 34610 - DNA, 1869 bp, Zea mays
  Peptide Sequence Number=SeqID_76389
atggcggagggcgaggaggccccgactggatctatggcggggggcgaggtagctccgatgaggtacatggcgcgggtcgaggcagctgcgattccgacgaggtccacgtcggagggcaaggaggccccaactggatctatggcggggggcgagttggctgttgcaggatccatggtggaggaggggaaggtccgacgggatccatggcccgggggtggtggagctggctgcgacggtatctacgacggagggcgagggtgtcccgacgggatccattttcgttgtccggcgacagcaacctgtggtgaagcaggcaggtctggagttccactgcgcgaaggttgtgtcccgacatctggtggcactgtcgatccggacatcatttcctctcctatggttaagttgattgaaacttttgctgttttttgcaagtctgagagagctgcttatagggagaaggtgttaattgaagcagagaaacaatttatgcatgatttcacttttttcaaggaaaagttattagttgattttggccaaatagtggatgtcgaatgcattgatagtacttgccaagttctgtgtgacaagccagttgatgttaagtcgaatgagaaaggggctggtatgggcattgttgaggcttctcatggaaaaggtcatgtggttattacaaatccactgataacagtgtccatacagttggagacaccaatcgttaataggctggatggaaataatggaacatctttgaatccaccagcggagtgtgctcatcctctcaacaagcgattccattactcaaaaactgataagttgggtctctttccacgtacaaagcttttctcacctgtgggtctttttgaccttcaaattacagatgatgaaagtgatcacaatggaaggggcagaaatactgcagctgctatatgtccacacgagccagctggtgttccaattgggctaggccaacttgctcctcctataaccacccatgttgtttatggtgcaacatcagcagcggcaacaggttgtgttaacaatgatgtttatagtggtgttgcttctgtggtgttgtctcagaatccaaaggcacatgctgttggtgcatttttagcagggaatgttactatatatgagcctacactagcattgaacttttcaaatagatccaaatcagcagctgcagttgatcagatgtacaatgatatgaacatattcaacgtagagtcagaagctgggggattctttttgggaaatcaactagaagttggaaatgtagtcaggaatgatgttggtgaaaattggttacaagttcaaaatgctcacgcccgttttccatgttctaatgtgctattgcgatattataatctttgtggcatggggcggagccaatggaaagatttggtcgcagttcgattttccaaaaccaccactcattcgatgatggaatacaataaccaatatgaagttgaagatctaaggaaatcgtttctgggggctaattctgctttgaagttgcatcgctctaacaagttgtattttccagtgtgccatgcgaaccattggtttttgttcattgttgatttgaagaataagcgttttgtttttatggattcatattttgatgaggaagatccttttaatgctttgttagagacaagcttgcatgactgcggtattttcacactacaatacatggaatattgggatatatctgttgatatgatgctcaagttccgcactgaggacatccctcaaattcgaatcaccttggccaacgatctctattttagtgagaagaacactgaagacaagtctctagttcgcaacatgtttcttcagaatattgatcctcggattgtcaactag

SEQ ID NO: 34611 - DNA, 606 bp, Zea mays
  Peptide Sequence Number=SeqID_76390
atgggtccagaaccggagcctctccccacgccgctcattaggacctcgccgcgcgaggataaggtcgccgctccccaggacgggccgcggttctgcgcctccctcctccaaggcgtcggcacctcctgcagccggcgcatcgggttcctcctcggccaatggggcaggttcccgatcgccgacctcgagcggcagcgcctcgaccatctcaacatcggcggcgacgggtggctccacggccagaacggcaacagcctcggcagaagccggtgccagcaccggcaacccgcccggtgggctcgaggccgcggccgcgccagcagcctccctcggcacgacggccgcctcgacggaggggtcagcctcgggaactcgccccacgacaacttgtgccgcctgagccccctacttgggggcaccttgtgtagaggccggccggccgacgagacccggtgcggcaccggctgcagaagctggcgccgtcttaagggccttccgaggagccagaccggtcgaatcgtgcctccgtttgctgggaagaaagggaagagcaggatcaggatacacgaagaaggagccgggacagaggtatcctcagatacttaa

SEQ ID NO: 34612 - DNA, 333 bp, Zea mays
  Peptide Sequence Number=SeqID_76391
atggcgacgcgcgaggacgaggtcgccgccccccaggacgggaagcggttctgcgcacctctcctccaaggcgtcaggaccccctgcagtcggcgcatcgggaaaaggaaaagcaggatcaggacacacgaagaaggagccgggacagaggtatcctcatatacctacccactccggaccaaggccaatcgtgcctgcggggaggcccctcgggcctcggcccccgcaggcgctgccaaggtttgccccgttgccggcttcagcaccatccccgcctcgggcacccggggcaccgaagggacgatccgcccaggcgcagtcatgacgacctaa

SEQ ID NO: 34613 - DNA, 742 bp, Zea mays
  Peptide Sequence Number=SeqID_76392
atgttgataacacaaccgagctcggcgccaagatctgtggcgccgagctcggtgccacgtcgacgccacgcgctcgaggtgtgccaacgcagcacgtacctcggcgccatagcctatggcgccgagctgtgttacctcggcgccataagctacagcgccgagcaaaggcttattcgcctcatgctccgtccgtgcgaccccagttccacttggctctgcttatattatactcctattgcgagagcactttggaatcctttgcatggcgtccgcgatggcggcgacgacagcgccaccacagcggacaggcgggggacacaggacactcacctcttgcgtctctcgtcctcgggccacgccgcgccaagcacgagccccggccgtcacatggctagcactcgcacccgtgggtttaattgggaggaaggagagcgcggaggccggccgggattggccctgtgcgtgcgctgcgttggcgttggcgttgggccgttggccttggcgttgcgtccccccactcccaggcagggcaggagcaggaagaaagcctggaaggacgctcgagtgtcacgtaaagctgaggtcctctcggcacgccaaggatggcatggcagcatgggtagagatggcaatgggtacccgctacccgaaacccggtgggtttttgctctattagggtatgggtttgggtcaatttctctacccatgggtttgttaatgggttcaattcgaaacccaacgg

SEQ ID NO: 34614 - DNA, 507 bp, Zea mays
  Peptide Sequence Number=SeqID_76393
atgggggagaaggagaggcagctagccacgcccaggctgcaggggattttgttgaggcatgggaggtactgtgtttatagagatggcaatgggtacccgctacccgaaacccggtgggtttttgctctattagggtatgggtttgggtcaatttctctacccatgggtttgttaatgggttcaaatgaaaacccagcggtgggtatgggaaacccgttgggtacccgaaacccgcatgggtatgggtttgggcaaaattttatacccgtcatgggtaaagattttttagcgggcgtattttttcttcgcgggtatgggtttaggcagtatttcctctctgaggaggttgtccacattgcaaccactgctcaggagaagatgaagccgtggaaggagacttccaagagttccaagactacgactagttctaggtgtgggttggcggcaaactcccagtcagctgcctgtgaaggccctatctttactgcgtttcgtttagcactttga

SEQ ID NO: 34615 - DNA, 492 bp, Zea mays
  Peptide Sequence Number=SeqID_76394
atgtcaaccgtccccatcgattccccgttcgcgtccaggcctcactgccttggcatacaatgctccactgaccccggctgccgccgtgcaatgaccgcacttgcgggggagctcgtcggcggcgaagagtctggcctatctagggcacagttgacaaatctaatgggtcagagagcttcaccagggatcaaggaaggcgggtggccgaagtccagtgagggcgatcttggccttccggtgatgttctgccgagtccgaaagctgggaaagcttcacaagctaatggcgaagctaaccgagcggctggcgcggcttggaagtggctggagtgggctggccacggtggccgaggctctggcggtaatggcgggcggaaaagaggtcgccggagctaaggagggtcgtctggccggcgaagagatttggagcccggaaatccggtttgtctctctgctcaaacccgaggcaaatctagagttctgtcgtgtctag

SEQ ID NO: 34616 - DNA, 624 bp, Zea mays
  Peptide Sequence Number=SeqID_76395
atggcggcaaccggggtcagtggagcattgtatgccaaggcgatgagccctggccgcgaacggggaatcgatggggacggtacgcttcaggatatggttgatggtcttcctgttttattgtatttcttctgtgactcaccttcgagtgagattgtgatgaattcacccaccctcgccagtggaggagacactcgtttcagctctgactttctttctcatgatggcttttcttccatcttgtgggaagtgcttaactccgccagttaccctacgccccctttgtacacggtgcagttgtacgaggagcatcagccgggttggcgttctcttaactctgagacgattggattcaggacggacgacaccactgaagcagcagccatgaagactctgacaactttctgtggctaccatcccctagagatggtgatgcacccactgggactcttccctgctgagaagaaggatgaccccatgtggtgcaaccatgcaagccatgtgaaggatgtgtgggtgatgtattcggacttggttgggagggtcactgttcagtgcatgagtgcgctgtaccgccttcaggctctacagagagacgctatggcacatcttgctaacctcgcttag

SEQ ID NO: 34617 - DNA, 435 bp, Zea mays
  Peptide Sequence Number=SeqID_76396
atgctggtagactacacaacggtactcgatagaccaagtgtgtcggtcgaaggcccgacgcaacagggtgtcgagagcgttgtggaagtgacacccacgagcggcgtcatgagtgatgggtctagcgatccatccctccggctcctccgagcactctgtgtcgtggctcgaactgccaccggcgtcgttgtcgtctccggggcatctctggctgaggtgcaggggaaggcggcctctcaaactccacctcctgctgaggcgagggggaagagtcctgctgctcctactcctggcatcggtgctcctgctcctcgtgcaggcgacgatgcagtctctccaggtgactggactgacctggcaccgtgcgacgcagtggacgctccgccagacgagaaggcaaaagggggatcacagacttacgtgcagtgcacctga

SEQ ID NO: 34618 - DNA, 561 bp, Zea mays
  Peptide Sequence Number=SeqID_76397
atgcagcaaggtgtcgagagcgtcgtggaagtgtcacccatgagcggcgtcatgagtgatgggtctagcgatccaccccctccggctccagctcctccgagagctccatgttgtggctcgaactaccaccggcatcgtcgtctcctctgtcttcgtcagggtctcttccagcagccgggatcccctgaggtggtgcaaggggcatctttggctaaggtgcaggggaaagcggccttccagactccaccttctgctggggcgagggggaagagtcctgctgctcctgcttatgctcctggcatcggcgctcctgctcctcgtgcaggcgacgatgcagtctctccaggtgactggactgacctggcaccgtgcgacgtagtggacgctccgcctgaagataagcctacacaggcagctgactgggggttgccactaagaaaaactagaactcgtcgtagtcctgaaactcctcaaagtcctccatgttgccagcatctcctcctgagcactgagtacagtggggacaatctggggtgggagtggtttgtaaagcaagggtga

SEQ ID NO: 34619 - DNA, 339 bp, Zea mays
  Peptide Sequence Number=SeqID_76398
atgcacggtctcttccgagggtcgggcgtggctgggaagggctctgctggccggtctacggtggcaggggctcgggtggccgcgggcacaccgtttgctgggcaaacgccggtggtttcgggctccggtgaggtcgagcatgctcggaggagtacggtcgacgccagagggggctttataagcgtggggcgcgcggggtcgggcgcgggcgtgctctggcgcgctcagagcgcgtcgaacacgtggaagtgttcttctgcccgtgttcaacagctcgccgagattgctagcgtgcgaatcttggcaaaaatctggcgcaggcctcttcctggcacctag

SEQ ID NO: 34620 - DNA, 288 bp, Zea mays
  Peptide Sequence Number=SeqID_76399
atggctcgacgcgacgtggggcgcgcagggtcgggcgcgggcgtgctctggcgcgctcagagcgcgtcgaacacgtggaagtgttcttctgcccgtgttcaacagctcgccgagattgctagcttgcgaatcttggcaaaaatccggcgtaggcctcttcctgcacctagggctgtctcttgttctctggaggacatggttgctggagtgacttggccgtccatcttgccaccgggttggacaatcgagtgggatcctgcctcggctaaggaagagcatgaagagtga

SEQ ID NO: 34621 - DNA, 156 bp, Zea mays
  Peptide Sequence Number=SeqID_76400
atgggcaaagtgaggtcagctgatggtaagaagaacttggtaagggaagactccatccaaggtgatgtatttgtggacattactccacaactaatcacactcaatcaaagatccaaatcagacatgtatcataagaacaaacactcaagcgtatag

SEQ ID NO: 34622 - DNA, 228 bp, Zea mays
  Peptide Sequence Number=SeqID_76401
atggcgcgacccgtcggattgaacaagcgtgccgcggctcgcatctaccatacgcaagttctaacgcttagggagatacgggcgaggaagattatgggagcacaacttaccgtggcgctgccaggatcaccgcctgatgtgattgtggacattactccacaactaatcacactcaatcaaggatccaaatcagacatatatcataagaacaaacactcaagcgtatag

SEQ ID NO: 34623 - DNA, 204 bp, Zea mays
  Peptide Sequence Number=SeqID_76402
atgaaggatgccacgcgggggctgtggcacgagctcgacgccgagcgggcctccgcggagacagttttgggttgtcttccttctcagttttgttttactagtggagacacgaagataggaggacagaagggcgcagcacaggactacagcgaaggggaaggccagatcaagcaggagacaccaagaggatgttatagatggtga

SEQ ID NO: 34624 - DNA, 459 bp, Zea mays
  Peptide Sequence Number=SeqID_76403
atgagtcggccagctctcgccgagtcacgccataagtcgttactagggattggcctacttgtactgcaaaatcttagtggaatcaatggtgtactgttttatgcaagtagcatcttcaaagctacaggggttacaaacagcgacttggccacctgttcacttggtgctattgagtggagacacggagattggaggacagaagggcgcagcacaggactacagcgaggggggaaggccagatcaagcaggagacaacaagaggatgtgatagatggtgatctctgcgagcagtatccctccctcccagctgatatgcagaggaagattgctgatgagctggacagaactccgacgcctgcagcactgcttggtgaggattgccaaggaggaagactagaacaggcaagagcagcgctaatcagtgacagagcatgttgccatccagatgggacaagataa

SEQ ID NO: 34625 - DNA, 930 bp, Zea mays
  Peptide Sequence Number=SeqID_76404
atggatgatggaccacctaatccgaggatccgatacatcaaacgtctcggtagtctgcatggcccaacaccatcgctccctcactccccagttctctcccggtctccccacttcggcctctccgcgggccgaacccgctcacccccgccctcccctagccaccggtcatcgccgccgcgtccaccgacgggcccacccaacgacctcgctgcgcccacccgtacgcctccatccagcttagcggcgcccgagtcacagaccagtcacatgtcgccgcggctcctgctcaacaatgtctcctgcatgcggaacgcacagacggtgctccgtgacatcaacctcagcgtccacgacggcacagccctcgtccttaccggcgccaacggctccggaaagaccaccctcctccgcatgctggcgggcttctcgcgcccctcggcgggggagatcctctggaacggacacgacatcacctcccccggcgtcttccagcagtacaagctgcagctcaactggatgtcgctcaaggacgccgtgaaagagaagctcacagtgctcgagaacgtccagtggttcgagctcctcgaggggaaggacggcagcaggtcgggcccggccatccagctcatggagctcggcaggctcatgaacgagaaggccaggaggatgttgtccatggggcagaggaagcggctgcagctcgccaggctgctcgccatcgatcgacccatctggctgctggacgagccctccatcgcgctggacgcagagggtaccaggctgcttgaacacatcatcgcggagcaccgggagaagggtggcatcgtgttcgtggccacgcatctgccgattcaggttgaggattctatgtcgcttcggcttccccagaggtttcctcggaggaagacgctggttgatcttgtccattga

SEQ ID NO: 34626 - DNA, 1199 bp, Zea mays
  Peptide Sequence Number=SeqID_76405
atggatctctcgcgatctcgtccacatgacattctcatgcacccgctcgcttctataccacatgccactattgtgatcttagcggcgcccgagtcacagaccagtcacatgccgccgcggctcctgctcaacaatgtctcctgcatgcggaacgcacagacggtgctccgtgacatcaacctcagcgtccacgacggcacagccctcgtccttaccggcgccaacggctccggaaagaccaccctcctccgcatgctggcgggcttctcgcgccccttggcgggggagatcctctggaacggacacgacatcacctcccccggcgtcttccagcagtacaagctgcagctcaactggatgtcgctcaaggacgccgtgaaagagaagctcacagtgctcgagaacgtccagtggttcgagctcctcgaggggaaggacggcagcaggtcgggcccggccatccagctcatggagctcggcaggctcatcaacgagaaggccaggaggatgttgtccatggggcagaggaagcggctgcagctcgccaggctgctcgccatcgatcgacccatctggctgctggacgagccctccgtcgcgctggacgcagagggtaccaggctgcttgaacacatcatcgcggagcaccgggagaagggtggcatcgtgttcgtggccacgcatctgccgattcaggttgaggattctatgtcgcttcggcttccccagaggtttcctcggaggaagacgctggtttattcacgccttgcatgtctgcgtgaagcttcaagtgttggatactcggcaaacttgaccaaatatggggagacctttggacaggatcaggcccgttggccagccgctctgcgcccacactcccttcatcctgccattacgccttacctcgctgacaacgtcagcttcttcaacggactccgcagctcgcagatcacgcaatccccgacccaatcccaacagaaatcgccgcatggctcgccgctcacttcggatcggccgaacgacctcctggatatcgagctgccccacccgatgggccttccctcggttgcggggcggacgctggtggcctcgccacctggaattgtcgccggggacttcaccaattggtcgccggacctctcctatcacaatcgaaccgccgcgcagcgagggcggacttcctcggcgcttaatctgcg

SEQ ID NO: 34627 - DNA, 264 bp, Zea mays
  Peptide Sequence Number=SeqID_76406
atggaggacttgagtacaatgaccccaacaattgtgattggaaagattgtggcatttgaaacgtcgcgaaagatgggtcaagaggagccaacttcttcaaggcgatatgcttttgcatgtgatgaaaagaaggcaagaagaaggctcccactccaagctcctcaagtgaagaagaggaagaagaatgcgatgatgattaagatgatcaactctcaacatcatccttcgaggacaaagaaacaatctgacgtgtcgaaaagttaa

SEQ ID NO: 34628 - DNA, 393 bp, Zea mays
  Peptide Sequence Number=SeqID_76407
atgaccgcgtcaaaaaagagaccgggaaagggggataccccgaaaaggatccttctccatgaaggaaacaggccccgagcctccctactgatcaaaggttcaaaggctggcccctcggaggggttcaacagctgcctcagagcgcctgggttccgcgcccacttctggtcagagagggaggcatcgagccctcggaccccgtcgaaaggggaccgggtccagcagatcacccgcagaggctcgggggctgctctcgcaaacccggctccggccaaaccgttgacagcgtcaacataccagcccgagaacttgggacccgaccgtgcacccgggctatggccagctcgcatgagggaacaaccagaccagccgaagtgttgtgaaatgtattaa

SEQ ID NO: 34629 - DNA, 1167 bp, Zea mays
  Peptide Sequence Number=SeqID_76408
atgggtcggcacgagacggaacacaaaggggggagaaacagcaaaggggaaacccgcgaccttcgtgttgtcctgcgcccaggtcggggtaatgatggctcccccctgtggcgtggtcggtctgagcccggggtcgggcgaggcggtgactcctccgaggtcgaggctgagtccaggcccgggggtcgggcgaggtggagaccgtcgttcgaggtcgaggttgagtccgagccctggggttgggcgaggcggagtccgtcgttcgaggtcgaggttgagtccgagcgctggggtcgggcgaggcggagtctgtcgtccgacgtcgaggttgagcccgagctctggggtcaggcgaggcagagcttcctatggcgcctgaggctggacttagctgctgtcagcctcactctgtcgagtggcacagcaatcggagcagggcaggcgacgctgttttcctgtcaatcgatccttgcattaaatgctcctgcgatacggttggttggcgtggcgatctggctaaggttgcttctacgcgaagcctgggcctcgggcgagccgaaggttccaagttctcgggctggtatgttgacgctgtcaacggtttggccggagccgggtgttaaaggttcacactcagccaataaaaagatcaaatttggatccaacaaaggagcaaagggccaaccgaaggcacctcaggtttggcgcaccggactgtccggtgtgccaccggacagtgtccggtgcaccaccggacatgtccggtgcaccagaggactccaacgccaactcgccaccttcgggaatttccagaggcactcgcgctataattcaccggactgtccggtgtacaccggacagtgtccggtgcgccatggagaagcggcctcaggaactcgccagcttcgggaaactccaacggcttgtccactaaaattcaccggactgtccggtgaacaccggactgtccggtgcgactccggagcaacggctatctccgcgccaacggctctctgccgcgcatttaatgcgcgctctgcgcacgcagaagtcaggcgcgcccatactggcacaccggacagcaaacagtacctgtccggtgtgcaccggacactcaggcgggcccacaagtcagaagctccaacggtcagaatccaacggcagtga

SEQ ID NO: 34630 - DNA, 513 bp, Zea mays
  Peptide Sequence Number=SeqID_76409
atgagtgaggacaaagtgcgcataaaagactcgtgttggtctgtggggacgatatatgatcctagagagctgccaggagtaagtaccgtcggtccagggtttggacagggtgttacagttgagaaactgtacaatttcgtggcctcgcgtcaggaggatagagatctagttgaggcatatttttctcgctcgtatttgaccactttggcgagaagaaaccgatcgaaagaggaggatgaagaacttggtggcgatgttgaagttgaaagtgaggttgctcgtgttatagagggggtggagagattactttgtaggtggaaaggcggacatacagatgcggtgttatggagcctaagtctactctttccttcgggctcattgtttggcgaagtttgcgttgcaactagagaagatgtttcacagaaggttcatgctcgtatgggtacaaccgttgcttctatcgacttcaaaaatgatgatgatgtctttgatgatgaagctgaggaagcttaa

SEQ ID NO: 34631 - DNA, 1050 bp, Zea mays
  Peptide Sequence Number=SeqID_76410
gtagcaaatattaatgccaaagaagagacaccagttggtcatggagaagtaatatgctttagcatctattcagcaaattctgatgtacaggcagctgattttggaaatggcaaaacttgcatttgggttgatgttctagatggtggaaggggtgtcctgatggagtttgctcctttctttgaagattcatcgatcaagaaggtttggcataactatagttttgatagccatgtcattgagaattatggaatcaaaattgctgggtttcatgctgatacaatgcatcttgcacgcctttgggattcatcaaggaaaattgatggtggatattcacttgaaggacttacaaatgaccgtagagtcatggatactgttccagaggatttacctaagcctggaaagacatcaatgaaaaccatctttggcaggaaaaatattagaaaagatggatctgaagggaaagttgtatctgttgagccagtcaagaagttacaaagggaagacagagagttatggatttgttattcttctctagattccatgagcacattgagactttatgacagcttaaaaagcaagcttacaacaaggagatggatcttggatggttgtcctaggggcaccatgtatgatttctatgaacagtactggcgtccttttggtgccctacttgtgaaaatggagacagagggaatgcttgttgaccgtggttacctttcagagatagaaaaggctgctattgctgaacggaaacttgctgcagataagtttcggaaatgggcatctaaatattgtcctgatgccaagtacatgaatgtgaatagcgatattcaaattcgccaacttctctttggtggcattgaaaatagcaatttgggatgggtgaccgaccgggaagttttctcgggtgcgcatgaggacaaagtgcacacaaaagacttgtgttggtctgtggggacgatatatgatcctagagagctgccaggagtaagtaccgccggtccagggattggacggggtgttatagggacaaatggcccaaagccctaa

SEQ ID NO: 34632 - DNA, 228 bp, Zea mays
  Peptide Sequence Number=SeqID_76411
atggagctcgtcggcggcgaggagtccggcctatctagggcacaattgaccaataaaacgggtcagagagcttcaccagggatcaaggaagggctggaaaagcttcacaagctactggtgaagctaaccgagcggctggcgcagctaggaagtgactggagtgggctggccacggtggccgaggctctggcggctctggcgggcggaaaaagagctcgccggagctaa

SEQ ID NO: 34633 - DNA, 351 bp, Zea mays
  Peptide Sequence Number=SeqID_76412
atgtgcgggtcaccgtcgaggatggtcggagttggctggtccacatgcgcagacgggggagctcgtcggcggcgtggagtccggcctatccagggcacaattgaccaatcaaataggtcagagagcttcaccagggatcaaggaagtgactggagtgggctggccacggtggccgaggctctggtggcaatggcaggcggaaaagagctcgccggagctaaggaggggcgtctggccggcgaagagatttggagccctgaaattcggtctgtctctttgcttgaacccgaggcaaatgcagggtttttcgtgtctagggctcgcatcccaatgccatcttctggcatgtga

SEQ ID NO: 34634 - DNA, 231 bp, Zea mays
  Peptide Sequence Number=SeqID_76413
atgggcggggggcagctggttggggaggaagaacagggcaaaggccgggaaaacaaacgggacgtatctgagtgcccagcgtccagtgttaaggacgcatgtgccctcaggcacctaggttatccccagaatattcccataaagcgggcgaggccggcgaaggcatcgagcgaagggtggcgtcttcgccttcgccccaacatttgccctccgagggaccagttcgactaa

SEQ ID NO: 34635 - DNA, 543 bp, Zea mays
  Peptide Sequence Number=SeqID_76414
atgtgggcccaggagcaaaatggaaggaagcttcacccgctggcttacgtcacgggcagtaggccacgtggcagcatcggttctccgcctgagcggggagcagaagcatacgcggtatggtccggacacgtgtcggccccggacccccgccataccttgattaaggcctgggtattctttgtcctagaatcccgggaccctgctgcgagtggcccggaccccacgcagaggggtccggaacccatcttaggggtccagtttgcgcccgtggaggccctggaccttacccggaggtccagtctgtacatacacaggggtccaactattggaacttgctctccggtgcaagttgatccaacgggggagtgtagcgacgtatctgagtgcccagcgtccagtgttaaggacgcatgtgcccccaggcacctaggttatccccagaatattcccataaagcaggcgaggtcggcgaaggcattgagcgaagggtggcgtcttcgccttcgccccaacatttgccctccgagggaccagttcgactaa

SEQ ID NO: 34636 - DNA, 1941 bp, Zea mays
  Peptide Sequence Number=SeqID_76415
atgccacgcacgaagaatgcgtcggcgtcagggggtggggatgacgaggaccctcgtcgccccttcaggcaggtgaagggcaagaccgtctatttggagcagcaggaaggccgcaagaagcggcgtacggacagagaggctcgtgcagcggcagcagctgcagtagtcgctgcgcaggccgcacttggagatcagccgcatgttccatccgatcagattgcattccgtgctcgtcgtctcacctcccggtctcgctcctccactcacacctccacttccactccgccacccactctgcctgctcccgtcactcctattgctccatccacctccacagccatacccactacctccactacgccagcttccactgcttcccctgctcccgctcccgcttcagctcctcctgtccctccacctcgctttcgggagcgtgatgagactgaggtccgtcctctggtttcggatcctcgtctgtttgatcttcagcgtgctactgcggcacggatagcgctgcgagtacaccgcctattggatcttccagcttttttgctagcagccggtgctgagtctgaggcgcatctcacctatctgcctggcctcctgacccttctgtctatcagcggcagatatgttgaggagtgggtccgcgtcttctacgcctctgtttggattgacccggatcatcattggatgaggtttcgctttgagcgcgaggatgtcacgatcactgccagtcagatccgacagctatttggattccctgagtcgacgactcgccttcacagcctctgctacggcacttcagatcctcctcgtcgccctcacggcggtgttgctccagggacagctcacgtcgcggctctgttccgcccgcctttcacagatgggtcgcgacgttcaccagcagactttactacagcagcgaagtacttatatgagctcatcagacggacactcctgccgaggatgggatacagggaggccaccactcatattcagctttggctccttggtgccctggtatcccactctgagtttgatgttgtggacttcctgatctgtgagatcgaggacacagttctggatgggattcgtgctcgtcggcagctaccttatgctcactacttgtgccacatctttgcgcagctgattcagccacctcgatttcagagcactcttgaggcctcacgccttgtatttggatcttaccgtcctgctcctgagattccagtgccagcttctgcttctgtgtttgactctctggccgaggatgcagctcttcgacagtttgacgctcagggtacagccgctgatgatgatgatgatgatgattttggggttcctcctcctcctccgcctcctatgcctccacgctcacatgatcatgaggctgggagttctagtgctgcccctcctcatcctcaggctatggaccctgcccttgcttcgattcttcagactctcacccagctgcagcagactctcacccagcagcaggctctcctggcagccgagcaggcccgtttatccgacaggatgctctcgatgtttcagagcatgcaggacaggcaggatgctcttcagcagcagctacttcaggatcgggcagagaatagggcattcatgactctcatgcttcagcattctggtatctccgcacctccggttcagtctgctccgcctcctccgcttcacgctccagtggtgccttcgatcttgtctggaccccctgttggtacctctccgctccggcccggtcactttggcgttcacctctccggttctcagctctgtctgtccgcagccgccagtgccaccagcatctgctgttaccactaccgctgtggcagtatctgtgaccgcttctgttccggtagctcctgcagcgcggcctccgtccgagtcagtaccagctccagcttctaccgcagatcctag

SEQ ID NO: 34637 - DNA, 597 bp, Zea mays
  Peptide Sequence Number=SeqID_76416
atggcgcaccggacagtccggtgcgccaccggtgcgccaacggtgcgccaccggtgcgccaacggtcacttccaacggctagttctgacagctagccgttggactcatggcgcaccggacagtgaacagtccactgtccggtgcacaccggacagtccggtgcggtgtccggtaaaaacactgccgcggaccagcctggccccacctggcagagggtgcaccggacagtccggtgcacaccggacagtccggtgccccaaagccagaaacagaggaggcggcgggggcgcatccggtcgaggtcgaggtagcagagcaaacgccggcggagggtcagagtcagtctcggatccaggatctgcggtagaagctggagctggtactgactcggacggaggccgcgctgcaggagctaccggaacagaagcggtcacagatactgccacaacggtagtggtaacagcagatgctggtggcactggcggctgcggacaaacagagctgagaaccggagaggtgaacgccaaagtgaccgggccagagcggagaggtagcaacagggggtccagacaaatcgaaggcaccattggagcgtga

SEQ ID NO: 34638 - DNA, 570 bp, Zea mays
  Peptide Sequence Number=SeqID_76417
atgacgaagacagaaacaatattgaattacaaatgtaccttcggcttgatagacggcaaaaagtacaagcgtgacacaaaagcaagtacaagtcagcgtgaacagtacggggcagtgaggttccgagaatctgaaggtcatcctggtacctggaatctcgagtctaaggcaagttgtgtgggggacagatatcctccaggtccactagaaggcaaaaggacctcgcgcggggtatcaggccagttaccccgcaaggccatcccttcgtgggccggggcaaaagctactagcgaaatgggccgacctgagaaggcgacagactcgaacccaagcattccatcaaattgtgcactatccaaagaaaccgtccgactttcccgtgcatggcaccctcaaatgtcggggcggattaaggataagtcggcggggttttcgggagatcagttcagtcggttcactattattcaggagacatgtgatcgtcatcacaaaccattgagttacaatcaaaagcaccgtcctacccaaaagcatcgcaagggtaaccctaggtgtgcggtcggactctaa

SEQ ID NO: 34639 - DNA, 480 bp, Zea mays
  Peptide Sequence Number=SeqID_76418
atgcagagacttggggatgtttccatagaaaattgggaggaatctggccctaaatcttggctgtcagacacactgaataagcatcgccatggtacagtgcctggacagatcagatcaattgctcccttcaccgccgatgacttcgcgccgggatcgtcgccaccgttaagattagcactcactggaaacgaagaagaaatcgaagtaactgaagagaaggcatcaccacctttggaatctcagtattgctctagccaaacaaaaggttttgttttacaaaatgatgattggcaaagtgggagggatgttttgaaaataaaacttgatgatggatccattatggtcgtaatgggttcaacatcggaaaagatgtacctctgtcaggtgaggaagcagcaaatttctgttgcttttgtaccaaggtggttccacatgaggaaaaacaagagtgaagctgcgggaggacatggtcctctataa

SEQ ID NO: 34640 - DNA, 165 bp, Zea mays
  Peptide Sequence Number=SeqID_76419
atggccgtgacggattcaacatcggaaaagatgtacctctgcgaggtgaggaagcagcaaatttttgttgcttttgtaccaaggtggttccacatgaagaaaaacaagagtgaagctgcgggaggacatgatcctccacaaaaacttttatgtaagaacttatag

SEQ ID NO: 34641 - DNA, 612 bp, Zea mays
  Peptide Sequence Number=SeqID_76420
atggagaaagcggctagggttttcgcgcagcgtggaagagtaaatttcaaaacgcgccgccccccgcccccttttatacacagggcgcggcgcttcgggaaacccgcagtcccacagtacggcgtcaatcaacggtcatgtcaaaaacccccgcggaaccacttcgagcgagggcagcgtctccgccatctagcgacgtcttcggcactagatgacttagtcgaactggtccctcggagggcaaatgttggggcgaaggcaaagacgccacccttcgctcggggccttcgccgtaaacgccggcccaacggagacaagacaacgggcagggacacccttcgcccgggccttcgccgttcatgccggcccaacggagacaagacaacgggtagggacacccttcgccccatacgacatcggacgaagacccgtggcgaggtcatcccaccgggcggcctcgtccagcgcggaggcccatgtgagatccggcccattgcgacaggccctgcgtggccgctgcgtgttacgggcttaatttataaaggcgtccctataattgcgttctgtaaccccgctttatgggaatattccggggataacctaggtgtctga

SEQ ID NO: 34642 - DNA, 228 bp, Zea mays
  Peptide Sequence Number=SeqID_76421
atgctcatgtcccgcaccaaggatgccggggccgctgacgagtgggacccgcaggccttcgtcaacgtgccgagtcttgcgaagggtgtccctgcccgctttgtctctgtcggaccagcggctgcagcgaaggcctcgagcgaagggtggcgtctttgccttcgccccaacatttgccctccgagggaccagttcgacaaagtcacctggtgccgaagacgtcgctag

SEQ ID NO: 34643 - DNA, 471 bp, Zea mays
  Peptide Sequence Number=SeqID_76422
atggagaaaacatccgctggtccgacagagacaaagcgggcagggacacccttcgcaagtctcggcactttgacgaaggcctgcggcgacgtcttcccgcggcgcggcctcgttcagtcccaaggcccacagagcaagttccaacatttggcgcccaccgttcgtgctacgacaaaaccacccgcgatggcacccaagagagctaaccccaaggctgacgaggctgcgaaggcagcactgctggccgcaagaaagggcaaggccctcgtcctcacccaatccacccaccaagagcccactgaagacaatgttccccacaccggcgaagacgacaccatccgcacctgcggaaccgaaggacagtcgcagccgcccccaggcttcgccctactggaaggcgcggacctcaccgaggacggtgaggtcctcggcgtctcaacagaagaacagctgcagctgacgaatctctag

SEQ ID NO: 34644 - DNA, 165 bp, Zea mays
  Peptide Sequence Number=SeqID_76423
atggcgacttggccaaggttgcttcttggtgaagactgggcctcgggcgagccgaagggggctgagaaccaccgtcgtcatggacgcacgcggggagccatcattactcgtttaccggggcgagccagatgggacgccggtcttgttccccgtagcctgagctag

SEQ ID NO: 34645 - DNA, 1265 bp, Zea mays
  Peptide Sequence Number=SeqID_76424
atgaaaatccttgaagccgagcaatggttgaagggtgccaacccccgcgaggtcgtgctcctccaacaacagcaagacgaaggcgacgcgggcggctctccccactcgcgtcctcaagcgtcgcgggcgaagtcttcaccgatgtgctccagggtcctccccctacgacacgggggctgggtcccacgcgtcatgcaagctgacctgaaacggaagaagccaaacccgccgcacgcggagcgtgtaaccaccccacggttacaagcactcctccaccctcgccgaaaccggcggtcgaaagggcggactgccatgcaggtggcgcgcgaccgcaccgcagtggcgcacccctttggcttcgtcgcatccagcatggaggcccaggcccacacgtcatgtaaccggcgcgctggttactacgtgcaagaaactgcatcgccacttgcgccaatgccgcgccttctcgactgcagaaccagtaccgcgactcgaggcaaccctgcgcatggcccaacagtgccaatcgagcacatcgatcacgggtcagtcagccgcgagaggagggaccgagaaaggggatatttcgaaagggatccttctccgcgaaggaagcgggccccgatccctcctactgatcaggggttcgaagagcacatgggcttcaagctcattactgatcaggggttcgaaggctgggccctcgaaagggttcaacagcctccccagagcacttgggctccgcgcccactactgatcaggggttcgaaggctggccctcggaagggttcgacagccacccctgagcacgcagagcgagggatgactctgggtatgtccgatacatggccgaggctcgggctacgctcccgagcctcaggcgcaacagtaaactctgcctcgcccgaccttgggcctcgacctcaggaggaggtctccacctcgcctgaccccagggctcagcccctgcctcggcctcggaagatggtcttcgcctcgcccgaccccagggctcggcctcaaccttggcctcggaaggaggactccgcctcgcccgaccccagggctcggcctcaacctagggctcggcctctacctcgacctcgggaagaatcgcgtcctcgctcgaccccggcctcaggaggagtctccgcctcgcccgatattgggctcggatcgaccgccccatgggggatacatcattaccctaccccctatctagctcaggctacggggaacaagaccggcgtcccatctggctcgccccg

SEQ ID NO: 34646 - DNA, 291 bp, Zea mays
  Peptide Sequence Number=SeqID_76425
atggcgcgcatgtatgagatgcacccggctttgtcccttaaatccgtgtgtgacaatatgccaattggagccatcaaaccaaaagaagatgaagaagaagtgcaaaatatcgacatgccttcttcatcaaatgtaccacataatgatggaaaagatgagagacatgcaaatgaagatacatttgtctcttatgaacaagcaagggtacaagctgaagatgttgatgctccaaggtcttcttcccaagtggttgacaagagaaactcatcactactacaagcacatccataa

SEQ ID NO: 34647 - DNA, 1962 bp, Zea mays
  Peptide Sequence Number=SeqID_76426
atgaaagcaacgcgggcgctccccatccgggggctcggaaggtggaagggcgcgatgcatgaggagagtgcgaagacatggttgccatccaagggggttgccctccttttaaaggtgactctccccacttgcgtcctcagccgtcgcggactgagtcttcaccaacacgctccaaggtcttccctctacgacacgggggctgggtcctacgcgtcatgcaagcaggcccaggatagaaggagccaaaccgccgcgcgcgcatggaggcccaggcccacacgtcatgtaaccggcgcgccggttattacgtgcgagaaactgcaccgccacttgcgccagtaccgcgccttctcgactgcggaaccagtgccgcgactcgaggcaaccctgcgcatggcccaacagtgccaaccgagcacatcggtcatgggtcattcagccgcaggagaaggcgcgacggtcgatatggccaaaagtgggctggtagtaatggcggcggcagtcgggcggaagcagcagtcaagtcgtctgcgggctcacgtcccctcctgggatagcgagagagccctctcccacggcgtgaagacgatgtgcccgtgttccgttcctcgaacggctcgcgcacgcacaacggccgccccgccaaccactcgtcccgtcgcattaactctgcggcagaacaggcgacacctttggcaggcgaagcgggcgacacttcacctccgccataatgactgcgtcaaaaaagggaccgggaaaggggatactccgaaagggatccttctccgcgaaggaagcgggccccgagccctcctactgatcagaggtttgaaggctggcccctcggaagggttcgacagccgcctcagagcactcgagctccgcgcccactactggtcagaggttcgaaggctggcccctcggaggggttcgacagccgcctcagaccactcgggctccgcgcccactactgatcaggggttcgtaggctggcccccgaagggttcgacagccgcctcagagcacgcagagcgagggatgactctgggtacgtccgatacatggccgaggctcgggctaagctcccgaggtaccctaggacatttccgagaccagcaggagcgattctataatggaatcccatcagagggaggcatcgagccctcggaccctatcaaacgggaccgggtccagcaaatcacctgcagggctgctctcgcaaacccggctccggccaaaccgttgacagcgtcaacataccagcccgagaacttggaacctgactatgcacctgggctacggccagtcaaggctccgtccgctcaagggacacgatctcgcctcgcccgagcccagcctcgggcaaaggaaaacagcgtcgcttgtgctgctccgactgatgtgccacccgtcaaggtgaggctgacagccgccaagaccgtcctcaggcgccataggaagctccatctcgcccgatcccagggctcggactcaacctcgacctcggacgacggactccacctcgaccgaccccagggctcagactcaacctcgacgccggacgacggtctccgcctcgcccgaccccagggctcggactcaacctcgacctcggacgacggactccgcctcgcccgaccccagggctcagactcaacctcgacgccggacgacggtctccgcctcgcccgaccccagggatcagactcagcctcgacctcggaagacggactccgcctcgcccgaccccagggctcggactcagcctcgactccggaaggcggtctccgcctcgcccgacccctggggctcggactcaacctcgacctcggacgacggtctccgcctcgcccgacccccgggcccagactcagcctcgacctcggaggagcctccgcctcgcccgacctcgggctcggaccgaccacgtcacaggaggggccatcattaccctacccctag

SEQ ID NO: 34648 - DNA, 342 bp, Zea mays
  Peptide Sequence Number=SeqID_76427
atggagacgctctcggcgaagcaggaggacatggtggatgtgatcctgaagccgacttctaaccaatccaactcaagcacccgacctcgccacgtgagcgggtccggagccgccatgtgtctagagaagatgatatactccaaggcatcaacagtggtccagacccctagggttggccccggacccccgtatatacagtccggacccccaagattggtcccggacctccacgtgggcaagctggacccctggaatgggatccggacccctctgtatggggtccgagtcacccacagtggggtcccaaggtcccaggtcggaacatacactggccttgaatag

SEQ ID NO: 34649 - DNA, 198 bp, Zea mays
  Peptide Sequence Number=SeqID_76428
atggctaagtttcaatctacactatataaaatcttaaagagcaaggtagtgatgcaaactctcgtggatgatgccggtatttttaccgaggtaggtgcaattgttgttccgcaggatcgccttagccctatcgagaatggagacgctctcggcgaagcaggaggacatggtggatgtgatcctgaagccgacttctaa

SEQ ID NO: 34650 - DNA, 804 bp, Zea mays
  Peptide Sequence Number=SeqID_76429
atggagcaaaatccgcgcgaggaagacgaccggccgatggggctcacatggggaaaatgcaccgcgacgtatggcgcatgggacccacgcatcagtggcaggcgaagtcaggttggcaagtggtcccaaatggtcagtgtgcaggctgccggagtccaccgccgtcgacccaggacttcaccgcctccccgccgtcctccagacgcttctgagttcgcgcttgtgcgaggcgacgaaggattcgcgcgaagggtagcgtcttcgccttcgccccaacatttcccctccaagggaccagttcgactgagtcatctggtgccgaagacgtcgctagatggtggagacgctgcccttgctcgaagaggtcccgcgggggtttttgaggtgacgtttgatggagacgctgcccaacatttcccctccgagggaccagttcgactgttggactgcgggtttcctgaagcgtcgtgccgtgtgtataaaaagggacagcgcggctcgggctgtctcttaccctttcgtgctttggaaaaccctaaacttttgaaaacgctcgctcgctcgcctgctctccttgttcctctacatcggagttctggcccgcgtcaagcaaaccgcgcgtcgccaccgacggatatgcagcaattggggtattttgggaacggtgttgggcgcgtcccgggggctgaggagattcccgagcctgagggcgaattagtcgtgtttgtggcgttcttcatcgccggccttcgccttcctgcgcatcgcttcgtggcggaggtcctgcagaggtttgaggtctag

SEQ ID NO: 34651 - DNA, 625 bp, Zea mays
  Peptide Sequence Number=SeqID_76430
atgctccttgatcttggccttgtggaggtacttctgcttcagcgcctctgtgtcaaatctccccttggatttgtgcttgctggagggcgacatggtgaacacaaccgtgggcatcacgccggcgcgggagcaccagagggcgcagaccgcgacggaaaggtcccgcagcggcgcaaacttactccggtgagcaattgcgcgacgaccaggacaataaacggaaaaataaaggtgcgggtaggttgcttaccacaagcgcaaacccaggagcgcctggaggacggcggggaggcggtgaagtcccgggtcgacggcggcggactccggctgcatgggaaacactctggtgagtgtggactgggcaaaccagaggggctgggggcaaaccgaggggtgtcccgagttgctgacggcgaggcggaactcaccggggcaacggaggcgacgtggactcaacggcgatcacagaacggcggcggtctttgggggaagtgggcgagcgagacacgaggtctaaaggggcaagggcgtgaggaagtggccgaagaacgtgcagtcatgggcgcgtccacggtgggggaacgtgggcgagaggttagggatgtggagggggctgacgggtggg

SEQ ID NO: 34652 - DNA, 372 bp, Zea mays
  Peptide Sequence Number=SeqID_76431
atgccgacgccgaccttcaatcactcggcgctgcctctaaagcgccgaccacgtgttcaatcgctcggcattacttctaaaatgccgacgccgaccttcaatcactcggcgctgcctctaaaacgccgaccacgtgttcaatcgctcggcattacttctaaaatgccgacgccgaccatcaatcactcggcgctgcctctgaaacgccgaccacgtgttcaatcgctcggcattacttctaaaatgccgacgccgaccatcaatcactcggcgctgcatctaaagcgccgaccccgtattttgtcgcttggcattacttctaaaatgccgatgccgaccttctatcactcggcattgcctctaaaacgctga

SEQ ID NO: 34653 - DNA, 567 bp, Zea mays
  Peptide Sequence Number=SeqID_76432
atgccgacgccgaccttcaatcactcggcgcagcctctaaaacgccgaccacgtgttcgattgctcggcattacttctaaaatgccgacgccgaccttcaatcgctcggcgctgcctctaaaacgccgatcacatgttcgattgctcggcattacttctaaaatgccgacgccgaccttcaatcactcggcgctgcctctaaaacgccgaccacgtgttcgatcgctcggcattacttctaaaatgccgacgccgaccttcaatcactcggcgctgcctctaaaacgccgatcacgagttcaatcgctcggcattacttctaaaatgccgacgccgaccttcaatcactcggcgctgcctctaaaacgccgatcacgagttcaatcgcccggcattacttctaaaatgccgacgtcgaccttcaatcactcggcgctgcctctaaagcgccgaccacgtgttcgatcgctcggcattacttctaaaaatgccgacgccgaccttcaatcactcggcgctgcctctaaagcgccgaccacgtgttcaatcgctcggcattacttctaa

SEQ ID NO: 34654 - DNA, 489 bp, Zea mays
  Peptide Sequence Number=SeqID_76433
atggctgaaaggtaccaactcccacggagttgcgttcctccaacgacgaggcggaaagacggcgggtatcccccatccgggggcttggaaggtggaaagacacgatgcataagggagcgcgaagacatggtcgcctcccaaggggatcaccctccttttaaaggcgactctccctacttgcgtccccagctgtcgagaagcgagcgacgcttcgccttcgccataacaaccgcgtcaaaaaagggaccgggaaagggggataccccaaaaaggatccttccccatgaaggaacctggctccgagcctccctactgatcagaggtttgaaggctggcccctcggaagggttcaacagccgcctcagagcgcgtgggctccacacccactactggtcagaggttcgaaggccggcccctcggaagggttcaatggccgtctcaggctactcgggctccgcgcccactactgatcaggggttcgaaggctag

SEQ ID NO: 34655 - DNA, 621 bp, Zea mays
  Peptide Sequence Number=SeqID_76434
atgggggatatccaccgttttttcgcctcgtcgttggaggaacgcaactccgtgggagttgctagcccggctgctccccctcgccgggggtcacccaagacggtgaccaccagcccctgggtggggagaagcaagccgggatgcgatcttggtcccaccctcagcttcaaggatgttcatcatcctcgctggggtggaggccgggctgagccggagctctacctcccgcgcgggttcgtgggtcaccctctcctgcggtgttcgagggagagggcgctcaccggccctgcgggcgggtcggacttcgacaacgcggggctggccgacggagggcgttgtcagccccagcgcgtcgggctcgtcggcttggctcccggtgccccctcctgccggaaggcggctgccgcgccgtgtgcacgggaggaccgcccaagatgtcgcgcgctgctagggcggcgttcgtattctggggcggtcctgcctttgcaccggtatggtgccttcgcgcgggggtcggtgccctgctcgtccgggaggatccgagtggggatctgccggcgggccgacggcccctgtcgtcggtgccgaggcggaggcggctcgagaagtccccgtcgctga

SEQ ID NO: 34656 - DNA, 609 bp, Zea mays
  Peptide Sequence Number=SeqID_76435
atggacacaggtgatccctccaacccatccccactctcctcagatccaccgattcacagccgttcttttcatctcagagaagagttactgagaactggtggtggtacgaccacagatacttcacagaaaccgagcagtggccgagaaagggtccagattgaatctctcagacaagaactggagggggcaaaacgacagataggggcactcaaaagtgagaagtcccagattgaagctgaagctaacaaccaaagaaacctttcagtaaaactggagtctgatctcaagagcttgtcagaagcttacaacagcatagagcaggccaactaccgcttggatgccgaggtaaaagccttgcggcagggaggcagcgtgccatatcctgacgtggaagcaataaaagcgcaagctaaggaagaggctgagaaggacagtgaggcagaacggaatgatctactcgtctgcctcgggcaagagcaaacgaaggtcgagaagctgagcacaaggctgacagagctcggcgaagatgtggatacccttctgcagggtattggcgatgacactgccattccggatgatgacgatgaagatgaagatgatgaagagtga

SEQ ID NO: 34657 - DNA, 219 bp, Zea mays
  Peptide Sequence Number=SeqID_76436
atggcgagagtagcgtgtaccctccgtggcaagaggctagacggtgagtcattgatcattgataagccttaccttgacacctttcaaagccagcaaccccttgagagtcttttctttagtcaggtgaagaagcgacatacttttgttgcttcttttcgaaggtggtaccgaaggaagaacaccaggagtaaagctgcgggaggaaaggatcctccataa

SEQ ID NO: 34658 - DNA, 165 bp, Zea mays
  Peptide Sequence Number=SeqID_76437
atggcgagagtagcgtgtaccctctgtggaaagaggctggacggtggtgtatctgtgctctcggttgacgtgaggaagcaaccaacttttgttgcttctgttctaaggtggtaccgaaggaagaacaccaggagtaaagctgcgggaggaaaggatcctccataa

SEQ ID NO: 34659 - DNA, 582 bp, Zea mays
  Peptide Sequence Number=SeqID_76438
atggagagtctttctttagtcgggtggtaccgaaggaagaacaccaggagtaaagctgctggaggaaagaatcctccatcaaaacttttgtttgatacttatcgggaggtgtttttgcctcccttggtgaaacgctcttgggaaagaaaaatgccgccgcgcacgaggggaactgcgcgcaagcatactggcccaatcggtgtgccacgtcatcaacttgccccaagacatgaggatagcagtagtgatccgatcggggatcttgaagcgaaagttaatcagcttcaaacagaactccaacgcaggattgacatatgggtcacggatggcgacagaatcaatgaattgagaagcgacgtccgccgcctgcgagatcagctcgcggatcgagatttagcgctcgactgggcgatgccttcccagactcgtgctcaggatggggctagtacctctcgtgggagggaggcaacaccaaacccacctccagtacccccgacacttgccgaggccatcgctgccttggtgaatgctacagcagacaatacccgcttcctgcgggagatggcgggtcaacaactctaa

SEQ ID NO: 34660 - DNA, 633 bp, Zea mays
  Peptide Sequence Number=SeqID_76439
atgcatactatgcttggtgtcaacattgggcctccaaggcttccaaaagcgtcggcgcatcatagacaatgtcgaggaaccaatcctaaccacaagtttggtggcgacgacatggttcgaaaagctaaaagaatgctacgcatggccaaaagcctagtgacattgaggtctaccaggagggccataaaggatgagaccctaacaaccctgacctgctctgcagccagacaaccacggattggctgctcgtgctctcgtcgaccgaacgagcaggagttggagattatgaggatgcgtgaggagatgagacagcaacgggaatttatggatgcttgcaatgcacataaccaagcgatgtatcaattaatgcagcaacagtgcatgacaccaaacattccaccgccaccacaatggagccaatttgcatccacaccaacgccgggactggggactcaacagttcaacacccctccgacacatatacctgcacctgaagatagggttacgcccgaagcgggggggagtgggtctgatcccacaggaactgggtttgttaagtccctcttcgcgtacccttctcctggtggcggcagcggccaacgctctaaccatccaagtggtggttatccctga

SEQ ID NO: 34661 - DNA, 510 bp, Zea mays
  Peptide Sequence Number=SeqID_76440
atgaccctgacttcgactggtgacatgaactgggtggatccctcgatggtatacacactttttgacggattcattgactcatcatcggtgagatctcagaggacgggttcgtcttcccgtagctcgtgctctcgtcgaccgaacgagcaggagttggagattatgaggatgcgtgaggagatgagacagcaacgggaatttatggatgcttgcaatgcacataaccaagcgatgtatcaattaatgcagcaacagtgcatgacaccaaacattccaccgccaccacaatggagccaatttgcatccacaccaacgccgggactggggactcaacagttcaacacccctccgacacatatacctgcacctgaagatagggttacgcccgaagcgggggggagtgggtctgatcccacaggaactgggtttgttaagtccctcttcgcgtacccttctcctggtggcggcagcggccaacgctctaaccatccaagtggtggttatccctga

SEQ ID NO: 34662 - DNA, 282 bp, Zea mays
  Peptide Sequence Number=SeqID_76441
atgtcacagggcccgcggtctggatggcaaaccccacgcgcctctgggagccgccgccgccgcatctctaggaagccatcaacgtcgtgcctccagatcgaggaactgccgtcgtcgtgcaaccggatcggggagctaccgtcattgcgtcttcggatcgaggaaccactgttgttgcgccacgaggaaccactgttgtcgcgccacgtgccgccggatcagggagccactatcgtcgcgccttcggattggagagtcgtcgcagtcgcgcctttgaattag

SEQ ID NO: 34663 - DNA, 647 bp, Zea mays
  Peptide Sequence Number=SeqID_76442
gggcggacccacagtggggtccgggtgggcctaggcacaccctaagccaggcccaccggggaccccatctggccatcctgttcaccgttgggccgttccaacttctcctagtttcaatcgttcggcacggcttcccagttcctgacttcctggcgagtgcacgactgttccagggttcctcagttcctggcgctggcggctggaaagtggaaactctggcgatcttgctcggtctgctactgtgctccggctgccgatggccgacgcctaccgcctgcggccctgccctcaccagcgctcgcacgaagacggaggttcccttccccgcgtacagccgtacagcgaaaagcgcgccggatcagaggatgtcacagggcccgcggtctggatggcaaaccccacgcgcctctgggagccgccgccgccgcatctctaggaagccatcaacgtcgtgcctccagatcgaggaactgccgtcgtcgtgcaaccggatcggggagctaccgtcattgcgtcttcggatcgaggaaccactgttgttgcgccacgaggaaccactgttgtcgcgccacgtgccgccggatcagggagccactatcgtcgcgccttcggattggagagtcgtcgcagtcgcgcctttgaattag

SEQ ID NO: 34664 - DNA, 252 bp, Zea mays
  Peptide Sequence Number=SeqID_76443
atgaagtattatttgaggttggtattgtatctgaaggaagtgaagtatattgataaatgcaacatgccatatacattgcatgattcacttgcatctgaagttggggtcgtgacctatggtccgaccgtaccggtattgttgacgcacggaagtgttatacaaactattgtggttgttcaaggaaatgagatggtgcttgttgctcatcaagggaagtgggaagtagtagcacatccaccttcactctcataa

SEQ ID NO: 34665 - DNA, 264 bp, Zea mays
  Peptide Sequence Number=SeqID_76444
atggggctcggtgtatgcggctcgctctgccaaggtggtgacgaggatgatggttttggttatgactatggtgctggtatgtggtattctttccgtttggaaagggtaaatgaagtattatttgaggttggtattaacttgtatctgaaggtaaatgaagtattatttgaggttgtattgtatgtgaaggaagtgaagtatattgataaatgcagcatgccatatgcattgcatgattcacttgcatctgaagttgggtcgtga

SEQ ID NO: 34666 - DNA, 261 bp, Zea mays
  Peptide Sequence Number=SeqID_76445
atggaccttacttctcctcacaccaccggtggcactgccacaaatacgaaccaaccaccaccggtgtcacacccagatcttagggcaccaaaacccaggcgtgaaataatcaccaagtgtgctagaaacaagtcttacacatatgatgactcatgggatgtgagtacagcaagtgtgagctcatatacgttcatccctcaacaagttgtggggaataatgtgcatgaactcaccaaaggtgggagcccatgtgaagtgtaa

SEQ ID NO: 34667 - DNA, 186 bp, Zea mays
  Peptide Sequence Number=SeqID_76446
atggcggtagacgagggattcttgcaattgctcttcccagaaactgtagcgggttttcggaagttagtggaactttgtaaaggcccccaatgctcagctttaaccaatctctttggtgagccttacacttcacatgagctccaacctttagtgagttcatgcacattattcccaacaacttgttga

SEQ ID NO: 34668 - DNA, 426 bp, Zea mays
  Peptide Sequence Number=SeqID_76447
atgcatcgcgcccttccaccttctgagcccccggatggggagcacccgcgttgccttcgtcttgctgccgttggaggagcgcgacttcgcgggggttggcgcccttcagccatcgctcggcttcaaggattttcatcatgtagctcggctgcattccctcaccaatggtcatccaggatgatgactaccagtttggtggtggggagaagcaagccgggctacggcctctgccccgccctcagcttcaaggatcttcatcatccttgctgtggcggagggcgagctgagccagggttctacctcctgcatgggccggcaggccgcctcttccttcagcattcaggggagagggcgctcaccggccttgcagagggggcgaacttcgacaacgcgggaccggtcgaccgcaagcgtcgtcagctctag

SEQ ID NO: 34669 - DNA, 1395 bp, Zea mays
  Peptide Sequence Number=SeqID_76448
atggggagcacccgcgttgccttcgtcttgctactgttggaggagcgcgaccttgcgggagttggcgcctttcagccattgctcggcttcaaggattttcatcatgcagcccggctgcattccctcaccaatgcttcaaggatcttcatcatccgagctgggaacgagggcagggcgagttggggcctacctccacgtgggccggcgacccacttcttcctccaacattcgggggagagggcgctcaccggccttgcggagggggcgaacttcgacaacgcgggaccggtcggccgcaagcgtcgtcagctgcagcgtgcctggctcgctggctcagctggctctgtcgcagcctccgacgctgcctactgtcgcttgatccgggctggggcgtccgccattcgtcggcatggcgctggcgcgcaggtggccgctgtcgtcggtgctgaggtggtggcagccagagaaggtttctccgccgacgagaccgtcggcgccatctgcggccggacccccggctctttggctttgatggcttgtcctcgcccctcgagtggagacgtgggcgaaggcctcgtcacatcagcgtctgccctgaggtcatcgctgctgctgtttagccgcccgaagcgggggtcgttgtcgctgttggtgcagtggtcaccggcgagccacctggagtttgttgtcccgcaggccctctggtgtggaggttgttcatacccgcggaagtggaaccagagttccgtttgtaatggcaccctgagtatgggtgttttttcattgtggctgtcgaggcctgaacatctggaggcggagttgactcaaaaagaggcttcgtcggcccaggagaaggcggcttgccaggccgacgaggtgcagcagcggcggctggagcttggccaggtcatctgcgagttggaccaaccccggagtcacgctgctgaggccgcgagccgggctgatgtcctcgagggacagctgactgaggttacggagcggccagccgaggtgcccgctcgggccgggaccctggcggagaccctggctgcgatggcccaagcgctgtgctggcgtcctccttcggggtggagatccttccgcccatgtcgccgtccgaggccaggccagattccgccgaaggtggaaacgacgccgagggtgctgctgctccttttgccgatgtttttgttcgtcggtagcataatcgcttatccgagcgagagttacttttctcggaaggtgatgagtgaggattctgttatcgatatagtcgtgaaggcacgaaagtcgttctggactccgctatcgaagcagtcgaaaagcgcgaaagacgttctggcaaaagacttttccgaggaaaattttgacgcagagggggttccccccttctag

SEQ ID NO: 34670 - DNA, 354 bp, Zea mays
  Peptide Sequence Number=SeqID_76449
atgggtgatgactccagtctcccctggatgaagagaatgtcggggaagaaaggagctggtgtggcgctaatagcaaacaaccttcgctgtcctgaggaaaatccggctgtcacacctgattttagaagtggactagctttatgtggggttaaggtcaagcagttgcttttagttggtcagagcgagcactacgccctagcccccattgatggccctccaacaaagccaactacacccccaggttcatctaattattcagctaaaggcgtcccattccatcctcatggtcgcattgttatcccgggtggtcactccacgaataggtccttacggagagttaaagcaatagcataa

SEQ ID NO: 34671 - DNA, 378 bp, Zea mays
  Peptide Sequence Number=SeqID_76450
atggctcaccggagttactccggcccgcccgaggctttctcaccgccgttctcccctctctacctgtggattcatggccccttccccgccattgagttctccgtggcaccctcttcctctctgcccaactccagcgaccccggaaccccccttggctcacgcctgcctcaactccggcaacctcaccgccacggagaggagcagcgccgcccgcagtcgttcacccctccccggacacaacaaaataaattgatctatgattatgtacttggggctcaggcatttttcctgagtacctctccgcaaggacctattcgtggagtgaccacccgggataacagtacaaccatgagggtggaatgggacgcccttagctga

SEQ ID NO: 34672 - DNA, 300 bp, Zea mays
  Peptide Sequence Number=SeqID_76451
atgaatgcccctaaccgttatgagcgtttcgtcgtgccagagggcaccaagaaagtgtcctatgagagggatacaaagattgtgaatgttgcatcattcactgtcgaacgcgaggatcacactgtaggcaatatcctccgcatatggtacaacaccaataggcaaatgtgcacgcctaggatactggagacatttcaagcatctatctatactgggggtgggggtaggaaatcatttctttcccctgtacagcacagccctcttgcatggagaaccactggaacaatagaagaacactaa

SEQ ID NO: 34673 - DNA, 276 bp, Zea mays
  Peptide Sequence Number=SeqID_76452
atgaatgtccctgaccgttatgagcatttcgtcgtgtcagagggcaccaagaaagtgtcctatgagagggatacaaagattgtgaatgctgcatcattcactgtcgaacgcgaggatcacactgtaggcaatatcctccgcatgaggaaggacgcacaggcccttgcatggcgaatacaaagactacgaagcaatggtttccagcagcatgcgcattcagatgtgcatcctctcgcagaggagatgtgcatccgcatggtcgaccgcacattttga

SEQ ID NO: 34674 - DNA, 276 bp, Zea mays
  Peptide Sequence Number=SeqID_76453
atgaatgcccctgaccgttatgagcgtttcgtcgtgccagagggcaccaagaaagtgtcctatgagagggatacaaagattgtgaatgctgcatcattcactgtcgaacgcgaggatcacactgtaggcaatatcctccgcatgaggaaggacgcacatgcccttgcatggcgaatacaaagactacgaagcaatggtttccagcagcatgcacattcagatgtgcatcctctcgcagaggagatgtgcatccgcatggtcgaccgcacattttga

SEQ ID NO: 34675 - DNA, 1384 bp, Zea mays
  Peptide Sequence Number=SeqID_76454
atgcagggccacatgctccaggcgttgtgcatccccgtgattgtctttgcgagcgccctggtgctggtggccgcggtgttgtgcgccgtcgcggtgcgggcgctgcggcgggcggcggcgcgggagatggcgctgaacgtcgacctggcccggcagaaggaggcgctgcggcaggcagagcgcaagagcatgaataagagcaatgcctttgccagtgctagccacgacatccggtccgcgctgtccgccatcgccgggctcgtggacatgtcccgccaggaggcgcagtcgctccccgccatcatggaaaacctcgaccagatgggtgtctgcaccaacaagttgttcgatatcctgaactcaattctagacacaagcaaggtggagtcggggaagatgcagctagaggaagccgagttcagcatggcagacgtcctgcaggagtcggtggacatggcctacgtgacgggcgtccggcggggagtcgaggtggtctgggacccctgcgacttctcagtcctgagatgcgcgactgtcctcggggacagcaagcgcctcaagcagatcctagacaacctactcggcaacgccctcaagttcaccgatgaaggtcacgtcgtccttcggagctgggcgacccgaccgatcatcgggagcaatgtcagagctccatcaaggtttgtgcacccacggcatggcggcggcagcttcttgggatgcttgttcagggcaaggaagggtcctggtgaccaggatcatgtgcagaatgaccccaatttggttgagttttactttgaagtggtcgatactggcattgggatcccccaggagaagaggatgtccgtgttcgaaaactatgttcaggtgaacaatggccaaggcggcacgggcttggggctcggaatcgtgcaatcctttgtacgtctgatgggaggagagattagcatcaaggacaaagagcccggggaaaggggaacatgcttcgcgttcaacgtgctcctgaagataagcgaggtgcaacagcctcaagacatagaagaaggaccgtcggttccattagacaccctgaaccgctccatttacatagcctcagcgtttcaagaagctagcaacttcaagggcgtgcactgcgttctctacgttcatgggtatgaaaccaggaggatcctgaagacgtggatggagagcatcgaggtcaaggtctggctggttccgcaagccgagttcatcggttccaccttggagaaggtgcagagcaatagcacggccaccgctaccgcggaatgcggcagcgccgaccggtgcttcagctccaaggagatggtgaacctgttgaggaacaactctagtcctaggagagccatcctcggggggattccttccg

SEQ ID NO: 34676 - DNA, 2214 bp, Zea mays
  Peptide Sequence Number=SeqID_76455
atgcagggccacatgctccaggcgttgtgcatccccgtgattgtctttgcgagcgccctggtgctggtggccgcggtgttgtgcgccgtcgcggtgcgggcgctgcggcgggcggcggcgcgggagatggcgctgaacgtcgacctggcccggcagaaggaggcgctgcggcaggcagagcgcaagagcatgaataagagcaatgcctttgccagtgctagccacgacatccggtccgcgctgtccgccatcgccgggctcgtggacatgtcccgccaggaggcgcagtcgctccccgccatcatggaaaacctcgaccagatgggtgtctgcaccaacaagttgttcgatatcctgaactcaattctagacacaagcaaggtggagtcggggaagatgcagctagaggaagccgagttcagcatggcagacgtcctgcaggagtcggtggacatggcctacgtgacgggcgtccggcggggagtcgaggtggtctgggacccctgcgacttctcagtcctgagatgcgcgactgtcctcggggacagcaagcgcctcaagcagatcctagacaacctactcggcaacgccctcaagttcaccgatgaaggtcacgtcgtccttcggagctgggcgacccgaccgatcatcgggagcaatgtcagagctccatcaaggtttgtgcacccacggcatggcggcggcagcttcttgggatgcttgttcagggcaaggaagggtcctggtgaccaggatcatgtgcagaatgaccccaatttggttgagttttactttgaagtggtcgatactggcattgggatcccccaggagaagaggatgtccgtgttcgaaaactatgttcaggtgaacaatggccaaggcggcacgggcttggggctcggaatcgtgcaatcctttgtacgtctgatgggaggagagattagcatcaaggacaaagagcccggggaaaggggaacatgcttcgcgttcaacgtgctcctgaagataagcgaggtgcaacagcctcaagacatagaagaaggaccgtcggttccattagacaccctgaaccgctccatttacatagcctcagcgtttcaagaagctagcaacttcaagggcgtgcactgcgttctctacgttcatgggtatgaaaccaggaggatcctgaagacgtggatggagagcatcgaggtcaaggtctggctggttccgcaagccgagttcatcggttccaccttggagaaggtgcagagcaatagcacggccaccgctaccgcggaatgcggcagcgccgaccggtgcttcagctccaaggagatggtgaacctgttgaggaacaactctagtcctaggagagccatcctcggggggattccttccggtatccttgttgtcatcgacgtgtccggtggtgaaacggaagaaatttgccaggagatggccaagcttgccaggatcaagcatcaagccccatgcaaagttgttctgctcgaggatatcaagaccccttccaatgatctgaggaggctcaaggacatgggctgcgatctcgttttgcgaaagccagtgcatgggtctcgccagttcactctccttatgaccctgagagacctccaagttttagatgcacaagcacagtcttcccatgttggccctgagattgctgggaacaggcagcaacaagatttgccagatgttgttgttccttgcgtggaagacactgctgcatcaactgaagcttcatgcttggctcaggaacaacagaagcctggagatgataagccgctagctgggatgcgaatcttgctggctgaagacaatctagtgctgcaatcaatccagaggaaaatcatgaaccagcttggagcatttgtcacagtagctcaaaatggagctatggctgtgaacttgctcagagaagctcttgagcaagccaatgcttcagaagaggatatagtgtccttgccctaccatgtcatcttcatggattgccagatgcccggtatggatggctatgaagcgacgaaactcatccgcgaggaagaacaacgctacggaattcatactccaatcatcgctttgaccgcgcacgacatggaggaggatctgcagaaggccatcgatgccggaatggatcttcacctcgcaaagccaatatcgcggaagaagatagtggatgctgttcgcagtgtctgcaaatgtgagaattga

SEQ ID NO: 34677 - DNA, 5658 bp, Zea mays
  Peptide Sequence Number=SeqID_76456
atgcttgggggtctaatgattctcttctgtgctctagctgccatttggttggttggccagcgcattggccaacccatatatatgtcccatctttgttcttttagtctccagctcaaggccacgactgtccgtatgacctctgcctatgtagctggaggcggtaacaatgccaaccgcatcggcatggcgctgtgccgctgccgaaacaatgttttgatggagccagccgtattgaaccgtgaaagagttgcattggacaagaaaaacaagatgcctgtgttgttcgacgactatagcgatgaagatttttatggggcacaacggaagtatagtattgtcgctcgagttgaagttaaattccctattgaaccacgttatcatgacaggcaacattacattttgtctgacatcaatggagccaagatcgaggccattgcaactcggtatgagatagtcaaatacttcaacagtttgctccatgaaaagcatgtctacaagatgcacaacgtatggtttggtcttaatccgggtgcatttaattttcgacatctaaatggtaccatggagttgtatttcacccaccaaactgtcgtagagccatacactgtcccagttcaaatgccgccatttccaaaacatatattcttgaaccttgatgatattgccgagctgccaaacaggactttagttgacattatggctattgtagtccacttggatacaatccatcgcacaatgtggggtacattcaggaagattgttataatggatgctaggtggtctttacataccattaaagtttggggcgatttactaaacaaaaatgcactccgttgggcgttggctaatgagaattatagcatcataattgggaccatgtttcggcggttcagaaaacaagatcagatgggacataatgtcgatcgcaaaccattcacagacatctctagcaatatcattagaggtgatcaaaatgaattgctcggaccaatgctcgatgctaaggagcgtaagcgaaaaagggatagggaaagatatgcagcgatgtccgttgaacaaaaaaacgagaagaataggaagcgtcgtgaagcacgtcaacgaaacaagggacacaatgtgatacccaatgtgtcaggaggtgaccaaaatgaacagcttaggttgtataatcagacaccaaggcggaaagagggaaagttagagtacataagaaaacgtagagcactgcaagctagcactttgaatcaggggtccatcgccatggaggtcccaacatatacctctgaggttgtacactctacagcagatgtatcggaacctgattcatcctctgataacgcatgcgactgggttatccctgaatacaccagtacacctttcatgccagcttcaacacaaactgaggatgtcggttcacccgatatgtctactgagccactccgacgtaaacatcatgttctgcctggtgaaagacaagctatcttagcccgtcaaaacaagaaatttgaagcaaacattgcacgtaacgtggctactttgactgaggatactattagtgacgtcggacaaatggatgattcgacacaacccggttcaactatagagatcaacaacactgttgatgacgatgatgagggtgtcatattcggagaggataatgatgagaacaagggatatctattcgctgatgaggacactaacgaggacttcgagatagatggtactcaagatcaatctgttgtcactgatgtgcctgacccgtacgacaaggtctacagtaacatccctgaagaaacacatatgctgaagcacgttcccgactgtggttattgcactgcgaagaagtttgagtatgagccgcctgggttttgctgtcgaggtgggaaggttgagctagccccactagagacccctcccctgctcaggcggttgtgggatagtgcagactctgatgctaggcactttcgtgataacatcaggttttttaatggccatttttctttcacttccctgtactgttgcctcgacagtatgacaactaatatgagggattctggtatatacacattctgtgcacaaggcatgatgtaccataatatcaagtcattcggtagtgaatgtggggcagagcacaaacacctggagctttacttttacgatgatgatcccagtctcgagcatcgataccgtaagtgtcgtgaagatcagattcagaaagaccaagaggttattaaacagatagttggcatacttcgtggaaatccgtactctgagcaccttaggagcatgggtcatgttgagaaccttgctgactatcacatcgcattgaaccttgaccagacgttgaaccagaagacatataacacacctctcacttcggaggtggccgctgtctggatcgaggggagcgaacgacgaggccagttcatcaagagtgttatgctacatgggaaggataggtcaagccacggcatccgctcataccatggatgctacgatgcgctatcatatccactgttcttccctagaggtgagcttggatggcatgcaaatatcccaaaggttggtgtatccatggacgaagtggatgcataccgggcgacgcatagggcaagtaatggaaatgatgaagatgcggaacctcctacccatctatgtgtgtctgtgcgtgattactactgctacaaatttcagatacgtccaggggtattcaatccgatacttcatggtaaacgacttttccagcagttcgcggtcgacacatacattaagattgagagctcccgtttagatttcatacgtaagaaccaggatcggttaagggcagatctataccagggcttggtggatagcatgttagatggagatgttagaggagagaaggttggaaagcgaactgtgttgtcaccgtcgtttattggcggtcctcgtgacatgagacgtcgatatatggatgctatggctctggtgcggaagtttggtaaaccagacatctttcttaccatgacatgtaaccctaactgggatgagataaagagagagcttttacctggacagacaccgcaagatcgtcctgatcttgtagtgcgtgtctttcatgcgaaactacaggagctaaagcataggttgactaaacaggatatactcggtaaagtccgagcctacgtctatgtcgtggaatttcagaaacgagggttgccacatgcccattttctactcatcatgcaaaggaagtacaagctcacgtgccctgaacagtatgaccttttgatctcagctgagatcccgtccaacaagtaccctgaactgcgaaagatggttatcaagcatatgatgcatggcccgtgcgggtcgctaaaccctaactgcccatgcactaagggtcgtgcatcgtgcaagaatcaatacccccggcatttccatgaggcaaccatgcaagggaaggattcatatcctaattacagacgtcgtgatgatgggcgtaaggaaaaggttcgaggatgtgaattggacaatagatgggttgtcccttacaacccttacctgcttcggctcttcaactgtcacatcaatgttgaggcgtgtgggagcatcaaggctgttaagtacctgttcaagtacatatacaaaggccatgatcgtgcgtctgttgttatgagagatgcgagtaaggaaaatggtgatgtagatgagatccagcagtatagagatgcaaggtgggtgactcctccggaagccttatggaggatatatggatttgagcttagtcagaactctccatctgtgatgcagctgcaactccatcttccaaacatgcacatggtgacgtttcacgagcgacaaatggtcgagcgagtcgtcaaccgtccaggtgctgataggtcaatgattacagcatattttaaggcgaataagctgtacgaggaggctcggggcatcctgtatcgtgacttccccgagtggtacacttggcagcagggcaaagtgtggcaaaggaggaaacggaatacgggtggacaagtcggtagaatcgtctctgctctaccatctgagggggagcgcttctatcttcggctcctcctaaatcatgttactggtgctacctcctatgtggatctaaggacagtagacggtgacacactaccatcgtttcgtgaggcagcacaaagaaggggattacttgaagcagacaacacaatagatgagtgtctcaatgaagctgctctttaccaaatgccatcagcgctacggaggttgtttgcaacgatactggttttctgcgagccgaatgatgtggccgaattgtggcagagacaccttgacaaaatgtccgaggattatcatcgtattactcagagcaaaagccatttgcagcagatggtcttgattgacattagaaacatgttgcagtcaatgggtaaagacataaagacattccctctacctgctatcatcgatagatatgacgattcacaaggtattgatagagagatttacgaggaggaaattatcgaggcgacggcagaagatgttgctttgcaagaaaccctaaatgaggagcagaagtctgcctatgaaaagatcttatctgttgttgacaccagtaatggcggtgtgttctttgtggatgggcctggtggtactggaaagacttatctgtataaggcattgcttgcggtgctacgtagtcaggacaagattgcagttgcaacagctacatctggggttgcggcttccataatgcctggtgggagaactgcccattcacgcttcaagataccacttactattgatgatggtgctatatgtaccttcacgaaacaaagtgggacatcaaagttgctacagaaagcgtcgctcattatttgggacgaggcatcaatggctaagagacaatcaattgaagcgttggacaacagcatgcgtgatatcatgggacgccctgatctgccctttggtgggaagactattgtgtttgggggagatttcagacaagtactccctgttgtacgtaaagggtcaagggctcagatagttgctgcctctctacggagttcttacctatgggaatcaatgtgccacctaaagcttgttcgcaacatgagagcaaagagcgacccgtggtttgcagaatatttgttgcgtgtcggtggtggaactgaggaagtgaacaacgatggtgatgttcgtcttccagatgaggtatgtgtgccatataccggtgatgaccgcgaccttgacagattgatagatgacatttaccccagtctaaacgaaaacatgtctaatacaagctacatcacttcaagagcaatattgactactcggaacgactgggttgatatgataaatatgaggatgatcgatcgtttccaacgggagcagatgatgtaccatagctttgacaccgcggtggacgatcctaataactattatccatcggaattcctaaacacgctgactcctaatggactacccccgcacgttctgaagctcaaaattgggtgcccattcatgttgcttaggaatatagaccctgctaacggtctttgcaacgtcactgatgataaaatgaataagggggtggaaaagaagtcaacaataaatggcgtaacatacacaaagaatattgtctataaggaggtccttacgccgtag

SEQ ID NO: 34678 - DNA, 1425 bp, Zea mays
  Peptide Sequence Number=SeqID_76457
atgtctaatacaagctacatcacttcaagagcaatattgactactcggaacgactgggtggatatgataaatatgaggatgatcgatcgttttcaacgggagcagatgatgtaccatagctttgacaccgcggtggacgatcctaataactattatccatcggaattcctaaacacgctgagtcctaatggactacccccgcacgttctgaagctcaaaattgggtgcccaatcatgttgcttaggaatatagaccctgctaacggactttgcaacgatacacgactggtggttttcttgcctcgtatacccctgtgcccttctgatgacgagatgttccctttccattttaaaaggaagcagtttccggtaagactaagttttgccatgactgttaacaagtctcagggacagatgattcctaatgttgctgcgtacttgcccgaaccagtattctctcatggccagctatatgttgctctctcaagggccacaactcgattgaatgtgaagggtgatcttgcactcatcgattggattaaagaaatcccttgtgaaccaagggtagaagtcgtgcttattgatgatgcctttgtggaaaggaagtggatagaatgcctatttcaaccggacgcatatctaggtgatgaggtgtttattccaataaatatccgagaaatgcactggtatcttgccatgatcaatgcaagaaatatggagatacaagtgctcgactcacttggtacatcatccggtcgcaatgacctcattgacactataaaaggactccaaagacaaattgatatggtatctcaacgtaaggagttaaaagatcacatgtggccagacctccgagttgcttcttggccacttagagaaatagaaatggaatatgcaaagcaaacaaatagctcctcgtgtggcctctttctactaaactatatcaaatactggacaggggacgaactatctgataattttacccaggatgacatgtcacactttaggaaaaaattggctgctatattactatcttcagatataaacaagagaaaggggtgtccgttatacaagtatgacaaagaagtcgatgctggatgttcctctgatgttcagatattagatagtcccacaaatcctaagaagaggaaactactttgtgtatctgaagaaagcgaagtattgatggaagatgatgatggccccatcactcaagaagacttagaaaggtggtttgttcatgattgggataaaagaactcctataaaaatcccgaccgatgagtgcactaatgaatttttactgagtggcctttctacaaaggacatgccagtgaccaaagccgatttaatagatgttctatgtgattacatcatgacaatccaagatgatacgacattagagatgacatgggtgcgaagttga

SEQ ID NO: 34679 - DNA, 354 bp, Zea mays
  Peptide Sequence Number=SeqID_76458
atggacagggagggggctgctgcttggcgccatggacatggacctcgccgaggtcggcccaaggagctcctgcgcgaccaagggggaaaacaggggcgagggaacgctgtgcagggcgccgtgactgctggccggagatggagttcggtctgcaacagagggggctcgaccacggcaagagcagggaaggggaggctgcgtgctagtggaagaagtggctggagcagggagggcgctgcttgggggctcggctgggggatttttctgggcgccatggctgggagcagggggcgccatggcaagcttcgagtaggggaagagcaggcgctgtgcgaggtggagcagggcacctga

SEQ ID NO: 34680 - DNA, 384 bp, Zea mays
  Peptide Sequence Number=SeqID_76459
atggctgggagcagggggcgccatggcaagcttcgagtaggggaagagcaggcgctgtgcgaggtggagcagggcaccggaacgagcagccatggggcaccaatgaaaggggagcgcgcagccatggagatgctcgaccatggagcaaaaatcaagctccttgctgctttgctgtggagaccagggaggaagaaaaggtgcgccggctgctctcctgtagggagcgagcgcccagggaggagggcgccatggtggccgaggggaggagctgagctccctgcgctttgctgctcgccggaggaagagaaccgctggctgttgatgtcgtggaaggagaagacagggaaggagaagggtggcggcctaggagactttagaaggggg

SEQ ID NO: 34681 - DNA, 825 bp, Zea mays
  Peptide Sequence Number=SeqID_76460
cccctgctctccaagttccttcgcggtagcagggcagcggcccagcgccagcggaagcccgccgcgaccgcgctgcacttctccggctccttcaagctgtcggctgtcgtggcgccggcgtcgtgctgcgtggtgctggatgccgtcaagaccgccgcctcctcgtcccttctccagcgcggcagggctggccagggcctcgacggcatcctggcggcagcgggcgaggggacatgggcgcatggcgctggcggcaggtggggtttgcgtcggcaacggcgttggtttggggctcgtgtaggcgctgtggggtggcgctctcttcttcgccacccctcccctcacgatctagactactgctgtggacggggcgacaaccgtgcgtcggcgaggagcagaggatttggatcctctgtggtgcggttgctgccagggatggccgacgagaggtgcggcgcgaggggcggctggctccgtgcgttggggcgtgtggtgggaggtcctccggcgaaagccatgctcgcttgcgggtggacagcggtgacgcccgtgggcgccacccctaccctattgagggtgccgtctttggacctctcgccccatgcgggatccctcgcctcggccttcttgaggcgggcggcgatggcttttcgacatcgtttctccttcttgaaggcgcggcccaggagacctccagtttgtgtgttcgtccgtgttgtggaggctctttgtcactccgcttggttcgatggtgttcgggcctttgtcgcttttggtgtctgctcactcccggggttcggcgttgtggatctttgctcgtggtga

SEQ ID NO: 34682 - DNA, 1209 bp, Zea mays
  Peptide Sequence Number=SeqID_76461
atgactttagctattatgattagagaaacatggttgtcggggacaaagaaaaattcatgggctggcaaagagctctgcctctcaattaagaagaatggaattggcccagttttaaggaaaaccgggcccaaaacctacacagagcgcacagtagaaaaaccggcgaacgagctaacaaacaacctagacaacgacagtccccacacacagacacatctagagtcatcgttgccaagctcaaacacaagagacgagcagctccgacttcccaagacgagccacacactgtcaaagcaactcgacgacgcttacatccagacatcgacgcaaggaataagaccgcagcgcgccatcgttgccaagcctcagcacaccctcacgaggcagctccgattattcaccacgagcaaagatccacaacgccgaactccgagagcgagcagacgcctaaagcgacaaaagcccggacaccatcgagccaagcggagtgacaaagagcctccacaacacggacgaacacgcaaactggaggtcttctgggccgcgccttcaagaaggagaaacaacgtcgaaaagccgtcgccgcccgcctggtacaaaccaagcaaagtttcctccgaagacctagcagagcagtgtagatcgccagcaccaaggagaaagctgaagggtcagccacgccgatgtcaccccgccaagccgccgcgtgatgtcaccttctgccgtccaccgacgcaccaacccaccagccccaaccctcagagccccaacgccggtcgagcaccagcgagagaccccaagaaggccgaggcgagggttcccgcatggggcgagaggtccaaagacggcaccctcaatagggtaggggtggcgcccgcgggcgtcaccgctgtccgcccgcaagcgagcatggctttcgccggaggacctcccaccacacgccccaacgcacggagccacccgaccctgcccacaccacaagccgaaacgagaggagagatgaatctagccggagaggctcaagatccggcccccagccccagacccaaccagagggccaccgacgcgccagctaccacaacagtcgcaaaggagcgccgcccgccaccccctccggctgggcccaagggcctggtcgagcagcggcagcacctcgcgccgcaccccccgccggccatccctggcagcagccgatgcgacgcgccataa

SEQ ID NO: 34683 - DNA, 1860 bp, Zea mays
  Peptide Sequence Number=SeqID_76462
atgctcccctccaccgtcggcggccgcggccgctacctcatgctcggcatcgcccttgccctcgctgccctgctcgcgctcgcctccgcttccgagtccgaccacaagcttactaatgtcaggaactcaggactgaggaccactacattttatcttagttactttgctatcctgccaaatgtaatgaaagggcctctagctgaattgtacaaaactgaagagccagttaagctttgggtgaataaagttggcccttacaacaatcctcaagaaacttacaactactacagccttccattttgtcaaccgtctgagaaccctacacataaatggggtggtcttggagaggtcctgggtggaaatgagctgattgatagtcagcttgaaataaagttcttaaaaaacgtggagaagggcttcatttgtacacttgagctagatgctaaaaaggtccagcagtttgctgatgccattgaaagctcatattggtttgaattttttataggttttgttggggagactgacaagaacagtgaaaacaagcattatctttacacgcacaagaacatccttgttaaatacaatgataacaggataattcatgtaaatctcacccaagagtctcctacgcttcttgaagatggtaagaaattggaaatgacatattcagtgaagtgggtagcgactgatgtgtcatttgcacgccgttttgaagtgtacctggactatcctttctttgaacaccagattcactggttctccattttcaactctttcatgatggttattttcctaactggtttggtttcgatgatattgatgcggactttgagaaacgattatgccaaatatgctcgtgaagatgatgatctagagtccctggagagagatgttaatgaggaatcaggatggaagcttgtccatggcgatgtatttcggcctccccaaagtttgatgtttctttctgcacttgttggtatcggtacccaattggcagctcttatcctacttgtgatcgttttggccatcgttggcatgctatacattgggcgaggggctatcatcacaaccttcattgtgtgctatgctcttacatcttttatttctggatatgttagtggtggtctttactcaaggaatggtggcaaaaactggattaaagcgatggttcttacagcgtccctgtttccgttcttgtgtttctcaattggcttcgcgctgaatacaattgctattttctaccgctcattagcagcaataccatttggaacaatggttgtcatgtttgtactttgggctttcatctcctttcccttggtgcttttgggaactgtcgttggtaggaactggagtggagctcctaacaatccctgccgagtaaagactattccacggcctattcctgagaagaagtggtaccttacaccttctgtcatctcattgatgggtggcctgcttcccttcggtagcatcttcattgagatgtactttgtgttcacatcattctggaactataaggtgtattatgtctatggcttcatgttgctggtctttgtcatccttcttatagtcaccatctgcgtcactattgtgggtacttatttcttgctgaacgccgagaactaccattggcaatggacgtcgttttcttctgcagcctcaaccgctctgtacgtgtatctgtactccatctactactaccatgtgaagacaaagatgtcaggcttcttccagacaagtttctatttcggctacacgctgatgttctgccttggcctaggcatactttgtggagctattggctatctagggtcaaccctttttgtaaggagaatctacaggaatatcaaatgtgattaa

SEQ ID NO: 34684 - DNA, 1137 bp, Zea mays
  Peptide Sequence Number=SeqID_76463
atgcagtcgcacagggagtggttagaacagtcgccggagtggcctcctgcgagattcgcggggaattgttgccatggcagttggccgaggccgatctcgggcgagacagagtcttctcccgaggctgaaaccgtcttcgggcgcggtagagttctgttccgagggctggactcagggttgtcctcgtgtccgagacgagttctggcgaggcagaaatggtcgttccgtgaaagaggcagctgctgggctcgtgacccacgccgtctcggaccaacccgagcgccgaaccccaaggctcgcgaccgcgacactcttgtgtcctcctgctctccagatctcgccgtcggcggcggcatgctcccctccaccgtcggcggccgcggccgctacctcatgctcggcatcgcccttgccctcgctgccctgctcgcgctcgcctccgcttccgagtccgaccacaagtacaaaactgaagagccagttaagctttgggtgaataaagttggcccttacaacaatcctcaagaaacttacaactactacagccttccattttgtcaaccgtctgagaaccctacacataaatggggtggtcttggagaggtcctgggtggaaatgagctgattgatagtcagcttgaaataaagttcttaaaaaacgtggagaagggcttcatttgtacacttgagctagatgctaaaaaggtccagcagtttgctgatgccattgaaagctcatattggtttgaattttttataggttttgttggggagactgacaagaacagtgaaaacaagcattatctttacacgcacaagaacatccttgttaaatacaatgataacaggataattcatgtaaatctcacccaagagtctcctacgcttcttgaagatggtaagaaattggaaatgacatattcagtgaagtgggtagcgactgatgtgtcatttgcacgccgttttgaagtgtacctggactatcctttctttgaacaccagattcactggttctccattttcaactctttcatgatggttattttcctaactggtttggtttcgatgatattgatgcggactttgagaaacgattatgccaaatatgctcgtgaagatgatgatctagagtccctg

SEQ ID NO: 34685 - DNA, 231 bp, Zea mays
  Peptide Sequence Number=SeqID_76464
atgagggtggtatgggacgcccttggccaagtaattagggaagtcttatgttgggtgctggtttttggtcattcggaaacgaaggcatctattatggctcctatattctcgctcagggatctaggtacgagcatcgtcccacggctttttcgtgagggcagagagtgttatgaaactgatatatcagtcgtgctcacggttatgagcggccttgggatcctctttgactag

SEQ ID NO: 34686 - DNA, 165 bp, Zea mays
  Peptide Sequence Number=SeqID_76465
atggtgatggagtggtcggtggaggcggtgggcgtggaaggggatggtggagggcaagagcgggttgtcaagcgcctcgacgcccaacgtcgctggaccgcggctacgcagttcgtagtcgcgctccagaccttcaccgtgaggggttcctcaccggtggcttga

SEQ ID NO: 34687 - DNA, 159 bp, Zea mays
  Peptide Sequence Number=SeqID_76466
atggagtggtcggtggaggtggtgggcgtggaaggggatggtggagggcaagagcaggttgtcaagcgcctcgacgcccaacgtagctggaccgcggctacgcagttcgtagtcgcgctccagaccttcaccgtgagggattcctcaccggtggcttga

SEQ ID NO: 34688 - DNA, 165 bp, Zea mays
  Peptide Sequence Number=SeqID_76467
atggtgatggagtggtcggtggaggcggtgggcgtggaaggggatggtggagggcaagggcgggttgtcaagcgcctcgacgcccaacgtcgctggaccgcggctacgcagttcgtagtcgcgctccagaccttcaccgtgagggattcctcactggtggcttga

SEQ ID NO: 34689 - DNA, 252 bp, Zea mays
  Peptide Sequence Number=SeqID_76468
atgggagagcgccggacccccggatgtacagtccggaccctcaagaatggtcctggacccccggatatacagtccggacccctaaggttggtcccgtacctccacgcccagtctggtgcggacctgtccacatacgcctctgctccccgcccaggcggagacccgatgctgccacatggcctaccgcgcgtgatgcggcgtgcctgtccattccactggcaggcgatgtgccgccttagtgagagcacctag

SEQ ID NO: 34690 - DNA, 438 bp, Zea mays
  Peptide Sequence Number=SeqID_76469
atgtggcagcatcgggtctccgcctgggcggggagcagaagcgtatgcggacaggtccgcaccagactaggtctggacacgtgtcggtaccggacccccgcctgggtcctgttcaaggttcgagtgcattctgtcctgggaccttgggacccccctgtgggcgacccggaccccatacgggggggtccggatcccattccaggggtccagcttgcacacgtggaggtccaggaccaaccttgggggtctggattgtatatcccggggtccaggaccaaccttgggggtccagactgtatattcgggggtccagcgctctttcggggggggtccgaacctactgttgatgccttggagtatatcaccttctctggacacgtggcggctccggactcgcccatgtggtggagtcggggcgctgctgtggacccagaatag

SEQ ID NO: 34691 - DNA, 294 bp, Zea mays
  Peptide Sequence Number=SeqID_76470
atgaagaagtgcattagcaataggcctcaggatcatccatttactcaacaacagcttccagcttgcaagactatacttgcgactcagacacatggcctgggcggcgacaacgtgttcggtagctgccgccctctccataacgggctcgtcagcctcatgcactggtctgggaagggcaagccatgggaccgtctcgacgccggcaagccttgcgcactggaccacacctggaaggcgtacgacctctacattggcgagaatgattcatcattagcatcagcttcatcggggtaa

SEQ ID NO: 34692 - DNA, 315 bp, Zea mays
  Peptide Sequence Number=SeqID_76471
atgacagtatctatacgtattgcagttgaaatggaaataattgaaatacaagatcatccatttactcaacaacagcttccagcttgcaagactatacttgcgactcagacacacggcctgggcggcgacaacgtgttcggtagctgccgtcctctccataacgggctcgtcagcctcatgcactggtctgggaagggcaagccatgggatcgtctcgacgccggcaagccttgcgcactggaccacacctggaaggcgtacgacctctacattggcgagaatgattcatcatcagcatcagcttcatcggggtaa

SEQ ID NO: 34693 - DNA, 639 bp, Zea mays
  Peptide Sequence Number=SeqID_76472
atggcggaggccatcaccggagttccggatccggtgctccagaccaccccctatggccccgacgcgtgctacatgatgcgaacggcaaagcgaaaatttggggaggattcgtacctgtgccccgaaggtcccatggtccacaacggcggcgagaaaatgctagcagccgacccccccccccctagtgctcccactcgcctgcaaacgacgcgcctgaaccctagagaaggtgctcccccagctgtcctccaatcggtcgagcgtgcagatttcgccgtgaccgtgtttcagttgactcacgtgaaccctggagccttcaagcaggtttcagctagggtggacgcccagggaccgggaaagggggataccccgaaaaggatccttctccgtgaaggaaacatgccccgagcctccctactgatcagaggttcaaaggctggcccctcggaggggttcaacggccgcctcaaagcgcttgggttctgcgcccactactggtcagaggttcgatggccggcccctcggaagggttcaacggccgcctcaggccactcgggctccgcgcccactactgatcaggggttcgtaggctggccctcgaagggttcacagtcgcctcagacacagagcgagggatga

SEQ ID NO: 34694 - DNA, 231 bp, Zea mays
  Peptide Sequence Number=SeqID_76473
atgaaggggtacgattcttttaatctggcgcgcccacttcgagatcaacggtcaaggcctctcttccctacccaacggcggagcatggcggcgccccgtgcaaccatggcggaggccatcaccggagttccggatccggtgctccagaccaccccccatggccctgacgtgtgctacacgatgcgaacggcaaagagaaaatttggggaggattcgtaccgcgcgcaatga

SEQ ID NO: 34695 - DNA, 732 bp, Zea mays
  Peptide Sequence Number=SeqID_76474
atgcatcgcgtccttccaccttccgagcccccggatggggagcgcccatgttgctttcgtcttgctgctgttggaggagcgcaactttgcggaagttggtacctttcagccatcgctcggcttcaaggattttcatcaggcagcccggctgcatccccttgccgatggtcacccaagacggtgaccaccagtttgatggtggggagaagcaagccgggctgcggcctctgccccgccctcagcttcaaggatcttcatcatccttgctggggcggaggccgggctgagccggggcctgccttcacgtgggccggcgtcccgcttcttcctccagcttctaggggtggaaaccatcctccagctctgcggaggaggcgccctccagccatgccggggaaggcgaactgttgctgcccagccagggacgggagtgaggacctgccggtgcgctttggggcggccggcgcccgctggtgcggtgttggtgggcaggtggacgtcaccgtcggtgctgaggtggtggcagctagagaaagcttctccgccgacgagatcgtcagcgccacccgcggaccgacctctggctctttggctttaatatctggttctcgtcccccgagtggggacgcgaacgagagccttccggcggcagcgtccgtcctgggaccattgctgctgctgcagaggtcgctggcgaatcgcccagagtttgtcgtcccgcaggctctctga

SEQ ID NO: 34696 - DNA, 1565 bp, Zea mays
  Peptide Sequence Number=SeqID_76475
atgaaagcaacgtgggcgctccccatctgggggctcggaaggtggaaggacgcgatgcatgaggagaaccggcgggtgaaagggtggaccgccatgcaggcggcatgcaaccgcaccaagggggcgcaccctttcgacttcgacgcgtccagcatggaggcccaggcccacacgtcatgtaaccggcgcgccgattactacgtgcgggaaactgcaccgccacttgcgccagtaccgcgccttctcgactgcggaaccggtgccgcgactcgaggcaaccctgcgcatggcccaacagtgccaaccgagcacatcgatcacgggtcagtcagccgcgggagaaggcgcgacggtcgatatggccaaaagtgggccgacagtaatggcggtggcaggcggcggaagcagcggtcaagtcgtctgcaggctcacgtcccctcctgggacagcgagagagccctctcccacggcgtgaagacgacgcgcccgtgttccgttcctcgaacgactcgcgcacgcacaacggctgcccagcgaaccactcgtctcgtcgcattaactctgcggcaggacaggcgacacctttggcaggcgaagcaggcgacgcttcacctccgccataatgaccgcgtcaaaaaagggaccgggaaaggggatactccgaaagggatccttctccgcgaaggaagcgggccccgagccctcctactgatcagaggttcgaaggctggcccctcggaagggctggcccccgaagggttcgacatccgcctcagagcacgcagagcgagggatgactctgggtacgtccgatacatggccgaggctcgggctacgctcccgaggtcagggctccgtccagtcaagggacaacgatctcgtctcacccgagcccagcctcgggcaaaggcagccgacccaggaggattcacgtctcgcccgagggtctcctcaagcaacggacgcaccttcgactcgcccgaggcccagctcgggcaggcttcgcgaagaagcaaccttggccggatcgctacgccaatcgaccgtatcgcaggagcattcaatgacgactgggcgagctcctccccgcggaggcggggacggcggacccgcccccaggccgagtcgccgagctccgtcccgcgcgggcgcccccctgcccagtcccagccgccccgctcctgtcccggccaggctcagctccgccctgttccggcctctgtacagcatccaggcacgacgacgcgagacgagatggcaggcctcgaacggcctcgccgccgccctccgccagaccccgtcgccgtgctccggggccaccgcgccgcagtcaacgacgcctgcttccacccctccctccccctcctcttctccggcgcggccgacggggagctcagggcctgggacaccgcgagccaccgcaccgcttcctctgtgtgggctcatgctgggtcggtgggagtgtattctgtcgctgctggtgctggacttggcaataagataatcagccagggcagggatgggacttgtaaatgttgggcgattgaagaagctgggctttcaag

SEQ ID NO: 34697 - DNA, 969 bp, Zea mays
  Peptide Sequence Number=SeqID_76476
atggggagccctcgcgtcgctttcgtcttgctatcgttggaggaacgcaacttcgcggaagttggtacctttcagccatcgctcggcttcaaggattttcatcaggcagcccagccgcatcccctcgccggtggtcagccaaggcgcttcaaggatcttcatcatcctggctggggcggaggccagactgagccggagctctacctcccgcgcgggttcgtgggtcaccttctccctcagcattcaggggagagggcgctcaccggcctagcgggagggtcagacttcgacaacgcggggctgcgtgttgggctcgctggctcagctggctctggcttggcctccggtgccccctcccgccgcgggagcggttgtcacgccgctggcaccggaggaccgcccaagacgtcgcgcgctgctagggcggcgttcgtgttcttgggtcgtcctgcctttgctccggtacggcgcctctgcgcggaggtcggtgctgcccgtccgggaggatccgagtggggatctgccggtgggcagatggcttccgttgtcggcgcggaggtggtggtggctgaagaagtcctcgtcaccgacgggatcaccgccaccatctgggcttcaggcctccgactctttggctttgatagcttgtcctcgcccctcgagtggggacgtgggcgaggggctcgatgcagcagcgtccgccctgaggccatcgctgctgtcgtttggccacctggagcgggggtcgttgtcgctgctgccagagcgggcggtggtgtgccacctggagtctcgtcgccccgcacgccctccgatgtggggggttgttcatacccgcaggggtggaaccagagttccgtttgtaatggcaccttgaatgccggtgtctgttcattgtggctgtcggggcctaaacatgtaggtatttttgggtgtaataccatgtcgtttccttatttcgagcactag

SEQ ID NO: 34698 - DNA, 1440 bp, Zea mays
  Peptide Sequence Number=SeqID_76477
atggctgaaaggtaccaacttctgcgaagttgcgttcctccaacgacagcagcaagacaaaagcaacgcgggcgctccccatccgggggctcagaaggtggaagggcggcatgcataaggggagtgcgaagacatggctgccatccaaggggtcgccccctttttaaaaggcgactctccccacttgcgtcctcagccgtcgcgactgagtcttcaccaacatgctccaaggtcctccccctacaacacgggggctgggtctcacgcgtcatgcaagctggcccaggacagaagaagccaaacccgccgcgcgcggagcgagtaactgcccagcggttacgagcactcctccacttttgcccagaccagcgggtgaaagggcggaccgccatgcaggcggcatgcaactgcaccaagggggtgcaccccttcgacttcgacgcgtccagcatggaggcccaggcccacacgtcatggaccgggaaaggggatactccgaaagggatccttctccgcgaaggaagcgggctccgagccctcctactgatcagaggtttgaaggctagcccctcggaagggttcgacggccgcctcagagcactcgggctccgcgcccactactggtcagaggttcgaaggctggcccctcggaagggttcgacagccgcctcaggccactcgggctccgcacccactactgatcaggggttcgtaggctggcccccgaagggttcgacagccacctcagagcatgcagagcgagggatgactctgggtacgtccgatacattgccgaggctcgggctacgctcccgaggtaccctaggacatttccgagaccagcaggagcgattctgtaacggaatcccatcaaagggaggcatcgagccctcggaccctatcaaacgggaccgggtccagcaaatcacctacaggtcaagggtccatccactcaagggacacgatctcgcgtcgcccgagcccagcatcgggcaaagacagccgacccaggaggattcaggtgtcgcccgaggggtgaggctgacagccatcaagtccggcctcaggcgccataggaagctccgcctcgctcgaccccagggctcggactccacctcgacactagaagacgcctcgacctcggacgacggtctccgcctcgcccgaccccaggactcggactcaacctcgacctcggacgacggactccgcctcgcccgaccccagggctcggactcagcctcgacctcggacgacggtctctgcctcgcccaaccccagggctcggactcaacctcgacctcggacgacggtctccgcctcgctcgaccccagggctcggactccaaccttcgacctcggaggagcctccgcctcgcccgaccttggggctcgggaccgaccacgtcacaggggggccttcattactcttacctctag

SEQ ID NO: 34699 - DNA, 426 bp, Zea mays
  Peptide Sequence Number=SeqID_76478
atggtctcggtggccttgtctcatgttggaggctatagaaatgttgataaccttgatgatcttcgatctggtgtcaagaaaaataagcttctgcatgagatgcttaagacatgctacagccaagtgtgggaaacggtgtcccaaatgcaggcagttcatcagatgattggcgcactctgcaacaacagctcgaaatcgtgcaccgtcaacactgtgctctggaacaccattcagctcttatttcccagtgaggttgaggtgtgtgctcgtgcgttgcaacgaaaacatataataccattggtaacttatgtggggcagcaggctgctgcgctcttgggagagcagctcgtctaccacgtcgtacaccgtaccattggctgcggggccgccacgccgtatcagcgaagtattactcagatcatctaa

SEQ ID NO: 34700 - DNA, 1590 bp, Zea mays
  Peptide Sequence Number=SeqID_76479
atgaagataccattgaaagttaaaattttcgtatggtaccttcgaaaaggtgtggggcagcaggctgctgcgctcttgggagagcagcccgtctaccacgccgtacaacgtaccattggctgcggggccgccatgcccccagtagcgctgcccggcaaggagggcgtggatgtagtattggaagtagaagtcctagatgaagctggcaagccagcgggaggcagcgaagcacaacacgatcgccaacacgaccgcggccctctgaacagtcgacgtgaggatcgttcccttagcgacggcaaggaacccgacgacggcgaccgaggccacctgcagggcagcctcgagcgccgcgttgcagctcctgcactgtaccacacctgcgcgctgaaagtgaatatccactgcgatgggtgcgagaagaaggtcaagaagatcctgcacaagatcgatggcgtgtaccagagcagcatagatgcagagcaggggaaggtgacggtgtccggcctcatggatccggccaccgtcatcaagaagctcaacaaggcgggcaagccggcgcagctgtggggcgccaagcttgacgtggtgagccagctccagaagctgcagcttggcggcggcggcggcggcgggaaggacaagcagcccaagggtggcgacggcggcgcgaagggccagcagaccaagggcggcggaggagaaggaggaggaggcaagggcgggaaagatgcgaacatggtgctgccgcagccgacaccacagcagatgcagcaggtgatgcagatgaagggcatgaagctgtctcatgtgctcggttgggcgcgggtgggcggcgaggtttcgcggtggcggggttttcggtgctcggttgggcgccggtgggtgtatggccgcctaggccgcacgtccgactcccgagcgctgccaaccacacacctaaacgcgccgctcacgcccatcagcttcctcgagcgcaccacgctcgtctaccccgaccgcccctccatcgtcgccgctggacacgacgccgcgccgccgccccgcacctggcggcagacccgggactgctgcctccgcctcgccgccgcgctcgcggggctcggcgtcgcgcgccgtgacgtggttgcggtgttcgcgcagaacatcccggccttctgcgagctccacttcggcattcccatggcgggcgccgtgatctgcgcgctcaactcgcggctcgacgccggcatggcgtccgtgctgctgcagcactcggaggccaaggtcgtgttcgtggacgccgtgctgctgggcgtcgcccgggaagcgctccgcttcatctcccagcaggccggcggagcgagcagggtacccgccgtggtgctaatcaacggggcgctcgacgagccgccgccagcggcgacaggaaacaacaagatcccaggcgtcgatcgatgctacgagtacgaggccctcctcagcaacagcagaggcggcgatccagagttcttgatccggtggccggacgatgagaacgagccgatcgcgctggatctgcgtgcaggggcggtgaatcgcggggaggggcgctggatctgcgggcggtga

SEQ ID NO: 34701 - DNA, 351 bp, Zea mays
  Peptide Sequence Number=SeqID_76480
atggagcctggcggagggacagctgtcggagcggttgggtccttgctgacgtcctcttgcttccgtaagggggctgagagcccgccgtcgtcacagagcatgcggggcgccatcattgcctatctggcggagctagccagatgggacaccggtcttgttccctgcggcccgagtcagctcggggttgggcgatgtggaggctcctccgaagccgaggtcgagtctgtcttccatggccgaggccgagcccgtgctcctgggtcgggcgaggcggaggtcgtcgccagaggccagggcggagtccgagccctggggtcgggcgaagcggagttcgtcgtcttctggggctaa

SEQ ID NO: 34702 - DNA, 348 bp, Zea mays
  Peptide Sequence Number=SeqID_76481
atggagcctggcggagggacagctgtcggagcggttgggtccttgctgacgtcctcttgcttccgtaagggggctgagagccgccgtcgtcagagcatgcggggcgccatcattgcctatctggcggagctagccagatgggacaccggtcttgttccctgcggcccgagtcagctcggggttgggcgatgtggaggctcctccgaagccgaggtcgagtctgtcttccatggccgaggccgagtccgagcccctgggtcgggcgaggcggaggtcgtctgcagaggccagggcggagtccgggccctggggttgggcgaagcggagttcgtcgtcttctggggctga

SEQ ID NO: 34703 - DNA, 2301 bp, Zea mays
  Peptide Sequence Number=SeqID_76482
gtcaggtctgagataaaccagtcactctactactcgatggaaccagcaacatgggctgtgttcctcggcattgccctctgcgcagcggcagcgctcttcctttcgcgcggccggcgcccggtctacaaccccccgccgggccccaagccatggccgatcatcggcaaccttaacctcatgggcgagctgccccaccgctccatgaacgagctgtccaagcggtacggtccgctcatgcagctccggttcgggtcgttgcctgttctcgtcggcgcgtcggttgagatggcaaagctcttcctcaagaccaacgacgcggcgttctccgaccggccgaggttcgcaatcggcaagtacaccgcgtacgacttctccgaccttctatgggctccttccgggccgtacctgcgccaggcacgcaggatctgcgccaccgagctcttcagcgccacgcggctcgagtccttcgagcacatccgcgacgaggaggtgcgcgtgatgctgcgacagctgcgccaagcggctgggcgcaccgtgcggctcagggactacctgcagatgttggcgctcggcgtgatctcgcgcatagttctgggcaataagtacgtcatggaggaggtggcggacggtgagggggactcagcgccggcgataacgcctgccgagttcagggagatggtggacgagttcttcgcgcttcacggtgcgtttaacattggtgattacatcccttggctagattggctggacctgcagggctacgttgctaggatgaagagaatgaaggcgaggtttggtcgattcctggaacgagtcttggacgtgcacaacgagcggcgactacgcgagggagggaactttgtggcaaaggatatgttggacgtgctgctgcagctggccgatgacactagtcttgaagtccagctcagcagggacaatgttaaggctatcacacagatgggtcgacgcgaggccgagcgcgaagggggaagtgaggtggccggagatgggcgtgagagaggtggaaatcccgcggccttcgtgttcgtcccacgcccaggtcggagcatgcggggcgccatcattgcctatctggcggagctagccagatgggacaccggtcttgttctctgcggctcaagtcagctcggggtagggccgagcccgagcccctgggtcgggcgaggcggaggtcgttcggcagaggccagggcggagtccgagccctggggtcgggcgaagcggagttcgtcgtcttccggggctgagcccgagtccgagcccggggtcgggcggagcggagttcgtcgtcttctgggacttagctcgagtcccgagcccggggtcgggcggagcggagttcgtcgtcttctgggacttagcccgagtccgagccctgggtcgggcggagcggagttcgccgtcttccggaacctagcccgagtccgagcccctgggtcgggcggagcggagttcgccgtcttccgggacttagcccgagtccgagccctgggtcgggcggagcggaggcctgactgcccgtcagtctcactctgtcaagtgacactgcagtcggagtggcgcaggcggcgctgtccttttgtcaggccgcttcatgctgatgggggttaccatctgagaattaggagtcttgaggacttcagagacgacctaatcatcgcaggcacggatagtaatgcaaacacgctggagtgggctgtctcggagctcctcaagaaccctaagatcttagccaaggccatggaggagctgaaccatgtcatagggccggaccgactggtgacggaaagcgacctccctcgcctcccctacatcgaggctgtgctcaaggagaccatgcgcgtgcaccctgccgcgccgatgctggcaccccacgtggcccgcgaggacacatccgtggacggatacgacgtgctcgctggcacggtcttgttcatcaacgtgtgggcaatcggccgcgaccctggactgtgggacgcgccggaggagttccggccggagcggttcgtcgagagcaagatcgacgtgaggggccatgacttccagctgctgccgttcggctctggccggcgaatgtgccccgggatcaacctcgcgctaaaggtgatggctttgagtcttgccaatctgctacacggcttcgagtggaggcttccggacggcgtgacggcagaggagctgagcatggatgaggccttcaagctcgcggtaccgcgtaaattcccgctcatggtcgtggccgagcccaggttgccagctcgcctgtatactggcgcttga

SEQ ID NO: 34704 - DNA, 564 bp, Zea mays
  Peptide Sequence Number=SeqID_76483
atggctgccccgccaaccactcgccccgtcgcattaactccgcggcgggacaagcggcgcttctggcaggagaagcgggcgacgcttcgccttcgccgtaataaccgcgccaaaaaaggctggccccccgaagggttcgacagccgcctcagatcgcgtgggccctacacccactactggtcagaggttcgaaggccggccccccgaagggttccacggccgcctcaggctactcgggctccgcgcccattactgatcagaggttcgaaggctggcccccgaagggttcacagccgcctcagacgccgagcgagggatgaccaggggtacgttcgatacataaccaaggctcgggctgcgctcccgagctcaccagagacaccatgttcggcgcccatcgagggcaacatggcgctttccccccctcctccttgcgaaaaggcgacgcaggggcaaggcaccacaggaaactccgctccgcccgacccagggctcggactcgggctcagccccggaagacggcgaactccgctccgcccgacccagggctcagactcgggctaa

SEQ ID NO: 34705 - DNA, 822 bp, Zea mays
  Peptide Sequence Number=SeqID_76484
atgttcggcgccctccgagggcaacatggcactttccccacctcctccttgtggaaaggcgacaaaggggcgtatgataaaagccgaaatcctgatgggcgcaattcaggtcaaggctccatccactcaagggacacgatctcgcctcgcccgagcccagcctcgggcaggaacaatagacctaggcggattcacgcctcgcccgagggcctcctcaagcaacgggcgcaccttcgactcgcccgaggcccagctcgggcaggcttcgcagtgaagcaaccttggccagatcgcctcgccaaccgaccgtatcgcaggagcattcaaagcaaggatcgcctgacaccttttcctgacgcgcgctcctcagtcggcagggctgaagaaaacagcgccgcctgccctgctccgactgctgtgccacccgccaaggtgaggctgacagcagccgagtccagcctcaggcgccataagaagctccgcctcgcccaccacggggctcggccctcgcctcagccttggaagacggtctccgcctcgcccgaccccagggctcggccctcgcctcggcctcggaagacggtctccgcctcgcccgaccccagggctcggcctcaacctcgacctcggaagacggtctccgcctcgcccgaccccagggctcggcctcaacctcgacctcagaggagtcaccgcatcgcccgaccttgcgctcggaccgaccacgccacaggggggtacatcattaccctacccctagctagctcaggctacggggaacaagatcggcgtcccatctggctcgccccggtaaacaagtaa

SEQ ID NO: 34706 - DNA, 405 bp, Zea mays
  Peptide Sequence Number=SeqID_76485
atgaacctcagggacagcaaggaaaaacttggctgcagtgcccttgattatgaacaggagctggagactgccaggaccatctccagtgttgagaagagctacgagctgcccgatggccaggttatcacaatcagtgcagaaagggacagcaaggaaaaacttgcctgcagtgcccttgattatgaacaggagctggagactgccaggaccatctccagtgttgagaagagctacgagctgcccgatggccaggagctggagactgccaggaccagctccagtgttgagaagagctacgagctgcccgatggccaggttatcacaatcagtgcagaaaagatgtggatctccaaggaagagcatgacgaatctggtccgggcatcgtccacatgaagtgcttctga

SEQ ID NO: 34707 - DNA, 426 bp, Zea mays
  Peptide Sequence Number=SeqID_76486
atgaacctcagggacagcaaggaaaaacttgcctgcagtgcccttgattatgaacaggagctggagactgccaggaccagctccagtgttgagaagagctacgagctgcccgatggccaggttatcacaatcagtgcagaaaggtttaggtgccctgaggttctattccagccatccttaattggcatggaatctgctagcatccatgaagccacgcacaactccatcatgaagtgtgacgtcgatatcagaaaggatcggtacggtaatgttgtcctcagtggtggttccaatatgttctctggtattggtgaccgcatgagcaaggagattactgcacttgcccctagcagcatgaagatgtggatctccaaggaagagcatgacgaatctggtccgggcatcgtccacatgaagtgcttctga

SEQ ID NO: 34708 - DNA, 486 bp, Zea mays
  Peptide Sequence Number=SeqID_76487
atgccgccacgtaccaggctaacggcacgcaagtctacgggaccaattggggtgcctcggcatcaattggctccccgacatgaaagcagcagcagtggaagtaacgaccccatcggagaccttgaagctcgtgatcaactcgctgatcgagacttagcacttgactgggccgtacagtctcgtttgctaatgtgtgctaaggaagcaagggctcaggcccgagttaaagaacttagctcgactgttgataacctgcaggtttactgcaatacgttgcacgaggaagtccatatactatacgcacaactacacccaagtgagcctgcacaacctgctgaggcggaagctggaccatctcacgttgcgggacgtgcgctgggtggggagttagacctttttgagccccctccttctttgaggttggttgatgtctggactcccacacctgacgatgaagccgccaagagtaatggcaagcaggaataa

SEQ ID NO: 34709 - DNA, 1533 bp, Zea mays
  Peptide Sequence Number=SeqID_76488
atgcgcggccccggggggaaggatgtcttcgcccgagctccaggagtcttcggcgcggctgctgagggttacccgggggttggtggcctaagaatgttcctatcccccgcgcggccggcgaagacttttttacatctcgcatggcttcatgaagccaggccgaagaggcagcggggggctgcgaaggctactgcccccggcggaggccagccgccgctggcggcgaagtcggccgtccctgcatccagcagggcgccggaggctgcggctgccgccggtggttctaagtctgcgaatgctgcaccggcgtccagcagggtgccggaggccgcgaaggcggcccgagatttgccgccgccgggcaagcgtgtcgccgacttcgccaccgacattagtgtggacgactatcttgctgggtcggacgaaggccagcttgttgttgttccgcctgccgcggcgaccacggcggctgccgtagtgccaaaggcgaagggcggtgctcttagtgccggcggcgagatgccggcactcattgctgtcagggacgaagcgggtgctgtgtcccaccggctgaaggaaatgaaagaggcgctaagtcaggcggctgacttcgcagaccgtgcggcgtcgggggccctcacggcagttgtgtctgccgaagtcgagagacttcggacgcaacatgcttacgccgtccgggagaagtcggccgccgacagaaggaggccaatgaggcccctcgccaaggcgcagtctgcgcaggcggaggcccatttggcgcgggcggagggcagtcttgccaagcagcgcgccgagcagttggaggagcggctcagcgctctgcgggctcgtgtggagagggccgaggcctcgacgcgcgcggaggctgagcggacacgcaaacatcttatggattcataccatgagctgggcgcgcggacctctgatttcgatgtgccggaccaagagcccggacttcgctgccttgagtgggtacaggaggagctgcaggcgctccccaccatcgtggaggggtttatgtcctatgcctccctggtcacctacgagggggcgatgaacgtgctctctcgcgaagggtgtcggcactatgaggtcttcgaccaagctgatgaggattttgagcgtgatatctacaaggttgaggaccctatagtgaaggaatccgccggagccctctacgaccggatgtggggcccccacggtcgagaggtggtcaggaagcgggccgagacggcgaggggtcaggcggcgcgtggcgagagggtggatgactttggggctttgaacagcgtgctgcctgacccggagtcgaacccggcggcggctgtgtccgaggccgccctggaaccgcccccggaaaccgccgaaggcgctcctgatgcccccgcagccgctgcggccggcggaggcctgccgccaactgctgcgccgagggctgaggatcctgtgacggtggtggcggaggcgacagcggaggctcccgcgacggctgggtcttcgcaggtggcctag

SEQ ID NO: 34710 - DNA, 1824 bp, Zea mays
  Peptide Sequence Number=SeqID_76489
atggacagcggtggttccgctgccggtggtggagtgtggactccccactgcatccccgtcgccaccggcgccggtgtttgccgcaggatcgtctgcatcggcccccatggatgtcgatttggcggcaccaccaccgcctccgcccactgcagcggcagttgctcgtcattcgccatctccaccagtgcttgtggtcgtcgagaccattgctgcccgtcgtggacagcccccgcgagccgtcgatgctccatgtggacgcattatcttcactggccatcgcccaaatggaatggcctcgtcttcctcctccaacgggagggactaatggccctcgattcggccgccgcgtcggccgttcggggggagggggtggggagcggcgcggcaagccccggcacgggcacgctctacggagcagggccggcgctcggcgcggcctcctccagaggcgagggcgcgggagcaggccccggcaagggcgctcggcgcgggccccacgagggtgctcggcgcggcctcctccagaggcgagggcgcgggagcaggccccggcgagggcgctcggcgcggctcccgagggcgctcggcgcgggcccccacgagggcgctcggcgcggcctcatccagaggcgagggcgcgggagcaggccccgacgagggcgctcggcgcggctcccgagggcgctcggcgcgggccccacgagggcgctcggcgcggcccaccggcggcgctcggcgctcgtcaggcgcgggcgcaggaggagcacccagcggctgctgctgggcgacggcagtttcggctggcaaacgcccctggtgccggcggcggctacagggggcggccgccaggccgctgcctggtccgcctggcaggccgcctgggctgctttccagagcccaaaatgggtaatgatggcgcctcctgttgacgtggtcggtccacgccctaggttgggcgatgtggaggatcctccgaggtcgaggtcgagtccgtcttccgtggccgaggccgagtccgagcctccaggtcgggcgaggcggaggccgttggctgaggccagggcggaatttgactcctggggtcgggcgaagcggagttcgtcgtcttctggggctgagcccaagtccgagccctgggtcgggcggagcggagttcgccgtcttccggggctttgcccgagtccgagccctgggtcgggcggagcggagttcgccgtcttccggggctttgcccgagtccgagccctgggtcgggcggagcggagttcgccgtcttctggggctttgcccgagtccgagccctgggtcgggcggagtggagttcgccgtcttccggggctttgcccgagtccgagccctgggtcgggcggaacggagttcgccgtcttccggggctttgcccgagtgaaaggaaaatccaagtctgctcagtctgggagcaccggactgtccggtggtgcaccggatagtgtccggtgcgccaggctggctcgagcgaactggccgctctcgggaattcaccggcgacgtacggctaaaattcaccggactgtccggtgtgcaccggactgtccggtgagccaacggtcggccgggccaacggtcggccgcgcgatctgcgcgggacatgtgaccgagccaacggctagaaggaggcaccggactgtccggtgtgcaccggacatgtccggtgcgccaacggctctctggctgccaacggtcgacttcgccgtagaaggaaagaaatcgggcaccggacagtgtccggtgtgcaccggactgtccggtgcgctagtcgacagaaggcaagatcagccttcctag

SEQ ID NO: 34711 - DNA, 402 bp, Zea mays
  Peptide Sequence Number=SeqID_76490
atggccagtgaagatgacgcggccacgtggagcatcgacggcgcgagggggttgtccacgacgtgcagcgatggtaccgacgaccacaggcactggtggagacggcgcgagggggttgtccacgacgtgcagcgatggtaccgacgaccaccgacgctgcagtgggcggaggcggtggtggtgccgccaagtcgacatccatgggggccgatgcagacgatcccgcgtcaaacaccagcgccggtggcgacggggatgcagtggggagtccacactccaccaccggcagcggaaccaccgctgtccatccatggagaacgcagaagtgcacattttgcacttgcacacggcgttcagggatcgcatgcaccggtggaagcgctgcggcttgaccagcggtga

SEQ ID NO: 34712 - DNA, 339 bp, Zea mays
  Peptide Sequence Number=SeqID_76491
atggagaacgcagaagtgcacattttgcacttgcacacgtcgttcagggatctcgtgcaccggtggaagcgctgcggcttgaccagcggtgaacgcctccaacatcgaatcatcaacaatgtgcagaacttcgcgcatacgactgctgataacgacgacctcctcttcgtccacgtgcacaacgagtgcatcgatgacaacttccagctcgggatgaaccatttcgccgatctcgctaccaacgagtatggccacctaccttggcgccaggatccttgccatccagagtggagtcgatgtggggagaggaatcgccatgacgactctgaggagtgctag

SEQ ID NO: 34713 - DNA, 1701 bp, Zea mays
  Peptide Sequence Number=SeqID_76492
atggatcccatcatgaagctactcgaggacgacgaggatgagagtctgcactcgggtgccgacgtcgaggccttcacggcggcgctgaaccgcgaggtggaggccagcgcgagcgccagcgccagcaccagcaccagcgttcccgccggctcctcgtcccagcccacggatcacggtgctggacttttacctcaggaacacaagtcactattaaaccatgatcctggtcagtggcaagatcctgtaaagaatgaaattgtaaaccaggagagtcagcaacaggaacagacacatgcatttagaaatgatcacccgtcaagacctgaaatggtttctcaaggttctaataactgcccccttcccactaatacaccaaaagaatgtgatttactgaaggcaaaacaagaacctggaagtacatctcaacaaggtattgttgctcagcatcagcctatgcagcaaatgaagagtgaacaaacaccaattgtcagtcagcagcagtcgatgcagcaaatgaagaatcaacaaacaccagtcacaaaccaaacaaatagtgcaactacaacagcaaaagctccagttgttacatttcacatgttaattccaattttgagtcgctacctagacaaagccagggacatagaagtgcagtccattttcgccaagttgcggaaaaatgaagtcagcaaggaatacttcttaaaaactgtaaggaatattgttggtgataaattgcttaagcaagctgcttcacaatatcaaatgcaggcacaacgaagccctcagacaaacccaagcaactattctttatcaggtcaagtttctggtcagcagactgctcccagtggttctgtgacaggagatgaacagaagggatatccaggggctcacaccatccctatgagacaagctattgccagcactcgaccacctcaatttcggccttcctcgtctggccaaatgcggagtaatacgggttatccaccttcacaaaccaatttgcataaggctaatgaaatgggaaacatgtcagatgggaaaggggtccatatgttacaaactcgtccacccaataactccataccagtacaaacaatgcagcatcatgtgcagcgaccacaaacatcttcaccagtgtttggggcaaatagtattcatgcacgtccatttccgcggccacttggaggtccagctgcaccatttagaccacaaatggcagattccaatccaaaagcacaattgattcagggagctgtgaccacagtatctgggagtgtgccaacacgatccatagtgtctggaaatgcgccaggtaatcaatctacaaggcaacaatcagcaaacaaggagcaaaaaactatttcttttactcgaacagcacatatgaataatgaaactgttagccaaaactctgaattctcacagaattcttttgctgtgatgcatgcaaaacaagtcaatcaagccttgggatcttcaaaagtcagtgctggcatggaaagccagtcacaacaattgagtgcgcctaagcctttagctgcaacaagcttaagtcagactcaatctcatggcattcaagaagagcctaaaattcagttatatgaaaccctgaaattgtcttgtctgatcttgctagtgccgaacttctatgtggaactcatatggccatatcaagttgcatttactcataactacacttga

SEQ ID NO: 34714 - DNA, 822 bp, Zea mays
  Peptide Sequence Number=SeqID_76493
atggaaagccagtcacaacaattgagtgtgcctaagccttcatctgcaacaagcttaagtcagactcaatctcatggcattcaagaagagcctaaaattcagttgcacataaaaatcatttcggacactagagtgttacatggtgaagctactaacctgcgtccacaatactacgttctgcctcggttcgatgccgacgctctccatcgctgccacaatcaatgcccacgcggatccccacgatcctccccaccgccgccgcaatcaatgcccacacagatcccccatcctccccaccaccgccgcaatcagcggcatggaaggtccaccattaccgtggcatgcgtcacttggtacttcgggcaggcgtcacggcgtccttggaaggctcacttcataaaagatagacggtgtaatactgcatgggctgtttttgcattggagtcagaatgcaagtgggctctgagtggaacacctttgcagaaccgtgttggagaactttactctcttattcggtttttgcaaatcttcccctactcatactatttctacaaggactgtagctgtgagatactagataccagatatgtagatgctggaacactgatgaataactacgctcatatcttcgatcttctcacaaggttgaggcaggctgttgatcatccctatcttgtagcatattctaaaacagcaggacatcctgaaggaatgaagaatgaaggaaacgagtccatggagagccaatgtggtatatgtcataatttggctgaagatgttgtttgcaaaactgtagtgattttgatcatccctatcttgtag

SEQ ID NO: 34715 - DNA, 1611 bp, Zea mays
  Peptide Sequence Number=SeqID_76494
atggaggtagttgagttggttccttgcgcccgcaacaagtggggcaattggcatgagttttggttctacgtcgcggagggcacagtcgaagaccatctggggctccccgtgtccgaggtgtgctcgcatttttactcagcatacccgccgtttgaagtggcggtggaggatgcggacgaaggggccctttcgatgccttcccatggtgggaagctggtgcgaagtcccgccttcgcgctggatctgcatagccgtgatccggccgcctttgtgcgtgaggcggaggatggggcggtgcggatcattggtcgggtttttgagttgaatcgtatgccgtatggcggttatcccgggcaagacgatgtggatcgtcgcgggaaaaaaccggtgagaattgatgaggacatgcgcggccccggggggaaggatgtcttcgcccgagctccgggagtcttcggcgcggatgctgagggttaccggggttggtggcctaagaatgttcctatcccccgcgtggccgacgaagacttttttacatctcgcatggttcgtgattggaaagtgtttctttacgggcggaatattgctgctgttgtgtcggcagtgatggacaaggatcgccagggagctgcacagaagcgccaggcggtcgtcagggttcatgaggccaggccgaagaggcagcggggggctgcaaaggctactgcccctggcggaggcctgccgccgctggcggcgaagtcggccgtccctgcatccagcagggcgccggaggctgcgaaggcggctgccgccggtggttccaagtctgcgaaggctgcccctgcgtccagcagggtgccggaggccgcgaaggcggcccgagggttgccgccgccgggcaagcgcgttgccgacttcgccaccgacattagtgtggacgattatcttgttgggtcggacgaaggccaacttgtcgttgttcctcctgccgcggcgaccgcggcggctgtcgtggtgccaagggcgaagggcagtgctcttagtgccggcggcgagatatcggcactcactgccgtcagggacgaggcgggtgctgtgtcccgccggctgaaggagatgaaggaggcactaagtcaggcggctgacttcgcagaccgcgcggcgtcgggggccctgacggtagttgtgtctgccgaagtcgagagacttcggacgcaacatgctgacgccgtccgggaaaagtcggccgccgacagtaagtgccgcaagctggcagataaggtggctgcgctggagggtgagaagactgacctccggcgccaactggcggaggagaggaaggaggctaatgaggccctcgccaaggcacaggctgcgcaggcggaggctaatttggcgcgggcggagggcagtcttgccaggcagcgcgccgagcagatggaggagcggctcagcgctctgcagagccgcgtggagagggccgaggcctcgacgcgctcggaggctgagcggacacgcaaactgcttatggattcataccatgagctgggcgcgcggaccgctgacttcgaagtgccggaccaagagcccggacttcgctgcctcgagtggatacaggaggagttgtag

SEQ ID NO: 34716 - DNA, 1719 bp, Zea mays
  Peptide Sequence Number=SeqID_76495
atggaggtagttgagttggttccttgcgcccgcaacaagtggggcaattggcatgagttttggttctacgtcgcggagggcacagtcgaagaccatctggggctccccgtgtccgaggtgtgctcgcatttttactcagcatacccgccgtttgaagtggcggtggaggatgcggacgaaggggcccttcggtgcgccgccggcctgagcagcgggcgcgatttggttgaggagtttgtggcgtacggggtgtggcctttggcgcatggctgggcgttgagcgaagtatgccctcgccagatgccttcccatggtgggaagctggtgcgaagtcccgccttcgcgctggatctgcatagccgtgatccggccgcctttgtgcgtgaggcggaggatggggcggtgcggatcattggtcgggtttttgagttgaatcgtatgccgtatggcggttatcccgggcaagacgatgtggatcgtcgcgggaaaaaaccggtgagaattgatgaggacatgcgcggccccggggggaaggatgtcttcgcccgagctccgggagtcttcggcgcggatgctgagggttaccggggttggtggcctaagaatgttcctatcccccgcgtggccgacgaagacttttttacatctcgcatggttcgtgattggaaagtgtttctttacgggcggaatattgctgctgttgtgtcggcagtgatggacaaggatcgccagggagctgcacagaagcgccaggcggtcgtcagggttcatgaggccaggccgaagaggcagcggggggctgcaaaggctactgcccctggcggaggcctgccgccgctggcggcgaagtcggccgtccctgcatccagcagggcgccggaggctgcgaaggcggctgccgccggtggttccaagtctgcgaaggctgcccctgcgtccagcagggtgccggaggccgcgaaggcggcccgagggttgccgccgccgggcaagcgcgttgccgacttcgccaccgacattagtgtggacgattatcttgttgggtcggacgaaggccaacttgtcgttgttcctcctgccgcggcgaccgcggcggctgtcgtggtgccaagggcgaagggcagtgctcttagtgccggcggcgagatatcggcactcactgccgtcagggacgaggcgggtgctgtgtcccgccggctgaaggagatgaaggaggcactaagtcaggcggctgacttcgcagaccgcgcggcgtcgggggccctgacggtagttgtgtctgccgaagtcgagagacttcggacgcaacatgctgacgccgtccgggaaaagtcggccgccgacagtaagtgccgcaagctggcagataaggtggctgcgctggagggtgagaagactgacctccggcgccaactggcggaggagaggaaggaggctaatgaggccctcgccaaggcacaggctgcgcaggcggaggctaatttggcgcgggcggagggcagtcttgccaggcagcgcgccgagcagatggaggagcggctcagcgctctgcagagccgcgtggagagggccgaggcctcgacgcgctcggaggctgagcggacacgcaaactgcttatggattcataccatgagctgggcgcgcggaccgctgacttcgaagtgccggaccaagagcccggacttcgctgcctcgagtggatacaggaggagttgtag

SEQ ID NO: 34717 - DNA, 993 bp, Zea mays
  Peptide Sequence Number=SeqID_76496
atggatatagtggtggagaaagaaaatgtcgatgttggcaatactgctgaaccatcgtatgaggttgtggctagaagtggttgttcagcacaattgtcaactaatgacaccgatgaacatgaattggagagcgcggatagtaaggtcagtgttggtaatgctgcaaaacaatcacacgatgttgtgggagtaggcattgactgtattttcaatcatgtagaagtgtcaactgaagccgatcttgggccacaaccggatgtgatacacctgacatctttggatgttccaaatgaatcaagtcaaataagttctgatgcggatatggtaaagcagaaccaacaagatgctttggatacacttattagaatatcacaacataagaaaccaaagaaattgaatgtagctcgagttgtctctgaagattataagtgcaccccagaagatgttcagcttattgaatacattaaaacattaccggggaaacaagttgtggtgaacatcgacagcgcatggttaaatagaaatgatatggaatgtctttttcatggtgacatgcaattgtctgacaaagccctcaatgcatatatacactgtattaggggtgaagagcatttacttcatagagaaggtggaaaggtcttcttggagaacacattcatttccagtctgcttaagcgtgatggcgaccctaaggcactgaggtcatcagttcccgtggtggtcgccgttgtgctgtacgtgacgccgtcccagttgggtcatgctgtttgtatttatgtgttcgaatccctcaccttgtttgggttcactggacatgcctgcttgctgcgcttcatatcggagatctgtgtgccgtcctcgctcttcaccagccgcttctacatctgctccgagagcgactaccaggacctgctgcgcaacacggatgccaaccagacggcgctcgacaggaacataggtacacagtgccaacgttgcctccgtcggccatga

SEQ ID NO: 34718 - DNA, 2652 bp, Zea mays
  Peptide Sequence Number=SeqID_76497
atggatccgttcaacaataacgatgttcgacctccattaagagaattgtctagcaacacccttgaagatgaatctccagaggtacctgtcagcgacggaagcataattgatttaactaaatcgtgtgataacactcaagattctcaacctcctactgtgtctctatctagctccaaggacatggttatctctgagttgagtgcaacaccttttgtttatgcttcattgcagactaaggatgttgacatggacaaaatgatacagtctcctagacgacagcggcatgagcatcatgtgtcgtctggcgaaagacagagcctgatatctcgtcaaaaccagaaatttcaatctgccattagaagaaactttgctactgcaactagggatcacggaatggaaggcggtgagcacaatgaaattgatcacgcgattgcttcagagatcgaaaacaacaacgttgggatgcaacgacagataaccccgaatgtcaccaccaatgagaatcatgacgaggatgatttgaaagtttctaaagttattcgtcttacccgttgttcctcgaaaacaactttagatggtgaatctattgaggatatcgagattgatgaaacccaagatgcctttactgtcaaccctgacgtacctgacttgtacgacaaggtgtatagtaacatacctgaagaaacacatttgctgagcactgttgctgactgcgattactgcaaagcgaagaagtttcagtatgaaccacctggattttgttgtcgtaatggacagattgatctagccccgttcgagacaccaccccaacttaggaggctgtgggagtgttcagatgctgatgcgaggcacttccgtgataacattcgattttttaacggccatttctcattcacttctttgtattgttgccttgatagtatgactacaaacatggattgtggtatctacacgttccgtgcacatggcatgatgtaccacaacgtaaggtcgttcggtagggaagttggggcggaacataaacaccttgaactctacttctacgatgatgatcccagcctcgagcatagatatcgtaaatgtcgtcaagagcaatttgagaaagacaaggcagttattaaacagttggttgaaatacttaagggaaacccatactctgagcaccttaggagtatggggaacattgataacattgaagactaccatatcgccttgaaccttgaccaaacgctgaaccagaagttatataatgtacccatcacttcggaggtcgctgcagtttggattgaggggagtgaacgtcgaggtcaattcagtaatagtgttatgctgcatgggaaggataggtcaagccacggcatccgttcatatcatggatgctatgatgcactatcatatccattgttcttccctaaaggtgaacttggatggcatgccaatattcctaagtccaatgtttccatggacgaagtagacgcgtaccgcgatcaacataggagaagtgatgcaaacaatgatgatacagaacgacctagccatctatgcgtgtctgtacgtgactattactgctacagattccaaattcgtccaagtatattcaatccaatacttcatgggaagcggcttttccaacagttcgcggttgacacctacatcaagattgagagctctcgtttggatttcatacgtaaaaaccaagacagattaagggcagatctatacaagggtttggtagatagcttgcatgaaggcgagaacagagcagacaaaattggaaagcgaaccgtgctgtctacatcatttatcggtggtcctcgtgacatgagacgtcggtatatggatgctatggcccttgtgcggaagtttgggaagccagacatattcctcactatgacgtgcaaccccaattgggatgaaataaccagagagcttctccctatgcagtcaccacaggatcgtccggaccttgttgttcgcatattccgtgcaaaactagaggaactgaagaagagattgactaagcatcatattcttggaaaaatccgagcttatgtctatgtcgtggagttccagaagcgaggtttgcctcatgtccatttcctactcatcatgcagagaaagtacaagctaacttgtcctgatcagtatgatcaccttatctccgctgagatccctgacaagaagaagtaccctgaactatacaagatggttatcaagcatatgatgcatggaccgtgcgggttgctaaatcctaaatgcccatgcactaagggtcgtgcttcatgcaaaaaccattatcctagagcttttagcaatgcaacgtctcaaggaaaggattcatatcctatttataggcgtcgtgatgatgggcgtaaggaaacagttcgaggttgtgaattggacaacagatgggtcgtcccttacaacccttacctcctccggctcttcaactgtcacatcaatgttgaggcatgcgggagcatcaaggctgtcaaatacttgttcaaatacatatacaaaggccacgatcgtgcgtctgtggctgtgacagacgcaaacaaggctgatggtgacgttgatgagatcaagcagtatagagatgctaggtgggtgaccccctccagaagccctttggaggatattcagctttga

SEQ ID NO: 34719 - DNA, 1968 bp, Zea mays
  Peptide Sequence Number=SeqID_76498
atgacgtgcaaccccaattgggatgaaataaccagagagcttctccctatgcagtcaccacaggatcgtccggaccttgttgttcgcatattccgtgcaaaactagaggaattgaagaagagattgactaagcatcatattcttggaaaaatccgagcttatgtctatgtcgtggagttccagaagcgaggtttgcctcatgtccatttcctactcatcatgcagagaaagtacaagctaacttgtcctgatcagtatgatcaccttatctccgctgagatccctgacaagaagaagtaccctgaactatacaagatggttatcaagcatatgatgcatggaccgtgcgggttgctaaatcctaaatgcccatgcactaagggtcgtgcttcatgcaaaaaccattatcctagagcttttagcaatgcaacgtctcaaggaaaggattcatatcctatttataggcgtcgtgatgatgggcgtaaggaaacggttcgaggttgtgaattggacaacagatgggtcgtcccttacaacccttacctcctccggctcttcaactgtcacatcaatgttgaggcatgcgggagcatcaaggctgtcaaatacttgttcaaatacatatacaaaggccacgatcgtgcgtctgtggctgtgacagacgcaaacaaggctgatggtgacgttgatgagatcaagcagtatagagatgctaggtgggtgacccctccagaagccctttggaggatattcagctttgatctaagtcaaaactctcctccagtgatgcaactgcagctccatcttgaaaacatgcatatggtgtcatttcacgagcgtgctaaagtaaatcatgttgtccaacgtccaggtgccgataggtcaatgcttacggcatattttgaggcaaataggctacacgaggaggctcggggcatcctttaccgtgattttcctgagtggtacactttgcagcaaggcaaagtgtggcaaaggaggaaacgaaacacgggtggacaggttggtagaatagtctctgctcatccagctgagggggagcgcttttatcttcgacttctcttaaaccatgtgacggacgacacaatagatgagtgtctcaacgaagccgctatttaccaaatgccgtcagcactacgaaggttgtttgcaacaatactggtatactgcgagccgaacgatgtggcagaattatggcagagacaccttgactcaatgtcagaggactatcaccgtagtactcaaagcaaaacccatgtgcaacagatggtcttgattgacattagaaacattttgcagtcaatgggtaaagacataaagacattccctctccctgctatcattgacaaatatgacgattcacatggtactgatagagagatttacgaggaggaaagtatcgagccgacagcagaagacgttgctatgaaagaaaccctaaatgaggagcagagttgcaacagctacatctggtgttgcggcttccatattgcctgggggaggactgcccattcacgcttcaagataccacttactattgatgatggtgctgtatgtagcttcacgaaacaaagcgggacagcaaagttgctacaaaaagcatcgctcattatctgggacgaggcatcaatgactaagagacaagcaattgaggcgctagacaatagcatgcgtgatataatgggacggcctgggctgccctttggtgggaggactgttgtgttcgggggtgatttcagacaagtactccctgttgtacgcaaggggtcaagggctcagatagttgctgcctctctacggagttcttacctctgggaatccatgtgccacctaaagcttgttcaaaacatgagggcacagagcgacccatggtttgcagaatatttgttgcgcgtcggtggtggaactgaggaagcgaacaacgatggtgatgttcgtcttccagatgag

SEQ ID NO: 34720 - DNA, 798 bp, Zea mays
  Peptide Sequence Number=SeqID_76499
atggcgcctcctgttgatgtggctggtctgcgccctaggttgggcgatgtggaggctcctccgaggtcgaggtcgagtctgtcttccgtggccgaggtcgagtccgagcccctggggcgggcgaggcggagaccgtcagctgaggccagggctgagtctgagccctggggtcggcccgagtccgagccctgggtcgggcggcgcggagttcgccgtcttccggggcttagcccgagtccgagccctgggtcgggcggagcggagttcgccgtcttctggggcttagcccgtgtccgagccctgggtcgggcgaagcggagcttcctacggtgcctaaggccgggtctgactgcctgtcagcctcactctgtcaagtggcactgcagtcggtacgacgcaggcagcgctgtccttctgtcaggccggtcagtggagcggcgaagtgactacggtcacttcggctctgtcgactgtagggcgcgcgtcaggataaaggtgtcaggctacctttgcattaaatgctcctgcgatttggtcggttggcgcggcgatttggtcagggttgcttcttggcgaagacagggcctcgggcgagccagaagtatgttcgtcgctggagggggccctcgggcgaggcggagatccttcgggctttgtgctgatgggggttaccagctgagaattaggagtcttgaggcctccgaggcctcggaggagtggtttgactcctccgaggtcttaatgcctcgcgcaatgctttggctggtctggtcgttccctcatgcgagctggccgtag

SEQ ID NO: 34721 - DNA, 906 bp, Zea mays
  Peptide Sequence Number=SeqID_76500
atgcaggcggcgtgcaaccgcgccaagtgggcgcacttctccgactcccaacacgcccagcatggaggcccaggcccacgcgtcatgcaaccggcgcgccgaatgcttcgtgcatacaacagcaccgccacttgcgccactaccgcgcctcctcgactgcggaaccaataccgcgactcgaggcgacccagcgcacgacccagcagcgccagcctggcgcgacggagaagcgggcgacgcttcgccttcgccataatgaccgcgtcagaaaagggaccgggaaagggggataccccgaaaaggatccttccccgtgaaggaaccaggctccgagcctccctactgatcagaggttcgaaggctggcccctcggaagggttcgacagccgcctcagatcgcgtgggctctacacccactactggtcagaggttcgaaggccggcccctcggaagggttccacggccgcctcaggctacttgggctccgcgcccattactgatcagggcgggaacgatcttgtaacggaatcccatcggagggaggcatcgagccctcggaccccgtcgccaggggaccgggtccggcagatcacccgcagctcaccggagacaccatgttcggcgcccatcgagggcaacatggcgctttcccccctcctccttgcggaaaggcaacacagaggcgtatgtaaaaaagtcgagtctgtccctgatcgtcctctcgccctgtgcagaggctcgggggctgctctcgcaaacccggctccggccgaaccgttgacagcgtcaacataccagcccgagaacttgggacccgaccgtacacccgggctacggccagctcgcatgagggacgaccagaccagccaaagcattacgcgaggcattaagacctcggaggagtga

SEQ ID NO: 34722 - DNA, 390 bp, Zea mays
  Peptide Sequence Number=SeqID_76501
atgtggcggatgccgcggccgagtccgccaaagccgggtcgccctcgcccggctttgacagaggatgagaactcttcattggtttgttcttcaggatttcgctcaccaaacgaggtgcgagtttgtaacgggaaaccggtgacgattgtggcatcccaagaaggattcaaccctgcaggaaagcgagcactcatcagcaaaaacaaggtcagcttaaggatgctgcttcataagtcatgtgctcaaccacctggagttcaacggttgcagactagtgatcctgaagacaatgaggctactcaaacttttgtccggaagatattaacagacagcctgcagaagcttgaaaatgaggctccgatagttcacagagtcatctacttaagctga

SEQ ID NO: 34723 - DNA, 639 bp, Zea mays
  Peptide Sequence Number=SeqID_76502
atggaacagagggaggggctgctggctgctgggtcggaggccgtcctattgggcacgctacgccgcattcctcctccgcagtcgcttccttcgcccacacgcccgcaggttcagaatactccaaggacggtcttggaggcgaaccaagtgttcggggcgaagaagcccgagccgaagcccaatgcggcggatgccgcggccgagtccgccaaagccgggtcgccctcgcccagtaagacggcgcccggcggcggcgaggagcccatgtacccgccgtcgaagctggagcagttctacgatttcttcaccttctcgcacctcacgctgtcgctgcactatattaggaggtcgtcccgcccattcgttgatgacaagagagaagacgacttcttccagatcgatgtgcaagtttgtaacgggaaaccgatgacgattgtggcatcccaagaaggattctaccctgcagggaagcgagcactcatcagccgctccctcgttggactgttgcagcagacaagccgtgcatttgatggagcctacaaggctctgatgaaggcatttgtcgagcacaacaaggtcagtcctcaaagcggttgcatctatccagcaactgatttccaaccatacaagtttacatga

SEQ ID NO: 34724 - DNA, 285 bp, Zea mays
  Peptide Sequence Number=SeqID_76503
atggctatctacactccatcggggattaatcatggaggaaggccattaagtgagacttttggtactgctgataacagtgagaagttgagcagcatgcttgagaggaacgattcgccttcttggcccagattttctggaattatttccctgatcgcaggttttgaagaacgacatgatagagcgaaggttgtagatattcttgtcaacgatcttaaagtcttttcgacattcaatgaggagttacataaggagacaacacaacttctcactcttgaaaatttttag

SEQ ID NO: 34725 - DNA, 1554 bp, Zea mays
  Peptide Sequence Number=SeqID_76504
atgaggaagcatgggtggcagctgccgtaccaccctctccaggtggttgcgatagccgtgttctcggcactggggttcgccttctacgtcttcttcgtgccgttcgtggggacgaagccgttccagattgtggccatggctatctacactccattgattacatgtgttgttgtgttatacatatggtgtgcggcaacaaatcctggagacccaggcattttcgattcaacgaagaatttgaaattagataagaatgaaaagcactcctatgtgaattcggatcaggggattaatcatggaggaaggccattaagtgagacttttggtactgctgataacagtgagaagctgagcagcatgcttgagaggaacgattcgccttcttggcccagattttctggaattatttccctgacagtctatcttcagaacacaaaatgtgtgaagaaggcatgtttttctgcagcttatgcgaagcagagatcgcaggttttgaagaacagtaagcattgtagagtatgtgacaaatgtgttgatggctttgaccatcactgcagatggcttaacaattgcatagggaaaaggaactacaaaggtttctttgttctaatggcttctgcagttatcctgtggttgtcggggggacttgtgttgattctctgtattgtgaagcgaggagaattctccaggcaggttgtcacaaagttgggaagcagcttctcaacagtggcttttgtaattgttgtggcaacttgcaccattttagcaatggttgcaaccgtaccacttgcccagcttttatgttttcatgtccttcttgtaaaaaagggaattagcacatatgattacatcatagctttgagggagcacgaggaacaacaagaggttcctggacaccaaagcccgcagatgtctattgttagttctgttactggttttagcacagccagttcttttgggcctcttcatcgtggttcatggtgcactccaccaagattattcctggaagaccagttgatacttattgcttggtcctctctttcgcagttcgatgccattcctccagagattggcatttcacggaattcaggcagtaagaaaactaaggaagaggaaggagcaaggagaaaagctggagcagtgaaaatcagtccatggacattggcgcggcttaatgcagaggaagtctcaaaggcagccgcggaggcaaggaagaaatccaaaatcctgaaaccagttggaaaacatggcgccccagagaacagcagcaaaccagaccatttgcctagctacaagagacggctagacaggagaggtttccctgctgaactctctcttgacccacttgcaactctatctgcaagcggcaccgaaagcaactacagcgacgcagcaacagaaatctgtggcagtctagccccgttacagctcgaagcgagaagtgctttccaaccgagtactgcagcgtccacaagaaatgttgcttcatcgcctgaaagtagctttgactcaccaaatctccaccccttccgcacttcctcgggccacagctga

SEQ ID NO: 34726 - DNA, 497 bp, Zea mays
  Peptide Sequence Number=SeqID_76505
ccgaaggggtacgggtcattttgagccgcacgatcagatatcgagggctcagattagatcgcttatccccgaaccgccgttctccactggatcaatggtccggatcgatcacgtgaagaggtacgcctactgcctaatcgtggccgttggtcaaaatccaagggtccgaagacccatcccctacccaccgccgagccatggcggcgcgctcaaaacgcacggcggcgcactcgccgtgacgacgtctcgcaccacggcacggggcggcgcggacgctgggaggagacccggtgaggagttcccgcggccacagaagctaatcccggtcgcgatgcttcggagatctttctcccgattcagcggcgcaaccaggcaccggcggagctgcggcaatgggggcaaatctgtttcgccccagcgcacggatcggagaggccgattctcaacaacccagcacccaggcggcttccggttcaacggggaagaggacccgacag

SEQ ID NO: 34727 - DNA, 421 bp, Zea mays
  Peptide Sequence Number=SeqID_76506
ccgttctccactggatcaatggtccggatcgatcacgtgaagaggtacgcctactgcctaatcgtggccgttggtcaaaatccaagggtccgaagacccatcccctacccaccgccgagccatggcggcgcgctcagaacgcacggcggcgcactcgccgtgacgacgtctcgcaccacggcacggggcggcgcggacactgggaggagacccggtgaggagttcccgcggccacagaagctaatcccagtcgcgatgcttcggagatctttctcccgattcagcggcgcaaccaggcaccggcggagctgcggcaatgggggcaaatctgtttcgccccagcgcacggatcggagaggccgattctcaacaacccagcacccaggcggcttccggttcaacggggaagaggacccgacag

SEQ ID NO: 34728 - DNA, 481 bp, Zea mays
  Peptide Sequence Number=SeqID_76507
atggcgggttggttatgggattttgcgggggctcctttgcataaaatcccagccgaagggccgttctccactggatcaatggtccggatcgatcacgtgaagaggtacgcctactgcctaatcgtggccgttggtcaaaatccaagggtccgaagacccatcccctacccaccgccgagccatggcggcgcgctcaaaacgcacggcggcgcactcgccgtgacgacgtctcgcaccacggcacggggcggcgcggacgctgggaggagacccggtgaggagttcccgcggccacagaagctaatcccggtcgcgatgcttcggagatctttctcccgattcagcggcgcaaccaggcaccggcggagctgcggcaatgggggcaaatctgtttcgccccagcgcacggatcggagaggccgattctcaacaacccagcacccaggcggcttccggttcaacggggaagaggacccgacag

SEQ ID NO: 34729 - DNA, 423 bp, Zea mays
  Peptide Sequence Number=SeqID_76508
atgagcattaggtttataggagttgcttggaaaccctttgatgcattggctaccttaaaatccattccttttatagatacttctgatgaagtatcaattatgatttacaaaaattgcttagccctgcctagaggaacacaaacaatcctaaggatggaagtacttaaatcgggacttgggctaggaacaggtgatgttcaacccacattgattaaggattatagagaatgtaggcttgctgatcgaggtccttttaactggtcacatgcctcatcatgggtaagctttgccttgggcagactaataccagaaaggccaacacgcaatgggagtggagagatggcgagagtagcgtgtaccctccgtggcaagaggctggacggtggtgtatttatgctctcggttggtgtgaacccggtctag

SEQ ID NO: 34730 - DNA, 264 bp, Zea mays
  Peptide Sequence Number=SeqID_76509
atgggtaagctttgccttgggcagaccaataccagaaaggccaacacgcaatgggagtggagagatggcgagagtagcgtgtaccctccatggcaagaggctggacggtggtgtatttgtgctctcggttggcgtgaacctggtctagtcttgagaaacccggtgcatacccttgagagtcttttctttagtcgggttacgagtcacttgtttatgaatggtgttaagcgccggtgggcacgaccttcttataagtctaagtaa

SEQ ID NO: 34731 - DNA, 417 bp, Zea mays
  Peptide Sequence Number=SeqID_76510
atggccggagtcggtcggtccacgcgcgcaggcggggatgctcgtcggcggcgaggagaccggcctggtcacggcgagatagttcaatcaaatgggtcagtaaggtccacgggatgccagagaagatatgagcgcaaggaattgggcggggactcactggatagctcggtccacgcgcggcggcggaagaccgaagtccggctagggacagggagttgtagcgtcaccaaggtgccagtgtcagaatgcctggtcctgaggtcaagctgcgccaaaaccatgccaaaagaatttggtttgagttcaaacttttccaggatgtgttcaagggaatttggcacgactttgatatttggatctcctggctttgagtttcgaaaagcagagaacgcagatgatctttgggaaggggtctga

SEQ ID NO: 34732 - DNA, 642 bp, Zea mays
  Peptide Sequence Number=SeqID_76511
atggcgggcggaattgagctcggcggagctaagggaaagtggctggccggtgaggggacagggagttgtagcgtcaccaaggtgccagtgtcagaatgcctggtcccaaggtcaagctgcgccaaaaccatgccaaatgaatttggtttgagttcaaacttttccaggacgtgttcaagggaatttggcatgactttgatatttggatctcctggctttgagtttcgaaaagcagagaacgcagatgatctttgggaagaggaggtggagtctgggaggcaaccgtcccctgtgcctcagctagatgtgccccgtgcaccaccacagggcacctcgactactggaggagaccctgacggagacgacgatgatggcagttcgagccacaacacgaagcttttggaggagcaggagccggaaggatggatcactcggcccatcattcgtgacgccgctcgtggttgtcatttccacgacgctctcgacaccttgctgtgttgggctttcaaccgacacaattggtccatcgagtaccgttgtgtagtctaccagcaccgtcgcgggttatacccggaccagtgggaggctacttgcctagtgcgccgtccggacgatgatctccagggtgcagaggccttctaa

SEQ ID NO: 34733 - DNA, 1812 bp, Zea mays
  Peptide Sequence Number=SeqID_76512
atgaccacgccgcgcggcacccagcgacgcgcggccgcccctgcggcggccgcgggcggcgagccctacaacatcctgcccatccacgacctcctcgccgagcacccgtcgctccggttccccgaggtgcgggctgccgcggcggcgctccgggcggtgggcggcctccgcccgccgcccttctcgcagtggcgcgccgaccaggacctcatggattggctcggcgccttcttcggcttccagcgcgacaacgtcaggaaccagcgggagcacctcgtgctcctcctcgccaacgcgcagatgcgcctctcctccgccgacttctccgacacgctcgagccccgcatcgcgcgccaaatccgcaagaagctgctccgcaactacacctcctggtgcggcttcctcggccgccgcccctccgtctacgtccccgagggcgacccgcgcgccgatctgctctacacgggcctgcacctgctcgtctggggcgaggctgccaacctgcgtttcatgcccgagtgcctctgctacatctaccaccacatggcgaccgagctgcaccgcatcctcgagggcttcatcgacaccgccacgggccgccccgccaaccccgccgtgcacggcgagaacgccttcctcgtgcgcgtcgtcacgcccatctgcgacgtcatccgcgccgaggccgaatccagccgcgacggcaaggcgccgcacgccgcctggaggaactacgacgacatcaacgagtacttctggcgccgtgacgtgttcgaccgcctcggctggcccatggagcagtcacgccagttcttccgcaccccgccggaccgcagccgcgtacgcaagacgggcttcgtcgaggtccgctcgttctggaacatttataggagcttcgacaggctgtgggtcatgctgcttctctacctgcaagctgcagcaatcgtggcgtgggagggcgccaagtggccgtgggatgatctgctctcttcccgtggctcagagtccaaggacacacaggtgcgcgtgctcaccgttttcatcacctgggctgcgctccggttcctccagtctctgctggacatcggcacacagttccgccgcgcatttagggatggccgaatgcttgctgtgcgcatggtgctcaaggccgttgttgcagccgcttgggttgttgcgttcgctgtcctatacatgagggtctggaaccagaggacagacaatgggcagtggtcgtcagcagctgattcacggatgaggagcttcctctatgcagctgcagcgtttgttatccctgaggtccttgccatcgtgctcttcattgtgccttgggtgcgaaacgcattggagaagacaaattggaagatctgttacgccctgacctggtggttccagagccgcagctttgttggccgaggactacgtgagggcacatttgacaatgtcaagtactccatcttttgggtgcttttgcttgccgtgaagtttgccttcagctattttctccaaatcaggccacttgtaaaacccacaaaagagatatacaagctgaatggaatccagtacacttggcatgagttctttggccaaagcaatcgttttgcagtgtttgtgctctggttaccagtggtgttgatctacctcatggatatccagatttggtatgctatattttcttctctgtcgggtgcatttgtgaggctttttgcacatttgggagagatcagggacatgaaacagctgcgacttaggttccagttctttgcaagtgccatgtcattcaacatcatgcaagggcgaattcgcggccgctaa

SEQ ID NO: 34734 - DNA, 996 bp, Zea mays
  Peptide Sequence Number=SeqID_76513
atgggctgccccgccaaccccgccgtgcacaacgagaacgccttcctcgtgcgtgtcgtcacgcccatctgcgacgtcatccgtgtcgaggccgagtccaaccgtgacggcaatgcaccgcacgccgcctggaggaactacgacgacatcaacgagagcttcgacaggctgtggatcatgctgcttctctacctacaagctgcagcaatcgtggcatgggagggcgccaagtggccgtgggatgatctgctctcatcccgtggcttagagtccaaggacacactgacacacagtggtgttgatctacctcatggatatccagatttggtatgctatattttcttctttgtcgggtgcatttgtgggatttttgcacatttgggagagatcaaggacatgaaacagctgcgacttaggttccagttctttgcaagtgccatgtcattcaacatcatgccagaggagcaacagcgattacaactaaggtatggtttcagcagatcctttagaaagattgagtcaaatcaagtggaagcacaacggtttgcacttgtttggaatgagataataagcaagttccaggaggaagacattgttagtgatcgtgaggttgagcttcttgagctgccacctaagctgtggaatgtgcgtgtaatccgttggccttgtttcttgctctgtaatgagctgtcacttgcacttggtcaggcagttacaggatctaatcgcaggctttggaggaagatatgtaagaatgattatcatcgttgtgcagtgattgaggtctatgatagtgcaaaacatatgcttcttgagatcataaaggaggggaatgaggagcatggtattgttacacaattgttcagcaattttgatggatccatgaagatggagaagttcactgtggagtataagatgactgagctgcacaatatccatacaaggcttgtagctctatgcctccctccccacgccgcctcagcccggcaaccctag

SEQ ID NO: 34735 - DNA, 474 bp, Zea mays
  Peptide Sequence Number=SeqID_76514
atggcgaccgagctgcaccgcatccttgagggcttcatcgacaccgccacgggccgccccgccaaccccgccgtgcacggcgagaacaccttcctcgtgcgcgtcgtcacgcccttactaggcacggcgacgacagcaagtgctagatcaatgcaatcttttagggagcaattacctgcattcagcatgagagagaggtttctgaaagcagtcgcagccaatcagttgcttaggatccattgtggcaggtattttctggctcaaattttacagattgaaggtgggctgtcacttgggatcgaaaaggatagggcatctactgtcgccatggggtttgtcgacgactccaaaggtgatgagctattgtcttttactcatgagcaaaggggcttttgcacattttttactagcgtggatcacctgctaggaactaggaggaaggaatttttacaatcggttttattgagcaagtag

SEQ ID NO: 34736 - DNA, 996 bp, Zea mays
  Peptide Sequence Number=SeqID_76515
atgaagcgggcgatcgtgagtgccggcgagggtggtgacacgcgagggcctgggggaaacgcccctggtgctagtgacggtggagaaagaagccctagtggatcacgaggtgaggagaaactctatcaaacatggtggatgaaagcgcatggagagtgggggaaagaaagcaaaaaagagaggaatctgtgggctaacatgtatgacgagaagatttgggatgtcgagatcggccctgagatcattgacgaggcgctccatcctgccaccgtaggccgtggcatcatcgagctcgatgtgtggcctgcacccagtcatgagcagattgtgcggcttgagaccccggtgtcggagagggcggacaaggatgagggcagggcaccatttgagaacaagtccccaacaacttccatttctcatgctttaccgaggaaaatcccacatttagttcaaatcccacatttcttctcctttgggcgaatgctgctgcactcttctgcctgccacggcagccgcctcctgtccccttgcagcagcagttgcagccgccactacctcctctccagcttcgcgtccactcccctcaaaaccctaaacgcgctcaggaccctagttgtcatgtcgtaccgcggagggcgcgggggcggcgggcccaactcgcaccgcgggcgcgggcggggcggcggcggtggggcgggacgccgcggcggcggcgggggacgcggggagcagaggtggtgggacccggagtggcgagccgagcgcctccggcagatgcatggggagacgacagcaagtgctagatcaatgcaatcttttagggagaaattacctgcattcagcatgagagaggggtttctgaaagcagtggcagccaatcagcgaatagggaagacccttggtgaagatgtcgacaaactgcaagctcgtcgagacgtgatggatgtagatgtccctgacagcaacacgctcatggcgaagttgatggagaggtag

SEQ ID NO: 34737 - DNA, 453 bp, Zea mays
  Peptide Sequence Number=SeqID_76516
atgggggacttgtggactaacataagggatgatctcgcaaagatgcaagccacgctccagaaggttgagcaagggctgctgcaaatcaaggcagcagtgcaacatgagcaacaccagctggcgttgtccgcacgactccggacgtcggcggctgtcggcatacaagctgctgctcgtggcttccttgcacgacggagagtgcgagagatgcgccggcagatgctcgaggcagccttggtgacggttgacctcggcacacgggggcgcgacctcgccctgtcggacggccatcagcagcggcaccgggccgctatctccaagtgcgagcatgtcttcatcgatcttggttgttcgttcttcatcctctcaaccgcctactactccaccgatgatgttgtcttcagttttgtcgcctcctgtgcgtgggggcaaggtggtctccattgtgcttga

SEQ ID NO: 34738 - DNA, 1203 bp, Zea mays
  Peptide Sequence Number=SeqID_76517
atggcttctgctgccaatttcgcggcttcatcctggcaaccggcgtccccatctccatggattgcgccgcatgtcaccttcgtcacgccgtcctggcaaccgacgtccccatctccatgggttgcgccgcatgccaccttcgtcacgccatcctggcaaccagcgtccctatctccatgggcagcatcgcctgccaattttgtcaccacatcctggacgccggcgtgcccatccccagggacaacgccaaattttgtcacatcatcttcgttgacggcgtctccgtccccatgggcgacgccactaggggcagccacggctcagcaatcaccagctccatcgatgggggacttgtggactaacataagggatgatctcgcaaagatgcaagccacgctccagaaggttgagcaagggctgctgcaaatcaaggcagcagtgcaacatgagcaacaccagctggcgttgtccgcacgactccggacgtcggcggctgtcggcatacaagctgctgctcgtggcttccttgcacgacggagagtgcgagagatgcgccggcagatgctcgaggcagccttggtgacggttgacctcggcacacgggggcgcgacctcgccctgtcggacggccatcagcagcggcaccgggccgctatctccaagtgcgagcatggtacgtgtcccgcgggcgacgaacttcaactctacggcaacagcggtagggaaggcactcacctcgtcatcagcaagggcgcactatttagggccaccacattccgctaccgaccgccacgagggcgcctccgctggttattgttgcgacctattccagtcttcatcgatcttggttgttcgttcttcatcctctcaaccgcctactactccaccgatgatgttgtcttcagttttgtcgcctcctccatggccaagccactgtcacccacctccgactcattggctcccaagtcgttgtctcgcccctcccctgggggtctcctcgatccgcttaccgcctccatgcgctccctcgcgtcggcgcgccgctccccgatcaccacgctcgtcatgtacgacgaggacacacgcaccatcgctgaactctccatcgacatctacctctacctggacaccgacctctacaacgtctctggcttgtccctcacgctgcccccgcccacatgcgacctctcccgtggccgatga

SEQ ID NO: 34739 - DNA, 198 bp, Zea mays
  Peptide Sequence Number=SeqID_76518
atgaggaaattgcgggatgccgagtgtgaggaggcaactgaggagaccaaaccctggcagcggcatgggccgaaacgtcggactcgtgcagctgaagtccataatctctcagagaggagaagaagggaccggatcaaagaaaagatgcgtgcgttgcaagagctgatcccacactgcaacaaggtacaagtcccttga

SEQ ID NO: 34740 - DNA, 519 bp, Zea mays
  Peptide Sequence Number=SeqID_76519
atgaagcgtcaaagaccttcggcgacgaagcatagtcccaacaaccctctaggcaccagcggcctcactgccaaggagaccgccacgtggttcctgaacaccctcgacgacccgctagagaaggacctatacaccaacgtcgagtctagctgggccggcgacatctgctcgaccttctgcggcagcaaccaggtgcccaggacgccgacagggatcagggggaaggacgcgacattgcattcggaggtgccaagcggtgccggcgcgcacgacgccacatcgtcatccggtgggtccgaaagcaactatgggggatccgggctgcccagtgacagcgtccatggccacaagaggaaggggatgtgtagagacgagtcagatagtcggagtgaggatgtcgagtgtgaggaggcaactgaggagaccaaaccctggcagcggcatgggccgaaacgtcggactcgtgcagctgaagtccataatctctcagagaggcgttattggctgctgctgatgtaa

SEQ ID NO: 34741 - DNA, 423 bp, Zea mays
  Peptide Sequence Number=SeqID_76520
atgaaagacttccactgcactccgatgagaggcataaatcaccaaaaaagggagagattgaaagggaaatgtgcccttgggccatttctaagtattttggtgattgagtgccaacgcaagtgcttttgtgttgatctatgcaatgtggtggacaaagtgcaaatcatgtcaaaagtgctggaaacaggaaaaattgacttggaaatgaaatggctctgttcagccaaagtcagctcggtctgggtgcaccggactgtctggtggtgcactggacagtgtccggtgcgccaggctgactctggtgaacttactgctctcgggagttcgacggcggtgtacgactataattcaccagactgtccgctgtgcaccggactgtccagtgagccgttcacaggcgaactcgtcgctctcgggagatga

SEQ ID NO: 34742 - DNA, 276 bp, Zea mays
  Peptide Sequence Number=SeqID_76521
atgaaagacttccactgcactccgatgagagggcataaatcaccaaaaagggggagattgaaagggaaatgtgcccttgggccatttctaagtattttggtgattgtgtgccaacacaagggcttaaatgtgtatttatgcttctggaggaacaaagtgcaaatcaagataaaaggagttgagcgcatgctcgtccgttgggacgccaccaccgtggtagtagcatggctctgtacttggttcgaaccatgggaataccaccgtgatctcttctga

SEQ ID NO: 34743 - DNA, 409 bp, Zea mays
  Peptide Sequence Number=SeqID_76522
attttggagcttgtttgtgattgatccaaggggtttaagcctaaggtccctgtggagaagtggtagagagtcatttggtcgacaagttttgttaaacttgctccccctgttgccatggaaaactgagagtttgcagggggtcaacagggaggtttgccaagttcagagaacacctatcccatttcaggtcagtgaagctcacaccaattactacttgaactctaccactattggttgcctggaactagaaaacgaagaagagatcgaagtgactgaagaaaagacatcaccacctttggaatctcaggcagagacttggctctacttcgacatctgcgagtccgagcctgactcacctactaacaaaggcaagccccggtgcatgcaacccctttccttgtgtttttaa

SEQ ID NO: 34744 - DNA, 369 bp, Zea mays
  Peptide Sequence Number=SeqID_76523
atggagaaaagcttgctcaaggttggactgacagatagtacgttaactgcatttggttcagttctgaaatctgaaaattgctgtatggtgccaagtttggagcccttttgtggttgttctataagattttggaccttccttgtgattgatccaaggggtttaagcctaaggtccctgtggagaagtggtagagagtcatttggtcgacaagttttgttaaacttgcttcccctgttgccatggaaaactgagagtttgcagggggtcaacagggagggtcatccaagtgcccacctcgccgcggtcaagcaatcacaagcgattccccagctgtacagtgcaagtttcgtgttctccttaggtcagtga

SEQ ID NO: 34745 - DNA, 1212 bp, Zea mays
  Peptide Sequence Number=SeqID_76524
atggggggcacggagcccggttccttcgcggagaaggacccctctcgggcaactggcgtgccggttgctcgacgcgtgggcctgggtttcaggctggcgtgtcagaagttggagaagcgcgtccatctagcgcggttgcatgccgcctgcatggctgctcgccccttctgcccgttggtctgggcgaaaatgggggtcgcctcgccgggtcttcccgtcttccaagcccccggatgggggatatccgccgcctttccgcctcctcgttggaggaacgcgactccatgggagttggtacctctcagccatcgtttggcttcaaggattttcatcacgcagcccggtcgcaccccctcaccggcggtcacccgagatggcgacctccagcttgatggtgggggaaagcgagccgggctgcggcctctgccccttcctcagcctcaaggattttcatcaccaaggctggggaggggagagtgccgagttggggtcggcccctgcgtgggcggtggcccgctccttcactcagtgatggggggagaagcgggcattgcccgtggcgtccggcagctgcagcgtgcctggtctccagccgcgagtggcttcggggccccttgcggcgtcggcgtctgccacggcagccggaagaggttcttccgccggcgcggcggccgggaccggccacgggctgacctccaacttctacggccttctgcccgtccttgcctcacgagttttggcacgggcgggggcctcctgacagcggcatccaccctgaggtcagcgttgccgctgttcggccccccggagcagaagtcgccgtcgtcgccactgctggagcaggtgacggcgcgccgtccgtcggtcttctgtggctccgcaggccttccccatggagtggggtcgttcgtacctgcggaggggggaaccggagttccgttggtagtggcatctcgtatgccagccgggggtagcgatatcagtatgaacagaggcggagttggctcgagaatggggaacctggttggccggagcctagccgtgtcgcccgtcagcggtgccgacgcccaagtcggccagtcgaggcctcggatcgggctagcgcccttggaagccggttgcccgaggccccagggacgtcgtcgatgccgagggtgctacggctcccttcggcgtgaagacccgagcctgcaggatcagatcgtcttgtag

SEQ ID NO: 34746 - DNA, 1136 bp, Zea mays
  Peptide Sequence Number=SeqID_76525
atggggggcacggagcccggttccttcgcggagaaggacccctctcgggcaactggcgtgccggttgctcgacgcgtgggcctgggtttcaggctggcgtgtcagaagttggagaagcgcgtccatctagcgcggttgcatgccgcctgcatggctgctcgccccttctgcccgttggtctgggcgaaaatgggggtcgcctcgccgggtcttcccgtcttccaagcccccggatgggggatatccgccgcctttccgcctcctcgttggaggaacgcgactccatgggagttggtacctctcagccatcgtttggcttcaaggattttcatcacgcagcccggtcgcaccccctcaccggcggtcacccgagatggcgacctccagcttgatggtgggggaaagcgagccgggctgcggcctctgccccttcctcagcctcaaggattttcatcaccaaggctggggaggggagagtgccgagttggggtcggcccctgcgtgggcggtggcccgctccttcactcagtgatggggggagaagcgggcattgcccgtggcgtccggcagctgcagcgtgcctggtctccagccgcgagtggcttcggggccccttgcggcgtcggcgtctgccacggcagccggaagaggttcttccgccggcgcggcggccgggaccggccacgggctgacctccaacttctacggccttctgcccgtccttgcctcacgagttttggcacgggcgggggcctcctgacagcggcatccaccctgaggtcagcgttgccgctgttcggccccccggagcagaagtcgccgtcgtcgccactgctggagcaggtgacggcgcgccgtccgtcggtcttctgtggctccgcaggccttccccatggagtggggtcgttcgtacctgcggaggggggaaccggagttccgttggtagtggcatctcgtatgccagccgggggtagcgatatcagtatgaacagaggcggagttggctcgagaatggggaacctggttggccggagcctagccgtgtcgcccgtcagcggtgccgacgcccaagtcggccagtcgaggcctcggatcgggctagcgcccttggaagccggttgcccgaggccccaggg

SEQ ID NO: 34747 - DNA, 204 bp, Zea mays
  Peptide Sequence Number=SeqID_76526
atggcgggcggaattaagcttgccggagctaagggaaagtggctggccggtgaggaaaaaaccctgagtgacactggggtgtcacagccttccccccttaaaggaatctcgtcccgagattcgggccagagtcctcccggggtgaagcgaaggattcgaaaggcaggaggaggggttggggtgattacgtaccagcttccttag

SEQ ID NO: 34748 - DNA, 327 bp, Zea mays
  Peptide Sequence Number=SeqID_76527
atggcgggcggaaataagctcgccggagctaagggaaaggggctggccggtgaggggacagggagttgtagcgtcaccaaggtgccagtgtcagaatgcctggtcccgaggttaagctgcgccaaaaccgtgtcaaatgaatttggtttgagttcaaactttcccagaatgtgttcaagaaaaaccctgagtgacactggggtgtcacagccttccccccttaaaggaatctcgtcccgagatttgggccagagtcctcccggggtgaagcgaaggattcgaaaggcaggaggaggggttggggtgattacgtaccagcttccttag

SEQ ID NO: 34749 - DNA, 189 bp, Zea mays
  Peptide Sequence Number=SeqID_76528
atggcgagagtagtgtttaccctccgtggtaagaggctagacggtggtgtatctgtgctctcgcatatccttgagagtcttttactttgtcgggtgaagaagcgacaaacttttgttgcttctgttcaaaggtggtacccaaagaggagaaccaagactagagctgcgggagggaaggccctccgttaa

SEQ ID NO: 34750 - DNA, 129 bp, Zea mays
  Peptide Sequence Number=SeqID_76529
atgcatatccttgagagtcttttactttgtcgggtgaagaagcgacaaacttttgttgcttctgttcaaaggtggtacccaaagaggagaaccaatactagagctgcgggagggaaggccctctgttaa

SEQ ID NO: 34751 - DNA, 192 bp, Zea mays
  Peptide Sequence Number=SeqID_76530
atggccggcttgctgatcaaggactatcttagctggcaacatgccctggaaatgggacagggtaagcgtatccttgagagtcttttactttgtcgggtgaagaagcgacaaacttttgttgcttctgttcaaaggtggtacccaaagaggagaaccaagactagagctgcgggagggaaggccctccgttaa

SEQ ID NO: 34752 - DNA, 378 bp, Zea mays
  Peptide Sequence Number=SeqID_76531
atggaccgaccaactccggccatctccgtcaacgttccgcacaccgttgtgatccccgcgacctccccttcgccctcgaccacttcaccggaacagtctcgccgccgtgaacttgtaaccatcagagccccactacaaaaatacagagcaccccagcctaactttttaatggtagtagaaagcacccctttggctagaaaccttaagaaaaccataggaaaagaattaaaagattgtaatcttgccgacggagagtacgtgctcatccccgagcaaggacctgtccaagaggaggaccaggagcaggcttcagaggctgctattgaggatctccccgcagccccagcagttgaaggcaagccccggttctatgcataa

SEQ ID NO: 34753 - DNA, 138 bp, Zea mays
  Peptide Sequence Number=SeqID_76532
atggaccgaccaactccggccatctccgtcaacgttccgcacaccgttgtgatcccccgcgacctccccttcgccctcgaccacttcaccggaacagtctcgccgccgagcttaaaattaaaaacagaaaccccctaa

SEQ ID NO: 34754 - DNA, 828 bp, Zea mays
  Peptide Sequence Number=SeqID_76533
atggaggaacagggagcagggacactggtgctggagacgcgacatcaagcggcggagtttgcgaacaatccagggcggccgacatctacatccatggttgaagacaggaggcgagctgaacgagctcgaccaccagagagcaagacgcgacggcggattcgcgcgcgcagaaagctgaagaccaaatcgagctggagccgaacagaagaactccggcgatggcgagggagccagggcgcagagcgtgcggctgacagagagagggcaggggcttgcggggaaagggacttggcagaggaagaggctcggcaggaagaagaccgagcagacggagaggagctgggcatgcgctggcacatgggcacgcggcaccacggcggccaggacacggaccacgccggcgagcccacggcggccatggaggagagcgagcagagagagagcgacgcgacagggagagaagaggtcgggggcgagctggagatagtcgacgttggggcaggcggcaggaccgagcgccgtccgagctccggccatgaagggagttccggccacagagggacgcagggagcgcaggaagctccaagcggaggagacgcgcagggaagaatcgagcacggagcgaagccacacgcagagaaccgaagtgcaggctgggagctcgaccgtagagggagagatgagaaggagcggctggggaagaagccagcccacggcacggcagtggaaaaatcccagcgttggatgaggatgacagctgaagtggataagagagaaagagagatttcgaacggtgaaaagatgaggatgggctgggattttacttag

SEQ ID NO: 34755 - DNA, 276 bp, Zea mays
  Peptide Sequence Number=SeqID_76534
atgggagtggcaggaccgagcgccgtccgagctccggccatgaagggagttccggccacagagggacgcagggagcgtaggaagctccaagcggaggagacgcgcagggaagaatcgagcacgtcaacacccggttccacgacaacagataatttatgtggagaatcgaatctcaattataaattctcatacgcgatttctcggttgacgagtggggacataattatttgcaccgaaaacttagtcgtcgagttctacttaatctgttcgggataa

SEQ ID NO: 34756 - DNA, 483 bp, Zea mays
  Peptide Sequence Number=SeqID_76535
atgaagagagcatctctatttgaaggtgtcaaagattcaacaaaaaccaatagaaagaacaaggcagggttcaaaacaaagaagcaaaaagaaaccgaagtgctccctggtctggcacaccggactgtccggtgtggcaccggacaatgtccggtgcaccatggaggattgccttcgaactcttcaccttcgggtttctcaggcgcagcccactataattcaccggactgtccggtgctccagaatgaagcggctctgaactggccaacttcgggaaaatggaaggccgctccgctaaaattcaccggactgtccggtgtacaccggactgtccggtgcgccagcggagcaacggctacctcgcgccaacggtcgactctgacagcgaacagtgcgcaacagtacacgcggcagaagtcagagcagaaggacagaggggcaccggactgttcggtgtgcaccggactgtccggtgccacatga

SEQ ID NO: 34757 - DNA, 354 bp, Zea mays
  Peptide Sequence Number=SeqID_76536
atgttggcggcgtcctcgtcgtcggaggagtcggtggagctctcgtcggagtcccactcgcggcacacgtgggcatcgctgcccctcttcttgtgcggctctgaactggccagcttcgggaaaatggaaggccgctccgctaaaattcaccggactgtccggtgtacatcggactgtccggtgcgccagtggagcaacggctacctcgcgccaacggtcgactctgacagcgaacagtgcgcaactgtacacgcggcagaagtcagagcagaaggacagaggggcaccggactgtccgagagggaaagggttgaaaaagacccgtccttgagtggactcctcaacggggactag

SEQ ID NO: 34758 - DNA, 405 bp, Zea mays
  Peptide Sequence Number=SeqID_76537
atggcgaagcctggccacactactcctcctggtcctctcctgcggaaacagcaacccactcgaccgtctatcccggtggtggggatggaggccaagtcacaccatcaaccaaatcaaggaggtacctgcaaaaattatgccacaagcaaggctgagtatactaatactcatctagacttacccgtggccgcacttgtacccaccatatctagaatgggagacccagtctcaggtcgcgtgagggataaagtccgcgcccggcttcactcagacaatgcatccccatggatccgtgtccacagaccatcatcattctattatcaaaaatggatacaaccaatttctgacctcgcgcgagtgctagaaaaatcactcgacttctaccgagatcctgatttagcatag

SEQ ID NO: 34759 - DNA, 321 bp, Zea mays
  Peptide Sequence Number=SeqID_76538
atgaaggccaagtcacaccatcaaccaaatcaaggaggtacctgcaaaaattatgccacaagcaaggctgagtatactaatactcagctagacttacccgtggccgcacttgtacccaccatatctagaatgggagacccagtctcaggtcgcgtgagggataaagtccgcgcccggcttcactcagacaatgcatccccatggatccgtgtccacagaccatcaccattctgttatcaaaaatggatacaaccaattcctgacctcgcgcgagtgctagaaaaatcactcgacttctaccgagatcctgatttagcatag

SEQ ID NO: 34760 - DNA, 312 bp, Zea mays
  Peptide Sequence Number=SeqID_76539
atgtcaaccgtccccatcgattccccgttcgcgtccaggcctcaccgccttggcatacaatgctccactgaccccgactgccgtcgtgcagtggccgcacttgtacccaccatatctagaatgggagacccagtctcaggtcgcatgagggataaagtccgcgcccggcttcactcagacaacgcatccccatggatccgtgtccacagaccatcaccattctgttatcaaaaatggatacaaccaattcctgacctcgcgcgagtgctagaaaaatcactcgacttctaccgagatcctgatttagcatag

SEQ ID NO: 34761 - DNA, 267 bp, Zea mays
  Peptide Sequence Number=SeqID_76540
atggaggaagcggatgaatccgacatccagggcccacatggacgcgaggggagtgagcacgcactagtagatgatttggaaaatatagacatatatgtctacccatctattaggtcagatgaggtcgggttaggtaggttatgcaacccaacatgtaggtcaggtgtatatgcagatgtcattgtggacattactccacaactcatcacactcaatcaaagatccaaatcaaacaagtatcataagaacaagcattcaagcatatag

SEQ ID NO: 34762 - DNA, 141 bp, Zea mays
  Peptide Sequence Number=SeqID_76541
atggagcgccctggcgattatgttgaatggggtctaggtgtatatgcagatacaattgtggacattactccacaactcgtcacactcaatcaaagatctaaatcaaacaagtatcataagaacaagtattcaagcgcatag

SEQ ID NO: 34763 - DNA, 435 bp, Zea mays
  Peptide Sequence Number=SeqID_76542
atgccgccgcttcggcccccgccaccgcggctcctgctcaacaatgtctcctacatgcggaacgcacagacggtgctccgtgacatcaacctcagcgtccacgacggcacaacccttgtccttaccggcgccaacggctccggaaagaccaccctcctccgcatgttggcgggcttctcgcgcccctcggcgggggagatcctctggaacggacacgacatcacctcccccggcgtcttccagcagtacaagctgcagctcaactggatgtcgctcaaggacgccgtgaaagagaagctcacagtgctcgagaatgtccagtggttcgagctcctcgaggggaaggacgacagcaggtcgggcccggccatccagctcatggggctcggcaggctcatgaacgagaaggccaggaggatgttgtccatggggtag

SEQ ID NO: 34764 - DNA, 567 bp, Zea mays
  Peptide Sequence Number=SeqID_76543
atgaacacaacagatggcatgagtggccttgcatatggaccgtcttgcatgctggcaggcttctcgcgcccctcggcgggggagatcctctggaacggacacgacatcacctcccccggcgtcttccagcagtacaagctgcagctcaactggatgtcgctcaaggacgccatgaaagagaagctcacagtgctcgagaacgtccagtggttcgagctcctcgaggggaaggacagcagcaggtcgggcccggccatccagctcatggggctcggcaggctcatgaacgagaaggccaggaggatgttgtccatggggcagaggaagcggctgcagctcgccaggctgctcgccatcgaccgacccatctggctgctggacgagccctccgtcgcgctggacgcagcgggtaccaggctgcttgaacacatcatcgcggagcaccgggagaagggtggcatcgtgttcgtggccatgcatctaccgattcaggttgaggattctatgtcgcttcggcttccccagaggtttccccggaggaagacgctggttgatcttgtccattga

SEQ ID NO: 34765 - DNA, 704 bp, Zea mays
  Peptide Sequence Number=SeqID_76544
catttgagaacaagtccccaacaacgtcttccccctcgcattcgaggcgaggacggcagcgaggatctaccggagcgcttgggagcggcccgctctttggctttgatggcttgttcgcgtcccttgagcgggaccgcgaacaagagccttccggtggccgcgttcacctggggccatggctgccgctgcagaggtcgctggcgagcctcccggcgttcgtcgccccgcaggcccgaggtcgctcgtacccacggggacggaaccggagttccgtttgtgatggcaccttgaatgccagtgtttttgttcattgcggctgtcggggcctgaacatgggtaaccggccgagccgcctgctcgggccggattcccggaggaatctctggaccgcgtcgccgtccgaggctgggtcggactttgctgaagacgtcgtcgatgccgagggtgctacggctcccttcagcgtgaagacccgagcctgcaggatcagatcgtcttgtagctcgctttatccgaacgcgagttacttatcgcagaaggtgatgagtgaggattcgctttccgaagtagtcaagaagcacgaaagtaatcctgctaaaaagagatcctttttcgaggaaaaattcgacgcagagggggtctccccccttttagcccccgagggagggtcgggcttcgccgaggcgaggccgacccttccttga

SEQ ID NO: 34766 - DNA, 1155 bp, Zea mays
  Peptide Sequence Number=SeqID_76545
atgtcttcttcctcccttaagcgtcgggtcttcccgtcttccaagcccccggatggggggtatccgccgcctttccgcctcctcgttggaggaacgcaactccatgggagttggtacctctcagccatcgttcggcttcaaggattttcatcaggcagcctggttgctcccttccgccggtggccacccaagacggtgacctccagctcctggatggggagagacagaccaggctgtggtcccgccctcagcgtcgggtgcgttcgtcatcctcgctggggcaggggccgaggcgagccggggctctacctcgcgtgcgggtcggcgaaccacctcctcttccagcttctggtggtggcaatcgtcctcccgcgctgcgacggagtcgtcctccagtcatgccggggaaggcgaactgttgctgtccagctaggatgcaacattccgtcttccccctcgcattcggggcgaggacggcagcgaggatctaccggagcgcttgggggcggcccgctctttggctttgatggcttgttcgcatcccttgagtgggaccgcgaacaagagccttccggtgactgcgttcacctggggccatggctgccgctgcagaggtcgttgccccgcaggcccgaggtcgcttcggggccgacgccaaagtcgatcagtcgaggcctcgggtcgggctggcgcccttggaagccggttgaccgaggccccgggggtaaccggttgagccgcctgctcggcccggattcccggaggagcccctggaccgcggcgccgcccgaggctgggtcgggctttgctgaagacgtcgtcgatgccgagggtgctacggctcccttcggcgtgaagacccgagcctgcaggatcagatcatcttgtagcgtgtgctttctgcggccgccgaggccagaagaaaacgccctcgccgcgcttgcgaagctgcgtcttttttcctcctgtttcaagcatctggactctgtcggtaacagggatgatccgctttccgaagtagtcaagaagcacgaaagaaatcctgctaaaaagagatcctttttcgaggaaaaattcgacgcagagggggtctccccccttttagcccccgagggagggtcgggctttgccgaggctaggccgacccttccttga

SEQ ID NO: 34767 - DNA, 336 bp, Zea mays
  Peptide Sequence Number=SeqID_76546
atgcaagccacgctccagaaggttgagcaagggctgctacaaatcaaggcagcagtgcaacatgagcagcaccagctggcgttgtccgcacggctctggacgttggcggctgtgggcatacaagctgctgctcgtggcttccttgcacgacggagagtgcgggagatgcgccggcagatgctcgaggcagccttggtgacggttgacctcggcacacgggggcgcgacctcgccctgtcggacggccatcagcagcgcaccggaccgctatctccaagtgcgagcatgctcgaggacgagctgcttgtccaggaggggtgtagtgttagggcctaa

SEQ ID NO: 34768 - DNA, 253 bp, Zea mays
  Peptide Sequence Number=SeqID_76547
atgggcagcattgcctgccaattttgccaccacatcctggacgccggtgtgcccatgcccagggacaacgccaaatttcgtcacatcatcttcgttgacgccttagtgacggttgacctcggcacacgggggcgcgacctcgccctgtcagacggccatcagcagcggcaccggaccgctatctccaagtgcgagcatgatggcgtccatgtgatccaggtggctgcactcgtgcaagtccaatgcgcggagg

SEQ ID NO: 34769 - DNA, 318 bp, Zea mays
  Peptide Sequence Number=SeqID_76548
atggcccgaaaggcgacacaacaagcatcacctattcatcctatgagaccagggtactttccacccgtttactcatcgtcggtatattatcctgttcaaacatggaatggtacgatgatgaatctatggtttagtgaaagctctcttgtgagttttggtgtttggatggcaactcaaattaaaggactaacaagtgtactaagtgttgaacaggtgcttaaggatgttggagctaagaaatgtcaatctagatcaagtcaagctgacttgatgatttatgagtccaacatcaaagctcaagcatgtcaaatgctatag

SEQ ID NO: 34770 - DNA, 348 bp, Zea mays
  Peptide Sequence Number=SeqID_76549
atggaggcgctcccggctgatgaccaaaggccctttgaagacctcgtaatgcgcgctgagaaggaggtgatgcggcaatggaacgaacaacgcaacaaggaagaggcggaactgctgcataaactctccgaacgacgcaaggaggcggcggacaagtacttgtcacacttcacggtagatcgccaccagaagatcgtccgtcaaggggagatcgatatggaatctctcctacctccacttcagggtcccgctgttgttggagctaaaaaatgtcaatctagatcaagtcaagcagacttgatgagttatgagtccaacatcaaagctcaagcatgtcaaatgctatag

SEQ ID NO: 34771 - DNA, 966 bp, Zea mays
  Peptide Sequence Number=SeqID_76550
atggaggtgagcctgttaagaaagtcgcgacaccaggcggaaggatgtggtactgtggtggtggccaagggttccatcgacaacaccactccatgttcaaaggagtcgtcacaatggtcgatcgtcgaacctttgacatcttatggccaagggctagaccttcctggtcctagacatcgaagcttgatgagcgggtacaacttaaccgatgttttcataaccgacaattctgttggggttcttcagtcaaaatttgatggctcttgccacttattccagggaacaatggagttattgatggccatagcttgtaatgtaaaggtccacaatgtgacgattgagacctcgctggacgctccactcactgatggcataattccagattcatattcaaacttatgtatcaaggacaacaccataattgtcagccatgaagttatctcgctgaaaaatagatgggacagagccgctcttgcatttgggagtgagatgtctagcggaatcttagacatccatgttgaccacctctggatccatgactcctccaagggtatttctttcagacctcaccggccatgggggttacatagaggacgtggtcatcccggagatcatatatacacgggaatagaggaatatgtttactctagaactaagaaaagtaggaagtcaccatctagaaacgacaagcacacgaacaaaattgtgctatcagaacatgacgaccacaagtatggagatctagaactaaaacctttcgtatgtgcagtgcagcatcatgtgggtttagtggacttggactgtgagatgcaggttgtcggtccagactccagagcgctctgcttccggagctggccgcttgcgctgagccctctgccggaggcaatgaggagcggccgtgcctgctccgctctcgcgtcgctcctgctgctgtggctgggcgtcgccgccgcgcagaaggcctag

SEQ ID NO: 34772 - DNA, 163 bp, Zea mays
  Peptide Sequence Number=SeqID_76551
atggacgagcaggtttggggagaggacctagcagcggcaggggcagaaggagagcgaaaggatggaggtgggcctgttaagaaagtcgcgacaccaggcggaaggatgtggtactatggtggtggccaagggttccatcgataccccccctccatgttcaaag

SEQ ID NO: 34773 - DNA, 471 bp, Zea mays
  Peptide Sequence Number=SeqID_76552
atggccggcactcgggtggcttgggcgggcagcgcagagctcgccggagctaaggacggggtcaggacagcgggggaggggttcaatcgccaacatctagatgcggcggaggagatcgccggcacgctcccgctcgccctcccgtggcttcgccccctgatcggcctgtacctccacccagtattgcgtcgtcttcgtggggacgaggcggcgctggtcagcgacaacgacggcgactacagtcctcgctccacagcctccctctctgcaccgcgtcgccgcttctcacagggttcctatgtctatgacattaatgggaacaagtatctggactctcttgcaagattatggtgcacaactttaggtcctctggaggacatgattgttggagtgacttggccgttcatcttgccagcgggttggacagtcgagtgggaccctacctcggcacaggaggagcatgaggagtga

SEQ ID NO: 34774 - DNA, 753 bp, Zea mays
  Peptide Sequence Number=SeqID_76553
atggctgaaaggcgccaacctccgcaaggtcgtgctcctctaacggcagcaagacgaaggcaacgcgggtgctccccatccgggggctcggaagggaccgggaaaggggatatttcgaaagggatccttctccacgaaggaagcaggccccgagccctcattactgatcaggggttcgaaggctggcccctcggaagggtttcgacagccgcccagagcactcgggcttcaagctcattactgatcaggggttcgaaggctggcccctcggaaggtcggcagggtcgaagtgaccgcagtcacttcgcccttccactgaccgacctgacaggaaaacagcgtcgcctgcctcgctccgactgttgtgccaccggccagggtgaggctgacaacagccaagttcagcctcaggcgcaacaggaagctccacctcgcccgaccttgggcctcggcctcgaaaggtggtctctgcctcgcccgaccccagggctcagcccccgcctcggcctcaggaggaggtctccgcctcacccgaccccagggctcggcccccgcttcggcctcagaaggtggtctctgcctcgcccgaccccagggctcggcctcaacctcggccttgggaggaatcgccgcctctcccgaccccagggctcggcccctgcctcggcatcaggaggagtctccgcctcactcgaccttgggctcggaccgaccgcgccacggaggatgcatcattaccctacccctagctag

SEQ ID NO: 34775 - DNA, 1410 bp, Zea mays
  Peptide Sequence Number=SeqID_76554
atggggagcacccgcgttgctttcgtcttgctgctgttggaggagcgcgacctcgcgggggatgatgaccaccagtttggtggtggcgagaagcaagccgggctgcggcctctgccccgccctcagcttcaaggatcttcgtcatccggactgggaaggagggcggggcgagttggggcctacctccgcgtgggccggcgacccgcttattcctccaacatttgggggaggaagacatcctccagctttgcggaggaggtgtcctccagccatgcgggggaaggcgaactgccgctgccgggccagggtgcagctgtccgtcctccccccgggtggcggtcgtgccgtgcgcgggtggctgttgtcaccggcttcgcgaagggggcgaacttcgacgacgcaggcctggtcggccacgagcgtcgtcagttgcagcgtgcctggcacgctggctcagctggctttggcgctgcctccgatgttgtttccttccgcttggtccgggcgtggctgaccgtccaccgcacgggcgactgtcgcgccgcgcgtaggtcggacatcacgacgcctccgcatagaggccggtgcccgcccgtccacgaggacttgagtggggatctgccggtgcaggctggggcgaccgccattcgtcggcgtggcgctggcgcgcagctggccgctgtcgtcggtgccgaggtggtggcagccagagaaggtttctccgccgacgaggccatcggcgtcacccgcggtcggacccccgactctttggatttgatggcttttccttgcccctcgtgtgggggcatgggcgagggcctctccacagcagcgtttgccctgaggtcatcgctgctgctgtttagccacccgaagcggaggtcgttgtcgctgctggtgcagtggtcaccggcgagccacctggagtttgttgtcccgcaggccctctggtgtggaggttgttcatacccgcgggagtggaaccggagtcccaaggtgacgagtgaggtggcttcccaggccgacgaggtgcagcagcggcagctggagcttggccaggtcattcgggagcgggaccaacctcggagtcatgttgccgagaccgtgagccgggctgaggtccccgggggacagctggctgaggctacggagcggccaaccgaggtggagaaccttccgcccatgtcgccgtccgaggccgggccagattctgccgaaggtggaaacgacgccgagggtgctgctactccctctgtcgatgacttgttcgtcggtagtagaatcgcttatccgagcgagagttacttttcacgaaaggtgatgagtgaggattctgttatcgatatagtcgtgaaggcacgaaagtcgttctggcagaaaagttttcgagcgttaggactcgttcggtag

SEQ ID NO: 34776 - DNA, 903 bp, Zea mays
  Peptide Sequence Number=SeqID_76555
atgatgctcccgacggccaccgcgacggccgtcttcctcaccgcggcgccttcctctttctccacccgccgtcggcgcagtcgcgccatcttcgcatccctttcgccgtccttctccgcctcggaggagccgctgctggtgcgcgcggcgcggggcgaggacggcctcccacgcccgcccgcgtggatgatgcggcaggcagggcggtacatggcggagtaccaggcgctggccaagcgccacccctcgttccgggagcgctccgagaacacggacctcatcgtcgagatcacgctgcagccgtggcgtgccttcgcgcccgacggcgtcatcctgttctcggacatactcacgcccctgccggccatcggggtgccgttcgatatctcggactccaaggggcccgtgatccaatcgccagtacggtccaaagagcaggtgagggagctcgtccccatcgaccttgatatgctccagttcgtcggggagtcactaaagattctgcgaaatgagattgatggaaaagctgctttgctaggatttgtgggggccccatggacaattgcaacttacattgttgaaggggggatgaccaacacgtacacaaatataaagagcatgtgccatacagctccagatgtcttgaagggtcttctctctcaccttgcacaagccatatctgactatatcatttaccaagttaactcgagggcccagtgtatacagatatttgattcatggggtggacagcttccacctcatgtgtgggagcagtggtcaaaaccatatatcaaacaggtgactcttccttacttttcttgctttcatgtattaccaacttcatggtgttgctatgtatctgcactgtcttatggtataacactgatgactcccactgaataa

SEQ ID NO: 34777 - DNA, 807 bp, Zea mays
  Peptide Sequence Number=SeqID_76556
atggtggtgagaaaggaaagggaattgggtttacccgaggaggagaaggacggcgaaagggatgcgaagatggcgcgactgcgccgacggcgggtggagaaagaggaaggcgccgcgattgatggaaaagctgctttgctaggatttgtgggggccccatggacaattgcaacttacattgttgaaggggggatgaccaacacgtacacaaatataaagagcatgtgccatacagctccagatgtcttgaagggtcttctctctcaccttgcacaagccatatctgactatatcatttaccaagttaactcgggggcccagtgtatacagatatttgattcatggggtggacagcttccacctcatgtgtgggagcagtggtcaaaaccatatatcaaacagattgtgagtaggattaagaaagagtgccctaatgtaccccttgtgttgtatataaatggaaatggaggtttacttgagcgcatgaagaacacaggagttgatgttattgggcttgactggacagtggacatgactgatggaaggaggcgccttggtaatggcattagtgtacaagggaatgtggatccagcatttttgttctcaccattaccagtactgactgatgaaattcatagggttgtgaaagcagctggtccaaaaggtcatatacttaatctgggccatggtgtacttcagaaaacacccgaagaagctgtagcacatttctttgatgtcacaaggcgcttgagatatgacacccttttccaaggttctgttgctgaagaattgcatcacgttgcttga

SEQ ID NO: 34778 - DNA, 885 bp, Zea mays
  Peptide Sequence Number=SeqID_76557
atgaattcatcacagaagaagcagagaagcaacacctatgttttaacaagaatagtgatccaggtgtcggcgtttcgagaccggggggtccccgagccgacgagtgaagtgtcgccgcgtgccccagcccagatgggtcgacgcgaggccgagcgcgaaggggggaaagcgaggtggccggagatgggcgtgagagaggtggaaatcctgcggccttcgtgttcgtcccgcgtccaggtcgggcataaggagaggatccaggtgtacaatgggtgtaacacccggattttaggggtccaaaacccgggcgctaacataaacaccaggaccgccatcacagcaaaatcctcccgagggcctccctacactgaccactcccctactgcccttgcccctttcagggcgcgtctcctacctccgcgctgggtcacggcaaacagcaagcaccgcacgacggcgaggccaccggagcaacgcgagccagcacccagcgctaatgcttctgcccacggagcagggcgggtccgtggcggcgttggacccacggcgagaaattgcggcaccgttggtccccaatcgcgcctggaatgtccccgtgcaccatcagtgtatctccccgaagcgctctggcccagatccgaggccgcaacggtaacgatgccgcgggtcgatggtgatggtgacttggacatgcacagcggcgattccaccacacagacagtgaaggcggtgagttctaatgaggcggattactcacggaggcacagggctatgggtggcggcggccggggagaggaggcaacagcggaccagggccaaaatggtggtgggatgtggcgcgtgcgccaggtgggcgagggtagtgaccaggaagcttgggcttag

SEQ ID NO: 34779 - DNA, 168 bp, Zea mays
  Peptide Sequence Number=SeqID_76558
atgccgcgggtcgatggtgatggtgacttggacatgcacagcggcgattccaccacacagacagtgaaggcgggagaggaggcaacagcggaccagggccaaaatggtggtgggatgtggcgcgtgcgccaggtgggcgagggtagtgaccaggaagcttgggcttag

SEQ ID NO: 34780 - DNA, 315 bp, Zea mays
  Peptide Sequence Number=SeqID_76559
atgtctgtccacccctttcctgctctctccctggtcggctcactcccgcttgcaaccacccacacccagttctcctccagatacagtcctgactgcaggggacgtggtgtcggcccaacatcaagggtggtagggcttatattttctcacttatatcctcaaatttcccatttgcactttgaaatagcaatgcaattacaacaacatcttgtaccccaaggaggacagggacaggcgcaccctgttctttgcatgtcgcaactgcgagcatcagtccagcaggaaatgtttgagcgggtgattggtcgcctctga

SEQ ID NO: 34781 - DNA, 745 bp, Zea mays
  Peptide Sequence Number=SeqID_76560
ggcagagccgccgccgtttcttcaatctcgcagcgccggcgcttcatcttccctcccttttttactcgcgatcggcacgcaggcggcggctgcggcgctcaggctcgggctctgcgactgcgtcagcggcttcccctccggcctctcgccagtcaccgcgcgccctcggccccggtcctctgcacaccggccggtgaccctgcgtgcttgcctttctcctcccgcctccggtggatcgtcaacggcgcccggccccggcggcagcgctgcgcgcgtctcgagggcagcgggagccagcagccgctgctccaccaaggcggaagcattttggaaccctgaactctgggctttaagaagacactactgctgcaaccatgagcaccatgaagttttgtcgcgagtgttacttgatgatggatggatgtgcagcaacaacattctgtaccccaaggaggacagggacaggcgcaccctgttctttgcatgtcgcaactgcgagcatcaggaggtctctgacaataactgtgtctatcggaacgaggtgcaccatactgctggggagcgaacacaggtcttgcaggatgtagcttctgatccaactcttcccagaaccaagactgtccgctgcaatctctgtgggcatggagaggctgttttcttccaggccgcagcaagaggggaggaggggatgaccctgttctttgtgtgctgcagccctgattgtggtcatcggtggagggaatga

SEQ ID NO: 34782 - DNA, 345 bp, Zea mays
  Peptide Sequence Number=SeqID_76561
atggctcgactgccatataaaagtgctagcttgtttattaactttgaagcgtcacctcgccttatgttttatcccctaaaatataaacaggaggaggtctctgacaataactgtgtctatcggaacgaggtgcaccacactgctggggagcgaacccaggtcttgcaggatgtagcttctgatccaactcttcccagaaccaagattgtccgctgcaatctctgtgggcatggagaggctgttttcttccagcaaagtgatatttgtatttcagtagttgcaattgatggccgcagcaagaggggaggaggggatgaccctgttctttgtgtgctgcagccctga

SEQ ID NO: 34783 - DNA, 960 bp, Zea mays
  Peptide Sequence Number=SeqID_76562
atgacacctggtatcagctccaggttatcctcaccaccaccagccgcccatccctcaccaccaccagccgccgcaacgccctcccacccgccctctccaactccagatgcattcactcggctcaaagagagttttggccgcttcgcagagcagtgggatcagtttgttgtgatgttccaccgctacaaggagaagacagagaaggaactccaagcagcggtgcggcttcagacggcagcgcgagggttcctggcacgccgccaggtacagtcccttcgtggggagaagcaccttgctgtggcctccagggccaccccatggccgtcatcacatgagcaggctgtggtgcgcctgcaagccgcagtgcgcggcttccttgttaggcgggcggtgcggaagttgcacttgctgatcagctcatcgctgcaccaactcgcagcctgcgcgcccaaccaccaggtatcgtctatactttttgaaccccctgcagaagtcgagatctgggtatgcagcccccctgcacggccaaagagggtcgtctccttcattcgagcacctgccttggtgctggacagacccaacataagaacgggttggttcctccacctttcatccaacgtgaaggccgtagttcagctctttccttgggatccaggaggacaggaggacatagctgcagttcaaatttataatttagttccacaattattttgtattttcgtcttaaataataaagcgcctagggctgctaccctagaaccaagcctgcggcagaggggtataacctcgccggagaagacagctattctcatggaccgaaggtccatgacacaatcattcaagctctatttgcgagagctgattcaatgtgctttgtgccccaaacaaataaaaggaggtatcaagagggtgaaacaacatctagctggtgactatggagacattgtcaaagtgtcctaa

SEQ ID NO: 34784 - DNA, 861 bp, Zea mays
  Peptide Sequence Number=SeqID_76563
atggcgttgtacgtgcggctgctgagctcgtggaccagcaccaaaaacgacgctctcgcggtcctcttgtgcctatctgccgagtgggagaactcggggatctttgaggctggcgctacggactcggtgctatctgcggtcggcgaggcggaggccgtcgcagcggtgctcgcatcactgacgaagcatggcgctgcagagacagtcggcaggctggacggtggtgtggtgcagctggtgatcaagatggtgtgcaacacggagcagtcgtgggagtgtgcggcggccattctgagctgctgtgccggcggcgccatgacggcatcacaggttatggtagtcccggtgcagctaggcactggcacggaccacagcaccaaggcagttgctcgaatgaaggagacgaccctctttggccgtgcagggggactgcatacccagatctcgacttctgcagggggttcaaaaagtatacacgagacctggtggttgggcgcgcaagctgcgagttggtgcagcgatgagctgatcagcaagtgtagcttccgcaccgcccgcctaacaaggaagccgcgcactgcggcttgcaggcgcaccacggcctgctcatgtgatgacggccatggggtggccctggaggccacagcaagagttggagagggcgggtgggaggtcgttgcggcggcatatggcgcggcggccggtggtggtgagggatgggcggctggtggtggtgaggataacctggagctgataccaggtgtcatggaccttcggtccatggggatagctgtcttctccggcgaggttatacccctctgccgcaggcttggttctagggtagcagccctaggcgcttga

SEQ ID NO: 34785 - DNA, 141 bp, Zea mays
  Peptide Sequence Number=SeqID_76564
atggagggaaagccatcacgggaaaggaagtcagaactgaaacgagagtctcctccactggcgggggtgggtgaattcatctacggaagggaatcaaagctgtggcagaaccacccgaattattccagcttaagtgcctaa

SEQ ID NO: 34786 - DNA, 141 bp, Zea mays
  Peptide Sequence Number=SeqID_76565
atggaaggaaagccatcacgagaaaggaagtcagaactgaaacgagagtctcctccactggcgggggtgggtgaattcatctgcggaagggaatcaaagctgtggcagaaccacccgaattattccagcttaagtgcctaa

SEQ ID NO: 34787 - DNA, 141 bp, Zea mays
  Peptide Sequence Number=SeqID_76566
atggaaggaaagccatcacgagaaaggaagtcagaactgaaacgagagtctcctccactggcgggggtgggtgaattcatctgtggaagggaatcaaagctgtggcagaaccgcccgaattattccagcttaagtgcctaa

SEQ ID NO: 34788 - DNA, 141 bp, Zea mays
  Peptide Sequence Number=SeqID_76567
atggaaggaaagacatcgcgagaaaggaagtcagaactgaaacgagagtctcctccactggcgggggtgggtgaattcatctgcggaagggaatcaaagctgtggcagaaccacccgaattattccagcttaagtgcctaa

SEQ ID NO: 34789 - DNA, 141 bp, Zea mays
  Peptide Sequence Number=SeqID_76568
atggaaggaaagtcatcgcgagaaaggaagtcagaactgaaacgagagtctcctccactggcgggggtgggtgaattcatctgcggaaaggaatcaaagctgtggcggaaccgcccgaattattccagcttaagtgcctaa

SEQ ID NO: 34790 - DNA, 141 bp, Zea mays
  Peptide Sequence Number=SeqID_76569
atggaaggaaagccatcgcgagaaaggaagtcagaactgaaacgagagtctcctccactggcgggggtgggtgaattcatctgcggaagggaatcaaagctgtggcagaaccacccgaattattccagcttaagtgcctaa

SEQ ID NO: 34791 - DNA, 201 bp, Zea mays
  Peptide Sequence Number=SeqID_76570
atgtctagaggtagaggagtagactcctcacaccgggtactccttaggatgattggttgctggtgtgacttggccttcgtccctgccaccgggatagatggtcgagtgggttactgcttccgcaggagaggaccaggaggagtagcgtggccaggtgttgggggccttcggcttccgaaggtcctcaaaaacatgatttaa

SEQ ID NO: 34792 - DNA, 213 bp, Zea mays
  Peptide Sequence Number=SeqID_76571
atgccgagaaatatggtaaatcgtagactttacccctcacgcgacctgagacgtggtctcccatttcggttatggtgggtacaagtgcggtcactgcacgacggcagtcgggctagtgcttttggcaaccaaaccctacagccaaacaactgcatgtctagaggtagaggagtagactcctcacaccgggtacttcttaggttgattggttga

SEQ ID NO: 34793 - DNA, 1221 bp, Zea mays
  Peptide Sequence Number=SeqID_76572
atgggacaagataagagggaggtcaagaagcctaagaagcccaaggtgaagaagcccaaggtgaagcaacgattctcgtggatgccgcacatgttctgcaagacgctcatggcctccgacaccagcatgcacgtcggcttctctgtgctgcgccgctccgccgaggactgcttcccgcctctggtacgcttgcgttggcttggaaagcttccatcttttcggtgcccgggtgctgctctcaaggactacagccagcagcgatcgtcgcaggagcttgtggccaaggatttgcacggaaccgagtggaggttccgccacatttatcgagccttgtgcgctatgctcagcatttctcatgtcattgggcagccccacagacaccttttaaccactggatggagtgcctttgtcaacaagaagcttgtctcaagggacgccgtactatttttgaggttcctcgtaattttcaggggtgataatggggagctaagacttggagtgcgccgtgcagctcagcttaaaaatggatctgcttttccagctctttataaccagtgctcaaatcttggttcactacctaatgttgcacatgctgtggccaccaaaagtgtgttccacatctactacaaccccaggtggctcctccaatataggattagtccatttttctacagatggggtgatagcatgcacattctagcatacacatgcccttggcctgccgatcatccgaaggctaatgaatattaccctgacccaagattagtagcatatgttgtaccctatgcacctatcctatcgtgcttgttacttgatttaatttggctccttgttaacagtacggatgctgcaaaaaattccctgaggagaaaggttgaaatcttaaaattgaagcctcattggtccaaagcttacttctatttgtgggatgaggtaattgaactgccagtctgccactttgctggtgtggaggcggcggcggtagaggtttcaactgtcccagaggtagcggcaacgggagagctttcaacggttctggaggcggaggcagcgggagagctttctacggtgtcgtacgaggcggcgacggagatgctgtgcagtcgtcggcatctcctgaactggatctacagcctcacgttcaccgcgacggctagaggatgcgggaggttcctccaatggcagatgggcggcgctgtagatcaggtcctcgatgtctga

SEQ ID NO: 34794 - DNA, 1389 bp, Zea mays
  Peptide Sequence Number=SeqID_76573
atggcactgaaggatgccgatcatccgaaggctaatgaatattactctgacccaagattagcagcatatgctgtaccctatgcacctatcctatcgtgcttgttactttatttaatttggctccttgttaacagtacggatgctgcaaaaaattccctgaggagagaggttgaaatcttaaaatcgaagcctcattggtccaaagcttacttctatttgtgggatgagccattaaatgtggaacagtatgacatgatatgcaacatctctaatgagctacggtcatatgcacctgatgtgcgaattttgacaacttactattgtggagagctttgtgtcatttcattaagaaagaaaacaggacttacaaccaaagtagaaaacaaaggcgccacctgtgctgatctggaacatcctgttggagttccaggttgtccactaagctctagagctgcaggtccaagtggctctgaactggctccctctacatttgaagcttttgcaaaagttccaaatgttctgcgtccgcacacgcaaatcttttgcacaagtgaatgggttcttggcacaagagaagacctagtgaaggatattgttgctgaattacggcctgatcttggtgaggagtggtggacatatgtttgtatgggtccttctgatcctcaaccaaactggcaccttgggatgcgtggaacccagcaccgggcagtgatgtggcgagtgtggaaggaaggtgggacaggatttctttattggggttccaactgctatgagaaggctatgatcccaagtgctgagatctgtttccgacgcggccttcctcctggcgacggtgtcctgttttaccctggtgaagtgttttcttcgtcacatgaaccagttgcttccacccggctagagcgcattctcagtggcatgcaggacatcgaatacctgaagctttattcttcacggtatgggagggaggaaggcctggcccttatagagaagactggcatgtaccttggaccggatcgatatacgctggatcatggaccggttacaccctccaaaggcgcattcgtttctaccgtgtgccgtgacgaggattcccgtctcagcaacggacgctgccgccgcgatgccctgtctctttcgagggagacaggttctctacatcttcttgcgcctctactgctgacgggagggaagggagcggatctggtgatccgtggtaatgtagttctcaacacgttatcagcacgctctaccttgatgttgctgcgagatcggatctgcatcacctcttcgtcaagccggcaggtctctggcctagccgaactatcctatgcgatagccttcgatttcctttctacgcagtcacacgaaaaagttgctgagtcaaagtga

SEQ ID NO: 34795 - DNA, 432 bp, Zea mays
  Peptide Sequence Number=SeqID_76574
atggcccggcagcgcatggtgcttgaggtgatccacctcgaccacgccaacgtgtccaagatggagttgaaggagaggctttccaagatgtacaaggtgaaggaccgcaacaccatatttgtcttcaagttccgtaccggttccattagctctggcctcatctacgacaacctcgactccaagaagttcgagcccaaatattgcctcatctggtttcttctagctaaatatgttaagcacgctgttgacgccttttcgaaggcgccaattactcaagagaaccagcggcggtgctctctggtcaggcgcggacggtccgcggcccagggccggacggtccgcgacctggtgcgaggcggcggtgctctctggtcaggcgcggatggtccgcggcacagggccggacggtccgcgacctggtgcaggagctag

SEQ ID NO: 34796 - DNA, 669 bp, Zea mays
  Peptide Sequence Number=SeqID_76575
atgtccaccaacgccgacgtccgtgacggcgcgcctggggcggcggtggacgcggccttcgccaggcgtgcgctccaggccaaggccctcctcggtgatacaagacattgttctgccactgattatagtaagcctatactagattggcttgagaattccagtgatgaggttgctgaaacaatggccaagaatggtaggctactattgaaatgcccagtggttcagtctgatgttcaggctatgaaagaaaaaaaaggagagttaagtaaaggaatgccactcagatttattttagggaacaacaagatgatcctaggctttgctgaaggcttcccaacaatgttgaaggatgaaattgctatggtgcttgaggtgatccacctcgaccacgccaacgtgtccaagatggagttgaaggagaggctcgccaagatgtacaaggtgaaggaccgcaacaccatatttgtcttcaagttccgtgccggttccactggctctggcctcatctacgacaacctcgactccaagaagttcgagcccaaatattgcctcatctggattcttcctcaagggccattcactgaattttcaccattttgtctgcctgtgcagcatgcttacactttgactgatgctcatgctgactttgttctcatggatggcttttag

SEQ ID NO: 34797 - DNA, 589 bp, Zea mays
  Peptide Sequence Number=SeqID_76576
gttcttttttgctaacttaaggcaaagcctcccattagagtcccgccagcgccgaactcttcgcatcgacagtggccacattagagaagaagccatacccacctgccacggtagcggaggaggtgatggcatgaggttgactggggctttggacccgtcccccattccacccgtcgtcgccgacatacttgtccaaggtcctctgcagttagtcttggcatggcaatggcctcgtagctcgtggctctctaataggaataattttactcaaaatgaagctataccgtcatgctatcttagtggtgggaacattgatggtagaaatgcatttggtcttagtgccctccaccttgcaacatggagaaatcatctacccattgtgaggcgactcttagatgctggcgctgatccagatgcaagggatggagaatctggctggagtagcctgcatagagcacttcattttggtcacctatgtattgctggtgttcttttacagtttggtgcttccctcgctttggaggacactaagggtcgtacacctgtttggccgaagccttataggaaaccagaccacctgtgcagctag

SEQ ID NO: 34798 - DNA, 1500 bp, Zea mays
  Peptide Sequence Number=SeqID_76577
atggagacttccatatctccaccaggcacatcaaagcagtcagctgtccgcaaaccttctcctggaagctctcttaaggatctgtgccttgtttccaaacaaggtggtgggaacattgatggtagaaatgcatttggtcttagtgccctccaccttgcaacatggagaaatcatctacccattgtgaggcgactcctagatgctggcgctgatccagatgcaagggatggagaatctggctggagtagcctgcatagagcacttcattttggtcacctatgtattgctggtgttcttttacagtttggcgcttccctcgctttggaggacactaagggtcgtacacctgttgaccttatctcctgtccagtatcacaggccaatggagattttccagatgcagttgcaacggaagtcttcagttggggaagtgggacaaattatcagcttggaactggcaacgtccacatacaaaaactaccatgcaaagtagaagctttgcatggatcatatatcaaaacagttgctgcatcaaagtttcacagtgtagcagttagttctaatggtgaactatacacatggggatttggtcgaggtggtcgtcttggtcatccagatattcatagtggacagacaactgctgtgattacccctcacctggtgacagtaggattaggccgtaaacgagttagtgttgtggctgcagccaaacatcatactgtgattgctacagagctggggaattgtttacctggggatcaaatagagggtcagcttggttacccttctgttcatacccaaccaacaccaaggcgtgttggttcgctcaagcaaaggataatttcagtagctgctgcaaacaagcactccgctgcagttgctgatactggcgaagtattaacctgtggttgcaataaggagggccaactaggatatagcacttccaactcagcatcaaactgtatcccaagaatggtggagtactcgaaaggaaaagtacttagaggtgtttctgcagcaaagtatcatacaatagtgttaggagctgatggagaggtgttcacttggggccatcgccttgtcaccccacggcgtgtcgtagtagctcgatgccttatgaagggtggaaatacaaatctgaagtttcatcgtatggaacgacttcaagtgatttcagtggctgctggaacaacgcacagtactgctttaacagctgatggtgctcttttctactgggtttcatcatatcctgatataaaatgccagcagttgtttgggcaaaggcaaagcgcaaggcaaataaacccagttgtttctcatccaaataccagtggagacaaagatgtgacttgggataacaaatctcagcatgaatcttcagaattacctcctagagctgaatttattgtcaacaaacaaatgacagtagaagggtacaaggcgcatcctggacatgttaattacatcctaggaagagcaaaaagaatatgtgattgttga

SEQ ID NO: 34799 - DNA, 1113 bp, Zea mays
  Peptide Sequence Number=SeqID_76578
atggaccttcggtccatggggatagctgtcttctccggcgaggttatacccctctgccgcaggcttggttctagggctgcttgttggtgcagcgatgagctgatcagcaagtgcagcttccgcaccgcccgcctaacaaggaagccacacactgcggcttgcaggcgcaccacgacctgctcatgtgatgacggccatggggtggccctggaggccacagcaaggtgcttctccccacgaagggactcggtggaacatcacaacgaactgatcccacttctctgtgagacgaccaaaactctcttcgagccgagtgaatgcatctggagttggagaggggcgggtgtcatggaccttcggtccatggggatagctgtcttctccggcgaggttatacccctctgccgcaggcttggttctagggcaatgatgttccttgatcgacaaaaacaatcaaagaatcctaaatatattctggcgattagtatatttgctcaaaggcggccacctggcatatacaagagggactatattgaagcattgtattcattttaccatgaggttcctgacaatatgatgatagcatgccctccaacaccagaatggaagagaccagatgatctcgatttaaatggcgaagctaagcaggatgacgatgatgacaatggtgatcctggaccactgcataatgaatcagaggataaagtcatcaccaatgacgatgtgttaggggatgaagtgccatatgaccagcaagaagctttgcgtgtcctatgttatcggttgcttgaaatgcctcttggctgggatgatccatatgtaactcgtactcatgaaggtcttctaaagtggaaataccctgagatgaattctgttgactttctgtttgagatccatcttctgtcgctgggaggattgtcgagtgctcttggaacaaggaagaacagtgttgggcatgtgatgaggagtatcacagataacattaccgaggagaagcttctcgaagagactgatgagataacgctcctgccgataatagcgtttaacaaggcgggtggtgttctatgtaggcgttgccatctctcggtgctgcctcgtgctagaataatgtag

SEQ ID NO: 34800 - DNA, 906 bp, Zea mays
  Peptide Sequence Number=SeqID_76579
atggaccgaaggtccatgacacctggtatcagctccaggttatcctcaccaccaccagccgcccatccctcaccaccaccagccgccgcgccatttgccgccgcaacgccctcccacccgccctctccaactctagatgcattcactcggctcgaagagaagtgggatcaattcgttgtgatgttccaccgctacaaggagaagacagagaaggaactccaagcagcggtgcggcttcaggcggcagcgcgagggttcctggcacgccgccaggtacagtcccttcgtggggagaagcaccttgctgtggcctccagggccaccccatggccgtcatcacatgagcaggccgtggtgcgcctgcaagccgcagtgcgcggcttccttgttaggcgggcggtgcggaagctgcacttgctgatcagctcatcgctgcaccaactcgcagcctgcgcgcccaaccaccaggtctcgtctatactttttgaatcccctgcagaagtcaagatctgggtatgcaatccccctgcacggccaaagagggtcgtctccttcattcgggcaactgccttggtgctggacagacccaacataagaacgggccggttcctccttcacctttcatccaacgtgaagtccgcagttcagctctttccttgggatccaggaggacaggaggacatagctacagttcaaatttatattttagttccacaattattttgtattttcgtcttaaataataaaggtaagccgagatgtaaaaggcttaaccttaagtcgtgtcaggtaagtctatggcagctcgaggacgagctggtcctcaagggagggggagatgtcatgggcatcatagggagcgagaggcaacagccaggctgggataaggctagagaacaagattga

SEQ ID NO: 34801 - DNA, 549 bp, Zea mays
  Peptide Sequence Number=SeqID_76580
atgcaggcggcatgcaaccgcaccaagggggcgcaccctttcgacttcgacgcgtccagcatggaggcccaggctcacacgtcatgtaaccggcgcgccggttgctacgtgcaagaaactgcaccaccactcgcgccactaccgtgcctcctcgactgcggaaccagtaccgcgactcgaggcaaccctgcgcatgacccaacagtgccaaccaggcacatcggtcacgggtcagtcagccgcgggagaaggcgcgacggtcgatacggccagaaatgggccggcagtaatggcggtggcaggcgggcggaagcagcggacaggcggcacctttggcggcagaagcagacgacgcttcacttccgccataatgaccgcatcaaaaaagggaccgggaaaggggataccccgaaagggattcttcttcgcgaaggaagcgggccccgagcccccctactgatcagaggttcgaaggctggcccctcggaagggttcagcagccgcctcagagcactcgggctccgcgcccactactggtcagaggtttga

SEQ ID NO: 34802 - DNA, 489 bp, Zea mays
  Peptide Sequence Number=SeqID_76581
atggcccaacagtgccaaccaggcgcatcggccacgggtcagtccgccgcgggagaaggcgcgacggtcgatatggccaaaaggaccgggaaaggggatactccgaaagggatccttctccgtgaaggaagcgggcccctagccctcctactgatcagaggttcgaaggctggcccctcggaagggttcgacagccgcctcagagcactcgggctccacgcccactactggttggcccccgaagggttcgacagccgccttagagcacgcagagcgagggatgactctgggtacgttcgatacatggccgaggctcgggctatgctcccgagaggctcgggggctactctcgcaaacccggctccggccaaaccgttgacagcgtcaacataccagcccgagaacttggaacctgactatgcactcgggcaacgactagttcgcatgagggaacaaccagaccagccaaggcatcacgaaacgcgctaa

SEQ ID NO: 34803 - DNA, 1314 bp, Zea mays
  Peptide Sequence Number=SeqID_76582
atgatcactggagctgctcaaatggatggtggtattcttgtcgtgtcagctcctgatggcccgatgccacaaactaaggagcatattcttcttgcccgtcaggttggtgtaccttcccttgtgtgcttcttaaacaaagttgatgctgttgatgatccagagcttctggaacttgtagagatggagcttcgggagctcctcagtttctacaagttccccggtgatgagattccgatcatccgtgggtctgcgttgtctgctttgcaagggaacaatgatgagataggaaagaatgcaattttgaaattaatggacgcagttgatgagtacatccctgatcctgtgaggcagcttgataagcctttcttgatgccgatagaagatgtgttttctattcagctgtcacacaagcgctcggcggcggccagggacttagacagtggcggccccattaaacaggggtggcactggcaggcaagtggacagtggacatctgcaactccatcaaaggtatcaatgtctggtgttggcgtgacttttggcagaagcacctgtgccggcattgaggacttgaaacgccttgccgcccacttgctgctggggcccgctgctgtcgttgtcggtggcgactggggccttggtttgacagatgtagatggcccatggtgcttggtgctggtggctgcagggagggccgtaagcagaatagaccagggtcgtggaactgttgttactgggcgtgttgaacagggaacaatcaaaactggtgaagatgttgagatcttgggtttggcacagactggtcccttgaagactacagttactggtgttgagatgttcaaaaagatactggaccatggagaggctggtgacaacgttggccttcttctccgtggtcttaagcgtggtgatgttgagcgtggccaggtggtgtgcaaacctggtagtctgaagacatgcaaaaagttcgaggcggaaatatatgtcctgacaaaggatgaaggtggccggcacactgcctttgtcacaaattacagcccccaattctacttcaggacagctgatgtcactggaagggttgagctgcttggggagatgaagatggttttgcccggtgacaatgtaactgcgaattttgagttgatatcacctgttcctcttgaacctggtaacgattacattctcaatttctttcgacagtatagaactatagaccagggcaaagatttgcgattagggaaggaggaagaacggtcggtgctggagtcgtctccaaagttcttagctgatcagtttccactttcttctccgtag

SEQ ID NO: 34804 - DNA, 750 bp, Zea mays
  Peptide Sequence Number=SeqID_76583
atggcttccgccgcggtgctccggaacgccggctcccggcgcctcttctcctaccctactctccgcgccgctgcgatatatgtaccttctgcgctacccgatgcgcccgcggcggcggcagcgccggcccagccgccaccgacggccgggaccctctgggcgaggtctatggccaccttcacgcgcacgaagccccatgtgaacgtcggcaccattgggcacgtcgatcacggcaaaaccactctcactgctgccattaccaaggctcacgtcgagtatgagacggctaaaaggcattatgctcacgttgattgtccaggtcacgcagattatgtcaagaacatgatcactggagctgctcaaatggatggtggtattcttgtcgtgtcagctcctgatggcccgatgccacaaactaaggagcatattcttcttgcccgtcaggttggtgtaccttcccttgtgtgcttcttaaacaaagttgatgctgttgatgatccagagcttctggaacttgtagagatggagcttcgggagctcctcagtttctacaagttccccggtgatgagattccgatcatccgtgggtctgcgttgtctgctttgcaagggaacaatgatgagataggaaagaatgcaattttgaaattaatggacgcagttgatgagtacatccctgatcctgtgaggcagcttgataagcctttcttgatgccgatagaagatgtgttttctattcagggatactag

SEQ ID NO: 34805 - DNA, 774 bp, Zea mays
  Peptide Sequence Number=SeqID_76584
atggatgtggacaccacggcaagggtggacgagttcttggttaccacctttgtaggcccattggtggaggaagacttgacgagagcgatacaagaacagatacagcagagagttcgttcaccaactctttggttaattcgattcttcatggcgcctactggagacgcagcggccgcacaggcgccggcaccgaagaagcagtcggcgaagtcgaggaggatctcgattgaggggctgcagcgcgccatgtccgacctggccctggagctggccagggacagcaagaagcaggccgccacgcccgccgacgccgacgccgacgccgccaagctgcagcagctgccggcgatcgcggagcagcagcagcagcagcagcagacggctgaggaggaggaggaggagctggcgcggtgcgagtgctgcggcatgcaggaggtgtgcacgccccagtacgtgcgccgcgtccgcgaccgctactgcgggcgctgggtgtgcgggctgtgcgcggcggccgtcagcgccgaggccgagggcggccgcgcgacgacggaggccgcgctcgcggcgcacatggccgtgtgcgggcggttcaaccgcgtggggcgcgccaaccccgtgctcctgcagacggaggccatgcggcagatcctcaggaagcggggcgccaggtgcgacagcccccgggtccgggaccgcggcgcccgccccgccgccgccgccgcgctcgccaggagctccagctgcatccccgccataaccaaggacttcaactga

SEQ ID NO: 34806 - DNA, 201 bp, Zea mays
  Peptide Sequence Number=SeqID_76585
atgcgtgccctcttccctctggttctccctgattctcacagcgcgctcgtggtcattggcaggaagactcatgtggtcggaagagggctgatgagcacgatcaccatggatgtggacaccgcggcaagggtggacgagttcttggttaccacctttgtaggcccattggtggaggaagacttgacgagaggtgtgtggtga

SEQ ID NO: 34807 - DNA, 351 bp, Zea mays
  Peptide Sequence Number=SeqID_76586
atgggtcaaggagcttcaccagaggtcaaggaagatgtgagcgcgaggaatttgagaatggctcaccggattgctcgatctacacgcggccgcgggcgaccgaagtccgacgaaggtgagcttgggtctccggtgaggttctgccgggttcaagagcttggaaagctttatgggccactggcgaagctaaccgagggacaagcgcggcttggccgcggctggagcgagctggccgaggcttgggcagtgatggcaggtggaggaaagctcgtcggagctaagggaggtttcgctgactggatcaagagatatggaggggtgaagttgggtttgtctcattgccgaacatag

SEQ ID NO: 34808 - DNA, 189 bp, Zea mays
  Peptide Sequence Number=SeqID_76587
atggcggaggggcttgccggcggcgaggttgcttcggtgaggggtcggaggcttgcaggtttcgctgactggatcaagagatatggaggggtgaagttgggtttgtctcactgccgagcactgggagaagatcccgggtttgacgtgtccagggcacgcgtcccaatgccatcttctggtatgaggtag

SEQ ID NO: 34809 - DNA, 969 bp, Zea mays
  Peptide Sequence Number=SeqID_76588
atggcgatgatgagccggacgcgggatctgctgatggaggggttcgaggggctggtgcgggatgggtcgttcaagtggggcctcccccgccgcggggacacggccatggacgacggcggcgacgacgacggctccctctccgtgcagcgctcctccatcgctggcctttccttcaaggccaacgccgtcgtcgcccgctgctcccgaatccttggcgtttctaccaatgatctacaaaataactttgataagcaagcatctgattccataaagcagccaaaaagctacgcaagaaattttttggagtactgctgcttcctggcacttgctcagatatcacaagtgacagggtatcttgctgacaagagctttcgccgcttgtcttttgacatgatgttagcttgggaggttccctattcttcaagccagctcactgttaaggctgaggtagatagcacagttagctcagaagcttttacaagaatagcacctgccatcccaaccattgctgatgtagtaacttgtgcaaatctctttgatgtactttcatgttcgagcggaggccgtctttcattttctgtatatgagaagtacctttcagaattggacaggaagcacttagcatatgtgtttatctcatatagagcggttaaaaagatgaagacacaatctgagtcatcacttctatcaaactttcggtctcagagaggagaaaggattctggaagttgatggtacattgacaacacaaccagtacttgaacatgtgggtatttcaacgtggccaggaagattaatactcacagatcatgccctttactttgaagctcttcgggttgttacctatgataagcccaaagtttatgagcttgcagaagatttaaagcaggttgttaaacctgagctgactggtccatgggggtcacgtctctttgacaaagccgttatgtacaaatcaacaaccttgtaa

SEQ ID NO: 34810 - DNA, 852 bp, Zea mays
  Peptide Sequence Number=SeqID_76589
atgaggtggagatggatgccgtggggatgcaatcgaggcgagggatttgcgcgggaggacgccgtctggcgtatctccgtcgcttctccgccgtcgcggaattggagtgctctcggggtggacatcggcgccgcctgtcgacgacgcgggccacggcacgcacacggccagcaccgcggcgggcaacttcgtgcagaatgccggcgtgcggggcaacgcgcacggcagggcgtccgggatggcgccgcacgtgcacctggccatctacacggtgtggacgtgctctccttctccatcggcgccaccgacgacgcgcagttcaactacgacctcatcgccatcgccacgttcaaggccatggagcacggcatcttcgtcagcgccgcagccggcaacgacggccccgccgcggggtccatcaccaacggcgcgccgtggatgctcacggtcgcggcgggcaccacagaccgcgcgatacgcaccaccgtgaggctcggcaacgggcaggagttccacggccaacccttgatggcgatgatgagccggacgcgggatctgctgatggaggggttcgaggggctggtgcgggatgggtcgttcaagtggggcctcccctgccgcggggacacggccatggacgacggcggcggcgacgacgactccctctccgtgcagcgctcctccatcgctggcctttccttcaaggccaacgccgtcgtcgcccgctgctcccgcgcgctggtggaggccgaggtgaggggcaaggtggtgctgtgcgagagccgctccatcagcgagcacgtcgagcaggggcagagctgtccgcgacggagagaagaagacggcgtctga

SEQ ID NO: 34811 - DNA, 3408 bp, Zea mays
  Peptide Sequence Number=SeqID_76590
atgagcagccatgatgccaaactggtgcaaaacttggtcctcaatcttgcatcctcagtggaaagtcgtgcagtcaatattaggacctttttagaagaggctttccgtcatttgggtgacgagcattaccttctgaatgctctacttgctattcgaaaagaggtagacctgatggagcaggatgcaattgagagcaaagcaaggtctgacccaaagaaggataggatggaggaacaaattaaccttgctcaggatgccaagcccgtgcctagacaaataactttcaccccccatcctcaccagaattgtatgacgccagtgacaatgactcctacgactccaacaggtccactaggtatagcatttggaacctgtaataatgaatgcctgacaacaactcaaacaatccttatcgaccacctgctgccagccccaatacagggacctaatgacccatctggatatacctttcgtacaccatggaacccatattttggtatgacaactcctgggggtcctcctacacaaacatgtttcggtcaaccacaattggtaccacccattccatgtccaccggtgcccacccatgttcccaaccagactgaccctataccctttgaatccgaagcagaacacagcgtccaggaagttaacagccctagcaagccgtcagatacaccagggacatttaggaggacgaaggaacagaacttcaaacctgatgaagacctgttgctttgcaaaacatggttagagattagtagtgacccagtgattagcacagggcagaggaaggagggtttgtgggctagaatagagaaaaggtacaatgaacttagagctgagtttccattgagacttaatagggctctcagcagcaggtgggaaaaaataagagctgaaacagggaaatttgccggattctacgcaagagtcctcagcgaaaaccaaagtggccttacagataacgacaagacttcgaaagctgcaactttgtatgcaacatcacagaaaaagccattccatttcatgcactgctggactcgcctgaaaaacgaacccaaatgggatgccatggttcatggcagcccctggagaggcaatgcagggaccgagccagtacgtagtcttacacctacaggttctgttaatgaagtacacactgatgaaggtggttcaaaaggcaagagaccattaggacgtgactcaatgaaagcatcaaggaagaagtcaatgtccagttcatcccaatctactgactacctgtcaagaatccatgacattcagatagcaagattgaagcaaagtgaagaaaaatcaaacctgaaacaacagaacattgagttcatgaaggaagttgaactgaagaagttggaggttcagtccaaggaaatagaagtgcaggaaaaaaaattgatgatggaagataggaagcaaaaggttgaagagctcaacaaactttttgccatggatatggatgctttaccagaagagttgagagctccactcattgcggacctcagcagtattgttgcacggttcaggcggcccagaggggccaatgaagtcgacattagctgcaccatctccttcgtcctcgacattcatgttgtgcataataatgcaagcagtcatcatctctgcgagcctccgcagatcaccgcactccccccgcacggcaccagtgacgcgaaagcaaaacgccaaacaggctcctctgaaactcccagagccggtagaggcacgccactccgcagtgtcagtcactgcccccccatcacgccgcccgccctttctcggccgttgccgcgagctcgctccgacccaccgccgatggcgacggcgatgggcgcgatggccgccacctgcatggcctcgatcccggccgccgctacgttccccggtgatctcggcgtcggacgacgccgagcggttgtaccagggtggcgcgccggtgggagacggctgcgtgcgacgccgcctgcccggaggccgttcctgttctcgccgaagggcgtttcggactcgcggagctcgcaaacgtgccttgatccggacgccagcacgagtgttcttgggatcatccttggagggggtgctgggacaaggctgtatccactgacgaagaagagggcgaaaccagcagtgccgttgggcgccaactacaggctcatagatatccctgtcagcaactgtctcaacagtaacgtctccaagatatatgtgctaacacagttcaactctgcttcgctcaaccgccacctctcgagggcctatggaaacaacattgccgggtacaagaatgagggattcgttgaggtccttgcagcacaacagagtccagagaatcccaactggtttcagggtactgcagatgccgtgcgtcaatatatgtggctatttgaggagcataatatcatggagttccttattctggctggagatcatctgtaccgtatggattaccaaaagttcattcaagctcatagagaaacagatgctgatataacagttgcagccctgccaatggatgaacaacgtgcaactgcatttggtcttatgaaaattgatgatgaagggaggatagttgagttcgcagaaaaaccaaaaggagagaagctgagatcaatgatggtagacaccactatattgggccttgatcctgaaagggccaaagaactgccttatattgctagtatgggaatctatgtttttagcaaagatgtgatgcttcggcttctcagagaaaattttcctgcagcaaatgactttggaagtgaggttattcctggcgcaacagaaattggattaaggactgagaatgataagaatgtcctttctgagactggtggcattcccattggtattgggaaaaattcacatatcagaaaagcaatcattgacaaaaatgctcgcattggagaaaatgtgaaggtctctgttttcctcccagccgccagggggctctcccaccctacagccgccgccagggggtttcccctccctgcagccgccgctgaccagcccccaacctcctcccgccgccgcccccccacccctcagccgccggcccctccccccctcctcccacctcctccccttttccccatcgccggatccgcgccgcccccggcactgctgcccccatggacgccggccgcctctcctacacggccgccgccgctgcgccggcccctggcgcgggccccgccgccgctgtcgctcccggcacgggccgcctcccctacacggccgccgccgctgcgccggcccctggcgcgggccccgccgccactgtcgctcccggcacggacccggccgccgctgctgctcctggcgcgagctaggccgccgccacgcctggagcgggcctggccgcaggagccgcccgcctggccgcccccctga

SEQ ID NO: 34812 - DNA, 591 bp, Zea mays
  Peptide Sequence Number=SeqID_76591
atggcgtgggaggggtggatgtgggccgcgcgtggcccctgcggggtcgacagggccacacgtggcgcgggaagagacacgagcagaggcgtcgaggccggttatcttgacccagagtattttctcacccataagctcacggacaagagcgacgtgtacagcctgggcgttgtgttcttggagctgctgactgggatgcagccaatctctcatggaaggaatattgtcagagaggttttggcagccaatcagtcagggatgatattctcggtggtggataaccggatgggctcgtaccctgctgagtgcgtggagaagtttgctgcgctggcgctgcggtgttgccaggacgagacggactcgaggccatccatggtggaggtggttcgggagctggacatgatatggcgcatgacgccggggacggagaacattgcatcgtcagagtctggcgtcatggggatgggctccaacagcaccagcacacccacagcatcggggtctcggatggatgatcactacatttcgtccatggaggtctccggtagcaacctgctcagtggcgttatgcccagcatcaatccgcgctga

SEQ ID NO: 34813 - DNA, 1482 bp, Zea mays
  Peptide Sequence Number=SeqID_76592
atggcgtgggaggggtggatggggccgcgcgtggccctggcggggtcgacagggccacacgtggcgcgggaagagacacgagcagaggcgtcgaggccgggggaccgaatcgaactcaaggagagagtcgagatcggtgggtggggaggagccaacaaggggaaacacatcttcgtcgaagacaacgtgatgagggatgagtatgcggtgggagacgaggtcaagacaacgataatggggtgtaggggggaccggatcggactcaaggagagagtcgagatcggtgggtggggaggagccaacaaggggaaacacatcttcgtcgaagacaacgtgatgagggatgagtatgcgtgcagggagcgccacaggggggagcacgacggggaggagagtgccggcgctggtcaggacgtccacactgggataatgcctggcaccgagaggggcggtccagcgggggtcagagaagaccggggcggcagccagggcgaggagtccaccagaggcgttggggaagggaggggctgcgctcgggaggagagcagcgcagttgccatccatgtcggcgtggacgaggagcagctcggagccggcgcacaacctttgttgtggctctgcgaacccgatgagcggcgtgagctctgctgtggcggccaagggaaggagcacgcgtctagggagccgagcaggggaacctcactagcgtggggagggtcggcggcgcacgatcgagcctctagagctaaggtgcctctagatttccccatgaggctacggatcgcgctgggatcgtcacgtggtatcctgtatttgcacacggaagcagatcctccaatataccatcgtgacatcaaagccagcaatattctactggactcgaagtttgtcgcaaaggttgctgatttcggtctctcacgccttgctccgctgccagaaacagaggggagtgcccctggtcatgtctccacagtcgtaaaaggcaccccgggttatcttgacccagagtattttctcacccataagctcacggacaagagcgacgtgtacagcctgggcgttgtgttcttggagctgctgactgggatgcagccaatctctcatggaaggaatattgtcagagaggttttggcagccaatcagtcagggatgatattctcggtggtggataaccggatgggctcgtaccctgctgagtgcgtggagaagtttgctgcgctggcgctgcggtgttgccaggacgagacggactcgaggccatccatggtggaggtggttcgggagctggacatgatatggcgcatgacgccggggacggagaacattgcatcgtcagagtctggcgtcatggggatgggctccaacagcaccagcacacccacagcatcggggtctcggatggatgatcactacatttcgtccatggaggtctccggtagcaacctgctcagtggcgttatgcccagcatcaatccgcgctga

SEQ ID NO: 34814 - DNA, 357 bp, Zea mays
  Peptide Sequence Number=SeqID_76593
atggcagctaaggcctataagtataaagcagaaatacttcttaaggaatacttgctagcagattcatatgttctatacacttctgtgctcgcggggcttctgatgtgcaagttggttcatgagcgccatgatacggtggactctgacattctcacgaaaggtgacaataatcccggggatgaccgagtcctgtacgcacatgggcagctttggctgcagcgacagcacatcattggacgggctgttggctatctgccttatgctgggtggcttacaatcgtcatgacggagaaaccagtcctcaagtatcttctaattggtgcactggggctgctggtggtagcatccaaggagtga

SEQ ID NO: 34815 - DNA, 753 bp, Zea mays
  Peptide Sequence Number=SeqID_76594
atgcagatccgccccgtggtcgcccaaatcatcaccctagggatgatcctaacttcggcattgatcctatggaaaggattggtcgtcgtaacagggagtgagtcgccggttgtggtggttctatctggaagcatggagcctgggtttcgaaagggtgatgtcctgtttctgcacatgaataaggaccctgtccgcacaggagacatagttgttttcaatgtcgagggccgtgatattccaattgtccatcgtgtgatcaaggttcatgagcgccatgatacggtggactctgacattctcacgaaaggtgacaataatcccggggatgaccgagtcctgtacgcacatgggcagctttggctgcagcgacagcacatcattggacgggctgttggctatctgccttatgctgggtggcttacaatcgtcatgacggagaaaccagtcctcaagtgcttttgtgttgggctgagtttgttacaagtaataggagggtctgttactgtatctgctaattggtgcactggggctgctggtggtagcatccaaggagtgacgttaaaggaagggcatgaggtacgaggccatgtgtgcgcgggactgcatggcatgggcaaggaggggatacgagcggacactgtcacatggaaccccttgatccatggcctgttcaaggatgccagggtgaaggaggcggctcagctcttcacggagatggtagcgacacaggtgatgccggacaatgtgacctag

SEQ ID NO: 34816 - DNA, 192 bp, Zea mays
  Peptide Sequence Number=SeqID_76595
atgggagacctagtctcaggacaagtgaggggaaaagtccgcgcccggcttcactcagggcttgccttcaatagcttgggctgcggggagatcctcgatggcagtctcgggagcttgctcctggtcttcctcttggacagctccttgctcagggatgagcacgtactctccgtcagcgagattgcaatctaa

SEQ ID NO: 34817 - DNA, 567 bp, Zea mays
  Peptide Sequence Number=SeqID_76596
atgaggaatagggcaaggcctagctcactactcctcctgctcctctcctgctggagcagcatcccactcaaccgtccaacccggtggcagggtggtaggccaagtcacaccatcaaccatatcctgaagcgtacctgcaaaaattatgccacaagcaaggctgagtatactaatactcaactacacttacccggttacaaggggtcaagcagtctcattagctgcgagaagcagacgattcgaatcgagtttttaaaccttgcaagggctcactgccttggcatacaatgctcctacatgggagaccccggctgccgccgtgcagtgaccgcacttgtacccaccatagctagcatgggagacccagtctcaggacaagtgagggagaaagtccgcgcccggcttcacttagacattgatgatattaaattacatttgtaccttcggcttgacagaagactgcgacgtgaacgaaggcctttagccgaaggtccgaaaaaacattttcccttcgatagaatagcgaaagtcaatgacaaatgggccccgccaagttgcaatgcatga

SEQ ID NO: 34818 - DNA, 548 bp, Zea mays
  Peptide Sequence Number=SeqID_76597
tttcttgtagcgttgatcgtgattggaagacgattgaagcatgtgtcggctcaaagactgttatacagataaggactcacacactgaagtacttcttgaaggttcagaagaatgtttctcaaattattttattacaaggacaacctacccagcggcagcaaggttctgtcatgcctatggatactgctactgtacaacaaataactgttcaggtagcacagagagtccgtctggtacttggccaacttctgaagcagttgagcaagaaattatggttccatcactctgtgtgggttcagtcccgagaaggaagagagtggctcttcactcccatcggactgacaaaaagttctgttggtgagaacatgttccattggcaagcgaccatcatggggccttcagacaccccatttgcaggtggggtattcttggtgaacattcacttcccaccggattaccctttcaagccaccaaaggtgtctttccacaccaaggttttcgacctgaacattaacgacaacaacaacatttgccttggacattcttaa

SEQ ID NO: 34819 - DNA, 156 bp, Zea mays
  Peptide Sequence Number=SeqID_76598
atggggccttcagacaccccatttgcaggtggggtattcttggtgaacattcacttcccaccggattaccctttcaagccaccaaaggtgtctttccacaccaaggttttcgacctgaacattaacgacaacaacattttccttggacattcttaa

SEQ ID NO: 34820 - DNA, 207 bp, Zea mays
  Peptide Sequence Number=SeqID_76599
atggacaaggagctgggcggccatgaaagggagggtgctccctgcgctggagaagacagccccgtgctgcagccgctcgccgggaggaggagcagggagggcgctcgactgctgctggccggagtagaggcgtgggtctgcatagaggggcaccgagcactagggcagaggtccggccatgggaggagctcggctcctagggaataa

SEQ ID NO: 34821 - DNA, 369 bp, Zea mays
  Peptide Sequence Number=SeqID_76600
atggatcagagctcgcccacgccatggacatcagagggaaacgctgggggagctcgattgctggccgaccacggagaagacgactccctgctgcagccgctcgccaggaggaggagcagggagggcgctcggctactgctgtgcgaggaagaaggagcagggggcgccgcgccatggctggccaagggggaggagctcttgcgtgttggctgctgctgtcgtggagcagggaggaagaagctgctggcggctgaaagaaaaggagggtcggagaaggcgaatcgtgatattttaaaattgctgtcgatacggggttttgagttcggttcggacatgagatatttggccgagtcggataaaattgattag

SEQ ID NO: 34822 - DNA, 426 bp, Zea mays
  Peptide Sequence Number=SeqID_76601
atggcgcggcgccccctgctccttcttcctcgcacagcagtagccgagcgccctccctgctcctcctcctggcgagcggctgcagcagggagtcgtcttctccgtggtcggccagcaatcgagctcccccagcgtttccctctgatgtccatggcgtgggcgagctctgatccatcgcgccctcctccccttcttcttcctcaagccagcaggcgcatccctctactccctgtgcacagcgcccccttcacctttggctgcgccccctgcacagcgacctgctccccctggctccatcacgcgcagggcattttctctgggtccaagctcgagcagatggcccgccgtcgcccatggccgacctccacttccctgtccatggcgtccaagttccctgcgcccagctcttcgatccaaaaacagtag

SEQ ID NO: 34823 - DNA, 240 bp, Zea mays
  Peptide Sequence Number=SeqID_76602
atggaggtttctcaccggggaagaagaccctcgccggagccaagaggaaatccgtcgattgccggagattcggggatccaatcgacgaaccgaacgcgctgcgacgaagccctcgatgagacgaacgcagcggtaccctcggattcggcagacgatgcacggattgggagtaattgctcgccggagttgtcgccggagttggaaccgccccgaacttcggcgggcaataccgggagctag

SEQ ID NO: 34824 - DNA, 213 bp, Zea mays
  Peptide Sequence Number=SeqID_76603
atggaggtttctcaccggggaagaagaccctcgccggagccgagaggaaatccgtcgattgccggagattcggggatccaatcgacgaaccgaacgcgctgcgacgaagccctcgacgagacgaacgcagcggtaccctcggattcggcagacgatgcacggattgggagtaattgctcgccggagttgtcgccggagttggaaccgccctga

SEQ ID NO: 34825 - DNA, 483 bp, Zea mays
  Peptide Sequence Number=SeqID_76604
atgcagttcattcttataagccccacaatctacatgttcattctgctaagcccctcgactctcgatggcaatggtgagcaggctgccgccacgctgcggagccaacgctccccacagcacccgcggtcctggaaggtgagcagaggactgcccttcttccaacgagtttcttgtagcgttgatcgtgattggaagacgattgaagcatgtgtcggctcaaagactgttatacagataaggactcacgcactgaagtacttcttgaaggttcagaagaatgtttctcaaactattttattacaaggacaacctacccagcggcagcaaggttctgtcatgcctatggatactgctactgtgcaacaaataactgttcaggtagcacagagagtccgtctggtacttggccaacttctgaagcagttgagcaagaaattatggttccatcactccgtggctaacgttccggagaaagaaatgtag

SEQ ID NO: 34826 - DNA, 360 bp, Zea mays
  Peptide Sequence Number=SeqID_76605
atgatgaagggacgaacctcaaaagcgcaggggaactgcgccttaaaatatattaagaagaggccgccgtgggacgatactcttgctcaatctcttagtgctggtgcaacaaataactgttcaggtagcacagagagtccgtctggtacttggccaacttctgaagcagttgagcaagaaattatggttccatcactccgtggaagagagtggctcttcactcccatcggactgacaaaaacttatgtccataattcttcaagtctgcatatgactgcatcattcttcagccttctagactccttccacttctgcccctcggatacaaggtacaacaataattcatctgtctgctactaa

SEQ ID NO: 34827 - DNA, 372 bp, Zea mays
  Peptide Sequence Number=SeqID_76606
atgaacgtatgtgagctcactcttgctgtctcacaccccccacaggtcaagaacaggaaaggaaagattatcacgcaacagcaaacagaaatgaatcctccaaatcctccacctgttgaaatcgatcaagtgattgctgcccaaagactggtaatacaacaattaacatacctggtaactgagatgcaaaatcagataagacaagaacgcgaggaaatacgtcaggtccgccaagaaataaggcaagcgcggttggagagacaacaacaacaacaacctccaccaccaccaccaactccaccaagctacataaacatatatataaattactactatttggaagatctagatgttactttagttagtagatga

SEQ ID NO: 34828 - DNA, 222 bp, Zea mays
  Peptide Sequence Number=SeqID_76607
atggcgaacacgaaggaggtgaagaataccggaaatcgggtgcgcagacaggttgttctcgcgttggggcggctcggcggtgctctatctactccagcgaggaattgctcacgcaccgcaggtctattaattgttgtattaccagtctttgggcagcaaccacttgatcgatttcaacaggtggaggatttggaggattcatttttgtttgctgttgtgtga

SEQ ID NO: 34829 - DNA, 783 bp, Zea mays
  Peptide Sequence Number=SeqID_76608
atggcggtcccgaggcctcgaatctgcgccctacgtcgaggcacgctgctcctcttcctcctcgtcccgctcatctactccgattttgttgagctggatttaccgcataacaaacttttgttgatgatgttctgtaatcataacttgatactggtagagtgcattctgtctttctcaaatcagtacctccttgctgttggcacaatgcaacctggacttagagctctgaacaagattggcctatcaagtgaagagaactattctggagaacatgttccttttgttactgtatttacaacctacaattctgtctcagctggagatggcaatgttccacctgattctgtaactgttggaaatagttcttatagcaaaatagaaagatccatgaccattctgaacactttcatcagtttcataaaggtatcaatgccaagaagcgatgtgatcatattgactgatcctggttcaaaattttcagtaaatcaagggagtgctacactattgcctattgaaggaaactattctcgaggaaatttgatgcttcagagaataaagacatacattgcatttctggagcaaaagcttgtggaatttgataggacggagaggttgaatcattttgttttaactgattccgatatagcagtggttgatgatcttggacatatatttgaaaaaaatccccattttcatctggctgttacttttcgtaataacaaagggcaaccattgaattctgggtttgttgcgagctgtggaattcttgaaacaagtccttga

SEQ ID NO: 34830 - DNA, 882 bp, Zea mays
  Peptide Sequence Number=SeqID_76609
atgcgggttcttaagcaactttcaggcattgctggccttgcgatcaggtacgggcttactctgaacacgctgcaagcacaggtgaaatatgcgccgcagctgcccttcgttctgaccatgaggctgtcatcacaagaattcaagtatcattcagtatgtaacaaaaacatgtatttgaaaaatatccctgcagtaaatcaagggagtgctacactattgcctattgaaggaaactattctcgcggaaatttgatgcttcagagaataaagacatacattgcatttctggagcaaaagcttgtggaatttgataggacggagaggctgaatcattttgttttaactgattccgatatagcagtggttgatgatcttggacatatatttgaaaaatatccccattttcatctggctgttactttttgtaataacaaagggcaaccattgaattctgggtttgttgctgtaagaggaaccagggatggcatcactaaagctgtggaattcttgaaacaggtccttggaacttacagcttaagatatattaaggcttcccgtatgcttggtgaccaattagcacttgcatgggtcgtcaagtctcatctaccatcggctttgggaaaattttctaagcatgaagcatttactggtgaagttaatggaacatctgttctcttcttgccttgtgttgtttataattggaccccgcctgagggtgctggacagtttcatggtatacccttggatgttaaggttgtccatttcaaaggttcaagaaagcgattgatgcttgaggcatggaatttctacaactcaacctctaagatgtctgatatgctatgcctaatcttgagaagtggccggacgaaatacgacttctaa

SEQ ID NO: 34831 - DNA, 174 bp, Zea mays
  Peptide Sequence Number=SeqID_76610
atgggaaggggatccgaggacatccgcgagccctccaagtcagcctctggcgtcatctcccaaagcggcaaccgcctccgccaagggaagcaccctccggcgatgaatggcggcaatcactcccgcagcgggaacgggaaagggggataccccgaaaaggatccttcttcgtga

SEQ ID NO: 34832 - DNA, 945 bp, Zea mays
  Peptide Sequence Number=SeqID_76611
atggctgaaaggtaccaactcccacggagttgcgttcccccaacgacaaggcggaaggactgcgggcatcccccgtccgggggctcggaagatggaaagacacaatgcataagggagcgcgaagacatggtcgcctttcaagggggtcaccctccttttaaaggcgactctccctacttgcgtccccagccgtcgtgggctgagtcttctccaacacgctccaaagtcctccccctatggcgcgggggctgggtcccacacgtcatgcaagccggcccagagcagaagaagccaaaccgccgcgcgcggtgcatgcaaccgcccaatggttacaagtggccctccacttttgcccagaccagcgggcgaaagggcgggcagccatgcaggcggcatgcaaccgcgccaagtgggcgcgcttctccgacttccaacgcgcccagcatggaggcccaggcccacgcgtcatgcaaccggcgcgccggatgctgcgtgcgagcaactgcaccgccgcccgcgccactaccgcgcctcctcgactgcggaaccaataccgcgactcgaggcgacccagcgcacgacccagcagcgccagcctggcacgacggtcaatgcggccaaaaatgggccggcagtaatggcggtggcaggcaggcaggagcagcgggaccgggaaagggggataccccgaaaaggatccttctccgtgaaggaatcaggctccgagcctccctactgatcagaggttcgaaggctggcccctcggaagggttcaacagccgcctcagagcgcgtgggctccacacccactactggtcagaggttcgaaggccggcccctcggaagggttcaacgaccgcctcaggctactcgggctccgcgcccactactgatcaggggttcgaaggctggcccttgaagggttcacagccgcctcagatatag

SEQ ID NO: 34833 - DNA, 471 bp, Zea mays
  Peptide Sequence Number=SeqID_76612
atgaactttaaccctaaactcccttctcctcctccatgccccttgatcgaccggttgatggaccccatgaatgttcctggtgtgccacaggctgctaaccggttgatcggcgagggacgaggagctgctgcaggagttctggaggggacaacgagcggggtggtgtacatggagaagacggtggaggatgcggagggcacggcgtccgtggtgcgcgccatgagcgagaagttcgacctgctcatcgtgggtcgttgtccctgtgccttggagtcggatcctcggaggagggagagggcgaagagtagggggaaccaaatcttgaaggtttgtgaccgcgaatgggcgttcctggtccatgttcgcgtgcgccgctgccgattctgggagctctctggtcgtccgtctcgctgggatctgccttttccccggctcggaaatgcccctgaacagattcacagggggtcctag

SEQ ID NO: 34834 - DNA, 309 bp, Zea mays
  Peptide Sequence Number=SeqID_76613
atggaggctgctaaccggttgatcggcgagggacgaggagctgctgcaggagttctggaggggacaacgagcggggtggtgtacatggagaagacggtggaggacgcggagggcacggcgtccgtggtgcgcgccatgagcgagaagttcgacctgctcatctttgtgaccgcgaatgggcgttcctggtccatgttcgcgtgcgccgctgccgattctgggagctctctggtcgtccgtctcgctgggatctgccttttccccggtagctcaatagatctactgccgtcggggcagtgccggtcctga

SEQ ID NO: 34835 - DNA, 885 bp, Zea mays
  Peptide Sequence Number=SeqID_76614
atgaagtgggactgcagcatcaagacagttgaacttgatgccatccttgggggtcgtgcattccaacatagggactccaagccttgcattatacctttggagggtggtttcgcctctgggttcaaaaagcctgaagaggagaagtttgaaacacggttgtatatttgcagagggaagagagctattcgggttaaagaggttcccttcgcccggtcatcattaaaccatgatgatgtgtttgtcttagatgctgaaaataagatataccagtttaatggtgctaactccaatatccaagaaagggccaaagcgttggaagtaatccaacatttaaaggagaagtaccatgggggtgtttgcgatgttgcgatcgttgatgatgggaaattacaggcagagtcagactctggtgaattctgggtcctttttggaggttttgcaccaattgggaaaaaaaccgtgagtgatgatgatgttgtacttgaaactacagcaccaaggctgtacagcatcaatgatggccaattgaagctggaagaaacagctcttacaaaagccgtgcttgaaaataccaaatgtttcttacttgactgtggggctgaaatatatgtatgggttggccgggtaacacaaatggaggatagaaaatctgccactaaagcagttgaggaatttcttattaatcaaaagcgtccaaagacaacgagggtaactcaagtgattcaaggttatgagagtcatgctttcaagtccaagtttgaatcatggccagtgggtaatgctactgggagccctggcgcagaggaagggcggggaaaagttgcagctttattgaagcaacaaggtgttgatctcaaggagctgcaaaaagcaccactccagtaa

SEQ ID NO: 34836 - DNA, 2805 bp, Zea mays
  Peptide Sequence Number=SeqID_76615
atgtcaactgcaaaagtgttagatcctgcttttcaaggggctggccaaaaacataatttagtgggacagaaatatggcggattgaagattttaagccagttccgctgccaaaatctgattatgacgacctgtactaaaggtggtgcctatctatatgatatccacttctggattgggaaagattcgagtcaagatgaagctgggactgcagcaatcaagacagttgaacttgatgccatccttgggggtcgtgcaatccaacatagggaactccaaggttatgaatctgacaaattcttgtcatacttcaagccttgcattatacctttggagggtggtttcgcctctgggttcaaaaagcctgaagaggagaagtttgaaacacggttgtatatttgcagagggaagagagctattcgggttaaagaggttcccttcgcccggtcatcattaaaccatgatgatgtgtttgtcttagatgctgaaaataagatataccagtttaatggtgctaactccaatatccaagaaagggccaaagcgttggaagtaatccaacatttaaaggagaagtaccatgggggtgtttgcgatgttgcgatcgttgatgatgggaaattacaggcagagtcagactctggtgaattctgggtcctttttggaggttttgcaccaattgggaaaaaaaccgtgagtgatgatgatgttgtacttgaaactacagcaccaaggctgtacagcatcaatgatggccaattgaagctggaagaaacagctcttacaaaagccgtgcttgaaaataccaaatgtttcttacttgactgtggggctgaaatatatgtatgggttggccgggtaacacaaatggaggatagaaaatctgccactaaagcagttgaggaatttcttattaatcaaaagcgtccaaagacaacgagggtaactcaagtgattcaaggttatgagagtcatgctttcaagtccaagtttgaatcatggccagtgggtaatgctactgggagccctggcgcagaggaagggcggggaaaagttgcagctttattgaagcaacaaggtgttgatctcaaaggagctgcaaaaagcaccactccagtaaatgaggaagttcctcctttgcttgaaggcggtggaaagcttgaggtatggtgtgttgatggcaacgctaagactgctctgccaaaagaggatattggaaagttttacagtggagactgttatatcattctctatacgtatcattcgggcgacaagaaagaagaatactatctcagctactggattgggaaggatagcttggtggacgatcaagtgtcggcatctcaaataactaatacagtgtggaattcattgaaaggacggccagttctgggtcgtatataccaagggaaggagccaccacagtttgttgcacttttccagcccatgattatcttgaagggtggaattggatctggatacaagaagctcatagaagaaaagggtgcgacgggtgagacttatactactgaaggcatagctctaattcgagtatctgggacatctatccacaacaacaagactcttcaagtcgatacggtggcaacatctttaagctcaatggagtgtttcatactgcaatctggaaatgctatgtttacatggtttggcaattctagcacatatgagcaacagcagtgggcagcaaaagttgctgaatttttgaagcctggcgttgcagtgaagcactgcaaggaggggacagagagttcaggtttctggtttgctcttggaggaaaacagagttatacaaataaaaatgctcctcaggatattattactagagagcctcacttgtatgcattctcattcaagaacgggagactggaggtaactgagatcttcaacttttcccaagatgatttgttaactgaagacatgatgatacttgacacacatggtgaggttttcatttggattggtcagtgcgtggaatcaaaagagaaacagaaggcatttgatattggccagaaatacgtggagcatgcaaattctattgatgatctttctccatatgcaccactatataaagttatggaagggaatgagccatgcttcttcaagacatatttctcttgggataacacaaaatctttggttcatggaaattccttccagaagaaactctcactgctttttggattgcgttctgagggtgcatctaggagctctggtaatggtggaccaactcaaagggcatctgcattagcagctctatcatctgcattcaatccatcgtctcaacaaaggctctctaatgagaggcctaaaagcacaggcgatggacccactcaacgcgcctcagcactggctgccctatctaatgcattcaattcatccttaaaacccaaaacaccacctccatctcgctcaggtcaaggttcccaaagagcagctgccgtagctgcactatcctctgtgctgactgctgagcaatctggatcttcagaaaatctacgagccaaagctagcagcacaggagataagactgatgtcgataggcctgtcataactccagctggaccatctggtccatcttctcctcagtctgaagctggggagtccaatgtgtttcgccaggaaaaagatgctgcagtagatggggcaccatctgacactgatggagcagtggctgagacccgagaggaagaaacgacagagaatgttggtgaagcgacatttagctatgaccgcttgatatctaaatctaccgatccagtccgtgggatagattacaaacgcagagag

SEQ ID NO: 34837 - DNA, 276 bp, Zea mays
  Peptide Sequence Number=SeqID_76616
atggtggattgccctctgtgcgcacccgcccggcgcggttcctccgccctcgcccccaaggtggcaatgagattgatggttcttggtattgactctggtaatgctagtccactacagccaaacaggatacttgctgggtatgttgatgtgtactcacccttgctctacacaccaaaccccccatccccaggttgtcagcattgcaaccactgctcaggagaagatgaagccgtgggaggagacttccaggagttccaagactacgatgagttctag

SEQ ID NO: 34838 - DNA, 882 bp, Zea mays
  Peptide Sequence Number=SeqID_76617
atggaggcaccacctgacccggtcgtcccatcctgctcgacgagatcgtcggcgacatccacggatccacaagttgctgaaaggaagatggcgttgcaccaagttgctgataggaagtgccagtggttacaagctgctgtcagcgaagtcaatggtgatggagcagtctgcgttcgttggcgcaggggcagtcagcgaaggaaaatctggaaccgcactgtggatgtcagcgacgatcttgtcgagcaggatgggacggccggcggtatcctgtacggcgtatcctctatgtcctacgggcccatgcccagtcacgcaaacgagaggagccgggagctaggacttgccggatgctccctcgtcctccatatctgcgggatggagccacccccctggataatacggaacgagctcactcgtttgccgtccaccgtgcctccgccagaataccgcgccgccgctagaacaccgcgccgccgccgccagaacaccgtgccgccgctaggccgcacaaactcgtcctcggctcgcagcccagcagcccaagctcaccgcgccgccgccagcccgttcaatctcgtcctcggctcgccgcccccgcagcccaagctcaccgcgccgccgccagcgccatccatcgccgcccactgttccatctctttcccggacggcaagggtttggcagaatctgaactcggaactactgggtctccttccttcgagccggagagggtcgaccgaccgagggtcgtcgccaccgccgacgcccgagtttgcgggctgcctccagtcctccctccatctcaggtgctctataagctggcactcgtgccaatgaagaattaccccttcttcctcgcccagttcgccacatttgggtaa

SEQ ID NO: 34839 - DNA, 477 bp, Zea mays
  Peptide Sequence Number=SeqID_76618
atggaagtctgcgatgagctgcggtcgtttgaggccaccggtgtctaccgcctcgatgtcaccagcaccggagccactttcgtcgactcggtccgcctcctcatcctcaacgcgtcctaccagttttcccatctcaccagctgtggatgtgccgccagaggctggaatggatgtgggagagccgggccgaggacgcgtggcggcgcggcaagtgcacggcgatggagagggagagggtaccgatccgatgaggcgctgagctccacgaatgtggtgggggcgttgggccttcatcgtgcccaccacctactccgggaaagagatggaacagtgggcggcaatggatggcgctggcggcggcgcagtgagcttgggctacgggggctgcgagccgaggacgagattgaacgggctggcggcggcgcggtgagcttgggctgctgggcagcgagccgaggacgagtttgtgcggcctag

SEQ ID NO: 34840 - DNA, 360 bp, Zea mays
  Peptide Sequence Number=SeqID_76619
atgaaccctaaccctaaactcccttctcctcctccatgccccttgatcgaccggttgatggaccccatgaatgttcctggtgtgccacaggctgctaaccgtttcactgaccatggagcttcaccatcgagagctgggagtttggagaacagaattattggtagtgcagaggttcctaggagattcggatatgaggccttggaattgagaaatggtggatctgattattttggcaagggtgttcttaaggtggaagaagagactggtataaagctgaatatagaagatatggttgatcttatgacactgttggaccctgctactggaggtcgaatgctaccatcactagtaactggctaa

SEQ ID NO: 34841 - DNA, 378 bp, Zea mays
  Peptide Sequence Number=SeqID_76620
atggcgcgcaccaaaggaagccttgccctccgggtccttcaccttttttttccatgtacacccaccccacttggtggtccctgtccctgctcccagaactcctgcagcagctcctcgtcccttggccgatcaacccggttagcagcctgtggcacaccaggaacattcatggggtccatcaaccggtcgatcaaggggcatggaggagggagaagggagtttagggttagagttcatgggttgtacctgattggagacacggtcgagggtcgcccgaggcggccgcgtcgggcaccttgcgcaggtcacacacctccatcacccaccgtcgccgaatcgccgatacacgccaacacagcgtggattcaaatgtgttga

SEQ ID NO: 34842 - DNA, 246 bp, Zea mays
  Peptide Sequence Number=SeqID_76621
atggcgaacgggccaaaaacggattttcggccacggccgcgaaaacgggcacgtggaagggcacgggaccctcccgtggtccccccgcgtgagacgtggaagttcgggtgcacccgtgagggaaaacgggtctcctcgcccgagccccgcaccccctcgcggcctagccgtggccgtcgggcaccctaccgcgcccagctccggctggcgctgttggctgcctggccggccgtgtttcggccgtga

SEQ ID NO: 34843 - DNA, 207 bp, Zea mays
  Peptide Sequence Number=SeqID_76622
atggcgcacgggccaaaaacggattttcggccacggccgcgaaaacgggcacgtggaagggcacgggaccctcccgtggtccccccgcgtgagacgtcgaagttcgagtcgacccgattacggggaggctacactagcgcaaaacaaaattttcaaccccataataccaagaactactgcggttataggtcatggaattaccactag

SEQ ID NO: 34844 - DNA, 228 bp, Zea mays
  Peptide Sequence Number=SeqID_76623
atggcgaacgggccaaaaacggattttcggccacggccgcgaaaacgggcacgtggaagggcacgggaccctcccgtggtccccccgcgtgagacgtggaagttcgggtccaccctttctcccgcgctcggtggaccttcggtcgccgtcctcgcaagcagacccgccgtgcccagcgtggagggatgctttggatggctcgaccgtagcggctacgctggcgcatga

SEQ ID NO: 34845 - DNA, 387 bp, Zea mays
  Peptide Sequence Number=SeqID_76624
atggcgaacgggccaaaaacggattttcggccacggccgcgaaaacgggcacgcggaagggcacgggaccctcccgtggtccccccgcgtgagacgtggaagttcgggtccacccttgagggaaaacgggtcacgctagcgaaacccctgattctgagcaaaaacgctgtgttcggccatcttagatgggtttcgtggggtcctgggaaaatgccctggttttctgaaggcagaactccccgaagtcctaggagggggtatgcccctcaggtctcctcggccgagccccgcaccccctcgcggcctagccgtggccggtcggcaccctaccgcgcccagctccggctggcgctgttggctgcctggccggccgtggttcggccgtga

SEQ ID NO: 34846 - DNA, 273 bp, Zea mays
  Peptide Sequence Number=SeqID_76625
atggcgaacgggccaaaaacggatttttggccacggccgcgaaaacgggcacgtggaagggcacaggaccctcccgtggtcaccccgcgtgagacgtggaagttcgggtccacccgcataactccccgaagtcctgggagggggtatgcccctcaggtctcctcggccgagccccgcaccccctcgcggactaaccgtggccggtcggcaccctaccgcgcccagctccggctggcgctgttggctgcctggccggccgtggttcggccgtga

SEQ ID NO: 34847 - DNA, 264 bp, Zea mays
  Peptide Sequence Number=SeqID_76626
atggcgcgcgggcccgaaaacaacggttcggccacggccgcgaaaaacgggctaagtcccaacgtgtggaaagacaccgaacctagagcgcatgtcttgagtgaaggcagaactccccgaagtcctgggagggggtatgcccctcaggtctcctcggccgagccccgcaccccctcgcggcctagccgtggccggtcggcaccctaccgcgcccagctccggctggcgctgttggctgcctggccggccgtggttcggccgtga

SEQ ID NO: 34848 - DNA, 249 bp, Zea mays
  Peptide Sequence Number=SeqID_76627
atggcgaacgggccaaaaacggattttcgggcacggccgcgaaaacgggcacgtggatgggcacgggaccctcccgtggtccccccgcgtgagacgtggaagttcggaactccccgaagtcctgggagggggtatgcccctcaggtctcctcggccgagccccgcaccccctcgcggcctagccgtggccggtcggcaccctaccgcgcccagctccggctggcgctgttggctgcctggccggccgtg

SEQ ID NO: 34849 - DNA, 273 bp, Zea mays
  Peptide Sequence Number=SeqID_76628
atggcgaacgggccaaaaacggatttttggccacggccgcgaaaacgggcacgtggaagggcacaggaccctcccgtggtcaccccgcgtgagacgtggaagttcgggtccacccgcagaactccccgaagtcctgggagggggtatgcccctcaggtctcctcggccgagccccgcaccccctcgcggcctagccgtggccggtcggcaccctaccgcgcccagctccggctggcgctgttggctgcctggccggccgtggttcggccgtga

SEQ ID NO: 34850 - DNA, 273 bp, Zea mays
  Peptide Sequence Number=SeqID_76629
atggcgaacgggccaaaaacggattttcggccacggccgcgaaaacgggcgcgtggaagggcacgggaccctcccgtggtcgccccgcgtgagacgtggaagttcgggtgcacccgcagaactccccgaagtcctgggagggggtatgcccctcaggtctcctcggccgagccccgcaccccctcgcggcctagccgtggccggtcggcaccctaccgcgcccagctccggctggcgctgttggctgcctggccggccgtggttcggccgtga

SEQ ID NO: 34851 - DNA, 273 bp, Zea mays
  Peptide Sequence Number=SeqID_76630
atggcgaacgggccaaaaacggatttttggccacggccgcgaaaacgggcacgtggaagggcacaggaccctcccgtggtcaccccgcgtaagacgtggaagttcgggtccacccgcagaactccccgaagtcctgggagggggtatgcccctcaggtctcctcggccgagccccgcaccccctcgcggcctagccgtggccggtcggcaccctaccgcgcccagctccggctggcgctgttggctgcctggccggccgtggttcggccgtga

SEQ ID NO: 34852 - DNA, 804 bp, Zea mays
  Peptide Sequence Number=SeqID_76631
atggcgaacgggccaaaaacggattttcggccacggccgcgaaaacgggcacgtggaagggcacgggaccctcccgtggtccccccgcgtgagacgtggaagttcgggtgcacccgtgagggaaaacggaactccccgaagtcctgggagggggtctcctcggccgagccccgcaccccctcgcggcctagccgtggccggtcggcaccctaccgcgcccagctccggctggcgctgttggctgcctggccggccgtgcggctacgctggcgcatgagttgtcttggacccgtgactgcttggaggacccccgctgccgtgcggccgactcccggcgcccgtgtcccatcactcgtgcgggcatcccgtgcctgctgcgttgagaagtgcttgcgtgctgctacccgtcccacgggaagccgtgctcgatacacgttgccttcgtcgagctcaccccccggggtgcggctcgtcggctcgagagcgcccgcggcgtttgcctcgtgccgccgtcggcctatggccggcggcaccgaggacacctcgctggcgcttttggtctcggatgtggctcacgctgaaggccggagacgcgttggcgtcacgcgcccaagaatcggtccgcccgaacgaacgacgtccagcccggcacgacgcctccgcgcggaggccggcgctggcccgtctgcgaggacgtgctacctggttgatcctgccagtagtcatatgcttgtctcaaagattaagccatgcatgtgcaagtatgaactaattcgaactgtgaaactgcgaatggctcattaa

SEQ ID NO: 34853 - DNA, 621 bp, Zea mays
  Peptide Sequence Number=SeqID_76632
cgtctccttccaggtctcctcggccgagccccgcaccccctcgcggcctagccgtggccggtcggcaccctaccgcgcccagctccggctggcgctgttggctgcctggccggccgtgcggctacgctggcgcatgagttgtcttggacccgtgactgcttggaggacccccgctgccgtgcggccgactcccggcgcccgtgtcccatcactcgtgcgggcatcctgtgcctgctgcgttgagaagtgcttgcgtgctgctacccgtcccacgggaagccgtgctcgatacacgttgccttcgtcgagctcaccccccggggtgcggctcgtcggctcgagagcgcccgcggcgtttgcctcgtgccgccgtcggcctatggccggcggcaccgaggacacctcgctggcgcttttggtctcggatgtggctcacgctgaaggccggagacgcgttggcgtcacgcgcccaagaatcggtccgcccgaacgaacgacgtccagcccggcacgacgcctccgcgcggaggccggcgctggcccgtctgcgaggacgtgctacctggttgatcctgccagtagtcatatgcttgtctcaaagattaagccatgcatgtgcaa

SEQ ID NO: 34854 - DNA, 804 bp, Zea mays
  Peptide Sequence Number=SeqID_76633
atggcgaacgggccaaaaacggattttcggccacggccgcgaaaacgggcacgtggaagggcacgggacccttccgtggtccccccgcgtgagacgtggaagttcgggtgcacccgtgagggaaaacggaactccccgaagtcctgggagggggtctcctcggccgagccccgcaccccctcgcggcctagccgtggccggtcggcaccctaccgcgcccagctccggctggcgctgttggctgcctggccggccgtgcggctacgctggcgcatgagttgtcttggacccgtgactgcttggaggacccccgctgccgtgcggccgactcccggcgcccgtgtcccatcactcgtgcgggcatcctgtgcctgctgcgttgagaagtgcttgcgtgctgctacccgtcccacgggaagccgtgctcgatacacgttgccttcgtcgagctcaccccccggggtgcggctcgtcggctcgagagcgcccgcggcgtttgcctcgtgccgccgtcggcctatggccggcggcaccgaggacacctcgctggcgcttttggtctcggatgtggctcacgctgaaggccggagacgcgttggcgtcacgcgcccaagaatcggtccgcccgaacgaacgacgtccagcccggcacgacgcctccgcgcggaggccggcgctggcccgtctgcgaggacgtgctacctggttgatcctgccagtagtcatatgcttgtctcaaagattaagccatgcatgtgcaagtatgaactaattcgaactgtgaaactgcgaatggctcattaa

SEQ ID NO: 34855 - DNA, 426 bp, Zea mays
  Peptide Sequence Number=SeqID_76634
atgggcacccctaaagttgttgctccatttgctgaaaggagggagtttgacaagatactgatatactcaaagcagcaattgctaatgctggaggctaatctagtttttggcgcctttgcctcctatgaccggcatagagacatgcggatggatattgatgatatgtcctatgaggtatacttcttatggattctgaaagttgcaagacatcgctctatagtcggacaatatttaacttcatgcagtggtggaaccattgctggccttgctttaggatccagattgagcagcttcaaaacaaaattagaagtcaacaaatcaaccgttgatgacatgaaatgcagcatctgtcagacacttgttgagttctttggcacattgtcgagagtgggctttggaatgcatgaaagaccttctactggttaa

SEQ ID NO: 34856 - DNA, 483 bp, Zea mays
  Peptide Sequence Number=SeqID_76635
atggatttgctaggagtttttccaactggccttgcaacgtcaacacctgagacaaatacatctcagtcccaagggagcagtgacagcagtggtaataacaagagcaagagccattcaacagagccactttgctttttgcgtcaattcaagggctccataataaggtcagactatttggcactgaggttgggctttgtcacatatcacaagctaccacattcatatgacttccataaatacatggtacagagcatggaagatgattacaatgggactattggtatcaggaggacaactggtccaacacgccgctcatccaagggcaactggactgtagaagagaaccagaggagtggggaaacagaccagaaagtcaaggctgagggaatgccgagggaacaaaatgagcatgtgttatttcctagatattcccttgtgtgcacttttaggttctctatgcttacaaaaaggaaaggaaagtag

SEQ ID NO: 34857 - DNA, 387 bp, Zea mays
  Peptide Sequence Number=SeqID_76636
atggatttgctaggagtttttccaactggccttgcaacgtcaacacctgagacaaatacatctcagtcccaagggagcagtgacagcagtggtaataacaagagcaagagccattcaacagagccactttgctttttgcgtcaattcaagggctccataataaggtcagactatttggcactgaggttgggctttgtcacatatcacaagctaccacattcatatgacttccataaatacatggtacagagcatggaagatgattacaatgggactattggtatcaggaggacaactggtccaacacgccgctcatccaagggcaactggactgtagaagaggtgaaccaaaatgttttcccaggtcttcgaactgaaatacagtag

SEQ ID NO: 34858 - DNA, 1443 bp, Zea mays
  Peptide Sequence Number=SeqID_76637
atgggcacccctaaagttgttgctccatttgctgaaaggagggagtttgacaagatactgatatactcaaagcagcaattgctaatgctggaggctaatctagtttttggcgcctttgcctcctatgatcggcatagagacatgcggatggatattgatgatatgtcctatgaggtatacttcttatggattctgaaagttgcaagacatcgctctatagtcggacaatatttaacttcatgcagtggtggaaccattgctggccttgctttaggatccagattgagcagcttcaaaacaaaattagaagtcaacaaatcaaccgttgatgacatgaaatgcagcatctgtcagaagacaggactttttatgctgctattaccccacttcccaaatgtcttattaaaaaggctgggttgtacttgcgagccctccagacacttgttgagttctttggcacattgtcgagagtgggctttggaatgcatgaaagaccttctactggttaatctgaagggaaatcttcagattgttgtgcagtggaatgcctttctcaaattttgcatgtctatctcaaaatgcaacacacctgacttttctttacatacaacagcgaggacccagatatccatttcaagtatggatttgctaggagtttttccaactggccttgcaacgtcaacacctgagacaaatacatctcagtcccaagggagcagtgacagcagtggtaataacaagagcaagagccattcaacagagccactttgctttttgcgtcaattcaagggctccataataaggtcagactatttggcactgaggttgggctttgtcacatatcacaagctaccacattcatatgacttccataaatacatggtacagagcatggaagatgattacaatgggactattggtatcagatttcttgattcgaataatgaagcattcaagtatactggtctagaaatagtttcccatgagatccagtatggtggctgtgttgaggaaactggacctgcggggagcgaaagactttgcagggcacagagtcttcagctccttctgttcctcctgatggaggagtcagcaaggaacctcaaaaagggggagattgcccaatgggtgaatttctatccgcttattggaaccactcatcaggaggacaactggtccaacacgccgctcatccaagggcaactggactgtagaagagtaacattgttcagtgacatgcctacatcagcaccaaagatttatttgatatttggatggcaatgttctttctatatgctggagaaccagaggagtggggaaacagaccagaaagtcaaggctgagggaatgtcgagggaacaaaatgagcatgtgttatttcctagatattcccttgtgtgcacttttaggttctctatgcttacaaaaaggaaaggaaagtag

SEQ ID NO: 34859 - DNA, 294 bp, Zea mays
  Peptide Sequence Number=SeqID_76638
atgaggatcaaggaggaccaacaataccaagactgcactctacctgtatttgtgtttgatgaggtcggacgaccaacagggttcggaagagggtgtccacgtgcgcagcaagttgggattcagagaaatcaccatacgagacacttgatcatgctggagaaccagaggagtggggaaacagaccagaaagtcaaggctgagggaatgccgagggaacagaatgagcaggctctttgtattgtggaggaggctaatctgatgtatgaagcgcctaccctgcttctgccacaatga

SEQ ID NO: 34860 - DNA, 1302 bp, Zea mays
  Peptide Sequence Number=SeqID_76639
atgcggatggatattgatgatatgtcctatgaggtatacttcttatggattctgaaagttgcaagacatcgctctatagtcggacaatatttaacttcatgcagtggtggaaccattgctggccttgctttaggatccagattgagcagcttcaaaacaaaattagaagtcaacaaatcaaccgttgatgacatgaaatgcagcatctgtcagaagacaggactttttatgctgctattaccccacttcccaaatgtcttattaaaaaggctgggttgtacttgcgagccctccagacacttgttgagttctttggcacattgtcgagagtgggctttggaatgcatgaaagaccttctactggttaatctgaagggaaatcttcagattgttgtgcagtggaatgcctttctcaaattttgcatgtctatctcaaaatgcaacacacctgacttttctttacatacaacagcgaggacccagatatccatttcaagtatggatttgctaggagtttttccaactggccttgcaacgtcaacacctgagacaaatacatctcagtcccaagggagcagtgacagcagtggtaataacaagagcaagagccattcaacagagccactttgctttttgcgtcaattcaagggctccataataaggtcagactatttggcactgaggttgggctttgtcacatatcacaagctaccacattcatatgacttccataaatacatggtacagagcatggaagatgattacaatgggactattggtatcagatttcttgattcgaataatgaagcattcaagtatactggtctagaaatagtttcccatgagatccagtatggtggctgtgttgaggaaactggacctgcggggagcgaaagactttgcagggcacagagtcttcagctccttctgttcctcctgatggaggagtcagcaaggaacctcaaaaagggggagattgcccaatgggtgaatttctatccgcttattggaaccactcatcaggaggacaactggtccaacacgccgctcatccaagggcaactggactgtagaagagtaacattgttcagtgacatgcctacatcagcaccaaagatttatttgatatttggatggcaatgttctttctatatgctggagaaccagaggagtggggaaacagaccagaaagtcaaggctgagggaatgtcgagggaacaaaatgagcatgtgttatttcctagatattcccttgtgtgcacttttaggttctctatgcttacaaaaaggaaaggaaagtag

SEQ ID NO: 34861 - DNA, 972 bp, Zea mays
  Peptide Sequence Number=SeqID_76640
atggaggtgatgcgtcagtggcgactggatctagaggaggacgaagcgagacggagatcagacgagacgaggccgcgagacggggttttggctgctgtctttagtctcgctcacaagctccagcctgctattatcttcattgatgaggtcgacagtttcttggggcagcgacggacaactgaccatgaagccatgactaatatgaagacagagttcatgtccctctgggatggcttcaccactgaccggcacctgcccaaacatcgtaggctgcaaccagctataaacagacgatttggttcgttgacatctcaaaatctggatatttcacagccaaattttgaggctaatccacctgatggggttttagcggttcctttattgaggcatcagagttggccaggtctaccaaggggtgtagaatttaatcccagtgatagtgatcttctgtggcatctagcagcagaagttgggaacgctctagctgagcgccatccatttatcaacgagttcattaaatttgttgatgatgttagagaatttatttgcactcatcctcaacatataccaggtgttaggcaagatggtcgtgcatcatacttcttccatagaagttttgagccctacatcaatgagaatgatgtaaataactgctggaagaaaattggaagccatatatccatcatcctggatggaacactgatgggttgcaaggaagtgtttgccctgtatgcagacatgccgagtgataaaagatctcaggaaactgattggagattacatcagtatcatttacaaaacacagtgaaggcagagtcagagatagtggcgtcgaaaatattccttgcatcacggaacagtctgtgtgaattggccaaggaaactcatattgaatccgaatgggtactactttcttatcaatatccatttgtatatataagtttagaaattcctataatatttgtcttgtag

SEQ ID NO: 34862 - DNA, 741 bp, Zea mays
  Peptide Sequence Number=SeqID_76641
atggggtcgtcggagccgtcgtcgcgttccgtgcagaacctcgtgctgtacgccgccagcgccgcgctcagctgcctcgtcctcttggccggccttcgccacctcgatcccaaccgcgccgcctctcagaaggcgcagcagcagaagaaggagatcgccaagcgcctcggccggcccctcgtctccaccacgccctatgaggacgtgattgcgtgcgacgtcatcaaccccgacagcatcgacgtcgaattcgattccatcggcggcctcgacaaggtcaagcaagcgctctacgagctcgtcatcctgcccctgcgccgccctgagctcttcgcctccggcaagctcctcagcccccagaagggcgtccttctctatggcccgcccggcacaggaaagaccatgctcgccaaggccattgccagggagtccggtgccgtcttcatcaatgtcaggatctccaatctcatgagcaagtggttcggggacgcgcagaagctcgtgtctgctgtatttagtctcgctcacaagctccagcctgctattatcttcattgacgaggttgatagtttcttggggcagcgacggacaactgatcatgaagccatgactaatatgaagacagagttcatgtccctctgggatggcttcaccactgatcgtgagtccttttatactttgcctgctgccatgaaagttgatgtacaactttcctttgtcgacaatgatgtgaacttgtga

SEQ ID NO: 34863 - DNA, 1353 bp, Zea mays
  Peptide Sequence Number=SeqID_76642
ggactggcaaaggggcccactggaggactctttgccgagtgccagtccactagatactcggcaaagaagcctcctttgccgagtgcctatgagagctctcggcacagggactggcggtggggcccactggacccgtctttgccgagggccgtgagagcagacactcggcaaaattggcctctttgccgagtgccaaagaaggcactcggcaaaggatccgtcaccgtcacttggcgccgtgacggtgacttttctttgccgagtgtcaaatggcactcggcaaattctttgtcgagtgcccgacaaaaagtactcggcaaagaggccgttgccgatgtacacaaaataacgaacaacattaagtttcagaagtccttcaaaggctctgtccaccaaggaacgctccccactctcctgtccatcggcagtgaaccacgccactccgccactaagcgctcctctcttgctctcaagctcgccgttgttctctcggtgcttgctgatgcatggttggtccgctaccggtcgccgtttgtccatccagtgccaatcgaaacgcgcagcggtgatgtcgctccgccggtggaagcccttcttcccggcgttcgccgccatcgagtcatcgacaccgccatagagaccgccaccggggcccgctcccgggacaagttccggcaactgaggagcgaactggtggagatgctctgcgatgccgcggacgacgacgccgatcgagtcaaagagctctgccggctgctcgacgcggccatggccgaggcgcttttgacgctgcatgtggtcccggtgacgacgaccatgctgaccaccaccggcgtggacaaggccgacgaaggtctgctgagccacgaggccgggaaggtgcgcgccctcgcgcgcggcatcttaatcaagtgggcgcaaggcggcgtgttggacttggacaccacggtgttggccggccgctcctccgtccactccccggatgcgtccgcagcaggcgcagagaggcctgagacagccgttctactagctgatacccccaagatctcggacgagaagatgcctcctgtcgtttccaatgccggcggcgatcgcgtcaggagcgggcagacaggagatgcgaaacgcaagcacccaggctactaccgagaagctgatgctgatgacgagaagcggcagcgcaacgtctctgagaaggtcgaggacaggccaaggaaaatggagccggacatcaagagcaggagcagctggagatccagggacacgaagagcaggagccgggcgagcagctggagatacagggacgagaggcgcttctcgtcgtcgacgcgtcatagtcataggagggtttaa

SEQ ID NO: 34864 - DNA, 234 bp, Zea mays
  Peptide Sequence Number=SeqID_76643
atggcactcggcaaagaaggaaacctgggaaccggtaaagccatctttgtcgagtgttgtggtcaaggcacttggcaaagggactggcaaaggggcccactggaggactctttgccgagtgccagtccactagccactcggcaaagaagcctcctttgccgagtgcctacgagagctctcggcacagggactggcggtggggcccactggacccgtctttgccgggggccgtga

SEQ ID NO: 34865 - DNA, 360 bp, Zea mays
  Peptide Sequence Number=SeqID_76644
gttaacaaggtacatacaaagaaggcggctgctcccaagattgctaaacaagagtccagtgatgatgacactagcgacgagacctttgaatctgatgaggaacctgcaaagaagcctgctgctaaacccttggctgcagttgcaaaaaatggttcgaagacggtcaagcaagagagcagcagcgatgaggacagttctgaagatgagtcggatgacgacagtgatgatggtagcgatattgttttcaacctattgaatagggtatatgatgatgttggcaagcgctggagcagacgtttggtcttttcaatgccaaaccaaggggtgtcattgattttggtgatttcatccgagatgtaa

SEQ ID NO: 34866 - DNA, 1149 bp, Zea mays
  Peptide Sequence Number=SeqID_76645
atggccgggcaagcccatcctgcccacgctgctctccatggaatagcggtcccagcagatctcctctcccccgcggtccactcccccaacgagctgctctccatggaacaccgaggtcgcggtctcctactcggcgagatccatggttggcgtcctcctctgctgctgagcccacctcccgcatctctgatcgaggctctgctcgattcggtgcttcgttgtgtccatgggggtttcagctgggcctctggagaggccggtgcgcatgcaggcggtggacaacctgacgctggtcggttcctgcgcgcgcgcgaccacgacgtggacaaggcctccgccatgttcctcaagttcctcaagtggcggagggaggcggcgcccggcggctccgtgccggaggagcaggtgaggagggagctgtcgcaggacaagctgtgcatgggcggcggcgacagggccggccgccccatcctcgtcgcctttgcggccaggcacttctccgtcggccgtgacatggcagagttcaagagttttgttgtctacttcttcgacaagatctgtgccagaatccccagagggcaggagaaattcctctgcatcgttgatctcaagggctgggggtactcaaactgtgacgtccgggcatacattgccgctatagagatcttgcaggttaacaaggtacatacaaagaaggcggctgctcccaagattgctaaacaagagtccagtgatgatgacactagcgacgagacctttgaatctgatgaggaacctgcaaagaagcctgctgctaaacccttggctgcagttgcaaaaaatggttcgaagacggtcaagcaagagagcagcagcgatgaggacagttctgaagatgagtcggatgacgacagtgatgatggtagcgatattgttttcaacctattgaatagggtatatgatgatgttggcaagcgctggagcagtctttctgatcataagtgggataatgcgaactatctggagcccaaacagatcaacagtctgtgcatggtgactttgtctgcagatgactaccgtaataaagatgaagttagtgttctcacggaggaattcaagacccaacttaccattagggaggatctgttcatcacaaccaaggttgtctga

SEQ ID NO: 34867 - DNA, 213 bp, Zea mays
  Peptide Sequence Number=SeqID_76646
atggtggcggagacagcggctattggaggccgaccgtcgttgcagccttcgcaggcgcgcaagtcggccgcgctctccgtcgccgcttcgccggcctcctccgctcaccgctctgctctattcagtgggaatgggtcagggggtagatacatcagtaacgagaagttgttgtccagacagccttgtggaatcaattccaagaagaggctctag

SEQ ID NO: 34868 - DNA, 666 bp, Zea mays
  Peptide Sequence Number=SeqID_76647
atggtggcggagacagcggctattggaggccgaccgtcgttgcagccttcgcaggcgcgcaagtcggccgcgctctccgtcgccgcttcgccgacctcctccgctcaccgagcttatgttgctcaggtaacatcacaaggaaagcttcttatgtggggagccaaggctgtcgcatactatttccatggtttgattcttgacgagggaaatacctctctcgcacgggtacgcagagcggaggacccatgctctgcggtggccaaatggctgcttcatcgggggggaattgctcctactccaatctccatcgtccttgctccatcggctacttcgccgcccgacactgtccacgtcggagtccatgttcggcgtctccacttccacctcctgatctgctacgcgtttcaccttggcagatgtcaaagtaggtgtctcgtcgcgggagacaggcctcctcatgctctgcgggtccgtcagccgcactggtgcctctacggtctcctcctgctcgcactcgtgatatactcccttgggtcaaaaactcttgcaaaatttgagtttgcagattctttggagtacaatttccaacgcttggggttgatcaagcattcgagctgcctggccgatagtccccatgccaggcatcaaccaggatttagtgtctag

SEQ ID NO: 34869 - DNA, 321 bp, Zea mays
  Peptide Sequence Number=SeqID_76648
atggagataacgtttcggcggacgaagggccacgatcccaacctggagggggccgtagccgataggccggagcggctggagggtctcggagcacgcagccacggacaacgtagttcagcgaacacgatggaggacgcacccatcggtcggagcgtggcgctggcggtagctgcggcggtgcagcaggtgccgcaacgttgctgggaccagcgccaggatcacccccggtccgacggacgcgctcagggtcaagttggcccgggcgtccttcttgctgcgcttcttggcatggtggcgaccatgtcgatgcgcagcacgtag

SEQ ID NO: 34870 - DNA, 879 bp, Zea mays
  Peptide Sequence Number=SeqID_76649
atgatctacaaagatctttctgttgccctccttaccttcatccttcggtttttgaacggtggccatcgtcgccggcgaggcgctgactttgccgcacgtcgtcttctacgtgctgcgcatcgacatggtcgccaccatgccaagaagcgcagcaagaaggacgcccgggccacacttgaccctgaacgcgtccgtcggaccgggggtgatcctggcgctggtcccagcaacgttgcggcacctgctgcaccgccgcagcaaccgccagcgccacgccaagaccgatgggtgcgtcctccatcgccttcgccggagcgggttgcagagcggttgcgtgagtccgagacccagcagccgctccgtccaatgcggtactgccccctccatggatgggggccgtgtcctgctcgccacccgcgggctcctccaacggatgcagacaccgccgcccccgctgttcgatcgagcggactgctcgttcaagtcacctctccagcgcgccctcgtgcccggacacggctgactgcgcggaaattaaccggccctcgcggtcgccccgtcggccagattgcatccacgtccactgcgacggttgccgtcgacgccacctcttcctccgacgacgatgagaggatcgccttagtcctctgcgacggggtgcagcagcgactgcctaccccgactcccgacgacggcccatccggaacggtctcaccgtcgacgctcttgagcccgagcggcaacagggtggtacgtcggctggcgcaccacctctctccacggccactcgcgccggggtcatggtcggcgacagcgagaccgtctgacgatgacgacgtccgtgagcactcgcgctcaccgcctcgccgtcttccctga

SEQ ID NO: 34871 - DNA, 2391 bp, Zea mays
  Peptide Sequence Number=SeqID_76650
atgcaggcggcacgcaaccgcaccaagggggcacaccctttcgactccgacgcgtccagcatgggggcccaggcccacacgtcatgcgggcggaagcagcggtcaagtcgactgcaggctcacgtcccctcctgggacagcgagagagccctctcccacggcgtgaagacgacgcgcccgtgttccgttcctcgaacggctcgcgcacgcacaacggctgccccgcgaaccactcgtcccgtcgcattaactctgcggcaggacaggcggcacctttggcaggcgaaggaggcgacgcttcacctccgccataatgaccgcgtcaaaaaggctagcccctcggaagggttcaacagccgcctcagagcactcaggctccacgcccactactggtcagaggttcgaaggctggcccctcggaagggttcgacagccgcctcaggccactcgggctccgcgcccactactgatcaggggttcgtaggctggcccccgaagggttcaacagtcgcctcagagcacacagagcgagggatgactctgggtacgtccgatacatggccgaggctcgagctacgctcccgaggtaccctaggacatttccgagaccagcaggagcgattctgtaacgaaatcccatcagagggaggcatcgagccctcggaccctatcaaacgggaccggttccggcaaatcacctgcaggtcaaggctccgtccactcaagggacacgatctcgcctcactcgagcccagccccgggcaaaggcagccgacccaggaggattcacgtctcgcccgagggtcccctcaaggccaaagtgactgcagtcacttcgccgctccactggctgacctgacaggaaaacagcgccgcctgcgctgctccgactgctgtgccacccatcaggggctcggactccacctcgacctcggaagacggactccgcctcgcccgaccccagggctcggactcaacctcgactccggaaggcggtctccgcctcgcccgaccctagggctcggactcaacctcgacctcgaacgacgatatccgcctcgcccgacccccgggctcgaactcaacctcgaccccggacgacggtctccgcctcgcccgacccccgggcccggactcagcctcgacctcggaggagcccccgcctcgcccgacctcgggctcggaccgaccacgtcacaggggggggccatcattaccctacctctagctagctcaggctacggggaacaagaccggcgtcccatccggctcgccccgcgggacgacgacgacctggcggagcaggtggccaaattcgggtaccagcatgagttcgccgacatctcgtggttcccggggcacgggcgggcggtgtaccgcatcgacgaccgcttgccgctggccgcgtccggcgagggcgccatggacttcatcggcttccgcgccaccccaacggtcgtgatccaggccagccgtctcgccgaggatctcttcgagcgcgcgggcaacggcagcggcaagtgcctgacgtcgcgggtgacccacgcggcgctgtcggtggccggctacgggctgcagcggcggagcggcgggctgttcacggggtatccggtggtggggccgcagcaccggatgcaggcgtcgggtgggtgcgtgacggggcccgagaacgcgctgctgacggcgtgcccctgggacccgcgggtgccggccggcaccttcttccaccagaccaccttcagccttcccctgcgccgtgccgcggcgttcgtcaccgaggtgcgccggctgcgggacctggagccccaggcgctgtgcggcgtcgagctctacgacggcatcctcatgcggtacgtgaaggcgtccacggcgcacctgggcaagcccgcgccgcgcggggagccgtcgggagatatggtggacttcgacatcacctactaccgcagccgcgaccccgggcgggcgcgcctgttcgaagacgtgctggaggagatcgagcagatgggcatcttcaagtacggcggcctgccgcactggggcaagaatcgcaacctcgccttcgtcggcgccgcgcgcaaatacccgggcttgccgcacttcctgcgcgtcaaagacgcctacgaccccgacggcctcttctccagcgactggagcgacacgatgctcggcatcggcgggaggtcgccgacgacggacgcgcccgggtgcgcgctcgaggggatgtgcgtgtgctcgcgggacgagcactgcgcgccggagcagggctacgtctgccgccccggcaaggtgtacaaggacgccagagtctgcaccagggacagatcgacagctgaaggaactatcggaggactttctccaagattcccaacagaattgaatttgctgctatga

SEQ ID NO: 34872 - DNA, 1458 bp, Zea mays
  Peptide Sequence Number=SeqID_76651
atgcaggcggcacgcaaccgcaccaagggggcacaccctttcgactccgacgcgtccagcatgggggcccaggcccacacgtcatgcgggcggaagcagcggtcaagtcgactgcaggctcacgtcccctcctgggacagcgagagagccctctcccacggcgtgaagacgacgcgcccgtgttccgttcctcgaacggctcgcgcacgcacaacggctgccccgcgaaccactcgtcccgtcgcattaactctgcggcaggacaggcggcacctttggcaggcgaaggaggcgacgcttcacctccgccataatgaccgcgtcaaaaaggctagcccctcggaagggttcaacagccgcctcagagcactcaggctccacgcccactactggtcagaggttcgaaggctggcccctcggaagggttcgacagccgcctcaggccactcgggctccgcgcccactactgatcaggggttcgtaggctggcccccgaagggttcaacagtcgcctcagagcacacagagcgagggatgactctgggtacgtccgatacatggccgaggctcgagctacgctcccgaggtaccctaggacatttccgagaccagcaggagcgattctgtaacgaaatcccatcagagggaggcatcgagccctcggaccctatcaaacgggaccggttccggcaaatcacctgcaggtcaaggctccgtccactcaagggacacgatctcgcctcactcgagcccagccccgggcaaaggcagccgacccaggaggattcacgtctcgcccgagggtcccctcaaggccaaagtgactgcagtcacttcgccgctccactggctgacctgacaggaaaacagcgccgcctgcgctgctccgactgctgtgccacccatcaggggctcggactccacctcgacctcggaagacggactccgcctcgcccgaccccagggctcggactcaacctcgactccggaaggcggtctccgcctcgcccgaccctagggctcggactcaacctcgacctcgaacgacgatatccgcctcgcccgacccccgggctcgaactcaacctcgaccccggacgacggtctccgcctcgcccgacccccgggcccggactcagcctcgacctcggaggagcccccgcctcgcccgacctcgggctcggaccgaccacgtcacaggggggggccatcattaccctacctctagctagctcaggctacggggaacaagaccggcgtcccatccggctcgccccgcgggacgacgacgacctggcggagcaggtggccaaattcgggtaccagcatgagttcgccgacatctcgtggttcccggggcacgggcgggcggtgtaccgcatcgacgaccgcttgccgctggccgcgtccggcgagggcgccatggacttcatcggcttccgcgccaccccaacggtc

SEQ ID NO: 34873 - DNA, 594 bp, Zea mays
  Peptide Sequence Number=SeqID_76652
atggagccagagcagtcgtcgccagccaggacacatggagaaaaattcaatcattctttgcagccaagtgaagctaataccttcgctaacatagaggctacatacaagtgccttgtggatgtttatggaaccagggaagaagacattgttctgtatggccagtctgttggtagcggaccaacccttaatctagctgtttgtttcaatcgcacctcggttggtgctggggcgttgcccaaccgttccgcgctcgtggacttcatccccaacccggaagcctggtcggacatcgtcgattgcctaccggattcggccgctgacgacgcgtcgctcgtcctcgcgggcggagtgcgtcttcgcttccctcaccggccgttagatcttgatccaacgtgcgcgatcagttatcagctcaagctcttttggttgccgtccagatctaatcctacggccgaaaatcctagataccccttcgaccgacagctttgcaaaagagcccctaacgatgttagtaaacaacccgcggtccatacagggctgttctctgtgtctgcagaacgttacaccgagacccctgcgttttccggttattga

SEQ ID NO: 34874 - DNA, 716 bp, Zea mays
  Peptide Sequence Number=SeqID_76653
atggccggttcaaagcatagctctgaagtttccaccagaaatatcatcaagccaacatgggtaaccttgccggctgaagaacagctccgattcgaggagcgccaggagcagctgatccaggaagcaaaggcgaaattcctggccaacttcaagacggccgttggcgcagtagtcgttgctccgcttggcacaccggacagtccagtgaattttagtggagtggcctccgagaaacccgaagctgaggagttcagagtgtacagtccctgcatttcgctagtggccgacggcacggtcccacttgtcatcaccgtcgcccgccgttgtaacagactgcgcggaatgcgcggcgattcccctgggcatgcaccggcgaccctcctctctccatctcgcctgggtccgagtcctcgggctatacaagccaacagtgcgcacccctgtttccggttaaaatccggcacctcacctgcctcaacaaaccctgggattccaattccacagtgtgtgggacctccccacatcgccattgaatgtcgttgtgccatcggcgagacctcggtaggtgctggggcgttgcccaaccattccgcgctcgtggtcttcatccccaacccggaagcctggtcggacatcgtcgattgcctaccggattcggccgctgacgacgcgtcgctcgtcctcgcggtcggggtgcgtcttcgcttccttcaccg

SEQ ID NO: 34875 - DNA, 450 bp, Zea mays
  Peptide Sequence Number=SeqID_76654
atggccggaatcgcccggtccacgtgcgcaggcgggtgttctcgtcggcggcgagtgtaccggccaaaccacggcgatctggttcaatccaagggcacgagggttggatggggctggggcaagctggactggccggtctacggcggcagtggctcgggtggccgcggacacaccgcgcacgggcaaacgacggtgaactggactccggtgaggcttgagtgtgcgcggaagagtgtaaccgacgcctgggagggctttataggcgcgggcgcgggacagggcgccgactggccgctggcgcgacgcggggcgcgcgcgggcgtgctctggcaagctcagggcgcgtcgaacacgtggagcttacaatctgcccgtgttccacagctcacccaagtcgcaaacgtgcgaatcttggcaaaaatccggtgcgagtcttttcctggcacctag

SEQ ID NO: 34876 - DNA, 366 bp, Zea mays
  Peptide Sequence Number=SeqID_76655
atggctggaatcacccggtccacgtgcgcaggcgggtgttctcgtcggcggcgagtgtaccggccaaaccacggcgatctggttcaatccaagggcacgagggttggatggggctggggcaagctggactggccggtctacggaggcagtggctcgggtggccgcggacacaccgcgcacgggcaaacgacggtgaactggactccggtgaggcttgagtgtgcgcggaagagtgtaaccgacgcctgggagggctttataggcgcgggcgcgggacagggcgccggctggccgctggcgcaacgcggggcgcgcgcgggcgtgctctggcaagctcagggcgcgtcgaacacgtggagcttataa

SEQ ID NO: 34877 - DNA, 366 bp, Zea mays
  Peptide Sequence Number=SeqID_76656
atgtccaaaccggacaaaactatccccctccttatcctcccggtgctccccagccttcttaaccctggggtcggaccgcacgagttcggattgagtgactgcccacacagtctcgagtggttgtacgataaaggagtacagggggtcgggagggggctgcccacggggagggggcggagttccgcggcggggatcgccgcgggtgggctctgggtggggaacgggggttggaaagtggcgcttcgggttcgtggctacgcgagggagctgctcggctcactcaattccttgccggaccaacagagaaggagagggaggagaagggaaagactcaccggagaggaagacgacgccggcgccttgtga

SEQ ID NO: 34878 - DNA, 366 bp, Zea mays
  Peptide Sequence Number=SeqID_76657
atgtccaaaccggacaaaactttccccctccttatcctcccggtgctccccagccttcttaaccctggggtcggaccgcacgagttcggattgagtgactgcccacacagtctcgagtggttgtacgataaaggagtacagggggtcgggagggggctgaccacggggagggggcggagttccgcggcggggatcgccgccggtgggctctgggtggggaacgggggctggaaagtggcgcttcgggttcgtggctacgcgagggagctgctcggctcactcaattccttgccggaccaacagagaaggagagggaggagaagggaaagactcaccggagaggaagacgacgccggcgccttgtga

SEQ ID NO: 34879 - DNA, 1146 bp, Zea mays
  Peptide Sequence Number=SeqID_76658
atgtcgttattaggacctccggcacggggagccatctgcttgctagttgtgtcgtcgtcgatcgtggtcctcagcacggccggtggtctcggatccgatgccactagtaggtccgccgctgcctatctctcagttgacgacgactacggggaggaggacgagagcggcgactcctccttctccttccccgaccccgagacgagttcagcttcaaccgggctagtgttcgggttctacgacgacaagtgcccggacgccgaggagatggtgtcgtccatggtgcggaagctctaccacgcggaccccaacgtcgcagccgcactcgtccgcctcttcttccacgactgcttcatccacggctgcgacgcctcggtgctgctggaccgcgtcggcggccagagatcggagcgcgacgccggcccgaaccagtcgcttcgcggcctgggcgccgtcgaggccatcaaacggggagtggagaaggcgtgccccgggaccgtctcctgcgcggacatcctggcgctggccgcgcgggacagcctcgtgctggtgggcgggcctacctacccagtgctcacgggccgccgcgacagcgcccagagcttctactacgacgcggacggaggtggcatcccgccgccgaacgccacctacgccatgacgctcgacgcgttcgcgcgccgcgggcagttcacggagcgtgagaccgtcgcgctcctaggagcccacagcatcgggaaggtgcggtgcaggttcatcgcggacaggatctacaacttcgccgggaccggcgcgccggacgactccatcgacccggacatggtcggcgagatgcgcgcggcgtgcggcggcggcgacggcgcggcgccgatggagatggggtactacaggcagggccgggaggtgggcttcggcgcgcactactacgccgagctgttggagggccggggcatcctgcgcgccgaccagcagctcacggcggggagcaccgtgcggtgggtgcgcgtgtacgcgtccggagcgcgcggcgaggagctgttccgcgacgacttcgcgcacgccatggtgaagctgtcggcgctcgcgccgctcacggggtcggctggccaggtccggatcacctgctccaaccccgtccgtcccaactga

SEQ ID NO: 34880 - DNA, 1656 bp, Zea mays
  Peptide Sequence Number=SeqID_76659
atgtcgttattaggacctccggcacggggagccatctgcttgctagttgtgtcgtcgtcgatcgtggtcctcagcacggccggtggtctcggatccgatgccactagtaggtccgccgctgcctatctctcagttgacgacgactacggggaggaggacgagagcggcgactcctccttctccttccccgaccccgagacgagttcagcttcaaccgggctagtgttcgggttctacgacgacaagtgcccggacgccgaggagatggtgtcgtccatggtgcggaagctctaccacgcggaccccaacgtcgcagccgcactcgtccgcctcttcttccacgactgcttcatccacggctgcgacgcctcggtgctgctggaccgcgtcggcggccagagatcggagcgcgacgccggcccgaaccagtcgcttcgcggcctgggcgccgtcgaggccatcaaacggggagtggagaaggcgtgccccgggaccgtctcctgcgcggacatcctggcgctggccgcgcgggacagcctcgtgctggtgggcgggcctacctacccagtgctcacgggccgccgcgacagcgcccagagcttctactacgacgcggacggaggtggcatcccgccgccgaacgccacctacgccatgacgctcgacgcgttcgcgcgccgcgggcagttcacggagcgtgagaccgtcgcgctcctaggagcccacagcatcgggaaggtgcggtgcaggttcatcgcggacaggatctacaacttcgccgggaccggcgcgccggacgactccatcgacccggacatggtcggcgagatgcgcgcggcgtgcggcggcggcgacggcgcggcgccgatggagatggggtactacaggcagggccgggaggtgggcttcggcgcgcactactacgccgagctgttggagggccggggcatcctgcgcgccgaccagcagctcacggcggggagcaccgtgcggtgggtgcgcgtgtacgcgtccggagcgcgcggcgaggagctgttccgcgacgacttcgcgcacgccatggtgaagctgtcggcgctcgcgccgctcacggggtcggctggccagaggaggacagtgttggggcgaaggcaaaggcgccacccctcgctcgaagtcttcgctgataaccgctggtcagacagggacagaacaggcggggacacccttcgcttgatcggcaccagacgaagaccggcgacgaagtcatcccacagtgcggcctcgtccagctcagaggcccacgtgctaggaggcaatagctctgttaatctgccctcccacgggcactgtgcaggggtatttatagactgtaattacagggatgcctttacagatcaggcccgtaactcgcggcggccacgcagggcccgttacaatgggccggaacgcacgtgggcctctgagctggacgaggccgcactgtgggatgacttcgtcgccggtcttcgtctggtgccgatcaagcgaagggtgtccccgcctgttctgtccctgtctgaccagcggttatcagcgaagacttcgagcgaggggtggcgcctttgccttcgccccaacatttgccctccgagggaccagttcgacaaagtcacctggtgccgaagacgtcgctag

SEQ ID NO: 34881 - DNA, 330 bp, Zea mays
  Peptide Sequence Number=SeqID_76660
atgctctccgccacattcctcacccagccttgctcgcagctactattgttccttgctgttgctgctttcggcactgatctggctgaacacggacacaatgcagccaagcatgtagcctcattaatcagtgtagatacgcctaaagtcggccctgacatacagcaatgcacgaccaagaaaagagcgttcgatctgttagagctcgatcatcgccgaaaaaaggctatgaagaaattgtttgtaagtcaacttgaacataaagacactcctgatgagcccagatcaataaagtgcaagacacactttccactaatggaagcagacacctaa

SEQ ID NO: 34882 - DNA, 549 bp, Zea mays
  Peptide Sequence Number=SeqID_76661
atggcttccacgacgactgttgcacgtgatttctcgggggataaatgcaggagaagtgaggaaactgcaggatacaaggatttacagttgcaattgccttctaaaacagatttacagccaccagctacactgatggctgtcatgccctccagagagacagacaatattgcagaacacggacataatgcagccaagcatgtagcctcattaatcagtgtagatacgcctaaagtcggccctgacatacagcaacacacgaccaagaaaagctcgatcatcaccgataaaaaggctatgaagaaactgtttgtaagtcaacttgaatgtaaagacactcctgatgagcccagatctgctcgacgcgtgaacccccgcgtcgccgagaaggagatcgtcgtcgtcctctccttcgcctccgtggcccttgtcgagagcagtgttgccgtcgtcgaccacctcaccttcctcgtctctcaccttcctcccctccaaaatctcacagccgcttcctcctcttccttgcaggatccaatcgtacatggcctgtag

SEQ ID NO: 34883 - DNA, 153 bp, Zea mays
  Peptide Sequence Number=SeqID_76662
atggcggtgtcctcggtgttcgttcgctgggtccggcgagggagcagggcgatcacaggcttaggatttatggtgccgcggattgcgctagggcaggcggtgaccggtaaggttggcccgagatctgcgcgggttttagaagctagattctag

SEQ ID NO: 34884 - DNA, 270 bp, Zea mays
  Peptide Sequence Number=SeqID_76663
atggcgatgtcctcggtgttcgttcgctgggtccggcgagggagcagggcgatcacaggcttaggatttatggtgccgcggattgcgcaagggcaggcggtgaccggtaaggttggcccgagatctgcgcgtgacacagtgaaaaagaaaaagaaaagggggcgcaagtgggccggcggggtgcttttcagcccagcaggcgcagtgaaggcgcggaaaggggaagatgggccagaaacagatatttcagcccaagtgacgttttcataa

SEQ ID NO: 34885 - DNA, 291 bp, Zea mays
  Peptide Sequence Number=SeqID_76664
atggcgatgtcctcggtgttcgttcgctgggtccggcgagggagcagggcgatcacaggcttaggatttatggtgccgcggattgcgcaagggcaggcggtgaccggtaaggttggcccgagatctgcgcgggttttagaaactcttccagggtttacaaatcctacccccattaacagaaatctcatcctcgagatttatgtaattgtggacattactccacaactcatcacactcaatcaaagatccaaatcagacaagtatcgtaagaacaaacattcaaatacataa

SEQ ID NO: 34886 - DNA, 429 bp, Zea mays
  Peptide Sequence Number=SeqID_76665
atggtccttaatcgactcagacggagacactacaccgagactctcttctcgtgcaagtcacccgcccggtctcagcttaatcttttaacccaaaaacttggtacctggcagagagcaatactaagcatagtaaaacctttttgtaaaaacagggtttcaaggaggcgcggggagcactccggcgagcacctgtaccggccgactggggccacggctggattctccgagcatcagacaccaaattggatctaccgcgagtactttccccaacccaattgcacgaatcgtgaactactgcggtctggccacggtggccgtgagcatcgcggcaagaccgacgcgttcccggcgattggcgggctcctagctcaattcagtggctcggcaagcatcgaagagtcatcagagtgctcaaacaagggagagtga

SEQ ID NO: 34887 - DNA, 387 bp, Zea mays
  Peptide Sequence Number=SeqID_76666
atggtccttaatcgactcagacggagacactacatcgagactctcttctcgtgcaagtcacccgtccggtctcagcttaatcatttaaacccaaatcttggtacctggcagagagcaatactaagcatagtaaaacctttttgtaaaaacagggtttcaaggcagggttatgagaatactcaaacgagggagcagaaggtgtgggctgacctgaatcgcgctggccgcggtgaggctgtttccacggtggcggagactgactttgggggaagttcgaaattggagctctctagtgattggttgcgaacaatacgtggtggctgggtgctggatgaccttgcggagctaggggagggctcaatttatagggagagcgagcggtggtga

SEQ ID NO: 34888 - DNA, 453 bp, Zea mays
  Peptide Sequence Number=SeqID_76667
atgctggtagactacacaacggtactcgatagaccaagtgtgccagtcgaaagcccgacgcaacagggtatcgagagcgtcgtggaagtgacacccgcgagcagcgtcacgagtgatgtgtctcgcaatccatccatccggctccggctcctccgagagctccgtgccgtggctcgaactaccaccggcgttgtcgtcgtctccgtctccgttgggggggcatctctgactgaggtgcaggggaaggaggcctctcagcctccacctcctgctgaggcaagggtgaagagtcctgctgctcctgctcctggcgttggtgctcctactcctcatgcaggcgacgatgcagtctcttcaactggttggactggcctgacaccgtatgacgcaggggacgctccaccagtcgagaaggcaaaaaggggatcacagacttatgtgcagtgcacctaa

SEQ ID NO: 34889 - DNA, 606 bp, Zea mays
  Peptide Sequence Number=SeqID_76668
atggggacgagcggagctctggccggacaaagggaggaggcgcgacacaagaagaaactggggaggggagatccacggacgcagagagctgaagaccaaatcgagctaggtccgatgccggggctgggcgcgaccagccatggagcttggggccaggcactgtcggggtggagcagggagaccgcggccagggcgcaaaggacagggaagaagacgcacgagagggagagcggagaagaagcagcgggagcagagagaaagaaggagacgcgcattgataaaggaaccagggggcgcgatccacttctccggctctggctcctccgagagctccgtgccgtggctccaactgccaccggcatcgtcgtcgtctccatctccgtcagggggaaggcggcctcccagactccaccttctgctgaggcgagggggaagagtcttgttgctcctgctgctgctcctggcgtcggcgctcctgctcctcgtgcaggcgacaatgcagtctctctaggtgatgggactgatctagcaccgtacgacacagtggacgcttcgccaggtgagaaggcaaaaaggggatcacagacttacgtgcagtgcatctaa

SEQ ID NO: 34890 - DNA, 516 bp, Zea mays
  Peptide Sequence Number=SeqID_76669
atgctgacgccttccccctatctcatccccacccgacgctcccgtgtaccgccttccaggctcccacatcgcagcaaggattgtcttctcttcacgttgtatgtgctgcccactccattttattttcttctccacaggtgcgacgtttacagctttggtgtcatattatgggagctggcaacgcttagaatgccatggagtgggatgaatccaatgcaggttgtgggggcagttggtttccaggatagacggcttgatattcccaaggaagttgatcctctgggtggtgaagatgataactttgctattgtgtttgctgctatgggagtgaacatggaaaaaaaactcaattcttatttaagcgaccataatgtaggaccacacaagattcaaggaattggagctggtttaatccctagagtcttggatgttgacctccttgatgaaactctacaggttttaagtggtgaagctattgatactgccaaggctcttgctttgaaagaatcgaaataa

SEQ ID NO: 34891 - DNA, 345 bp, Zea mays
  Peptide Sequence Number=SeqID_76670
atggcacttctgcacagcagggaggatccttggtgcgacgtttacagctttggtgtcatattatgggagctggcaacgcttagaatgccatggagtgggatgaatccaatgcaggttgtgggggcagttggtttccaggatagacggcttgatattcccaaggaagttgatcctctggtagcaaggatcatattcgaatgctggcagaaggacccaaatctgcgcccttcatttgcacagttaacaagtgccctaaagactgttcaaagactagtgaccccttctcaccaggagacccagagcccccatgttcatcaagaaatctcagtgaacttgactccatag

SEQ ID NO: 34892 - DNA, 1707 bp, Zea mays
  Peptide Sequence Number=SeqID_76671
atgggcgttgatgctgctgcctctgctcggctgctgccggcgatgggggtgacatggcggtttggaccacaggcgattcacgaaggacttcatgtcccattattgcagccaactcccccaccaaaccctaatcactccggcgccacgccgcgccgcacggacctgcctcgatccgctccagcggccgcccgccgaggcggctgtgcggtggttgcgcttgcgctttcgcgcgcaggtccccgtgggtctctgcgcgcagcgggacccgtccacggcggcgaggcgcgggcttcaaggcgggcgcaggcggaggggcggaattgctcgggcgatgacacggaggctcgcggccgcggcttcgcgtccgaggccgtgaatgggagtggcggggcgctgcgggcggcgactgcgtacatggaggccggggcaccgcccctgatttggatgattttggatctggttctcacccagatacttggagtggagcttatctatgctggggaaagagaacagggaggctccattaagaatcgcatgcccacctggtgcgacgtttacagctttggtgtcatattatgggagctggcaacgcttagaatgccatggagtgggatgaatccaatgcaggttgtgggggcagttggtttccaggatagacgacttgatattcccaaggaagttgatcctctgggtggtgaagatgataactttgctattgtgtttgctgctatgggagtgaacatggaaaaaactcaattcttgcggcaaaggagaggcgcagccgcctggattagacccaagaacccgccgatctgcggcgaccagggcgaccgacgacatggatggcggtggccgaggagaggagtgggagggggcccccccggctacgtgctctcgctcccggcggcggcgctgcccctgcccgtcgtcgtctcctgcctggacgccaccgtccggcgcaaggggcgcaaccatatccgccaccgtggccatccgtcgggctggtgggccttcaggctccccgtccccgcgccggaggaggcaaaggggccggttcccccatcgtcggcggccaataatccgaccgaggagggtcgttcctgttctcgtcaccagcgcctgccctgcggcgcggcggtgacgccgcagtggaggtcggggccgatggggcagggcacgctctgcaacgcctaccgggttcggctcaaggtggccggggtactgcgggatcaggtgaagcaccgccccacgccagcgaccgccaggacgcccgcccggccgcccctagacagcccggcctcgactgaggaagaagcctctgaaacgggggagaccctcgccgcctccgaggacggtacccgcggcggcgccgccgctagcgccagcggtatacctcgtcaagaagaagaagaaatcggcttcggcgaggaagccgtggcggcccccgaaggccggttgctgccggagtaccggccgctggcgagccccaccttcgagccgtcggagcacgccaacaagcacagccaggtgatgcagctccaccggcagcggaagagccagggccagcaccaccctctgcccgcggagcatccgcgagccatggacgtcctccagtttccccagcggtggcaggtgaaggagtaccagccgacgccggtccaccagcctctgccgcatcctgataaggaaatgatttcttgtttgtga

SEQ ID NO: 34893 - DNA, 504 bp, Zea mays
  Peptide Sequence Number=SeqID_76672
atggggggggccccacaaattacggcaagacatttaaagtggggtcaagtgaggaaagggaagagatttaggcatatgctctccacgacgggaaatgtgtgtgagagtgtgtttttggaaaagaaaacgatgccactcgagcgggaagatcaatgggggttgagagtgaaaaagtttgtttccttcttgggaaaaaaccatcaaagctctttggtcattaggacatcctattgctcagaggtggaaggattccctcatctcttgcagagttgcgcgcttcgcatggggatccgcaagaagccggaatacgtctggaaagaataccgcgagaacggaactgagaagtgctttatggcagtctacctaggagaaagccgaaattacccaaaccaccctcctttccaagtcaccttcaccggacaccgcttcccagacacttgccaaaatgttgccccgaaaagctctccgacagctatgccaaaactacagctgagaggtctttga

SEQ ID NO: 34894 - DNA, 903 bp, Zea mays
  Peptide Sequence Number=SeqID_76673
atgtgggatgggaaaagggcagtgtttttactaagcgatgttttcaaaaagtgtatggtgaaggaaggattgtcccctcatataaggatcggtttgtcatccttcactacctgtactcatgacaagtacaacctatcgagactgtatgggcagtcactcaatctgaactcatacggttcaaaccccagggttatgaaggctggggagcaccgggaggataaggagggggaatgttttgtccggtttggacatggcggtggcctgactccttccggtataaccgttaaggtggggacatgtgaggaaataaagagatttggcattcgatctcacgatgaggtggaaggattccctcatctcttgcagagttgcgcgcttcgcatggggatccgcaagaagccggaatacgtctggaaagaataccgcgagaacggaactgagaagtgctttatggcagtctacctaggagaaagccgaaattacccaaaccaccctcctttccaagtcaccttcaccggacaccgcttcccagacacttgccaaaatgttgccccgaaaagctctccgacagctatgccaaaactacagctgagaggaagagatcccactgaggatgaccccaccatcgtctacatggccggatatctccacaccctcgataaccactatgatgacctttcctcccactgcacccacctaaactcccaggtggaaagcttagagcaacaggtcaaggaacttaaaaaggagaaggcgtccctccaagagaatctcgaaatagcagaaggcgaagaggccaacactcgtgaagcctaccgaaccctgaagatggattacgataagaagctaaagaagcttgcccccacgaagaaaatccgaaagaatatcaagagccaaggatga

SEQ ID NO: 34895 - DNA, 423 bp, Zea mays
  Peptide Sequence Number=SeqID_76674
atggcttttctttctttcaacccgggctccttccccaccgtaacagtgactgcggagaggaaaagggtggcacggcttaccggtgacgagggaggttcggtgaagggctgggtgaggtacaaggaatcgacgaatggcttaccgtgggctcggactacgtgcggcggcgaccggttgaagtccggcgacgtggatctggcgtctccggcaagggtggaggatggctgtcttggctggtctacggtggtcgtggcttgtgcggccgctggcatggggttctttgggcaaatgctggcgaactcgtgctcgggctgggtcagggacgcgcaggggtgtacggtcgagaccgaggtgggatttatagctgtgggcgcgtgcatgggcgcggggttgacacggcatggggctgcgcgcgtgggctga

SEQ ID NO: 34896 - DNA, 534 bp, Zea mays
  Peptide Sequence Number=SeqID_76675
atgggcttttctttctttcaacccgggctccttccccaccgtaacagtgactacggagaggaaaaagggtggcacggcttaccggtgacgagggagaataaggctgaccgcaagcaggcggtcgggctcgtcggcagcgtgtactctggcctgctcacggcggtagggctcaatcaaatggcacatgtagctttacgggatgctaaggatgttataggtacaaggaatcgacgaatggcttaccgtggggctcggactacgtgcggcggcgaccggttgaagtccggcgacgtggatctggcgtctccggcgaggtattgttcaatcctcggttcggggagcttcactaaggtctggagaagctatcccaagggtcggatagggtggaggatggctgtcttggctggtctacggtggtcgtggcttgtgcggccgctggcacgaggttctttgggcaaatgctggcgaactcgtgctcgggctgggtcagggacgcgcaggggtgtacggtcgagaccgaggtgggatttatag

SEQ ID NO: 34897 - DNA, 609 bp, Zea mays
  Peptide Sequence Number=SeqID_76676
atgaatccgttcgtcgtggtcaatggggagccatatcctctggacatcagaggagaactagatgacacaacagccttcaaaaacttcaagaaggatggaataagtgaaggacaattcaactatgttttgatccttgaaatggacgcgataaggaaggcttgtgcctctctggaagatgggtatctacccccagtgacatttgtcgtaatacagaaaaggcaccacacaaggctcttccctagagttcatggaaggagagatgttactgacagaagtgggaacattcttcctggaactgtggttgataccgagatttgtcatccgcgggagtttgatttctacctttgtagccatgctggaattcagattcgtttctccagggaaccagcaggccaatacactatcatgtcctctacgatgaaaaccgtttctcggctgatgggctgcaaatacttacaaacaacctgtgctacacatacgcacgatgcacgcacgctgtctcaattgatttttgcttactttttagtcttcatgtaccacctgtctgagattgatgaactgagacaaaaaccattcaaaagaaatggcccagactttgatgctaaataa

SEQ ID NO: 34898 - DNA, 933 bp, Zea mays
  Peptide Sequence Number=SeqID_76677
atgacgtcctctggctcacccttctcctcctcctcctccgcgtctcgcatgccggacaggtgggagccgccgtcgtcgcagatgtcaaaggacgggcccgactccgactctccgccgtcatcacagatgtcgaaggacggccacggctctgacccgactctgccatcaggaggacttggactcgtcatcgttgcagatgggagccagatctccagtgactccgtgagctgcctgctctgcttcacagcacacacccagcacaacactagctcagctcgacaaggtagcagtcattgctcgccatgcaatgtcattgccgctgctcccctcctcctgctcaccgccgccgtagcggggcttctgttggagctgtcagtttcttgttctgtgttacaactgtgtcattcaaatgcaatggtggttgcatccatggactggccacaagtcacaacatataaagctctggtctcggcacaagcacacttggaagagattatacaaaatctcggcagaatgataagggagttgctgatttcgttctacaagaggactggcaaaaagcccaaaaggattatattttacagggatggaataagtgaaggacaattcaaccatgttttgatccctgaaatggacacgataaggaaggcttgtgcctctctggaagatgggtatctacccccagtgacatttgtcgtaatacagaaaaggcaccacacaaggctcttccctggagttcatggaaggagagatgttactgacagaagtgggaacattcttcctggaactgtggttgataccgagatttgtcatccgcgggagtttgatttctacggaaccagcaggccaatacactatcatgtcctctacgatgaaaaccgtttctcggctgatgggctgcagatacttacaaacagcctgtgctacacgtaa

SEQ ID NO: 34899 - DNA, 171 bp, Zea mays
  Peptide Sequence Number=SeqID_76678
atggcctttgtatatgtagttgaacaggtatttaacagccttgatgctcccgcacgcctcaacattgatgtgacagttgaagagccgaaggaggatatgaatccttcccatgaaaagttgtgtcacagaaaggccgagggtaatgattcttgcacgatgcacgacccttag

SEQ ID NO: 34900 - DNA, 2601 bp, Zea mays
  Peptide Sequence Number=SeqID_76679
atggctctggtgcggaagtttggtaaaccagacatatttcttaccatgacatgtaaccctaactgggatgagataaggagggagcttctccctgggcagacaccgcaagatcgtccggatcttgtagtgcgtgtccttcatgcgaagctacaagagttaaagcatcggctgactaaacaggatattcttggtaaggtccgagcctacgtctatgtcgtggagtttcagaagcgaggtttgtcgcatgcccattttctactcataatgcagaggaagtacaagctcacatgtcctgagcagtacgaccttttgatctcagccaagatcccaagcaacaagtaccctgaactacaaaagatggttatcaagcatatgatgcatggcccgtgtgggtcgctaaaccctaacggcccatgcactaagggtcgtaaatcgtgcaagaatcattaccctcggcctttcagtgacacaaccttgcaagggaaggattcgtaccctatttatagacgtcgtgacgatgaccgtaaagaaaaggtccgagggtgcgaactggacaatagatgggttgtcccttataacccatacctccttcgtctcttcaactgccacatcaatgtcgaggcatgtgggagcatcaaggctgttaaatacctgttcaaatacatatacaaaggccatgatcatgcgtctgttgttatgagagatgcgagcaaggcagatgatgatgttgatgagatcaagcagtatagagatgcaaggtgggtgactcctccggaagccttgtggaggatatacggctttgagcttagtcagatatctccacctgttatgcagcttcaactccatcttccaaacatgcacatggtggcgtttcacgagcggcaaatggtcgagcgagtcgtcaaccgtccaggtgttgataggtcgatgctcacatcatattttgaggcgaataggctacacgaggaggctcgtggcatcctatatcgtgacttccctgagtggtacacttggcagagtggtaagggaaaagtatggcaatggaggaaacaagatacaggtggacaagtcggtaggatagtctctgctcatccggctgagggggagcgctactatcttcgtgttctcctaaaccacgtgactggcaccgcctcctatgtggatctaaggacagttgatggtgtcaccctaccgacttttcgtgaggcagcagagagaaggggactacttgagtcggacaacacactggatgagtgtctcactgaacgtgctcttttccagatgccatcgtcgctgcgacgactttttgccacaatactggtgtactgtgagccaagcgatgtggctgtactctggcagaaacacaaagattctatgtccgaggacaatcaacacaagagtcagaacaaaactcatgttgagcagatggtattgattgacattaggaacatgttgcagtcaatgggaaaggacataaagacattccctctacctcctatgatcgacgcgtatgacgatgctattggtactgctcgggaggtttacgaggaggaaagtatccaaccgacagtggaagatgtggctcttaaagactctcttaacgaggaacagagggccacctatgataagattatgtctgccgttgacaccgataagggtggattattctttgtggatggacctggtggcaccgggaagacttatctatacagagtgctgctcgcgacgctacgcaaccagggcaagattgcagtggcaatagctacatctggcgttgcggcttccataatgcctggaggaagaaccgcccattcacgcttcaagataccactcactattgacgatggtgctgtatgtagcttcacgaagcagagtggaacagcagagttgctacggaaagcatctctcattatctgggacgaggcttctatgactaagagacaagccgtggaggcactggacaatagcatgcgcgatataatgggtcgccccgcactgccatttggtggtaaaaccattgtcttcggtggagatttcagacaggtcttgcctgttgttcgtaaagggtcaagggctcaagtggtcgcgtcttcgctacagatgtcttacctatgggagtccatgtcccacttaaagcttgttagcaacatgagagcaaaaaacgacccttggtttgcggagtttttgctgcgcgtaggcggtggaactgaggaaacaaatagtgacagcgacattcgtcttcctgatgatgtgtgtgtgccttacagtgggagtgacaacgatcttgacaacctaatagactttgctttcccaaatctcaacgaaaatatgtctgattccacctacatcacttcaagggcgatactgtcaacacggaacgactgggttgatatgataaatgttaagatgattgatcgttttcaaggggagcatatggtgtaccatagtttcgatagtgccatggatgatccccacaactactacccacctgagttcctaaacacattgacgcctaatgggctaccacctcatgttttgaagctcaagattggatgtcctgttatattgctccggaatatagaccctgcaaatggactttga

SEQ ID NO: 34901 - DNA, 486 bp, Zea mays
  Peptide Sequence Number=SeqID_76680
atggggtccaggcacagtgcttgctctgccgaggctgagtgccgaggttgtccgcattgtaaccactgctcgggagaaggcgaagccgtggaaggagacttccaggagttccaagactacgatgaattctatgatatggctcgtcttagacacactgcacgtaagtcggtgattcctttcctgccatctcgacttgcggagcgtcctctgcaccgcaccgtgtccggacagtcgagtcacctggagaggctgcaccaccgcctgcgtgaggagcaggaacgccggcgccagcacggagagcagcagggctcttcctcctcaccccagcaggaggtggagactgtgaggccccgttcctctgttgcccagctggaggcgccccttgttccaccgcgggacgtcccggctgttggaggagctgttggaggagctgttgggaggagaccccgacgacgacgactcagaccacagcacggagtcctctga

SEQ ID NO: 34902 - DNA, 354 bp, Zea mays
  Peptide Sequence Number=SeqID_76681
atgagggtgaaatgggatacccttagccaattaattagaggaactagaggtgtagttgcttcgtcgtcgtgccgtcaaaggggtctaggcacagtgcttgctctgccgaggctgagtgccgaggttgtccacattgtaaccactgctcaggagaagacgaagtcgtggaaggagacttccaggagttccaagactatgacgagttttagactcaaacctaaaattattgaggccttgatttgtaccaaggattggaagattgctttggagcaagatttagagactgaaattaaaaccataagtgaagctattaatgcattggacttggacgcagatgctgttgcggcgacatga

SEQ ID NO: 34903 - DNA, 2031 bp, Zea mays
  Peptide Sequence Number=SeqID_76682
atgagccgaggtgaacttattatagaagataatcaagtaaaagaaggttcagcatcccaatccagtggctgggctgatgaatttcaaacaccgtacattgctaatgcaaactcatgggcagatcagtttgcacatgaagagctttcacaaggggcggataagtgggttagcgagttctctagtcaacctaatcatggtgcactaaatgagaactgggttgatgagttctcgaaattaaatgttactgacgaatgggcagaggaattcagtggaggtggttttggcgaaagctctgctgatccatgggtagatgagttccaagaacacttgtcatctttcaaacaaagtccgggcgcctctcgaggggtttatgttttttctgagaacaacccgtatgttggtcaccctaatccaatgcaggaaggacaggagctcttccgcaagggcctcttaagtgaagctgttcttgctttagaggctgaagttttgaagaatcctgataacacagaaggttggaggttgttaggcgtaacacatgcagaaaatgatgatgaccaacaggccattgcagcaatgatgcgtgcgttggaagctaatccaacaaaccttgaagttcttcttgctcttggtgttagtcacacaaatgaattggagcagggggaagcattaagatatctttataggtggcttcagaatcaaccaaaatatggtggccttgtccctctgcagtcaactgattcaccttatggtcctgatgttgttagattgtttaatgaagctgctcagatgtcacctgaagatgcagatgttcatatagttctgggagtcttatacaacctatcaagagagtatgataaagctatagcttcatttaagacagcactacagctcaaaccacaggactattcactctggaacaagcttggtgcaacccaagcaaacagcatccagagtgctgatgcaatattggcgtatcagcaggctctggacttgaaacccaactacgtgcgtgcatgggcgaatatgggaatcagctatgccaaccagggtttgtatgaggattccattcgatactatgtaagggcagttgcaatgaacccaaaagctgacaatgcctggcagtacctgaggatctctcttagagctgagccaaaattaaattccatgactggccagttaataaaaagccaggaattgacccatatatataaggctgcctccagcaagggcctgtatacggttctgaactctaaatatagaggactgtcaggcactctaaatgtggaggcgtccgagagtgcgctatccgcgctactcctccaccagccgccgcgaggaaacttccgcctcctcctaccccgcgctggcgactgcatcttccggggccgagccctcgatccggcgtgcttcgccgccggcatcgaggcaggagggcgagaagcgggcgtgcggaggcgggtctgccggcgtagagctcgcaccccttcgaaccgaggccgcgcgagtcaccgcaacccaagatccaagccagtttccccctgctcgtcgccggagagtcgccatcggcaaaaggcttcgtcgtccgccgacttcgtccaaggcagccggcaaaaggaagagaagctcgtcgccgccgtcgtcttcctcttcgattcggtccaccgaggcagatccgcgaagggcgaggatctggagcattccatggattcggagaacgaaaagctccgtaaagcactggctactctgctcagagttgttcaaaagcgtagttgtgacatcgttgatgtcgtcaaatcagccttccagcctttcaactcacctttggtcgacgaattgaaccgagcactagttgagattgacgacctcgccaaggatcttgaagacgtagcagtgcaaactcagtgggaggtagaaaatatggctaatagtcaagtgaaacaacatccacaacaagaggaagcagtagaggaccttctgatagaagatggttcagaagacgacctactgatagacgaagagtcaccaatttaa

SEQ ID NO: 34904 - DNA, 396 bp, Zea mays
  Peptide Sequence Number=SeqID_76683
atggattcggagaacgaaaagctccgtaaagcactggctactctgctcagagttgttcaaaagcgtagttgtgacatcgttgatgtcgtcaaatcagcctttcagcctttcaactcacctttggtcgacgaattgaaccgagcactagttgagattgacgacctcgccaaggatcttgaagacgtagcagtgcaaactcagtgggaggtagaaaatatggctaacagtcaagtgaaaaaacatccacaacaagaggaagcagtagaggaccttctgatagaagatggttcagaagacgacctactgatagacaaagagtcaccaattaactatgaagaccttgtgggctatgacaatggtcgtgactactcaaccgacgacacatatccctactag

SEQ ID NO: 34905 - DNA, 741 bp, Zea mays
  Peptide Sequence Number=SeqID_76684
atgcacaagctaaagggaagagttcggacagctgctcaccgacaattgcgacccgcagtgccttggccacgaagaggtgctgttctccgccgcggacgcactctggtgagaaattcgccggcgccggacgctcccaacctgatgccgctgccgcggaatcaattgccgagccgaggcgaagctcctcgagtgcacaattcgcccaggatcgacgacaatcaccagtgcacaaccacggcggccgagctccggttctccttctctcttaccgcctacggttcacttggtgactgggtactcgtcgagatggataaggaggctagagcggccgggttatataggggcggggcgagtccgagcgaggaacaagggtggagtcgaggtaggtgcgcgttttgcggcccgccgttgcgacgaacacggcatgggtcgttttggggtggaagacgatctgacaaccagaccccaccagtcagcgcttgggcatgttccaacgcaggagtccaacttcaagcgaaacgcgcacacctgactgacccagggtcccacacggcagcgtccgcggtcaagggtgtacgcgcgacatccgtggctgaccgggcggtcccacctgacagtgtcacggaggcaagcccagggctttacacagatcgcccgcggcagaaaaatctcaccgtcggtgactccccaccgttattcgtgtcaccggcgtcaggattcacgctcgtggtggatggataa

SEQ ID NO: 34906 - DNA, 468 bp, Zea mays
  Peptide Sequence Number=SeqID_76685
atggtacagtgctctattgtggatcagatcgcccgcggcagaaaaatctcaccaccggtgacttcccgccgtgattcgtgtcaccggcgtcaggattcacgctcgtggtggatggataacgtcgtgggtaaaaggatctctgccgccgaaaacgaagaagaaatcgaagtaaccgaagagaagacaccaccaccttcagaatctcaggccggaaattgtttctactttgatatctgcgggtccgagtctgactcacctactaatgaaggcaagccccgtaagcatttctgcaaaatagagtctttgattattgagaagccttaccttgactcccttaaccagcatacccttgagagtcttttctttagtcgggtggggaagcaacaaacttttgttgcttttgctccaaggtggttccaaatgaagaaaaacaagagtgaagctgcgggaggacatggtcctccataa

SEQ ID NO: 34907 - DNA, 486 bp, Zea mays
  Peptide Sequence Number=SeqID_76686
atgccgccgcgcacgaggaaaaccgcgcgcaagtcaactggcccaattggtgtacctcgtcaccaacttgctccacggcacgaggatagtagtagcggaagcaacgatccgattggggatcttgaagcccgagtaaatcagcttcaagcggagcttcaacgcaggacgaacatatgggtcgcggatggcgacagaataaatgaattaagaagtcacatccgccgtctgcaggaccagcttgctgatcgagatttagtgctcgattgggcagttcagtctcgttcagtggcttgggctaaggaagcaaaggctcgagcccgagtcgaagaacttagctctgccattgacaacctgcaggcgtattgcaataccctacatgaggaagtccatgtactgtattcgcaactacaccccagtgcacctacggatcctgtcggggtcggaagccgaaccctcgcatgttgtgggagaagcgcttggtggtga

SEQ ID NO: 34908 - DNA, 585 bp, Zea mays
  Peptide Sequence Number=SeqID_76687
atgccgccgcgcacgaggaaaaccgcgcgcaagtcaactggcccaattggtgtacctcgtcaccaacttgctccacggcacgaggatagtagtagcggaagcaacgatccgattggggatcttgaagcccgagtaaatcagcttcaagcggagcttcaacgcaggacgaacatatgggtcgcggatggcgacagaataaatgaattaagaagtcacatccgccgtctgcaggaccagcttgctgatcgagatttagtgctcgattgggcagttcagtctcgttcagtggcttgggctaaggaagcaaaggctcgagcccgagtcgaagaacttagctctgccattgacaacctgcaggcgtattgcaataccctacatgaggaagtccatgtactgtattcgcaactacaccccagtgcacctacggatcctgtcgggtcggaagccgaaccctcgcatgttgtgggagaagcgcttggtggtgagttggacctttttaggccccctccttctatgaggctggtcgatgaatggtctcccacacctgacgacgaggctgccaggagcaaccagaagcaggaatag

SEQ ID NO: 34909 - DNA, 987 bp, Zea mays
  Peptide Sequence Number=SeqID_76688
atggaaaagctcgaccacaatgacatgacaattcgagctggccctggaaaggagctgaaaattacaaaggatacggtgcacctaattttgggtttaccgaatgctgggggaggaactgcattgggcatcgatgaagctgttgttgccaacaatttgagagctgaacttgggctatcgaaagaagattttggggttacagctctacaagatcgtttgaggaaaggttctgacgatgatttaagcatcagatgctttttcttgatattgttcaataggttgttgttccctactgccagctggggaataacgaaccatgaggttcttttaaccgagcagatggatcgtttccaccagattgactggtgccagcttattttcaatgatttatgccaagctgccaagaagtggcataacaggagcgttactaacgtttctacaaccatctatggatgttccatcgttattcttctgtattatttggatcatttgcatgactcagcggcaccccagaacaaacgtggaacaccacgaatcaaatactttgataggaatattattcaagccctgacaagagctgacaagggcaagatacgcaaaggagaagaagcatttggacattgctcgcataagaccaggaccaacacttttgatgttcctcgtcctgacccatctggacatcactcaattcacatcgaactcccgctcatcagggatttgatatcaagcaagctcaatcagcttccatcccgccaccgcatgggtttcatagagaagctgtcacattttgatgtggaggttggtaaggcgtgtacagttattaaacagactcttcagcagattgttgagaaacaattcaatctatctgatgtttttggcgagttaattgatgaggtcctccgtgccgaggcgggtgacaacgaagatgcttatgatgtgcagaaaaccacatcaaaatcagatgatattcttccccagacagctggttag

SEQ ID NO: 34910 - DNA, 3093 bp, Zea mays
  Peptide Sequence Number=SeqID_76689
atgagcgctttggtgtttgatgaggacacccctagcattgacactaaaattataaagaataagaatgcaacaaatactgatgatccagttacaagaatgcgagctaaacaactagagaaggaaatttattctcagatgacgactggagctttttggctaccaattcagaaatacaaactctttgagttctcaagttcccccgccgtcgcattctccttcaccaccgcagagacccgccctcgccttctccgccgcacgccctcgccttctccgccgcacacaggccgtggccttgttcttcgtctccggcaagggccccggaatctaggaggcggttgtgccgcccctgcgttctcctactcgtcagagaccgagacctcgatcttctccaccgcggcggccgaacgccgactcccctaccccgtcgcgagccccgcgccgcgttgggttgtcccctgcacaggtgtctcggattcagccgccctccaggcccatccacattccggaacatcagtgatgaagaacgtagaccgaccaccttccaatccaaaacagatcataatccagtctactcaggagtgcttcagcgttgacataccgcgtgctccggcggggactgttagacccgagacaaggcatgctactgatgaggatgatgactttatgccattatccaagaagcgtaaattggacgacagccctgggaaagttttgaagaaggtagtcactaagcggaggaaagcagtgcccccaccccgacagcagaagctgaacgtcagatgcaacccccaagatgtgttagtaagcatacagatattaaatgacagacagcaacaagcaattgcacgtaggggattttctagtattcttgatatgagactggacgcactcggcagcagatcacacttagcttggctgatggaaaagctcgaccacaatgacatgacaattcgagctggccctggaaaggagctgaaaattacaaaggatacggtgcacctaattttgggtttaccgaatgctgggggaggaactgcattgggcatcgatgaagctgttgttgccaacaatttgagagctgaacttgggctatcgaaagaagattttggggttacagctctacaagatcgtttgaggaaaggttctgacgatgatttaagcatcagatgctttttcttgatattgttcaataggttgttgttccctactgccagctgggggataacgaaccatgaggttcttttaaccgagcagatggatcgtttccaccagattgactggtgccagcttattttcaatgatttatgccaagctgccaagaagtggcataataggagcgttactaacgtttctacaaccatctatggatgttccatcgttattcttctgtattatttggatcatttgcatgactcagcggcaccccagaacaaacgtggaacaccacgaatcaaatactttgataggaatattattcaagccctgacaagagctgacaagggcaagatacgcaaaggagaagaagcatttggacattgctcgcataataccaggaccaacacttttgatgttcctcgtcctgacccatctggacagcactcaattcacatcgaactcccgctcatcagggatttgatatcaagcaagcttaatcagcttccatcccgccaccgcatgggtttcatagagaagctgtcacattttgatgcggaggttggtaaggcgtgtacagttattaaacagactcttcagcagattgttgagaaacaattcaatctatctgatgtttttggcgagttaattgatgaggtcctccgtgccgaggcgggtgacaacgaagatgcttatgatgtgcagaaaaccacatcaaaatcagatgatattcttccccagacagctgaaagttgtcccgatgaagctgatattgatctactggttcatacaaatataacgaaacagaacaaaacacctacaacctcagtgggtaaacatggtgacggtggcaagaacatgccgaccaatacaaacgtcactcctaaagcaacaccacacatggatcctgacgcgccgatatttgatacgactccgcaaatcaagtctactggcggcgtacaacaagtggcagaaacagacttgcctgatagtggtccatgctttgatcagactccatctgaacatgtttatgttgaaaccgatccagctacaaacactccacaggttggccaggcttctcttgattcggagatgcaaactgtgttagctctacgcgaatatttgtgtggtctgcaatctgacaccggcaggaccataatagattatggtgaatattcagcgacatgttctgacatatatgaatcttttgccgatggaaagtgtctcgacaatggattcatgcagtgtttcatccaatgtgttattcatgatgcaaaaaatcagcagacttccatgagttcgaacagtttggttcttgatgttaatgttgggtcaatactcaactttgaggaacaggaacgacacagtcgcaatcctcaaccttttgatgaatctgtactccacacacttctagacaattcattgcctgagacagatgagttggaccaatgcaaagcgatcatggtccccatggtaagcagggggcattggacattgtatgttgtcaacaaggtcaagaagtgcattcatattttagattccaacccatatggaccaacacttggtggaactacatggaaggactatcattttgcacatttgggctcaggtggcagaaagttaccctgggctaaggttattatgagcagattaaacaaagcaatacaacatgtgcggcccagttcatgctttcccaagtttggtaacttcacaattgacttgtgccaaaattgtcctaacatggcagctggatcaaatgattgtgggttttatgtcatgggttacattctattttatcaatgcgacgaaggatctttgcggtcagacatagaagcaggcaacaccagtgagatacggtctcttgcgctgcattacatcacattccacccgaagaacaaagcattatcgctgctccaagacatccaaagattcaaggtctaa

SEQ ID NO: 34911 - DNA, 1796 bp, Zea mays
  Peptide Sequence Number=SeqID_76690
atgaatcgggtcttcgaattgaaccgtttaccgtacggttgttatcccggggaagacgtcgccgaccgccgcgggaagaaactgatgggcgttgatggggacatgtgcggcccccgagggaaggatgtcttcgcccgagctctgggagtcttcggcgcgaatgttggagctcgtggcttggggattttcccttatggacggaacattgctgctgttgtgtcggcagtgatgaacaaggatcgccaggatgctgcgcagaagcgccgggcggtcgtcaggctccccgatcctaggcgtgaagtgaagagagcgcgggggagtgcgaaggccgccgcccccggcggtagccagccgacgctggctgcgaaaccggtcgtgctcggatccagcaaggtgccggagagcacgaaggcagtcatcgtcggcggaaccaagtctacctcgggcggggctgcgaaggtccgggagctaccttcgccggggagacgcgttgccgactacggcacgaatattagtgtggacgactatttcgttgatgtgtctgccaaagtcgagagacttcaggcgcagcacgcgaacgccatccgggagaagtcggctgcggagagcaaaaaccgcagactggcggagaaggcagaggccaaattggcgcgggcggagggaagcctcgccagccaacgcgccgaggaatgggaggtgaggttcaacgctctgcgcggccgcgtggacaaggccgaggcctctacgcgctcggaggttgagcggacgcgcacagtggactcgtaccgcgagttgggtgcgcggacggctgacttcgaggtgcccgaccgagaggcgggccttcgcttcctcgagtggttgcaagaggaacttctggtactccctaccatcgtggagggtttcatgtcctttgcctccctcgtcacctgcgaaggggccatgaatgcactgtcccgtgaggggtgcaaacactatgaggtcttcgaccggtccgatgaaaactttgagcgcggaatttttaaggtcgaagaccctgtggtaaaggattccatgggggcactcttcgatcgtatgtggggtcctcatggccgagaggcagttagggagcggtctgatcgggcgagagagcagatggcgcgtgccgaggatgtcgaagaccttggggatctgaacggcgtgcggcctgaggctgaggtcaacccggtgctgcccgaggctgaggtcgacccggccctgcgctcgaaagccattgaggccgcctccgctgggcctgtgtccactgtgtccggtgaaggctccttgctagcccctgcgccgacggcggaggaccccccgaaggcggtggcagagctggcagcggaagatcctatggcggcggccaggccttcgcaggttcaagattttgggcctgcgcacgcaactgctactgatactgctaattttgtgacagcttcgaccgtggttgctgaaaatgaattggatgagtccgtgtctaagttttttgagtctgatgattctgggggttcgattgtgtggactgaagagtctccggatgaggacttggattattttgcggccttggatgtagccgtggcggaggcttctccgcgtgtgatggatgttgaggtttttcctggtccgagctccgggcgcaggcggcgaagggcggtggcgaagcgtagattgagagaggtggaggatgagggggagttgcaaagtctctttgagggtgaggagctgaggataatgttgtttaactacagggagatgggtatcatcccaaaggttgaaccaat

SEQ ID NO: 34912 - DNA, 1989 bp, Zea mays
  Peptide Sequence Number=SeqID_76691
atggggacatgtgcggcccccgagggaaggatgtcttcgcccgagctctgggagtcttcggcgcgaatgttggaggttaccgggggtcggtggccaaagaatcttccgatcccctgggcagagggcgaagacatgtctacgtctcgtatagctcgtggcttggggattttcccttatggacggaacattgctgctgttgtgtcggcagtgatgaacaaggatcgccaggatgctgcgcagaagcgccgggcggtcgtcaggctccccgatcctaggcgtgaagtgaagagagcgcgggggagtgcgaaggccgccgcccccggcggtagccagccgacgctggctgcgaaaccggtcgtgctcggatccagcaaggtgccggagagcacgaaggcagtcatcgtcggcggaaccaagtctacctcgggcggggctgcgaaggtccgggagctaccttcgccggggagacgcgttgccgactacggcacgaatattagtgtggacgactatttcgttgggtcaggcgagggggagatggttgttgtcccgcctgcggtggcaaccacaacgtcaaccgtggtggctggggtgaagggtgacgctttctgcgcggccgacttcgccgaacgcgtggcgtcgggtgcccttactgcagatgtgtctgccaaagtcgagagacttcaggcgcagcacgcgaacgccatccgggagaagtcggctgcggagagcaaaaaccgcagactggcggagaaggcagaggccaaattggcgcgggcggagggaagcctcgccagccaacgcgccgaggaatgggaggtgaggttcaacgctctgcgcggccgcgtggacaaggccgaggcctctacgcgctcggaggttgagcggacgcgcacagtggactcgtaccgcgagttgggtgcgcggacggctgacttcgaggtgcccgaccgagaggcgggccttcgcttcctcgagtggttgcaagaggaacttctggtactccctaccatcgtggagggtttcatgtcctttgcctccctcgtcacctgcgaaggggccatgaatgcactgtcccgtgaggggtgcaaacactatgaggtcttcgaccggtccgatgaaaactttgagcgcggaatttttaaggtcgaagaccctgtggtaaaggattccatgggggcactcttcgatcgtatgtggggtcctcatggccgagaggcagttagggagcggtctgatcgggcgagagagcagatggcgcgtgccgaggatgtcgaagaccttggggatctgaacggcgtgcggcctgaggctgaggtcaacccggtgctgcccgaggctgaggtcgacccggccctgcgctcgaaagccattgaggccgcctccgctgggcctgtgtccactgtgtccggtgaaggctccttgctagcccctgcgccgacggcggaggaccccccgaaggcggtggcagagctggcagcggaagatcctatggcggcggccaggccttcgcaggttcaagattttgggcctgcgcacgcaactgctactgatactgctaattttgtgacagcttcgaccgtggttgctgaaaatgaattggatgagtccgtgtctaagttttttgagtctgatgattctgggggttcgattgtgtggactgaagagtctccggatgaggacttggattattttgcggccttggatgtagccgtggcggaggcttctccgcgtgtgatggatgttgaggtttttcctggtccgagctccgggcgcaggcggcgaagggcggtggcgaagcgtagagtgagagaggtggagggtgggcgtcttcgtgtggatagggctggcaagcgggaattgttgtcttcgccagttggggcgagtgtagatgagggggagttgcaaagtctctttgagggtgaggagctgaggataatgttgtttaactacagggagatgggtatcatcccaaaggttgaaccaatgtaa

SEQ ID NO: 34913 - DNA, 201 bp, Zea mays
  Peptide Sequence Number=SeqID_76692
atggcattaggtagacgtactcaaaataggacggtggcaggcctgtctccctttcctcctttcgtgctatttgacgatattcaagatgtcaataacttaccacaagtcaaaagtgtctttgcgagagtagttgttaagttccctaggcgtcgtaatagtcaacactacatcctacaggacatcactatgttattggcatag

SEQ ID NO: 34914 - DNA, 1386 bp, Zea mays
  Peptide Sequence Number=SeqID_76693
atggccgcctgcagacctctaggaccactttggtggtgcgtaattgttctcttcactcgcatgcatgtagagatggcaatgggtacccgctacccgaaacccgtgggtatgggaaacccgttgggtacccaaaacccgcatgggtatgggtttgggcaaaattttatacccgtcatgggtatgagttttttagcgggcgtattttttcttcgcgggtatgggtttgagaacgttgccaggttgagcgccatctcgccggagctttctgtgtgcctccgcgtcgtcgtgctggatctgccaccgcaggtggagggcctcctggttggcgcagagtcgaccgttgacctcccacctgagaaggtcgagctactcaaggaggcgttcgatgatctcgtcgcgtcgttcgccagcttcgtcgtggagtcccccgcgggcgtgtgccgggccaggcgtacctccggcgtggtggcctcggcctcggtcgccagccccacagatactttctctgtggatgagggtctgcatcagtacaggacaagatcaccaccaaatgcggctgtaggagcgacccggcgtggacggggtcctctcgaacctcacctgcgacagcgacagcaagagcttaagttggggcctgaagaactggagcgctggtttacaaaaatagatcacgtatttgagcacacaagaatccctccagttggtgaagttcttaccccgttctataagactactgttaagaaacttcagcattatgatcttcctttagtcggccatgtgaaccacaatttctctgtgcatgccatacacatgggagaagatgtcttatctgtttttgagcatgctataaaagttctatcctgtaaagatgatctcgtggattctagattgccattgcttctaagaacttctctggctagaattagattgttgacagtgagtcgatatgtcattgatgtatgcttacctgatagctgtggtgtactgatcagattcgtggatatgtctgataatgagaaattggtgggggagggaaccaccccccgaggggcggactgggaagttgtcactcttacagcatctgccacccagagcagctcatctcggggaaggaggacgcagctaacaactttgcctgtggccactacacgggtgattgtggatctatgcctggactgtgtgcgcaagcttgcagacaactgcactgggcttcagggattcttggtgttcaatgctgttggtggtggtactggctctggacttggttcactgctgttggagcgcctttcagttgattatggcaagaagtccaagtttggtttcaccatttatccttccccacagcttgaggtacttgtgttgattcttcccaaggaatatcagtaa

SEQ ID NO: 34915 - DNA, 443 bp, Zea mays
  Peptide Sequence Number=SeqID_76694
ttgggaaggtgattgtggatctatgcctggactgtgtgcgcaagcttgcagacaactgcactgggcttcagggattcttggtgttcaatgctgttggtggtggtactggctctggacttggttcactgctgttggagcgcctttcagttgattatggcaagaagtccaagtttggtttcaccatttatccttccccacagcaccctgccaccctcttttatcaggctattttgttcactggatttatgctttctcttttagcatcaatcatcgtgaaagaaaaagttttggctaatataatgagcgtgagcgaggtcgaggcattgtacaagctgttcaagaagatcaacatcgccttcatcgatgatgggctgattaataagggtgatgctgacagcttgttggacaggctgtggcagaagaaggctgagatcaagcagtag

SEQ ID NO: 34916 - DNA, 267 bp, Zea mays
  Peptide Sequence Number=SeqID_76695
atggagctccaagttgatctgtcagataagctcttcagtgagtcaggcgcactgttcactggtcttcagaaaaatcgcgccgaggataaggatcagccctcgccggcgataagaacgccaccacagcttgggatggtcgtcggcggccgtggtaaaagttatcggcgacatggcgatgtttcactaaggtggcgttctccggtgataggagttgaatgcttaaacaattcctgcattaccttccttgaacttgattaccctccttga

SEQ ID NO: 34917 - DNA, 123 bp, Zea mays
  Peptide Sequence Number=SeqID_76696
atggcccgagcaaaccaattggccatagatgaaattaggttgggggaaatgatcgaggtgataggagttgaatgcttaaacaattcctgcattaccttccttgaacttgattaccttccttga

SEQ ID NO: 34918 - DNA, 366 bp, Zea mays
  Peptide Sequence Number=SeqID_76697
atgcctcataatatctgcaaagaagggctatgctccgataccagctgtgacggaacctcccaagtaattaggcccacctacagttgtccttgtctaacagacatcagacaccctgtagatgttcctaagtcacttgacaagttcggtatctttccttacctttccaggaacgtctcacccgtcttgcagacattacagaacatcggagataaagaaatgcggaagcgattacataaacttacatttattaaaaacaagtcttacccgactaaagaaaagactctcaagggtatgctggttatatgggagtcaagggtttcaaggaaggtaatcaagttcaaggaaggtaatgcaggaattgtttaa

SEQ ID NO: 34919 - DNA, 816 bp, Zea mays
  Peptide Sequence Number=SeqID_76698
atggcgcacggttctgcctgcgtccgcgcccctacgctacgccacctcctcctcctcctctccccctcactgcgccgccacctcctcggttccgtgcgtccgctgcgccgccacctcctcctcctcctctcccacacgaattcgacctccagctcgagcacgacatcgaccacaccggaaaagtacgccccctcactgcgctgccacctcctcggttccgcgcgtccgctacgccgccacctcctcctcctcgtctcccccacgaatccgacctccagctcgagcacggcatcgaccacaccggaaaagtatgccagcgactccgacctacacctcgagcgcatcaacgtctactacaacgaggccagcggcgaccgcttcgccccgcgcgccgtcctcatggacctcgagcccggcaccatggactccgtgcactcgggccccttcggccagatctttcgccccgacaatttcgtcttcggccagtccggcgccggcaacaacttggccaagggccactacaccgagggcaccgagctcatcgacttcgtgctcgacgtcgtgcacaaggaggccgagaactgcgactgcctcccgaaatcggccgccgcggcgccgcacgccacgactcctgccccagcccacctccctacagcagctgcagctccctccggcctccggtggtctggcacgccgcctcctcgcccagatccgtccgtggtccgcccctccggcctcgcccaaaatcagagccgcccttccatctacgctctcgattggatccctccctcgcgcgctctccgcgtctccaagtga

SEQ ID NO: 34920 - DNA, 858 bp, Zea mays
  Peptide Sequence Number=SeqID_76699
atggcgcacggttctgcctgcgtccgcgcccctacgctacgccacctcctcctcctcctctccccctcactgcgccgccacctcctcggttccgtgcgtccgctgcgccgccacctcctcctcctcctctcccacacgaattcgacctccagctcgagcacgacatcgaccacaccggaaaagtacgccccctcactgcgctgccacctcctcggttccgcgcgtccgctacgccgccacctcctcctcctcgtctcccccacgaatccgacctccagctcgagcacggcatcgaccacaccggaaaagtatgccagcgactccgacctacacctcgagcgcatcaacgtctactacaacgaggccagcggcgaccgcttcgccccgcgcgccgtcctcatggacctcgagcccggcaccatggactccgtgcactcgggccccttcggccagatctttcgccccgacaatttcgtcttcggccagtccggcgccggcaacaacttggccaagggccactacaccgagggcaccgagctcatcgacttcgtgctcgacgtcgtgcacaaggaggccgagaactgcgactgcctcccgaaatcggccgccgcggcgccgcacgccacgactcctgccccagcccacctccctacagcagctgcagctccctccggcctccggtggtctggcacgccgcctcctcgcccagatccgtccgtggtccgcccctccggcctcgcccaaaatcagagccgcccttccatctacgctctcgattggatccctccctcgcgcgctctccgcgtctccaagcccatcgtcgcgctccaggccgacatggacgtacttcctgtgtag

SEQ ID NO: 34921 - DNA, 2202 bp, Zea mays
  Peptide Sequence Number=SeqID_76700
atgtcacttgacacgaagctcatcctcggcgctatcggcaagctgttcgacgacttcgacgctcgttgggagcgccgtctttccaagttattgaccgcacaggaggcctctccggtcatctccgttctaaccccgactatggcggttggggccgcagtcatcgccgataactggggcgggggcttcaacggaggcgagtactcattcgagcagtactgcacggcgccatccatcgtcgccgacaattggggcggattcttcggtggcgaggacgcggctgccaacgccgagttcgccatcgatccgccagacgaccctgagagattcgtcctccccaacgtctccaccgacgagcccagcatcgaccccgcgctggaccgcaccaactccggagcggcggacgactccgtcaatgcgctcgtcagccccaccatccgcgacgctgccagcagggcccccgcgctcgacgacgactggctgctgaagcccctcgcccatcaccgtcttctggggcgcgcctactacgcggaggatgacgtcttccacaccttgcccaccaagtgttcgacgacggtcctcaactacgacgcttactccgttcccaaccctgccacttcactgacaaccagtacgttcaccaggcccatcttcaatgactacagctccatggagcggaatagtacagacaacgggacagtgctggtggcgcagttcacgggggcgttgcgcggcctgcgcgctaccgacgacgaggacctgctccggatgctgcacctcaacccacgcctgcgcagcgacgggagcgaccggcccatgctagagatgaacacttgcttccaattagccaagggttcgatcagcaggtggttctctgaaccgtcagtgccgagtgagatgaagctatggccgtgcaaggtcattccaggccccggtgacaaacccatgatagtagtcaacttcaagggtgaggagaaacaactcgctgctgaggagatctccttcatggtactcctgaagatggaggacgcagctaacaattttgcccgtggctactacactgttggaaaagggattatgctgaaatttccattgtcaaggatggttgctcaaatttccattaatagggaacatgcagttttgattgcactgcaaagttcagttctactggtcactgggatggcaactgggagtgaagcggcgaagccagttgaggttgttgacacggtgttcaaggtgttcaacaactgcaaatcagctagcttcacagttgaatccatcagcaaccatgagatatcaagctttgtgattcctgtgcatgacagcgcaagtgaacaccaagtggtcaacaaaaggacgggtcctgaaattagtgtgctagcatttccgtacaatgcagaacctatgctattatcatcattggcatctatagcgcttggtccccccactgcgaacttcatcacttcgatcccagcatcatgtgtgactgtcagcctaggcgcccatcatatctttgatgaaatgacaaaggggtcatggtgtcttccacaactacgacatcaacactacaggcctggcaatgtttggaaattcctccacagttattcttcatgcatcattgactatcatggcactaagcataacaatgtttttaggagagcactcgtctggtgctgcaagttctccgttcatgaattgttgggtcattttgagtatttgttgctggatataaccaaggagcacaccatcagctgcattaactcaggtggcctagagaggacatttattctgtggctatcgtggcctacgccagttaagatttttcatgcaagtggtgagcttcggccaagctgcagcgtgcccatggcgacgataaggaagcatgtgtccgtccccgccatcctgctagcgctggccgtcctctcctgcctgctcctcgtctccgcggcaggcaaccggagggctctgctgccgagggagccagccgacacctacgccggtggtggacgtggacaggtggtgttgccgacgacgacgacggcggcggaggagggtgctgccgtgctgggagctgagctcgctgaagccgagcgggacgagacgatggtggtggatacggcggccaggagggcggggctgctgcagactcaggactacccggggtctggccccaacggccgccatgatccgcggaacccgcactga

SEQ ID NO: 34922 - DNA, 165 bp, Zea mays
  Peptide Sequence Number=SeqID_76701
atgtcgtgtgcgttcgacgactactatatcgaggattgtggcgtcatcttggcgccggatgtgacaaagaggaggatcgacaacagtgaccagttcgtcatcctcgccaccgtcagggttgagtcgggtgaccctcgacagcccatgtgttcgttattttcatag

SEQ ID NO: 34923 - DNA, 660 bp, Zea mays
  Peptide Sequence Number=SeqID_76702
atgaatccatgtttcctacttcaaaccccgaacaaactccatgagcaggaggcattcgcgttgtcgtcgttcatcgatgacgagaagaagcttggcgactggggcctcatggttgtcgccaacgtcgacgactctcgggttgttctggacaccgcatccgacacgacgccatcacgccgtctagctcatcgtccactgaagcccaacctgccccagttgactcagaggaggatcgacaacagtgaccagttcgtcatcctcgccaccgtcaggattgtcgtggctaaactaggcccacatgtcagtcgtggtggtcgattggacccatccacccttctccctcctcgaccccttcctcgccaccgcactggagcagacaagctcgccggtgtccatgtgctccacgatgaatcagcacaagatgcagacgagttcgccggcgtcgaccagcccggacgcccacagtcctgccgagctgatcatcgggtcgtccctgttggtgccctccagcagcgcaagccgcgtgtacctaccgcatacctcggtggtgagatctgccccttattggaagcactggctgcaatactgttgggaattcataatcctgttggttcttgtggcctgcagatagagcaggagctggactgtggtgaaaactga

SEQ ID NO: 34924 - DNA, 741 bp, Zea mays
  Peptide Sequence Number=SeqID_76703
atggagaagaacccaacggcacgtattgatgttctgaagctagacctcagctccctcaagtctgtcagggcttttgtggaccagttcaactcgatcaaactccctctgaacatcctgataaataatgcaggcgtcatgttttgcccttttcagctgtctaaagacggggtcgagatgcagtttgcgacaaatcatctaggacactttctgcttaccaatctcctccttgataccatgaaggccactgccaagtctacgggtattgagggccgcattgtgaatttgtcatcagtcgcccaccaccatacgtatccgaagggaattgacttcgataacctcaatgatgagaaaatatacaacgacaaaatggcttatggacagtctaagctggcgaacttgctgcatgcgaaggagctctctagaaggctgaagaggtgctttaggttgccacttacatactgtggaagaatgtaccccagttctcgtgccctctttggcgagaaacggagggcttggaaactcacaagcttcttccgagccgggacggtagtggaggctgacgctggagagattggccgtgacaaaggcccgttgaatctgcaatctgcgagccgtctcctgcgccggtgctgcctccactggttccgccgccggggacaggccactcatgcgaagaacgtttcgttgaagctgtcaagagcacaaaagcacagccaagaatatcatcagccatccggatga

SEQ ID NO: 34925 - DNA, 696 bp, Zea mays
  Peptide Sequence Number=SeqID_76704
atgtgcatggagaaaaaaaggagacagcgacgaggggtcaacgggaagtctttgagcacgcgacagatgacgaggaggtatacaacctgcctatgttccaagggttcagctttcgggcagttgcggctggctgcatcagggtttgggatggagaacatcgtgtatgagcatggtgagaaggagcccaatgtggtatacaaggggaagctcgatgcccagtgccacattgttgttaagctctccaaccactctgcctgggcaaaaaagaaggcgaatgcccagagccacatcgttcccggtattccattcgccttcttttttacgctttctaattatgtgcatcttgtggagcttctgaagtatagggatgcagcaaaaatggttgctgttgaaaccacgcaagaaactgctatggcagagatccttgttcaatgtttaagaccttatggaattgtaggaacaaatgcctctgtggaattgtatgaacaaatgcatcatgtccagcaccaccagatgcagtggaagtgcggcggctccaatcccatcgtgtccaaggccgtagacgagatgattgatgtcactgtcccgaggaaagcccgctccgcttcaacgaaacgttcttcgcatgagtggcctgtccctggcggcggaaccagtggaagcagcaccggtgcaggagacggctcgcaaatttaa

SEQ ID NO: 34926 - DNA, 1731 bp, Zea mays
  Peptide Sequence Number=SeqID_76705
atgctggtgttcgtttctgggattatcaagtatggggagagggtgtgggctctgaagagtgcgagccgaaagggccttgacaagacatcagctaatcccagttcacatgaagacacaatcgatgatgtattgacttgtaccaaggaatcatatgctctttggacggtgcttatagctcgaggattttttgtggggcgaactatgctcctgatgggacaggggcctgcatcaacactatggttttatttcaagacaaagtatcaaggtagagaagagaagctgaagatggtaatgatggagcttggcatgatgttcgatctcctctacaccaaagccaacgtgctccagagaaggattggtgtcctattcctgtgtgcttcccaggccttgatggtcgttgccctggttctcttcatgatacgacgtgaggaaggcgcccacaataacaaggttaatgtcgcgattacctacacattattcagtggcgccatttttgtggagacctgctgtgttgctgcggcgattgcgtcgccttggacaagggcacacttgaaggagagcagctgccttcatggtctcagtgactccttgtttgaggctgttcatctgtgcaaatccaccgctaataacatggcacagtttaacttattggatcactgcatctctgtcaactccaaaccaagagttttctcaaaggccctcagtgctattggtctggataagcaatggtacgtccaccacatggataagcaatgctactggtggattatcaaccgtgttttggaacatttggccacattgcccgacgaattctcaggtctagcaactgtacactttacaattaatgcacccactgaacatccagtatggttcaaccagctgagtacatccttcgagcaagtcctctacggcttacacctatacactgacctacatctaagcaggcacttcaacaactgcagcacgggtagcgtcgtacaaccacctccacctgagattatgcgacttaaggaagaatgcgagacactatcaaactacatgatgtacctgatggtggtgcatccttccatgttgccagtcaacacagttgcggcaggagatcttgttcaacaacttattggctgggttactaaccaccctggacatggggcgacgacgaccaagctagcaattctgcgagggtactcaaggaccttttacattctgggcatagacgaaccaggccaacacagatcattttattatttgcatcacttacttacgcagatcaaggagatgtgggtgaggcttctcatgtatgctgctggcaaatgcagcggagaggtgcacgcacgccaacttggtgaaggacgtgagctcatcacctttgtctggctactcatgctgcatcatggacttggagacatggcagctgagttcaagcttttaagatctaatgatccaaatgtagccgagcggggggcgtggattgtttcacctccaggaaattatcaagagccgacttgtgccttcaaccacgccacagtactatctgaagctccttttcacatccagaccaacccatctgactgcctgcttctatgctatatgtcaacagacattcaggcaagcattcagaaacgtacgacgaacagccgcaacaggtcaaacgaagagaacagctgcacagcacagctgtgtggttaccagagcatctggaagttcgtcttccataacagaccaaccaaatag

SEQ ID NO: 34927 - DNA, 1782 bp, Zea mays
  Peptide Sequence Number=SeqID_76706
atgctggtgttcgtttctgggattatcaagtatggggagagggtgtgggctctgaagagtgcgagccgaaagggccttgacaagacatcagctaatcccagttcacatgaagacacaatcgatgatgtattgacttgtaccaaggaatcatatgctctttggacggtgcttatagctcgaggattttttgtggggcgaactatgctcctgatgggacaggggcctgcatcaacactatggttttatttcaagacaaagtatcaaggtagagaagagaagctgaagatggtaatgatggagcttggcatgatgttcgatctcctctacaccaaagccaacgtgctccagagaaggattggtgtcctattcctgtgtgcttcccaggccttgatggtcgttgccctggttctcttcatgatacgacgtgaggaaggcgcccacaataacaaggttaatgtcgcgattacctacacattattcagtggcgccatttttgtggagacctgctgtgttgctgcggcgattgcgtcgccttggacaagggcacacttgaaggagagcagctgccttcatggtctcagtgactccttgtttgaggctgttcatctgtgcaaatccaccgctaataacatggcacagtttaacttattggatcactgcatctctgtcaactccaaaccaagagttttctcaaaggccctcagtgctattggtctggataagcaatggtacgtccaccacatggataagcaatgctactggtggattatcaaccgtgttttggaacatttggccacattgcccgacgaattctcaggtctagcaactgtacactttacaattaatgcacccactgaacatccagtatggttcaaccagctgagtacatccttcgagcaagtcctctacggcttacacctatacactgacctacatctaagcaggcacttcaacaactgcagcacgggtagcgtcgtacaaccacctccacctgagattatgcgacttaaggaagaatgcgagacactatcaaactacatgatgtacctgatggtggtgcatccttccatgttgccagtcaacacagttgcggcaggagatcttgttcaacaacttattggctgggttactaaccaccctggacatggggcgacgacgaccaagctagcaattctgcgagggtactcaaggaccttttacattctgggcatagacgaaccaggccaacacagatcattttattatttgcatcacttacttacgcagatcaaggagatgtgggtgaggcttctcatgtatgctgctggcaaatgcagcggagaggtgcacgcacgccaacttggtgaaggacgtgagctcatcacctttgtctggctactcatgctgcatcatggacttggagacatggcagctgagttcaagcttttaagatctaatgatccaaatgtagccgagcggggggcgtggattgtttcacctccaggaaattatcaagagccgacttgtgccttcaaccacgccacagtactatctgaagctccttttcacatccagaccaacccatctgactgcctgcttctatgctatatgtcaacagacattcaggcaagcattcagaaacgtacgacgaacagccgcaacaggtcaaacgaagagaacagctgcacagcacagctgtgtggttaccaggctcctggcgaaaagcaagcagatgaccacgaaacccaggcctacggctcccccgagcacaatggctacagtctttgctgtctgctgccctga

SEQ ID NO: 34928 - DNA, 987 bp, Zea mays
  Peptide Sequence Number=SeqID_76707
atgtcctcctggcccggcgtctgcggcgcctccgtcgccgcgcgggtccagctcgccggctgcctcgcgctctacgaggtgtccggcttcccccaggtctccggcgtccagatgctcttcaagacctgcggcaccggcagcggcggcggcggcggcgacttcgagatgcgcagggacaccgccttctccgcgctcgagggcggcgtcgccaccagctccggcggcttcgtcgccaccagctaccaggccgtctacgccatggcgcagtgcgagggcgacctctccacgggggactgcagccagtgcgtcacccaggccgtgcagcacgtcgaggtcgagtgcggcggcgcgccctccggccaggtctacctcgacaagtgctacatcagctacagctactacccccacggcgtgccccacggcggcggcaccggaggtgagatcttggcagtgccctctgttcactcgtgcttcagaattgatttgattgatagcgattggtacctttttggttgttcctctggttgtttgggggcaaatttatgtagattagtcgtccactctcaggtacaatatggtagtagggtagcgcagtttccattttgccaccttgtttatgcatctgtctattcaagctttgggcagcagacagcaaagactgtagccattgtgctcgggggagccgtaggcctgggtttcgtggtcatctgcttgcttttcgccaggagcctggtcaagaagaaggatggtgctcccactgctgtttgttccaccagatgcctgactgttcccccttaccaaacctgtgtttattgcagattactgatgggagggagagcacggaaggagaatgtggacaaagacattgtgggggcatggtatggcattttgatggagcgggttgggtgtctatttggttggtctgttatggaagacgaacttccagatgctctgggaccagattttaactctagggtttggaagtag

SEQ ID NO: 34929 - DNA, 1305 bp, Zea mays
  Peptide Sequence Number=SeqID_76708
atgggcattcgcagagctcgccggttcctcttcctggccgccgccgtcttgctgctccacgcgccgctgcccgcgacgtccgccgacctctacgcgctcatctacaagggctgcgccaaccagagcttcccgggcggggtggcgcccccgagcgtcgccgcgctctccaccacgctctcggcgcagtccgcctccgccaagttctacaagacctcctcctcgtcctcggcggcctcctcctccacctccgtcttcggcctcttccagtgccgcggggacctctcggcctccgactgcgccgcctgcgtctcccgcgccatgtcctcctggcccggcgtctgcggcgcctccgtcgccgcgcgggtccagctcgccggctgcctcgcgctctacgaggtgtccggcttcccccaggtctccggcgtccagatgctcttcaagacctgcggcaccggcagcggcggcggcggcggcgacttcgagatgcgcagggacaccgccttctccgcgctcgagggcggcgtcgccaccagctccggcggcttcgtcgccaccagctaccaggccgtctacgccatggcgcagtgcgagggcgacctctccacgggggactgcagccagtgcgtcacccaggccgtgcagcacgtcgaggtcgagtgcggcggcgcgccctccggccaggtctacctcgacaagtgctacatcagctacagctactacccccacggcgtgccccacggcggcggcaccggaggtgagatcttggcagtgccctctgttcactcgtgcttcagaattgatttgattgatagcgattggtacctttttggttgttcctctggttgtttgggggcaaatttatgtagattagtcgtccactctcaggtacaatatggtagtagggtagcgcagtttccattttgccaccttgtttatgcatctgtctattcaagctttgggcagcagacagcaaagactgtagccattgtgctcgggggagccgtaggcctgggtttcgtggtcatctgcttgcttttcgccaggagcctggtcaagaagaaggatggtgctcccactgctgtttgttccaccagatgcctgactgttcccccttaccaaacctgtgtttattgcagattactgatgggagggagagcacggaaggagaatgtggacaaagacattgtgggggcatggtatggcattttgatggagcgggttgggtgtctatttggttggtctgttatggaagacgaacttccagatgctctgggaccagattttaactctagggtttggaagtag

SEQ ID NO: 34930 - DNA, 903 bp, Zea mays
  Peptide Sequence Number=SeqID_76709
atgcaggcggcttgcaactacaccaaggggatgcaccctttcgacctcgatgcgtccaacatggaggcccaggcccacacgtcatggactcggaaaggggatactccgaaagggatccttctccacgaaggaagcgggcctcgagccctcctgctgatcagaggttcgaaggctggcccctcggaagggttcgacagccgcctcagagcactcgggctccatgcccactactgttcagaggttcgaaggctggcccctcggaagggttcgacagctgcctcaggccactcgggctccgcgcccactactgatcaggggttcgaaggctggccccccgaagggttcgacagccgcctcagaacacgcagagcgagggatgactctgggtacgtccgatacatggccgaggctcgggctacgctcccgaggctcgggggctgctctcgcaaacctggctccggccaaaccgttgacaacctggtaacccccatcagcacaaagctgcaaaggcctgatgggcgcaattcaggtcaaggctccgcccactcaagggacacgatcttgcctcgcccgagccagcctcgggcaaagacagccgacccaggagaattcacgtctcgcccgagggaaaacagcgtcgcctgccctgctccgactgctgtgccacccaccagggtgagactgacagtagccaagtccagccttgggcgccataggaagctccgcctcgcccgaccccagggctcggactcaacctcgacgccggaagacagcccccgcctcgcccgaccccagggctcggactcaacctcgacctcggacgacggactccgcctcgcccgaccccagggctcggactcaacctcgacctcggacgacggactccgcctcgcccgaccctag

SEQ ID NO: 34931 - DNA, 750 bp, Zea mays
  Peptide Sequence Number=SeqID_76710
atgggcgcgattccggtcaaggctctgtccactcaagtgacacgatctcgcctcgcccgagcccagcctcgggcaggaacagtagaccaaggcagattcacgcctcgcccgagggtctcctcaagcaatggacgcaccttcgactcgcccgaggcccagctcgggcaggcttcgcggagaagcaaccttggccagatcgctacgccaaccgaccagctcggactcaacctcgacgccggacgacggactccgcctcgcccgaccccagggctcggactcaacctcgatgttggacgacggactccgcctcgcccgaccctagagctcggactcagcctcgggcgccatagaaagctccgcctcgcccgaccccagagctcggactcaacctcgacgccggacgacggactccgcctcgcccgaccccagagctcggactcaacctcgacctcggacgacgatctccgcctcgcccgacccccggggctcggactcagcctcgactccggaaggcggtctccacctcgcctgaccctagggctcggactcaacctcgacctcggacgacgatctccgcctcgcccgacccttggggctcggactcaacctcgacctcggacgacggtctccgcctcgcccgacccctgggcccagactccacctcgacctcggaggagcctccgcctcgcccgacctcgggctcggaccgaccacgtcgcagggggccatcattaccctactcctagctag

SEQ ID NO: 34932 - DNA, 132 bp, Zea mays
  Peptide Sequence Number=SeqID_76711
atggcggcggttctagccgtgtctccttccgcatcgaggaaccgacggtcaagcttcgactaccaagtgatcaagcttttcgagttctacgagattgaagaccctgagcactcgttttgtgaaggcaagtga

SEQ ID NO: 34933 - DNA, 408 bp, Zea mays
  Peptide Sequence Number=SeqID_76712
atgaagacaatgcgatcaacatcaaccaacaagatcagagtggcgcaatggaagcatgtgtgggtccccacccacaggtccaagggatcctcaaggaatgtatcgcttggtcttgagcgtctgaagcagcagatgaagaggatcccgcacccagagctccgcctgcatagagctcgactcgccgcccagctgtctgcactaggagactgtgcccggagttccacccacgtcgtgctcgcccgccatcgaaggtcaaccacgtcgtcgactcgcctcaccgtccgccgtcgtcgcaagattgcgatctatttccgagcttcgaggaatcgacagtcaagcttcggcgaccaagtgatcaagttcttcgagttctacgagattgaagaccctgagcatctgttttggtga

SEQ ID NO: 34934 - DNA, 276 bp, Zea mays
  Peptide Sequence Number=SeqID_76713
atggcgggcggaattaagcttgccggagctaaggggaagtggctggccggtgaggggacagggagttgtagcgtcaccaaggtgccagtgtcagaatgcctggtcccgaggttgagctgcgccaaaaccgtgtcaaaaggatttggtttgagttcaaactttcccagaatgtgttcaagagaaaccctaagtgacactggggtgtcacagccttccccccttaaaggaatctcgtcccgagattcgggccagagtcctcccggggtgaagcgaagg

SEQ ID NO: 34935 - DNA, 303 bp, Zea mays
  Peptide Sequence Number=SeqID_76714
atggcgggcggaattaagctcgccggagctaaggggaagtggctggccggtgaggggacagggagttgtagcgtcaccaaggtgccagtgtcagaatgcctggtcccgaggttgagctgcgccaaaaccgtgtcaaatgaatttggtttgagttcaaactttcccagaatgtgttcaagagaaaccctaggtgacactggggtgtcacaaattcgtcctcgaattcgaccacttccaagaaaagcatccaagctatacatcaacatcaatgtcttaaaacaacactcttttatgaaggggtaa

SEQ ID NO: 34936 - DNA, 177 bp, Zea mays
  Peptide Sequence Number=SeqID_76715
atggcgggcggaattaagctcgccggagctaaggggaagtggctggccggtgaggattatttatccacatttcaccaagtttggaattattcaatctcaagaacagccaaatttggagctgttgaaactcttattctcgacgcgaatgcaaactcgaaaaccaatcttgatttttaa

SEQ ID NO: 34937 - DNA, 1051 bp, Zea mays
  Peptide Sequence Number=SeqID_76716
atgaacaaaacatcggcattcaagatgccatcacaaacggaactccggtcccgtccccacggcaacagttcaccttccccggcatggctggaggatgtctccgcctcagggctggagggcgattgccaccaccagaagctggaagaggaggtggtccgccggcccgcgcaggaggtagagccccgactcgcctcgctccccgcctcaacgaggatggcgaacaccctcaacactgagggcgggatcggggtcacagcccgaccaacgggcgaaagaggcaggcagccacgcaggcggcatgcaaccgcgccaagtggacgcacttctccgactcccgacacgccagcatggaggcccaggcccacgcgtcgcgcaaccggcacgccagatgctgcatgcgagcaactgcctcgcctgcgccaccaccgcgcctcctcgattgcggaaccaacaccgcgactcgaggcgacccagcgcgcgacccagcggcgccagcctgacgcggcggccaacgcggccaaaggagggccggcagtaatgacggtggcaggcgcgcgggagcagcggtcacgtcgtcagccaagctcacgtcccatccgggggcagcgagagagccccctctcacggcatgaagacaacgcgcccgtgatctgttcctcgaacggcccgcgcacgcgcaacggcagccccgccagctactcgccccatcgcattaactccgcggcgggacaggcggcacttctggcaggaaaagcgggcggcgcttcgccttcgccgaaacaaccgcgccaaaaaagggaccaggaaagggggataccccgaaagggatccttccccgtgaaggaaccaggctccgagcctccttactggtcaggggttcgaaggctggccccccgaagggttcaacagccgcctcagatcgcgtgggccctacacccactactggtcagaggttcgaaggccggccccccgaagggttccacggccgcctcaggctactcgggcttcgtgcccattactgatcaggggttcgaaggctggcccccgaagg

SEQ ID NO: 34938 - DNA, 1185 bp, Zea mays
  Peptide Sequence Number=SeqID_76717
atgaacaaaacatcggcattcaagatgccatcacaaacggaactccggtcccgtccccacggcaacagttcaccttccccggcatggctggaggatgtctccgcctcagggctggagggcgattgccaccaccagaagctggaagaggaggtggtccgccggcccgcgcaggaggtagagccccgactcgcctcgctccccgcctcaacgaggatggcgaacaccctcaacactgagggcgggatcggggtcacagcccgaccaacgggcgaaagaggcaggcagccacgcaggcggcatgcaaccgcgccaagtggacgcacttctccgactcccgacacgccagcatggaggcccaggcccacgcgtcgcgcaaccggcacgccagatgctgcatgcgagcaactgcctcgcctgcgccaccaccgcgcctcctcgattgcggaaccaacaccgcgactcgaggcgacccagcgcgcgacccagcggcgccagcctgacgcggcggccaacgcggccaaaggagggccggcagtaatgacggtggcaggcgcgcgggagcagcggtcacgtcgtcagccaagctcacgtcccatccgggggcagcgagagagccccctctcacggcatgaagacaacgcgcccgtgatctgttcctcgaacggcccgcgcacgcgcaacggcagccccgccagctactcgccccatcgcattaactccgcggcgggacaggcggcacttctggcaggaaaagcgggcggcgcttcgccttcgccgaaacaaccgcgccaaaaaagggaccaggaaagggggataccccgaaagggatccttccccgtgaaggaaccaggctccgagcctccttactggtcaggggttcgaaggctggccccccgaagggttcaacagccgcctcagatcgcgtgggccctacacccactactggtcagaggttcgaaggccggccccccgaagggttccacggccgcctcaggctactcgggcttcgtgcccattactgatcaggggttcgaaggctggcccccgaaggacccggctccggccaaatcgttgacagcgtcaacataccagcccgagaacttgggccccgaccgtgcacccgggctacgaccagttcgcatgagggaacaaccagacctgctgaagcgttacgcaaggcattaa

SEQ ID NO: 34939 - DNA, 222 bp, Zea mays
  Peptide Sequence Number=SeqID_76718
atgtggaaggggaagaagagcgggcctctggcgccgtggggccggaagcgagagttccccattcgtgcggcggactacgagctgctcgagcccatcggcgacggcgccaccaccgtaatgcgccgggcgcgctgcctgtcgcacgggaggtcgtcgtcgtcaaggaattgggaggacctgtcctttgacggcaagggataccacagtcagcttcaatattag

SEQ ID NO: 34940 - DNA, 708 bp, Zea mays
  Peptide Sequence Number=SeqID_76719
atgccggggaaggcgaactgtttctgcccagccagggtgcaacattccgtcctctatcctcgctttcgtggcgaggacgggagtgaggacctgccggtgcgctttggggcgaccgacgctcgatggtgcggtgttggtggacgggtggacgccgccgtcagtgctgacatggtggcagctggagaaagcttcttcgccgacgagcccgttagcgctacccgcggaccgacctccggctctttggctttaatgtctggttctcgtcccttgagtggggacgcgaacaagagccttccggtggcagcgtccgtcctggcaccatcgctactgctgcagaggtcgctggcgagtcaccaggagtttgtcgtcccgcgggctctccgatgtggaggttgttcatacccgcgggagtggaaccggtgttccgtctgtaatggcaccttgagtgccggtgtctgttcatcgtggctgtcggggcctgaacatttatgtattttggcgtggagccgtgttttttcctcatttcgagcactagaactcgcctgtcggctagccgaaccgcttaaccaagtgttccttcgaggtggagatgctccgactgtgttgccgtccgaggccgggtcggattccgccgaaggtggagtcgacgccgagggtgctgctgctcccccgctgatgtttgatcctgcaggaacagtttatctatag

SEQ ID NO: 34941 - DNA, 453 bp, Zea mays
  Peptide Sequence Number=SeqID_76720
atggggaagaacatctccttgatcctctctctctctcttcaattcaacgtgctcctcctcttctcgatccttgctgcatggaggagatctagagggaggaggaagccgtggagaggctgtcggcatagtgatagttcagcaaggacattagtttatggcttgtacccttggaagttgaggaggagtttctatcaaagggtggcccatgagttaatggttggtgttgggggccttcgtcttccgaagcatttgagaacaagtccccaacagttggagcaggcagcttggtgtatcaagttacaaaattttgtgcttgagggccaagagatgctctttttcttgctggataaggaggcggactctagcctgggcctcgttatgctgctgattgggtgcgagggcgtctctttgcttctggaggttggcactgcgcatgcgaaggcttttgagtag

SEQ ID NO: 34942 - DNA, 642 bp, Zea mays
  Peptide Sequence Number=SeqID_76721
atggggaagaacatctccttgatcctctctctctctcttcaattcaacgtgctcctcctcttctcgatccttgctgcatggaggagatctagagggaggaggaagccgtggagaggctgtcggcatagtgatagttcagcaaggacattagtttatggcttgtacccttggaagttgaggaggagtttctatcaaagggtggcccatgagttaatggttggtgttgggggccttcgtcttccgaaggtaccttcggactcggatcagaaccatagtgtgaagaagcataaagaatacgaagcatttgagaacaagtccccaacagttggagcaggcagcttggtgtatcaagcttccaaccctgtagttgcttggccagggcataacctgcagcctggcggagagcgagcacttactgtcagtgaaattgaaagcctagaaggcgtcattttgtggaggttgcctaacttcgtcaaagctactcagccttacatgatcttgcgaaggggccaagagatgctctttttcttgctggataaggaggcggactctagcctgggcctcgttatgctgctgattgggtgcgagggcgtctctttgcttctggaggttggcactgcgcatgcgaaggcttttgagtag

SEQ ID NO: 34943 - DNA, 438 bp, Zea mays
  Peptide Sequence Number=SeqID_76722
atgtcttcgagcccggctgagagcaatgctctccaggccatgggcgagtggcttggtcttctgaccgtcaagcaagagctgttctttgtatacttcaagccgagcacgtctctgctttgcaaaagcagcgctcgcttcacgggcgttcctggtagcagcgctcgcttctcgggcattgctggcgccagattggacaacgacgaggaggagagtgaaaccaaggagaggccactggtgcttcgacttcaaccacgcgaggtccagagcggcgctggaccttcaggccccgtcccgtccggctgcagatcctaccgctacttccccgacgcccgcgcgctccagagctgcagatcctacgcgatcctgggaatccccttgatagacacacctccagatcgcgacctccagatcgtcgagatgagcagaggaagagggtga

SEQ ID NO: 34944 - DNA, 2274 bp, Zea mays
  Peptide Sequence Number=SeqID_76723
atggacccagaaactggagattttatcccgaatagtatgcttgtgagcgaatggtatgtttgggatgtctatacagtggcctacgcgtttcggagtgaactggagaacggcgagcccatctccggcctggacccaccgcccacctggatcgagagttgttgttccagagtaaaagtaaaagtcagcagtggcaacttgtacagcagctcgcagaattgctccactatcactatgcacccagacacccagaggtgtgccgtgtgcgcactgtggcggtgtggccactggtcaaaggacaagcaccatcgactgtcacagtatggctactgcggtagcgcgatgatagaacaatcgattgccaacgattctccctttgggtcgagccagctgcttctgaggatcttctgtgcaccttgccgtatcgtgtcatcatacagtttgactggttgctgccctagcttgttctaccgcgtgggaaaaaaaagaaagggaatgcgaatgctaccaggagtaataattaccgttgagatcgtactaacaggagttgaggacaagctagatgatcgatcagatcagggtaccagaactctcctgctcggcccgctcgcgtccagctgcgcgcgcgcctgcggtggccgtgaaggacagcccgagggacgcgccgggtgcactgatctgggggccgcgtgtccccggtggtggggcgaggcggcgccggcttccaggaatgtgagttcccgctacacaaggggtggtgccgtggtggggcagcttgtagtggctgtttcttttgcatatgcgctttctattgttgttgtcatttcaaaggagatgtcatttcgtagcatagtccgtgatgttagggatggcttcggcagcttgtcaaggagaagctttgaggtgaccctcgcaagcatttatggccttactgggcatcacaaagggaagacccagagctcatcacatgtgctcgacgactcaccttccataattcgtgaaagtcgatgggcgaatctacctcctgaactcatccgtgatatcatacggagactggaggctgatgagagcacctggccagcgcggaagcacgtcgtttgcttcgcagctgtttgtaggacatggagagaaatgtgtaaagagattgtgttgagcccggagttttgtggcaagctcaccttccctgtgtctctaaaacagcctggtcctcgagatggaaatacaatggtccagtgttttataaagaggaataagtcaaaatccacttaccatctctacctgtgccttagcaatgttgttacttcagaaagtgggaaattcctcttatcagctaaacgacaccgcaaaaccacatgcaccgagtacactatatcaatggattctggcaacatctcaagatcaaaaagaacctacattggaaaaataaggtctaacttccttggcacaagatttttaatttatgatacacaaccgccctataatggggctgtagttcctcctgccggaaggacaagcaggaggttcaactccacaaaagtctctccaaagctgccttcagtcagttacaacatcgcacaggtatcgtatgagttaaatgtccttggcacgagaggtcctaggcggatgcgttgcatcatgcactccatacctgcatcatcagtggagccaggtggcacagtgcctggacagccagagcagattgtacctcgagccctggaggattcattccgcagcacggcttccttctcgcagtcgttccgtagcactgcctcattctccaagtccatcatggactcatccatggatttcaatagcgctcgcttctctgacatcgctggcagcagcgctcgcttcacgggcgttcctggtagcagcgctcgcttcgcgggcgttcctggcagcagcgctcgcttctcgggcattgctggcgccagactggacaacgacgaggagagtgaaaccaaggagaggccactggtgcttcgtaataagccgcctaggtggcacgaacagctgcagtgttggtgcctcaacttccgtggccgtgtgacaattgcctcggtgaagaacttccagctgatcgccgcggctaccccgccaccggcaggtgcgccaaccccctctcagcctgccccgtcagatcccgacaaggtgattctccagtttggcaaagtggcaagggatatgttcacgatggactatcgctaccctctctcggctttccaggcctttgccatttgtctgagtagctttgatacaaagttagcctgtgaataa

SEQ ID NO: 34945 - DNA, 725 bp, Zea mays
  Peptide Sequence Number=SeqID_76724
tgcaatgctacaagtgctacaaatggcgtactgttccaaaagaagaattcgagacactccgtgagaacttcaccaaggatccatggttctgcagcagacggccagactgctcctgcgaagacgatgctgacatcgagtacgacagcagccgtatctgggttctggacacgcccaacataccaaagcctccaccagagacggagaggctagtgattatgggcggtgactacaccagaatggacacgtattacgtcatgcccaatgggaagcgtgcgaggtgtgctggtgacgtggacaagtttctggaggcaaatccagcgtacaaaagccgcatatctgcttcggatttcgactttgcaccgcccgaggttgttgaggagactgttgtttctcacaattttctgcctctgcaagaaggttccggaagcaagggacgtttctggatacagggcgttccgttctctccagctgcgtataaattctgccccaccgtgtcatctcccgcaccgtctattcttgggctgtcggcctcacgttttccactgcttccagaggcttcctctcgagcgcggcggcccgcggccaaggggcgcgacgacgggctcaccccggagcagcggcgggagcgggacgccaaggcgctgcaggagaaggctgccaggaaggcggcgcaggccgcgggaggcgcctgcgccaagggcggcaagaacaccggcaagaagtag

SEQ ID NO: 34946 - DNA, 837 bp, Zea mays
  Peptide Sequence Number=SeqID_76725
atggagcccggccgtttcccattccccgcatcgcctctatcgcctgtgccacctcgccgccgtcatgacaacagggtcaacaccgggttcgcccccctctcaaggctctcagtgcaatgctacaagtgctacaaatggcgtactgttccaaaagaagaattcgagacactccgtgagaacttcaccaaggatccatggttctgcagcagacggccagactgctcctgcgaagacgatgctgacatcgagtacgacagcagccgtatctgggttctggacacgcccaacataccaaagcctccaccagagacggagaggctagtgattatgggcggtgactacaccagaatggacacgtattacgtcatgcccaatgggaagcgtgcgaggtgtgctggtgacgtggacaagtttctggaggcaaatccagcgtacaaaagccgcatatctgcttcggatttcgactttgcaccgcccgaggttgttgaggagactgttgtttctcacaattttctgcctctgcaagaaggttccggaagcaagggacgtttctggatacagggcgttccgttctctccagctgcgtataaattctgccccaccgtgtcatctcccgcaccgtctattcttgggctgtcggcctcacgttttccactgcttccagaggcttcctctcgagcgcggcggcccgcggccaaggggcgcgacgacgggctcaccccggagcagcggcgggagcgggacgccaaggcgctgcaggagaaggctgccaggaaggcggcgcaggccgcgggaggcgcctgcgccaagggcggcaagaacaccggcaagaagtag

SEQ ID NO: 34947 - DNA, 282 bp, Zea mays
  Peptide Sequence Number=SeqID_76726
atggttggccgcgggccgctccatgtttttctggcagccgtgcgcgcgaaactgcgctggtcgacgtccttctctgcgtgttcgtcgtccatcgggtttcgtgcgtgctcgcgtttaccgtcaagtcgtcgaacccatcatcctttgttcgaccccccacctcaccagctcgctccaaacacgatctcgtcatcgtttcatgcgtcatcaagaaatcccaaaaatcggatgaagacgaagctagcagcgcgatattccccaagcgctcgacaaattgcctag

SEQ ID NO: 34948 - DNA, 390 bp, Zea mays
  Peptide Sequence Number=SeqID_76727
atgtcgagttcccgcaccatcatcatcgcttctgttgcaagctcgttggccacagttatcttgaccgcgtcagctcgcgactgtggtcgtgttcatcgaattcgccaacactttgttgccgattcgactgccgtcgttccgcgcgtcagcaagaaatcccaagaatcgggtgaagacgaagctagcagcgcgatattctccaagcgctcgacaaattgcctggatcgaaaaatcactaccgatctcgcggatcgtgtcagctatggaaacggaacgttaatcaatcgcgcgatgcggaagacaagccaagtcgaccccaagcgcgggctactccgcaggatgatgctgatggacaagcctgaagatactcgtcaagtggacgtcacctaa

SEQ ID NO: 34949 - DNA, 396 bp, Zea mays
  Peptide Sequence Number=SeqID_76728
atggatcacgtgctcgcaggactgatgggcgaccatctcgcgttgatcgtggaccggctgctgacagagtcgacgctagaggcggcgatcggcggtgggaagcagatggtcgatctgcgtcaggagacggtggacgtcgacctcaagaccgttctcatgcccccgcctctccttctgcgcatcgaggcttctgaaacagcaaacacctccttccgtatctgtcggcgtttcgaccccggggggtcccaggaccgacgagtcgggtgcgcttgcagtagggggttacaagcgtccgcgtgggagagagagagagagccttatgcgctggcccgttcccccgcgcggccaaccttctcgtatgagagccctgaaccttccttttataggcgtaagtag

SEQ ID NO: 34950 - DNA, 675 bp, Zea mays
  Peptide Sequence Number=SeqID_76729
atggccggccgcatgcacgaccacaggtgccacgcgcggcatggcgaagaagagctcgagttggggctcctgagctcggcggtggcggatgcccccacctcaatctgcgcgcggggaagacataccgcgcggcgagcgggcttccctctggatctctcccatccgtcggccatggtggcccacgcacgcgaagctccctggcggatctgcgctgagtctgttgttgtgtttgcgttcactacggaggtagacgacgagtctagcgtcctggagccggtgcgattcggtgaagacgatggagcattggagctgccgcgtgggacccacccgcagtatcagagatggttcaaacacgcgatgtgtggaaggctgggacgcggacccccgaagtcagcgaccaagactgatgggcgaccatctcgcgttgatcgtgggccggctggtgacagagtcgatgctggacgcgcgatcggcggtgggaagcagatggtcgatctgcgtcaggagacggtggacgtcgagtactgccatcgcgagctaggcggcggctcggcgatgaaggtggtggagtgcaggatttgccaggaggaggactgggacacctgcatggaggccccctgcgcctgctgtggcagcctcaaggacctctttaatcacgctattttttttatttga

SEQ ID NO: 34951 - DNA, 591 bp, Zea mays
  Peptide Sequence Number=SeqID_76730
atgggggcttcagcgcgggaaagtcgggtctctgttgcgatttactcgctcgacgttgtgggccattcgggtttgcaccaatccggtatcacgtcgctctgctttgttggttgtttctccccaggcccacaaaagaatgaccttacgatttattgggcccttgggcctttcgtgaggtcttttactcctttagtggacccgggggatatctatcccccacacaacagccttaggctccatggcatccaattgtgttgtcacatggagcatagggtgtccacaacccctgtcacgatagtttggaatattgcatctcatttttgggccaacacaaccaacacactaaagacatcaatcatggttgaaagagaagagttcgttgttagcaaaacaaggctgtattatgatgttaatcttattgatccactaaacaatcttggcttgggcttgatgggctttagccatctctgtatcctcaatgggtccaagtccagagcacacgaaggcctagcccagaaccactggattggccactgccagcggcacagccgacgccttatccagcaaccgtcttcctcatccatggcataa

SEQ ID NO: 34952 - DNA, 315 bp, Zea mays
  Peptide Sequence Number=SeqID_76731
atgcagagggaccatggtgtcgagaccgacattatggacgaggggatgacgatgaagagaaaggagggcgtgggggcctcctcgttgcatctaacgggcaccgaccgggttggtttggccaatgtggcccccaacaggagactccatgtcgacaagtccatcatccctgcatatcaccttgacctggacggcccacaacgtcgagcgagtaaatcgcaacagagacccgactttcccgcgctgaagcccccatgcaacggagccatgcgaggagagccctcttgtaaccacgtgcacatactcaccaggacgtag

SEQ ID NO: 34953 - DNA, 291 bp, Zea mays
  Peptide Sequence Number=SeqID_76732
atggggatggagtggaagcagaaggtgagcctcttcgacgtgatcgacgagacctccgtccccaccaagcttggccatgccgcctccaacggcgtcgccgccactgcgacttggggcaactcccaagggctaggggatagtgttataatcctttgcataattaggagcaagcagggagaaaaatcgtcatgtcaaagggtcaatataactagacgcagtactaattccaagagccagggtcccagcaataatcacacatataagggtagtttgaaggaatcgttagaatag

SEQ ID NO: 34954 - DNA, 162 bp, Zea mays
  Peptide Sequence Number=SeqID_76733
atggggatggagtggaagcagaaggtgagcctcttcgacgtggtcgacgagacctccgtctccaccaagcttggccatgctgcctccaatggcgtcgccgccactgcgacttggggcaactcgaatgctattgcagttctcttttatgatttcatactctag

SEQ ID NO: 34955 - DNA, 237 bp, Zea mays
  Peptide Sequence Number=SeqID_76734
atgcccattgaaaaaacgagaaaagtagaaagcgtcgtaaagtttaatacgagctacctcgttctacaagctatggccatgtgggggaatgacagacgaatgaaatttgttggggatgcaaagattcttcaaataaactttgtgattgatctgttaagttatgaggacaattcgtgtcgatatgccatccctacaaacatacaacagagacttatcgatatcgctaaaaaggattag

SEQ ID NO: 34956 - DNA, 1773 bp, Zea mays
  Peptide Sequence Number=SeqID_76735
atggttctcatggtgcgtgactttgctgtcttgtccttctacttcgagctagctcaagctttcctgaagcaagcgaagcgaagcagagaaatgctgcaatacaatgcagtgcaatggaccctgtgctttgcttggctggagatggagggtgatcttgccctcatcgattttattaaggaaatcccttgtgaaccaagggtggaagtcgtacttattgatgatgcctttgttgaaagaaagtcgatggaatgtttatttcaaccgaatgcgtatctaggcgacgaggttatagactgttatataaatttgataaaagctcaaaagcatctaaagtgccgatctggaggtcgcgttcacatagaaaatgctttccagtttaatttcttgaagcgagatggcgatgttgacattaaaacagaggagctatatccaattgaagacatgacacaaatatgtagcgctgaacgaagggtgttactttacctagaccatgacatggtgtttattccgataaacatccgagagacgcaatggtatcttgctgtgatccatgcaagaaatatggagatacaagtgctcgattcacttggtacttcacaagaccgtaaagacctcactgactctattaaaggtctccaaaggcaaattgatatgatatctcaacctcttcatgtggcctctttctttttgaactatatcgaatactggacaggggatgaactgtctgacagttttacccaggatgacatgtcacactttaggaagaaaatggctgctatattactatcttcagaactgaataagagaagggggtgtctgttatacaaaaatgataaagaagttgactctggaagcccatcggatgttgagatattagaaaacccaacagattctaagaagaggaagctactccacgtgcttgatgataacgaagtagtgtatgaagatgaggaaggccctattactcaagcagacttgcaaaagtggtttgttgatgattgggataaaagaactcctgtaaaagtatctaacgatgggtgcaccaatgactttttaatggttggtctttccacaaaggacatgccagtgaccaaagccgaatcaatagatgttttatgtgattatatcatggcaatagaagacgatacgacactagaatgttttgatatggctgttcgactgcttgccaataaagagtcacgtaggccgaaaggagaaatcataaataatagaaagcattatatggacatgcgtttctggagaatggttggctttggtaaacttccaaagtaccatcaagatcctacagcagaagagttagccaaaacactcgattgttggccatcaatgaattattatatcacgggttgtagatatgttcttatgccatggaaattcaacggatgttatgcccttttcgtaatagatcatgttaaaaagcatgtgacttttatcgactttacactgactcaagattggtgtaaacacatgccatacaagaggtttgcggaagcgattatcatggcctcaaagaaatataagattgcttacagcaagaaacgttctggatgggcggaggatatctttaagtgggaacatacaattcagactgatgttccaattgatttaagagggtttaataccagctacctcgttctacaagctatggccatgtgggggaatgacagacgaatgaaatttgttggggatgcaaagattgttcgaaggaactttgtgattgatctgttaagttatgaggataattcgtgctga

SEQ ID NO: 34957 - DNA, 594 bp, Zea mays
  Peptide Sequence Number=SeqID_76736
atgaccagtccaggcgcacggcaacttttgctctcctctggctctgcgcggcgcatagggatgcccggagatggcagcgcggcggcgggcgaccccctggcgcgatcgcactccagcggtgatcttgccctcatcgattttattaaggaaatcccttgtgaaccaagggtggaagtcatacttattgatgatgcctttgttgaaagaaagtcgatggaatgtttatttcaaccgaatgcgtatctaggtgacgaggttatagactgttatataaatttgataaaagctcaaacgcatctaaagtgccgatctggaggtcgcgttcacatagaaaatgctttccagtttaatttcttgaagcgagatggcgatgttgacattaaaacagaggagctatatccaattgaagacatgacacaaatatgtagcgctgaacgaagggtgttactttacctagaccatgacatggtgtttattccgataaacatcctagagacgcactggtatcttgctgtgatccatgcaagaaatatggagatacaagtgctcgattcacttggtacttcacaagaccgtaaagacctcactgactct

SEQ ID NO: 34958 - DNA, 240 bp, Zea mays
  Peptide Sequence Number=SeqID_76737
atggtgggcaagaactccatgaagattgctcgtgatctggtcatgcaggaggttgtaaatgatcttaatccttcaggtcagaacttacagaataaggaggatcttcagggaacactgattgatggcataaaagaagtcgtcttgtctcctgcagatgctttgtcccttattgcagccggagaagtgttttacaacagtttggcctttggaattgctactgctaaaacttcgttcctctaa

SEQ ID NO: 34959 - DNA, 666 bp, Zea mays
  Peptide Sequence Number=SeqID_76738
atggtgggcaagaactccatgaagattgctcgtgatctggtcatgcaggaggttgtaaatgatcttaatccttcaggtcagaacttacagaataaggaggatcttcagggaacactgattgatggcataaaagaagtcgtcttgtctcctgcagatgctttgtcccttattgcagccggagaagtattccgattatcacaatctctactacttcataagtctctaacgtggccgtccaccacagcttcaccgtgcccccgctcttgcgatcctcgcccccgttcccgcccgccggtgtgccgccactccgtatccgggcgcagcgccagtgttccacgtgctatgctggacatctcacagtcaattcgttttgatgatgatgtggaggatggaaaaagtcatgaactcaaagtgtactctctagaccgtataagagctgctacaattaattttagtgactctaacaagcttggacaaggaggatttggtcatgtctatatgggaactttacctgggggagaagaagtagctgtgaagaggttttgtaggaattcaggtcaaggccttgaagaattcaagaatgaggtcatacttattgcaaagttgcagcaccgcaatcttgtaagattactagggtgctgcatacagagggaagagaagatctag

SEQ ID NO: 34960 - DNA, 312 bp, Zea mays
  Peptide Sequence Number=SeqID_76739
gatgcgaagagaattggaccaaggaaaatgaggatgcaacacctcaaaagaagacataaaaagatgcataggagtccaatactcaagaacaaaagaagcccgaagaaatcagcgaagaaatccaagaagcgggctgtcagccagcgcctggtggtgcaccggacattggtgtccggtgtgcaccggactgtccggtgtggcaccggacagtctgcgcagagaggccacagacaggcgctctctggctgtagcaccggactgtccggcgccaacggtcggctgacgtggcgtgcaccggacactgcacagtag

SEQ ID NO: 34961 - DNA, 375 bp, Zea mays
  Peptide Sequence Number=SeqID_76740
atgaccggggataaacaaaggcaaaagctcaaacaaaagccatcaagcaaaatctccaacacctacataaaaaaggtggacaaaaaggccgctacatcatatttgatcaagaagaaaaagaatggaaaggtgatagcaattaaggccaacaagcaagtcaacaaaggaaagggggccaaacgcatctgggtgccaaaggaaataatttcaaccatgaaaagcaccaagaaggtttggatcccgaaagggaatttattgccaagtgggttagcaaaaaatttggacccaaatttcccacccatgactaagttcacaggatgcgaagagaattggaccaaggcaaatgaggatgcaacacctcaaaagaagacataa

SEQ ID NO: 34962 - DNA, 663 bp, Zea mays
  Peptide Sequence Number=SeqID_76741
atggaccgtggaccatccgcagtatcaagatctgcacagtccggtcgaaagcgcatgaagttatcagggcgcggaccgtccactgcccttgcacggaccgtccacgacaggcagttaagacgggcagaggcagtcaacttgtcatttctattcattaactctcctctcacgctctccactcgccaaaaggtcactttcgtcgattgtgcgcggacggtgaagagaagttgcacacggacagtccgaaagcttgtgggacgttcaacaaacatgtcttcatcctgtggtctaggtggtcttcggaagaagcttgtcggtcgcttcaaatcaaagcgccctcgtgcagacgatgcagactacactccaaccactgactcagaggcccaatcttcagctgggggtagtgtatctatggacacagaagatgttccgcatactcatcctaactatccaattgacatcataggatggacatttccaaagaggaggttctctatggcagaatactgctccaagagaactgtcaatcaatatactctgccatcagacacaaatgttcaattctttcacactcagctccaatttgatattttttggggcacattgatggataccaactttcacaaacatcaggtgattgattggacttttatgctgggataa

SEQ ID NO: 34963 - DNA, 1509 bp, Zea mays
  Peptide Sequence Number=SeqID_76742
atgcgcggccccgggggaaggatgtcttcgcccgagctccgggagtcttcggctcgaatgctgagggttatcgggggttgttggcctaggaatgttcctatcccccgcgcgactggcgaggacttttttacatctcgcatggttcgtgaatggagagtttttccttacgagcggaatgttgctgctgttgtgtcggcagtgatggacaaggatcgccagggagctgcgcaaaagcgccaggcggttgtcaggctcgttgaagccaggccgaagaggcagcggggggctgcgaaggctgcggcccccggcggaggcaagccgccgctggcggcgaagtcgggcgcccctgcgtctagcaaagcgccggaggcgacggcaggcgccggaggctccaaatcgacgaaggctgtgccgccgtccagcagagtgccggaggtcgtgaaggcggcccgagcgttgccatcggtaggcaagcgtgtcgccgacttcgccaccgatattagtgtggacgactatcttggtgctgacgaagacttcgagcgagatatctacaaggttgaggaccccatagtgaaggaatccgccggagccatctatgaccggatgtggggtccgcacggtcgcgaggtggttagggagcgggccgagacggcgagggctcaggcggcgcgtggcgagagggtggatgacttcggggcgttgaacagcgcgctgcctgacctagagccgaccccggcggaggctgtgtccggggccgccctggagccgcccctggagactgcggaaggcgcgccggatacccccgcatccgctgtggccggcggagacgtgcccccagacactgccgaaggcgcgcctgatgcccccgcagccgctgcgccgagtgctgaagatcctgcgacggtggtggcggaggcggcagcggaggcaacggtggaggcgacggcggaggcaacggcagggtcttcgcaggttcaagattttgggcctgcgcacgcaaccaccactactaaatttctggcggcttcgaccgtggatggtggtaataaatgtgatggttctgcatctgagttttctgattttgctgactctgggagctcggttgagtggactgaggagtcgtcggaggaggacttggactactttgcggctttggatgtggctgcggcggaggcttcaccgcgcgctgcggacacagaagatgtgcccggtcctagtacagggcgccggcgacgaagggcggttgcgaagcgcagagtgagtgaagcggagggaggcgacttctgcgcggatagtcttcgcggtagactgaggtttttcgcacttgttgtgctagtccggctgcaccctaaggcgacttctgcgcggatagtcttcgcggtagacttcgggtttttcgcacttgttgtgctagtccggctgcacccttgggcgacttctgcgcggatagtcttcgcggtagacttcggttttttcgcacttgttgtgctagtccggctgcacccttag

SEQ ID NO: 34964 - DNA, 426 bp, Zea mays
  Peptide Sequence Number=SeqID_76743
atggcgctggcccctactccatgccgacatcccctgtccctcttctctctaacgcgagcacccctcctccctgctctctgttcggcgcaggagcccccacggtgccttgaaacggttggcgtcttccacttggccggaaatctcatcatccaagctcgctgcctgtcctcgctggtcgcgtgcaacgagcatccctcgccgacatcctccctcgcctcgccaaccgagctccttcttggccgagctctcctcatgcccatcgcgcctattcccatctggatcccgtgccctttctccagtgcagcagcactgctgcgagctaggagtcggcgccacgcttcgcgctttacccgttcgacgaaacaccaagccatgtggacagtccatgcggctaagtcccgactcgttcaggttgaatccatgtga

SEQ ID NO: 34965 - DNA, 453 bp, Zea mays
  Peptide Sequence Number=SeqID_76744
atgaggagagctcggccaagaaggagctcggctggcgaggcgagggaggatgtcggcgagggatgctcgttgcacgcgaccagcgaggacaggcagcgagtttggatgatgagatttccggccaagtggaagacgccaactgtttcaaggcaccgcgggggctcctgcgccgaacagagagcagggaggaggggtgctcgcggtagagagaagagggacaggggatgtcggcatggagcaggggccagcgccgtggctgccagcggccaagagcagagagaaaaaggaaaaagaaaatggagcagggaggggcgccgatctagaggagggcgccgacatgggctcatccctggagacgagggcaacccagggaacatctgtgcgcccaccatggctggggaaaggatcttagggaggcgctgccagggaggagacaacctgtaccagcgttga

SEQ ID NO: 34966 - DNA, 315 bp, Zea mays
  Peptide Sequence Number=SeqID_76745
atgaaggccaagtcacaccagcaaccaatcatcctaaggagtacctgcaaaaattgtgccacaagcaaggctgagtatactaatactcagctagacttacccggtcagcatggatcaagcagtctcattagctgcgagaagcagacgattcgaatcgagtttttaaaccttgcaaggattcagcatttagcaaggtcaaacagtgctaacacaacagttctgtccagatttggacagattcagacttgcaacttcaaaaattcacaactacagattcagacatccaaacaaggtgatcctagactttatggaaag

SEQ ID NO: 34967 - DNA, 387 bp, Zea mays
  Peptide Sequence Number=SeqID_76746
atgaaggccaagtcacaccagcaaccaatcatcctaaagagtacctgcaaaaattatgccacaagcaaggctgagtatactaatactcagctagacttacccggtcagtatggatcaagcagtctcattagctgcgagaagcagacgattcgaatcgagtttttaaaccttgcaagtgaccgcacttgtacccaccataaccagaatgggagaccacgtctcacgtcgcgtgaggggatatgtccactgccaggttcactcagacaacgcatccccatggatcgttgtccacagaccaccatcattatgatatcaaaatggatacaaccaattcctgacctcgcgcgagtgctagaaaaatcactcgacttctaccgagatccctaa

SEQ ID NO: 34968 - DNA, 1569 bp, Zea mays
  Peptide Sequence Number=SeqID_76747
atggcgccactgaacggttgccccctgccaaccacctcgaccaccggtcctcctcatctcctcccctcctccgcctccatatccgccttcatcgcctccgaccctgccctcacgctcctccacacgcgatgcgtctccatggcacacctgcgccagctccacgcggcgctcgtcaagtccggcctcgccaaggaccccatcgccgccagccgcgccgtcgcattctgcgcgggccccgggcgcgacgtcttatacgcggagcgcctcgtgaggcaccacccgaggcccaactccttcatgtggaacaccgtgatcagggcgctgtccgacggggcccgaccggacgccgccgtggcgctgttcgtcgacatgctcagttctcccacgccgcccgaccggcgctctttcccatctctcctcgcggcgtacgcgcgcctggggcgcgctggcgacggcgaggcgcttcacgggatggcgctgaagctcgggctcgccggggacgcgtacgtacgcaacgccacgatcgccatgtacgcgtcgtgcggccgcgcggacgaggcactggcactgttcgggcagtgcccggagctagacgtggttgcgtgcaacagcgtgatcgtggcgctcgcgagggccgggcgcgtcgacgaggcgcgctcagtgttcgacgccatgccggagcggaccgtcgcgacgtggagcgccatggtgagcgcgtacgcgcgcgccgcgaggtgcagcgaggccctggcgctcttctccgcgatgcaggcggacggcatggagccgaacgccaacgtgctcgtcagcgtgctgggctgctgcgccagcctcggcgcgctggtccagggcgcgtgggtgcacgagtacatagaccgccacggcgtcgccatgaatgcgctcgtcgtcaccgccttggtggacatgtactgcaagtacggctccgtagacgatgcccgccaggtgttcgatgccgcaaggtcgcaaggcttggccaagctatcgtcttggaactccatgatgcaggggttagcggtgcacgggcagtggcgagaagcggtcgccttgttctcggagctgaaatcctacgggctgagccccgacaacgtcaccttcatcgcggtcctgacggcctacggccactccggcatgcccgacgaggctcaggccgcgttcgcgtccatgtccagtgaacacggagtggagccggggatcgagcattacggctgcctcgtggatgccctcgcccgcgccgggcggctccgggaggccgaggacgcgatccgggcaatgccgatggcgccggacgcggccatctggggcgcgctgctctccgggtgccggctgcacggcgacgccgagctgggtgcgcgcgcggcgcgcgaggccgtgcggtgcgatccgcgcgacagcggcgcgtacgtgctcgcagccagcgtgctggcgcgtggtggagaccccggccgcggcgcgggcatcaggggccggatgagggaggccggcgtcggcaaggtccccggttctagcatgatcgaggttaacggcgtcgtgcacgagtttgtgagctag

SEQ ID NO: 34969 - DNA, 801 bp, Zea mays
  Peptide Sequence Number=SeqID_76748
atgaacgtatgtgagctcactcttgctgtctcacaccctcccacaggtcaagaacaggtaccgcaggatgaggcgcatagaggatgctgtgatgagttcgtgagtggtctaggccgtcgtcttccagtaaacttcgggttgctggaccgttgtctccttataatcacacctggtgattatgttcgcgcccgggtcttggtgccccgaaacccgggtgtgacaaatttggagggaaataatgtccagggacaggacgacatgcaaattgaggaaaacatcaacgtgggcctcatgttgcacttggaacataccaaccctgatcttgcttttgaagacttcatggccagaaagcgttcctcctcttgggctgatttgctccctggcaatgatggctcagtttctgttccaaaggtctggcctgctttcttcatgggccttttaatgaggccggactcttttgactgggccaggaaatttctgttgtcgggagctatctctgcattcgtcaagcccagcatggacaccatttcaatcaagattccctccaattgtcttcttccccccagtcaggacacccctgctgagccacagtcccctccccagtcaaaggcaactttcagaaaaaggcagcctatcctagttgacacgacagttaggagtgccaggcttagggcaaaggccaagggctttaaaattgcactgggattggtaaaaagaattgttcttgctgcgctcaaagcattcctcctacccttcaacttgacatcatcaagaaactgggagctgagttttgtaagatga

SEQ ID NO: 34970 - DNA, 693 bp, Zea mays
  Peptide Sequence Number=SeqID_76749
atgaacgtatgtgagctcactcttgctgtctcacaccctcccacaggtcaagaacaggtaccgcaggatgaggcgcatagaggatgctgtgatgagttcgtgagtggtctaggccgtcgtcttccagtaaacttcgggttgctggaccgttgtctccttataatcacacctggtgattatgttcgcgcccgggtcttggtgccccgaaacccgggtgtgacaaatttggagggaaataatgtccagggacaggacgacatgcaaattgaggaaaacatcaacgtgggcctcatgttgcacttggaacataccaaccctgatcttgcttttgaagacttcatggccagaaagcgttcctcctcttgggctgatttgctccctggcaatgatggctcagtttctgttccaaaggtctggcctgctttcttcatgggccttttaatgaggccggactcttttgactgggccaggaaatttctgttgtcgggagctatctctgcattcgtcaagcccagcatggacaccatttcaatcaagattccctccaattgtcttcttccccccagtcaggacacccctgctgagccacagtcccctccccagtcaaaggcaactttcagaaaaaggcagcctatcctagttgacacgacagttaggagtgccaggcttagggcaaaggccaaggggctttaa

SEQ ID NO: 34971 - DNA, 972 bp, Zea mays
  Peptide Sequence Number=SeqID_76750
atggaccctggtgaggccgtggagcttggagggtgtcgcaacaactccctggctactgacaatgctcgtggggtcgccctcgatggagtccgggacgtctgtgcagccactggacaggcacgccgtctgatggatgaccctgacgccgtctgccagtggagtggacatgacgcgttaaatgctgagagggcacatcgcccgtcagcgtggtggcagggcaaggcctggacacgtgccagcaccgggcccttactcatgtcggggtcctccccgtcccgggaccttgctaaggcccggaccttactcggagggtcctggggcccacccgagggacccgatctgcccatgtggtggggtcggatgtcgttctccgtgtggcctggagacgtagcacgtgtacagcgtctttactcaaaacaagttgaactgtccctgaggacaggttcaactgcttttgaacagggagatcacgccacgccgtcgggcaagaccagctcctctcgcctcccggcacttccgcttgccctcggtcaaggtcaaccaatcgccatggacgccgcgtcctcgtccgcggcgccgctgcgccttgtgatcttcccgtggctcgggttcggccacctgctcccgtacctggagctcgcggagcggctggcgctgcggggccaccgcgtgtccttcgtctccacgccgggcaacgtcgcccgcctcccgccgctgcgccccgccgccgcgccgcgcgtcgacatcgtggcgctcccgctcccgcgcgtcgacggcctccccgacggcgccgagtccaccaacagcgtcccccacgacaagttcgagctgctgttcaaggccttcgacggcctcgccgcgcccttcgcggagttcttgggcgggtgctgcgccgacgagggcaggaggcctgactgggtcgtcctcgactccttccactactgggccgccaccgccgccgtcgagcacaag

SEQ ID NO: 34972 - DNA, 1386 bp, Zea mays
  Peptide Sequence Number=SeqID_76751
atggacgccgcgtcctcgtccgcggcgccgctgcgccttgtgatcttcccgtggctcgggttcggccacctgctcccgtacctggagctcgcggagcggctggcgctgcggggccaccgcgtgtccttcgtctccacgccgggcaacgtcgcccgcctcccgccgctgcgccccgccgccgcgccgcgcgtcgacatcgtggcgctcccgctcccgcgcgtcgacggcctccccgacggcgccgagtccaccaacagcgtcccccacgacaagttcgagctgctgttcaaggccttcgacggcctcgccgcgcccttcgcggagttcttgggcgggtgctgcgccgacgagggcaggaggcctgactgggtcgtcctcgactccttccactactgggccgccaccgccgccgtcgagcacaaggtgccatgcgcgatgctgctcccgagcgccgcgtgcctggccgtgggcagggaacggcagtcctcgagcggcaagccggccgctgcaccccgttacgagtcggagcagaacaaacagtattccgccaaggatggcgcatccggtgtgtccatcgccgagcgctacttcttgacacgcgagaggtgcacgatcatggccatacgaagcagccacgagtgggaaccggagttcctgccgctggtggcgccgctcgtcggcaagccggttctgcccctcggcctgcttccgccgtcacccgacggagggcgtggcgccagcgccaacgcgaacggggagcacgccaccgtacggtggctggacgcgcaaccgccgagctcggtgctgtacgtggcgctggggagcgaggtgccgctgcgcgcggagcaggtgcacgagctggcgctggggctggagctcgccgggacgggcttcctctgggctttgcggaaccctagcggcgtccccgacgcggacgtccttccggccgggttccaagaacgcacccgcggccgtgggctggtgaccacggggtgggttcctcagcccagcgtactggcgcacgccgccgtgggcgggttcttgacgcactgcggacggaactcgctcatcgaagggctcctgtacggccgccctctcgtcatgctgcccatcttcggggaccagggcccgaacgcgcgcctcatggagggaaagaaggtggggttgcaggtgcccagggatgagcacgacggctctttcgaccgccatggcgtggccggcgcggcccgggccgtcatgctagaggaggaaaccaggggtgtctttgtcgcaaatgctctcaaggtgcaagcgattgtagctgataaggaacttcaagacaggtacgtggatgaatttatacagcaactactaataagagggaggccatgccctgcctccagctga

SEQ ID NO: 34973 - DNA, 2913 bp, Zea mays
  Peptide Sequence Number=SeqID_76752
atggccgagggggttgcatggaaggccaaggaggagagggtccagggggcgcaaaatttggagacaacacatgaggaggtgcggtgcatgaccagggacatggagatggaacctgaggaactgagttgggtggatcctcgatctggagaacagaaattggagacagagcttacctctcgcgtgcgtgcgtattcattgcaggaggcggcgtccatcacagcgtctgacgagctcatgtcccggcgatcacgccggtggctaggagccaaccctgctccagttgagattagatatggagaacaagggcgtcggtgtggtcttaatgctcaatgtgatggaggtatgacccttccggtgttcgatgaaaggccacttgagaatgtgatttgggatgatgaacaacaacagttagatagagagatggatgatctgttggagtataatcaggtggcgtgggatgaagagttggtacatggggttgagtcacatgatagtagatggcagttagtagatcatgcggaatgtcagattgccatggatgagcatttgcttcctatgttgggctcttataaggccgcaatagtgacaaaggatgatgaagagaagtacaagcaagtagctgagttagcttccaaactagtagttgaagaagctgcgtatcgtgatgtccaggagagaaaagttgagctgcatgatgcgctgattaaaatggtacaaggtggaagtgttgatggtctgcttcaggttcgagctgatcgaatccaatatcacttagaagagatggagaaagctattggtgaacggtgcaaacactttggatttaaattcaaatcatctacatcagttgagcttccttctggttgggaacctgggccacaagagggaatcattgagtgggatgaagactgggataaatttggaaatgaagggtttagtattgttaaagataatggttgccgcctcctagacggctcgggtgattgtctccgtcgagctctccaagaagattgtggagaagccgcggtgtggattgtgaggggtttgcgcctacctcgccggagcggcaaaggtgacattagtggaatcgagatcctacatatgtctcctgttgcatcctctaatggtcatatcaaggaagaagggtgttatcgtggaggtgatcaagtgactgagagtgaaatagcatatggttttggtgatgaatttgtaaggaatcctggcagtgctggaagaagtgcctcagggagtccatttaaatcttcccgctttggggtgcacgattcatctctcagcaaaagcgaaagctacaatgactatggtggtcctgaatttgtttttggtgacaagtttgttgatgaaacttcctggaactttgatgaccacgatattgactatgtttggggttctactgcactgaacactaaggttaatgatcaggcagaggaggctactgatagtgacactgtgcccacggattgcaccactgagaagcattattattctaagaagggtctggcgaggtcaaatgacagtggtgactctgagacctgcgcagttggcgagaatgcagagccgcttgccgttgcatctcagccagtaaacaaggtgaataccatacaagttaatatatgtgagcagactggtgcttctgccatttgtcatgagaaaatgttctctagatcaacaaggcaactggaagggaattatgagcatggtgtaaagggagggaggctgatggagtgtgacgagcacattgaaaacaatttccggatgacatcattagccgggcatagtctaagatcgatagaacaggagtgcaaggctatgacaatatttgtcaaaacaatgggtgacaaaccaagcagcctacagctcgttgattcctttggcgaaatcttaaaaagcaagcgtaacagttcattccacctcctccaggtggcaacagacaaggggtaccatgtgaaagagacgaacaggcacggctatgatgggtggtggtggactgaatcatcatcctatcctgccacgttgaatcctgagatatgtgataggtactcgcccccctacaaggttgttaatggggaggagcttctcaggatgttgagtggcaaggaagagcacacgactatccttttccatgcattatggtgccctttctcgcaaagaattaaattagtctttgatgatatgagctcactgtttccacgggttaagcatttggccgtcgaagagtccaacatcatgaaagccattttgtcacgatatcatgtctgtgcactaccttccgaaataatagctggcaactcacacgtattctggcctcttggttcgatagatcatcgcctcgctggtcacttctctccgcaaaattttgttcaacaaggatttgatctgaaccttgctgtctgcaatcaagagaagcagcgacatgaagaagagtttggtggagtcttcacaatggagaagctgaggttaaccttcccatgggacccaggcggtcacagttcaaggaacgcctcggcggcagctgtggtgggcgccaccacggtctggttcgttttcgagcgcgcggggtacagcttcccctccgtcctctccaacgccctgctcctcctcgtcgccatcctcttcttctgggccaagtctgcgtcgctgctcaacaggcctcttccacctcttcctaatcttgaggtctcagatgcgattgttgaaaaagctgcaaatcatgctcttgtatggatcaataggctgctggctgttggtcatgacatcgccatcaagagagataggaaagtttttataaaggaccaggttgatgagaaggttggtgtagcgtacagtgtactatcaaggcacatagataccatcattaccagggctgggcaatcagccaagcagaagaagactgagtaa

SEQ ID NO: 34974 - DNA, 822 bp, Zea mays
  Peptide Sequence Number=SeqID_76753
atggccgatggggaggacaccggccacgcgagacctcaacaccccatgaagcagtcacgcttcaacttcaccaaggctgttgttgaaaaagctgcatattatgctcttgtatggatcaataggctgttggctgtcggtcatgacatcgccatcaagacagataggaaagttatattgtttcctaactatatatgctcttacctattcctgttctccatagtacaaaagatgatattgattttgtggctggtttcatttgttggaatgctcttcaactttcttacgctcgtttacattgatctggagactggagcagtttttgttgggataaactttgtactggaccggagcatcttatctctggatcttttctctgcggtaaattgctggcttaaatgcatgctgcttgaaccctataatcagacagaccatcccgaatgcaaatcaaggcctgatagtggtctttctgcaattacagagctggaccttggttatataacaggtacagttatctgtatctcactcacactactgcttctttcaaaagagaaagggaagggaaaacaccttgcactgatattattttattgggcaaggtttcaggtcctctctcttcagtatggaaagaatgggtcaaatggatcagtaagagttaatggcccagtgacggattcaaggtatcctgctcaccaacagatcccacaagcatacggttaccgccaaatgcctgcaaggttggacagtaccaacccatcgcaggccatgggaggttacacgctgcagtcacagaaggaaacattatttgaagagttgccattttga

SEQ ID NO: 34975 - DNA, 267 bp, Zea mays
  Peptide Sequence Number=SeqID_76754
atggcggcgcacggatctgcgatggcgtatagcccctggccagaaactttcttcgcgcccgagtactatattcgaagactcagcgccgtctggtggatcctccgagcaacttcacggcgacaacaatcatctgattcccggttagaatctcttgctaggttaaaatcgaggggttatgcaactatcggatggttaagatgtaattgtggacattactccacaactcatcacactcaatcaaagatccaaatcagacatgtatcataa

SEQ ID NO: 34976 - DNA, 426 bp, Zea mays
  Peptide Sequence Number=SeqID_76755
atgccgccatgctccgatgagcaatttggagtagtgccccggatgcatcgggctcaccgatgccacgccaagcttcagagggcatccacgaatattctcgtgcaccaccacggccctaccgatgacctggctcaattcaagccaccgacggatcccactattgctctcatggcttgcaccggcgtagcaggtaggttagaatctcttgctaggttaaaatcgaggggttatgcaactatcgaatggttaaggtctcctattcctaaagtcactttaggcacaggatttcaaagtgtgaaatccacatttgtctttagaaggaaaaggtttcgtcctacagtcaacattcctctgataccacttctgtcacacccgggtttcggggtaccaagacccgggcgcgaacataatcaccaggtaaggtaa

SEQ ID NO: 34977 - DNA, 408 bp, Zea mays
  Peptide Sequence Number=SeqID_76756
atgatcaataacatcgaatcaggaaggaactacggatacaggagacgcatagaaatagatacatcctggatgactggacgaacagacaggcatacctaccgtactgctgcttccaggcgaggaagtggggcatcaccctggggagccgctgaggaagctgtaaggcggcccgcggaccccctgcgccctgaacatgccgcccacggcgcggggcttggccgatttgtggactgcgggcgcgtccgaggcgtggctggcgcggactgcgggagctggcgcgacctttcatcaacggcgaggaatgcgcggcgcgaccttccattgacggcggggaggaattgcgggaatgtggactgcgggcgaggcgttgatggcgcggactgcgggagcggcgcgaccttccgttga

SEQ ID NO: 34978 - DNA, 1633 bp, Zea mays
  Peptide Sequence Number=SeqID_76757
ctccgcggcaatggacgtcagcggccgtgttctgagagacgacagttccaccgatgatggaggccatgatgggggcttcacatcgactgtcatcaatgagggcgccttaaggaccgcccacctcgccggctacctcgtcgatgtgaaggcgtgcacaggttctgtgttctgcctccccgcgatcggctgccgtcgcgccagccgcgccagctccgcaaatctgccgcgccgctcccgcaaatccccccgcaggtccagctcggcccgcattccccgacaccgcggatggaaggtccacctcctcctcgccgctcccgcaaatcagccgcgcaagtccagctgggcccttccatcaacgcctcgcccgcagtctgcagacccacaattcctccccgccgtcaacggaaggtcgcgccgctcccgcagtccgcgccatcaacgcctcgcccgcagtccacattcccgcaattcctccccgccgtcaatggaaggtcgcgccgcgcattcctcgccgttgatggaaggtcgcgccagctcccgcagtccgcgccagccacgcctcggacgcgcccgcagtccgcaaatcggccacgccccgcgccgtgggcggcatgttcagggcgcaggggtccgcgggccgccttacagcttcctcagcggctgcaaccgcgagatgaggaagatgaaggcggaggccgacgacgggctccggctggacgtccgcgaccacaattacctccccaggttgatgccccacttcctcgcctggaagcagaagtacggggagccattcctgtactggatgggtccgcggccccgggtctgcctcttcgactacgagtcggtaaggcaggttcttttcaacaagttcggccatttcttcaaggacgacgcccacccgactatcctggcaatgctcgacaaagggctggtcctggtggaaggcaccgactgggtgcgccatcggagggtggtcaacccagccttcgccatggacaagctcaagacgatggtcagctgtgctgagccactgatcaagcggtgggaacagctcacagccagcagatccagcgaggacggtgggaggggagaagtgcaagtggagttcagcaagcagttccaggacctgacggcagacgttatctcccacaccggtttcggaagcagctacaaggagggcaaagaggtgtttcatacgcagaagcagctcctggcgctcgccatagcgactctcctcaacgtgcagctgccaggattcaagcaagtcgatctatttcttttcttgcctcttcttggtcaccactcaccaatatattgttgcccaaggactactgcagaattggaggcacatgtagctgatacatctcttgtgtctgctgatgcaccttgtgtgcttgctgatactgtactggatatatctgggttagctcttagcaaaacccttccaaagcttcctgatcttgttgagctttatctcagtgatctcaatcttgaaaacaagggtactatagcaattgccaaagccctcgaacagtcatcaccgcagttggaggtccttgaaattgctggaaatgaaataaatgccaaagcagccccagatttggccaagtgcctagcggaaatgcagtgttaa

SEQ ID NO: 34979 - DNA, 756 bp, Zea mays
  Peptide Sequence Number=SeqID_76758
atggggagcgcccacgttgctttcgtcttgctgctgttggaggagcgcaacttcgcggaggacggtgaccaccagttcgatggtggggagaagcaagcgggctacggcctctgccccgccctcagcttcaaggatcttcatcatccttgctggggcggggggcgagctgagccggagctctacctcctgtacgggccggcgggccatctcttccttcagcattcaggggagaaggcgctcaccggcctagcggaggaggcggacttcgacaacgcggggtcgatcggccgcaagcgtcgtcagctccagcacgcctggttcactggcttccggtgccacctcccaccgctgagcggagtgtggctatctgcccgtcgtacgggcggctgttgcgccgcgcgcaccgggggaccgcccaagacgtcgcgcgctgttagggcggcgttcgtgttcttgggctgtcctgccctcgatccggcacgacgcctctgcgcggaggtcgctggagaaagcttccccgccgacgagaccgtcagcgccacccacggaccgacctccggctctttgactttgatagcttgtcctcgcccctcgagtggggacatgggcgagggccttgtcgcagcagcgtctgccctgaggccccccgatgtgggggttgttcatacccgcgggagtggaaccggagttccatttgtaatggcaccttgggtgccggtgtctgttcattgtggctgtcggggcctgaacatctag

SEQ ID NO: 34980 - DNA, 1086 bp, Zea mays
  Peptide Sequence Number=SeqID_76759
atggggagcgcccacgttgctttcgtcttgctgctgttggaggagcgcaacttcgcggaggacggtgaccaccagttcgatggtggggagaagcaagcgggctacggcctctgccccgccctcagcttcaaggatcttcatcatccttgctggggcggggggcgagctgagccggagctctacctcctgtacgggccggcgggccatctcttccttcagcattcaggggagaaggcgctcaccggcctagcggaggaggcggacttcgacaacgcggggtcgatcggccgcaagcgtcgtcagctccagcacgcctggttcactggcttccggtgccacctcccaccgctgagcggagtgtggctatctgcccgtcgtacgggcggctgttgcgccgcgcgcaccgggggaccgcccaagacgtcgcgcgctgttagggcggcgttcgtgttcttgggctgtcctgccctcgatccggcacgacgcctctgcgcggaggtcgctggagaaagcttccccgccgacgagaccgtcagcgccacccacggaccgacctccggctctttgactttgatagcttgtcctcgcccctcgagtggggacatgggcgagggccttgtcgcagcagcgtctgccctgaggtcatcgctgctgctgtttagccgcccgaagcggacgtcgttgtcgctgctgcagtggtcggcggcgagccacccggagttcgtcgtcccgcaggccccccgatgtgggggttgttcatacccgcgggagtggaaccggagttccatttgtaatggcaccttgggtgccgaaaccctcggccgctctgcgatgagccggagccggaggcagcggtgtcagcgtggacagaggcggagtcggcttgagaagaagcttcgtcggcccaggagcaggggactttccaggccgaggaggtgtagcagcggcggctgggacctggccaggcacggtactgacatcttccttcgaggtggagatcctccgaccgtgtcgccgtccgaggccgggccagattccgccgaaggtggagacgatgccgagggtgctgctgctccccctattgat

SEQ ID NO: 34981 - DNA, 768 bp, Zea mays
  Peptide Sequence Number=SeqID_76760
atgtactttatctgttacgatctcttgtacaaggactacaactttgaccaaaagttttctttgtcgacatgttctaactctggtttgaatctcacagccactggtgtgaagatcaatgaagacttcattggtgatatacggacacagcataaaagcggcagaaccactgttgatgtcataatcgatagtgattctaaagtgtcaaccacagtcactgttgatgaagcactaactggtttgaagacttcatttgccttcaaggttccagatcacaagtctgggaagcttgatctgcaatatgcccacaatcgtttttcaatgaattcgaccattggtttgacatcaacacctttggttgagctcgctgcaactgtcggcacaagtgaacttgccattggtgctgagttcgggtttgatagtacttcagctgctgttaccaaatacaactcaggggttggatacaacaagtctgatttctctgtttccttgctactggctgataaaggggagactttgaaggcatcttacgttcatttattcaatccgaccaacggggctacagttgcagctgaggtaacacacaagctgaaaaccaaggagaactatttcacacttgggagctcccatgcacttgatccttcaacattgctaaagacgagattcagcaactcggggaaggctgcatcagagaatgacaattgtgcaagtgcagactcaaggggatttacactgattggcagttccaatgagtccaaggcaaagatttag

SEQ ID NO: 34982 - DNA, 1251 bp, Zea mays
  Peptide Sequence Number=SeqID_76761
atggagaggcacgttgaaggggaggggaaaggggtgcaagccctggctagggttcaacatgtgagcgaggagcgcctggtagtggtactgctggtgcgagtctacgttgtcgtcaccatcggtgacgaggaagcgttggttgaatcgggggaggggctcttgtcaagggggggggcacatcgggcggttgcgagcggcgcgagcggagatgacgatgcatgcagtacacactcacactacttgcagagagaagtcggcccaagtagcgtgcgcgcagaagctactcccgaagagtcgctctcctgcgtccacgcctcgcttgcggcgactagggcgactgccgccgccgcccttcgcccagctgcccaggtcttcgtcgggcgctttaccggtgaagagcgcccaccataccagaatggatgccatttcatatttattggaataattgtgatgtactttatctgttacgatctcttgtacaaggactacaactttgaccaaaagttttctttgtcgacatgttctaactctggtttgaatctcacagccactggtgtgaagatcaatgaagacttcattggtgatatacggacacagcataaaagcggcagaaccactgttgatgtcataatcgatagtgattctaaagtgtcaaccacagtcactgttgatgaagcactaactggtttgaagacttcatttgccttcaaggttccagatcacaagtctgggaagcttgatctgcaatatgcccacaatcgtttttcaatgaattcgaccattggtttgacatcaacacctttggttgagctcgctgcaactgtcggcacaagtgaacttgccattggtgctgagttcgggtttgatagtacttcagctgctgttaccaaatacaactcaggggttggatacaacaagtctgatttctctgcttccttgctacttgctgataaaggggagactttgaaggcatcttacgttcatttattcaatccgaccaacggggctacagttgcagctgaggtaacacacaagctgaaaaccaaggagaactatttcacacttgggagctcccatgcacttgatccttcaacattgctaaagacgagattcagcaactcggggaaggtcggtctgctctgtcagcatgagtggaggccaaagtccctcgtgactctttcagctgagtatgatccaaaggtggtaagtgcgccttcaaggatcggcgtggccatatcgctcaagccttga

SEQ ID NO: 34983 - DNA, 498 bp, Zea mays
  Peptide Sequence Number=SeqID_76762
atgagctgggctgatgtccttggggggcagctggctgaggctttgggccgaccaagccgtttgctcgggccggattcctggaggagaccctggcggcgatggcccgggtgcggtgctgatgtcgttcttcggagcagagaacctccgaccgcgttgacgtccgaggcacggtcggacttcgccgaaggtgtagttgacgccgagggtgctgctgctccccctccgtcaaggtctgagcctgcaggatcggtttatcttgtagtgcgcgattctgctaacgatgtagtcgagaaggcccgaaaaatcattttggcagaaaggtttccgagcattaagacttgttcggtcagcggaatcgcttatccgagcgtgagttacttatcgcagaaggtgacgagtgaggtatccgtatcccggaggcataggagtccctcggctcggtcggccttggctgcttacgtgtactctgtcgttttcaggatcccactttcgaagtag

SEQ ID NO: 34984 - DNA, 1382 bp, Zea mays
  Peptide Sequence Number=SeqID_76763
ggtggggagaagcaagccgggctgcggcctctgccccgccctcagcttcaaggatcttcatcatccttgatggggcggagagcgagccacgccggggaaggcggattgctgctgcccagctagggtgcagcatttcgtcctccgtccgggcgatggtcgcgccgcatacgggccagccacgtccaggtcttcctcgcgccgacagccgcgccagagggtcgtccagcacgtcgtgcgccgcgagggcggcgcttatgttctggggtggctccggcgagggcaggagcgaggacctgctgatgcgctttggggcgcctggcgcccgctggtgcggtgttgaggtggtggcagccggagaaggcttctctgccgacgagattgccaactccgcctgcacccccggacctccgtcccctgacttgaatggcgggttcttgtccttcgtgggtgagagcccttctgctgcagcatccgcccagaagccgttgctgcagctgtttcgccacccagggcggaggtcgttgtcgctgctgccggagcgggcggcggtgagccacctggagccttatcgccccgcgggtcccccaatgtggggggttgttcgtacccgcgggggcggaaccggagttccgtttgtaatggcacctcgagtgccggtgtttgttcattgtggttgtcgtggcctgaacatgaaccctcggccgctcttcgatgagccggagctggaggcagcggtatcagcgtggacagaggcagagttggctcgaaaagaagacttcgtcggccggagcctgaccgggccgtccactggcgggaccggcgccggagtcgagttgccgaggccatgggctgggcttatgtcctcgggggacagctggctgaggcttcggggcgaccggccgagccgtctgctcgagccggactcctggaggagaccctggcggcgatggcccgggcgtggtgctgacgtcgtccttcagagcggagatcctctaactatgttgtcgttcgaggctcagtcgggcttcgccgaaggtggtgttgacgccgagggtgctgctgctccccctccatcgaggtctgaacctacaggatcggtttatcttgtagtaattgtttgtccgagcgagagttacttttcacagaaggtgatgagtgaggattctgctaacgatgtagtcgagaaggcccgaaaaatcgtttcggcagaaaggtctccgagcattaagacttgttcggtcagcggaatcgcttatccgagcgtgagttacttatcgcagaaggatcccacttttgaagtagtcaaaaagcacgaaagacgttctcgcagaaagacctttttcgaggaaaattttgacgcagagggggttccccccttctag

SEQ ID NO: 34985 - DNA, 978 bp, Zea mays
  Peptide Sequence Number=SeqID_76764
atgggcggccatactgcagctgtgtcttcatttggtgagaaggggaagttcctcatttcaggtggcaatgatgcatcagtgaagctgtgggattggtcgaaaggattttactctgaaacaaacagcaaagttgatttggttttggatattgatgtaaagaaaaagcagtcagtaatgcatcttgacgcggtcactgaacttgcagatgtgcacctcttctgttccctgcggcaaggctttccacgctcatcttggtcggccgtcatcagatcagaagccagcggcaacgcggtggcgtcgccaggcacggtcatcaagcgtagcaaggaggagctcatcaccttcttcagagacatacagacatccattgccgagtgctcgcgtaaagcttccaagaggacgaggaagcagccgcctgatctgttccaagaggcgtcggagaagaagcagtcgaacccgatgcgggagatgaaggtccagaagctcgtgctcaacatctccgtcggcgagagcggtgatcgcctcacccgcgccgccaaggtactggagcagctgagtggtcagtcaccggtattctccaaggcaaggtacactgtgaggtcgtttgggatccggcgcaatgagaagatcgcatgctatgtgacggtgcggggtgagaaggcaatgcagctgctggagagtggcttgaaggtgaaggagtacgagctgctgaggaggaacttcagtgacactggctgctttggatttggcatccaagagcacattgatcttggcatcaagtatgatccatctactggtatctacggcatggacttctacgtcgtccttgagcgtgctgggtaccgtgtcgcccgtcgccgcaggtgcaagtcccgtgttgggatccagcatagggtcactaaggaagacgccatgaagtggttccaggtcaagtacgagggtgtgatcctcaacaaggcccaagccaacacctcctaa

SEQ ID NO: 34986 - DNA, 1280 bp, Zea mays
  Peptide Sequence Number=SeqID_76765
caattactgggggccttgactcaaagctcgctgcatgggatttctccaaaggacgaacactgttttctattgattatgtagcagtttctgaagagggtattttgggagggctctacaaggtttgtgctgttgcaaggggggatggtgctgttgatgtggttgatcttgagtatgaactggcccctgcgaaatcgaagggacctcctcgggcagctattttgacaacgagatcaaaaggcgctgaacttggagatgggagctgcaatcaaagtcgagcgaaaagaatccatcttgactacaccatgggcggccatactgcagctgtgtcttcatttggtgagaaggggaagttcctcatttcaggtggcaatgatgcatcagtgaagctgtgggattggtcgaaaggattttactctgaaacaaacagcaaagttgatttggttttggatattgatgtaaagaaaaagcagtcagtaatgcatcttgacgcggtcactgaacttgcagatgtgcacctcttctgttccctgcggcaaggctttccacgctcatcttggtcggccgtcatcagatcagaagccagcggcaacgcggtggcgtcgccaggcacggtcatcaagcgtagcaaggaggagctcatcaccttcttcagagacatacagacatccattgccgagtgctcgcgtaaagcttccaagaggacgaggaagcagccgcctgatctgttccaagaggcgtcggagaagaagcagtcgaacccgatgcgggagatgaaggtccagaagctcgtgctcaacatctccgtcggcgagagcggtgatcgcctcacccgcgccgccaaggtactggagcagctgagtggtcagtcaccggtattctccaaggcaaggtacactgtgaggtcgtttgggatccggcgcaatgagaagatcgcatgctatgtgacggtgcggggtgagaaggcaatgcagctgctggagagtggcttgaaggtgaaggagtacgagctgctgaggaggaacttcagtgacactggctgctttggatttggcatccaagagcacattgatcttggcatcaagtatgatccatctactggtatctacggcatggacttctacgtcgtccttgagcgtgctgggtaccgtgtcgcccgtcgccgcaggtgcaagtcccgtgttgggatccagcatagggtcactaaggaagacgccatgaagtggttccaggtcaagtacgagggtgtgatcctcaacaaggcccaagccaacacctcctaa

SEQ ID NO: 34987 - DNA, 1878 bp, Zea mays
  Peptide Sequence Number=SeqID_76766
atggtcggcagtggggcgggagctaccaggcgagctcgggcgctcggcgccaagatctgtggcgccgagctaggtgccacgcgtgacagccacgtcacgaagctcggcgccacaggctgtggcgccgagctgtgttacctcggcgccacaacctgtggcgccgagctaagggccaggcgtggtctggtcaccgactcaccgtcggcaaatgttcgtcaagaactcaacgaacagaccagaggggttcggaataaaagagcacaggacgaaggcataaacaggcatggatctaccgcttcggctctggctcatgcaaaagttgtgtcaaacacctctttttcaaatggcttcaccagtgaagtgcttttccaaaatgaactagaggagagagagcaccaaaccgcaccgaaaagccaacacccccggcccgcgcgccggcgtcctcctatgctcgccgtcgccggcgacgggaagggccgccgacgctcagtcctgccgaaggaacgcccatccggccgtcttatccgcctcctcgccgcgctccgcccctcccgcgccgggcccctccccgtccagaccggctttcccacctctctcgccgacctcgtcgtcaagaaccatggtcgcctcaagaagcatccctccccgtcctccaagcgcggcgccgccgcttcgccttcgccttcgcctttgccttccccatccacccccacctcgccatcgctgttcccgccggctgagtctccgcctccaccgacgaccgccgacgcagtctcaccgtcggatcggcccaggcccgaccttccgccggcccagcccccacgccgcggcaaaggcagtggctttggcccgggcctgggcctgggcctgggcttcctggcggtcagcggcgtggtggcgtccctcgcactcctcgtgatctggagcaaggtggttgcggccgttaccgtggcctccttctcactctacctgctcgagtccgtgaggtcgtcctcgctccccaggcggcggccccgggcggtggtgaccgagaggcggcttgccctggacggccgcgggcgcgtctcgccgatccgggaggttgacgcggcgaccgagccgtcgcggccgagctgctgctcggattccgacagggaaagcgacggccgcatgctgctcgtcgaagaaagcggcggcgtcctggacgaatcaagcaacctgaggccgaaggcgaagaagaagtcctggaagaagctgctcgccagctccaagaagctgcacagaggacggaggagtaaggaggcgggttcgtcaggctgcgacggcgacggcgacggcagccgagagggtgatgacacggcgcgcggcggcggcaatgcaaaggcggccgattcgtcgggctcccgccgtggcgcgcccagcgaaatcggtgccgccgcggacgaagccgctgcgaaagaggcggattcttcgaggggttctcgcggcagccaatgcgtagaagtagatgctgggcacgtggaaatcgatgcgtcggtggacgacctaatcgaggaggaggaggaggagcaggcagggatccggtctcctgctctagttctggtcgccatcgtcctcgtcggcctggtcgccgggaaggtggtggccctggcggtgacggtgctctgctccgcgttccttagctcggttcagagatcgccttgcgcttgcggacagacagacatggcattatgggggtcttttcgcatggctaaaatgatggaaccaaatgtgccgcgtcactgtggcagtttcgtcgccctgatgacagaaataatgcgcatcgcgatgcggccctggtgggggaacctgaaatgcatcctgtcctgtcccgtggtgggcgtgggctccggaagatga

SEQ ID NO: 34988 - DNA, 309 bp, Zea mays
  Peptide Sequence Number=SeqID_76767
atgccggagcgcggcgattccgggcgggcgggcggcgactccggagcgtgggcgcggcggccggcggtgtcgagcaagagctcggagcagggcggctggccggagctgggcggcgggcgggcggcggcggcgatttccggagcgtgggaacggcggcgcgcgctcggcgccaagatctgtggcgccgagctaggtgccacggaggacagccacgtcacgaagctcggcgccacaggctgtggcgccgagctgtgttacctcggcgccacagtctatggcgccgagctaagggtccaaaactgcatttaa

SEQ ID NO: 34989 - DNA, 259 bp, Zea mays
  Peptide Sequence Number=SeqID_76768
cgggcggtggtcggcggagctcgggcggagcgcggcggggcggccggcggagctcgcggcggcggccagcggagctcggggcggccggcgtgaagagctcaagggcggagctcgcggcggcgccggagctggggcaagcggcagcggcctcggcgccaagatctgtggcgccgagctaggtgccacgcaggacagccacgtcacgaagctcggcgccacagcctgtggcgccgagctaagggtccaaaactgcatttaa

SEQ ID NO: 34990 - DNA, 411 bp, Zea mays
  Peptide Sequence Number=SeqID_76769
atgcccgagggactcaagaacgccggctcgaatttttcccacctcaccaagaaggtcctcaaaaaccaagtaggccgcaacgtcttcacttatgtggacgacgtcatcgttgcaagaacgtttcacccgtctgacagacagtatgttcatcggagatgcgaaaatgcggaagtctctgacgctttgcaaatcggtcctccatcttctaattctttacaggggaaggtccccgacgacggcagcgtgttgaggagctccggcgagtcactgtaccggccgattgaggcgatgaccgacgctcccgagcgacagacaccaaattggatctaccctaagcctttcccccaactcaattgcattcaaggtcaactatggagctctggccacggtggccgagaacatggcgggtag

SEQ ID NO: 34991 - DNA, 210 bp, Zea mays
  Peptide Sequence Number=SeqID_76770
atgaaaggatccacttttagtaatcatttctgcaaaacagagtctttgattattgagaagccttaccttgactcccttaaccagcatacccttgagagtcttttctttagtcgagtgaggaagcgacaaatttttgttgcttctgttctaaggtggtaccaaaggaagaacgccaggaatgaagtgcgggaggaaaggatcctccattag

SEQ ID NO: 34992 - DNA, 210 bp, Zea mays
  Peptide Sequence Number=SeqID_76771
atgaaaggatccacttatagtaagcatttctgcaaaacagagtctttgattattgagaagccttcccttgactcccttaaccagcatacccttgagagtcttttctttagtcgggtgaggaagcgacaaatttttgttgcttctattctaaggtggtaccaaaggaagaacgccaggaatgaagtgcgggaggaaaggatcctccattag

SEQ ID NO: 34993 - DNA, 210 bp, Zea mays
  Peptide Sequence Number=SeqID_76772
atgaaaggatccacttttagtaagcatttctgcaaaacagagtctttgattattgagaagccttaccttgactcccttaaccagcatacccttgagagtcttttctttagtcgggtgaggaagcggcaaatttttgttgcttctgttctaaggtggtaccaaaggaagaacgccaggaatgaagtgcgggaggaaaggatcctccattag

SEQ ID NO: 34994 - DNA, 726 bp, Zea mays
  Peptide Sequence Number=SeqID_76773
atgtggagacttggagacggccgctatcggggcgaggggtcgggctcccgcgggggtgaaaaatccgggcgcgctgtactcccgtcgctggtgacttcgatccatctcggcgagggggcctcgcggcgctgctcgtcggcggagccggccaagctgggctccaagaggtcgtgctcgagcgggtctggcggcggaccgctctcggtggttggaggcaaggaggtggcccgcgacgagacaaagatcgaaggctcgggtgcaaccgtcggtgttcgtcgccgtcgaaccgccatcgcgaagaagctgagaagatccacggcaccgacgaaggaaggtgcggagaaacgcaagcgcatctcgtcgtcgccatcgtcatcgtcttccagtaggtcgggtgctccagatccgaagaggaaaagagtagtggaggagcgttgtgccgacatcgtcgatgtcgtccacggtgccttccaaccagttagcggaccagtcctcaatgaaatgaatcgtgcattagttcagatcgaggacctcgtcaacgaccttgatcagcttgcactggaaacagactgggagatggagcacatggccccttcaccaattgctgaatcatcacaaacagaggatgagcttctgattgattatgattcagagttgaacaatgacgataccgtcggctacgacgacggccgtgactactccaccgacgacacctatccctactag

SEQ ID NO: 34995 - DNA, 390 bp, Zea mays
  Peptide Sequence Number=SeqID_76774
atgtggagacttggagacggccgctatcggggcgaggggtcgggctcccgcgggggtgaaaaatccgggcgcgctgtactcccgtcgctggtgacttcgatccatctcggcgagggggcctcgcggcgctgctcgtcggcggagccggccaagctgggctccaagaggtcgtgctcgagcgggtctggcggcggaccgctctcggtggttggaggcaagggaggtggcccgcgacgagacaaagatcgaaggctcgggtgcaaccgtcggtgttcgtcgccgtcgaaccgccatcgcgaagaagctgagaagatccacggcaccgacgaaggaaggtgcggagaaacgcaagcgcatctcgtcgtcgccatcgtcatcgtcttccagtag

SEQ ID NO: 34996 - DNA, 870 bp, Zea mays
  Peptide Sequence Number=SeqID_76775
atgccctctattcgcgggacgttcctccgcatcgccagcttcgccttcgtcttcgctagcgacatcgtggaaatcctccgcctccttttcgctagtaccaggagcggggcactacctccgccatggccatgggcgatatcgtcgggctcgctctccatcgcggcctcgaagctctccgctgcggccatggacgacctcgttagaccagcactccatcgcaattcgcaactcgaagctctccaccgcggtcatgggcgacctcgccgggctcaaagctttccatcgcagcctccaagctctccaccgtggccatggacgacctcatcagaccagcactccatcacaactcgaagctctccaccgcggccatgggcgacctcgtcgagctcgaagctttccgtcatggcctccaagctctccgtcggtaccgtgcacatgattgatggagaggcctccttgctgaaggtgagagagcttcaccaccgaggacgacactcgctgggacatagcgttgagaggagcacagctggcagcgcggtgaggatcctgctgacgtctccttgctgtcgtaaggggctgagagccatcggcgtcatggcgcacgcggggcaccatcattacccgtcgccgggggtcgggcgaggacgcgatttctcccgagaccggggtcgaggccgagtttgggggtcgggcgaggcggagacctcctcccgaggctggagcctgaggttgggcgaggcggaggcctcctctcgaggccggagcatgaggtcaggcgaggcggagcttcctgttgcgcccaaggctgaactcggtgacagtaaagaagaggggcaaagtgactgcggtcacttcggcctggccgactga

SEQ ID NO: 34997 - DNA, 129 bp, Zea mays
  Peptide Sequence Number=SeqID_76776
atggctggcagcgcggcgaggatcctgctgacgtctccttgctgtcgtaaggggctgagagccaccagcgtcatggcgcacgcggggcaccatcattacccgtcgccgggtcgttgccggggtggctga

SEQ ID NO: 34998 - DNA, 1470 bp, Zea mays
  Peptide Sequence Number=SeqID_76777
atgtcgtcggtccgcgtgcaagatatgcaacagttggggtattttggcggcggggttgggcgtgtcccgagggcagaggaggttcccgagcccgagggcgaattggttgtttttgaggcatttttcatcgccggccttcgtctgcctgcgcatcgttttgtgtcggaggttctgcagaagttcgaagtccagaagagaaaaattggatataagattgcgcaattcggatcgtgcactttcacgccgaagtccgggaagacttcgatggaagttgtggagctggtcccctgtgcccgaaataagtggggcaactggtgggactactggttctatgtttcagaggctgaagtcgaagaccacccagggctccccactgccattatgtgctctcattattatgtggcgtacccgccatttgaagtggcggaggatgatgagaatgaaagggcccttcagatcgctgcccgtacgagtagtgggcgtgatctagttgaggaattcatatggtatggggtgtggcccttggcgcatggatgggcgctgggcgaagtatgccctcgcgagatgccctccctgggtgggcggaaagtgcgaagtccgctttttgctttggatgtgcgagggcgggatcctgccgcggttgtgcatgaggcggaggatggggcggtgcgaattgttgggcgctacgtgccgaagacggaggcccagcggagctgggatatacgtggatccaatgaccgcctgaatagggccttcgagttgaatcgtttgccgtatggcggttatcccggggaagacgttgtcgaccgccgtgggaaaaaaccagcggctatgactgaagacgaccccgcgccggaggccgccccagccactaagaaaaggaagctaggtactgcgatgggagaactgggggtctccgatagttttgctatggagttgatggggacatgcgcggcccccgggggaaggatgtcttcgcccgagctccgggagtcttcggcgcggatgctggaggttaccgggggtcgatggcccaagaacgttcctatcccccgcgcggctggcgaagacttctttacgtctcgcatggctcgtgacttgagagtgtttccttacgggcggaatattgctgctgttgtgtcggtagtgatgaccaaggaccgtcaagatgctgcgcagaagcgccggatggtcgtcaggatggtcgatctcgtgcgcgaggtgaagagggcgcgaggaagcgcgaaggctgcagcctccggcagtggcaagctggtgccgactgcgaaaacggctgcgcccgggggcagcaaagcgtcgacaggcgagaaggatgcggccgctggcggaaccaagcctctcccgggcggaccgtcgcccgcgaagctgcctccaccggggttgcgtgttgctgacttcggcacaaatatcagtgtcgaggattatctgggtgacgaatctctagattcc

SEQ ID NO: 34999 - DNA, 294 bp, Zea mays
  Peptide Sequence Number=SeqID_76778
atggaggagctcatcggggaagaagactctcgctggagccgagggggaaatccttcgattggcggagattcggagctggtctggtgtgattgcaacttatgtgaagaggttgagccgttcgcggaggagccgttcacggagaaaaaggggtgggggcggggaagtgaaaaggttctgtcgggagcgtgcgggagggacgaagacggcctaggtggggcggttggctcggacctggcgcgtaggttcggcctgggtgcattctctatattgaatgcactcaggtgtaatatataa

SEQ ID NO: 35000 - DNA, 1287 bp, Zea mays
  Peptide Sequence Number=SeqID_76779
atgaagacgaagcgtcggttcggcctaggtggggcgattggctcggaccaggtgctcctggcgcttaggttcggcctgggtgcattctctatattaattgcacccaggggtgaccatgttggacttgagaagggtggcctcgtggaggaccttatggtcgccgatcgacttcaagaccgcggcgaggacgggctccgtggcggcggcgcaggtcccgatgtcgtgcccgcggaggtccgccgaagacgagggcgagggcacgctggggccccggggcgccgggaagggcttagggaggttcagggcaacgtggcgaacgcgggcgtgggcatggtgacaacgcagagggcccggaaggtagctaccaacagcgggatggctcggcggcagcgcaaccttgctccggtgagcaattgcgacacccgagggcaggaaaggggaaattggggcaggggaaggtccggtgagcgcgggcagagagaaccggagggtgaaggtgtgaaccgaggggtgtcccaggttgctaacgttgaggcaaagctcaccaaggccacaaacaaggcgaggactcgacggtggccacagaacgcgctcaagcccaaggcggacgacggttgtgtcttctttggcacgcgagcggtgagagggatcggtccattcgagggactcgatcacgcctcgcccgtgcctagcctcgggcaaggtcaacagagccgaagtgaccgcagtcacttcgccgctccactgaccggcctgacagaaggacagcgccgcctgcgccgctccgactgttgtgccgctcaacagagcgaggctgacaggcaaccaggtccggcctcaggcaccataggaaactccgcttcgcccgacccagggctcggacttgggctcagccccagaagacggcgaactccgctccgcccgacccagggctcggactcgagctcagccccggaagacggcgaactccgctccgcccgacccagggctcggacttgggctcagcctcggaagacggcgaactccgctccgcccgacccagggctcggacttgggctcagccccggaagacggcgaactccgctccgcccgacccagggctcggactcgggctcagccccggaagacggcgaactccgctccgcccgacctagggctcggactcgggctcagccccggaagacgacgaactccgctccgcccgacccagggctcggactcagccctggcctccgccgacggtctctgcctcgcccgtcccaggggctcggactctgtgggggatag

SEQ ID NO: 35001 - DNA, 276 bp, Zea mays
  Peptide Sequence Number=SeqID_76780
atgagtgtacacaccccagtgaagctccccgagcgaggaatcgaagcctacttcgccggagaggccagtccacggtcgccggagctctcaaccccgccggagtacgtggaccggatcgccgtggtttggccggtacactcgccgccgacgagaacacccgcctgcgcacgtggaccgagcgattccggccatccccgccgtcaagccgcacctcgctgtgaccgtcagagcctccccgagccaaccctgcccttcgccggacctatctcaccgccg

SEQ ID NO: 35002 - DNA, 150 bp, Zea mays
  Peptide Sequence Number=SeqID_76781
atggaccgggcgattccggccatccccgccgtcaagccgcacctcgctgtgaccgccagaacctccccgagccaaccctgcccttcgctggacctatctcaccgccgggacctcggtgtaaaactgtttttctcaggaaactcttattaa

SEQ ID NO: 35003 - DNA, 732 bp, Zea mays
  Peptide Sequence Number=SeqID_76782
atggaacctcaacgtgtaggggacgcggacggagaatcccgctccgcagcggcccaatcagccccgcccccgcgcgcggagacccacgggacgaaccagcggtcgtgcggagaagtacgagcattgctacagctcggagacccattgggatggttgccgctgcggagacccattgggatggttgccgctgctaggtggattgcaaagctctcagggccttgtctggcacaagcattgcagatgtacccagacttcaaaataaaggttgttggacattcactgggaggtggtacagctgctctgttgacatacgttctgagggaacagaaggagtttgcctctactacttgtctggcatttgctccaggggcagctgcatgtatgacatggaaactggcagagtcaggagtgcattttatcactacagtcatcaacggagctgatctggttccaacattttctgctgcgttagtagacgatcttggttcagaggttacagcgtcagcttggctaaatgatttccgccaccaaattgaacaaaccagaatcctaagcactttttatcgttctgcgtcagccttgggatcccggcttccatttatggcaaatgctaaagcaagagtagctggtgctggcgccatcttaagacctgtatctactgggacacatgttactttcaaagcttcatttgttacaccatcttcaggaagcttagttgtatttgagttttaa

SEQ ID NO: 35004 - DNA, 1944 bp, Zea mays
  Peptide Sequence Number=SeqID_76783
atggcaaccgccgcgggggccgcggcactgctttactacacactgaaccgccgcctgcagacagagaggctgaataaggaaggggagtgcagcgatagcagggatgtgacacccagggccgcacagggttctcccagcaggagccgtgtatcgcggagggacgtccgcgcccctgccacctggcttgagactatctcgacgctgtcagagacgctgcggttcacgtattcagagacccttgggaagtggccgatcggcgaccttgccttcgggatcagtttcctcctcaagagacagggaaacttatctgtagcaagcatatacgctggaaatgatagtgtggagctcaaaggagctgaagtaattgctgatttaaagtatcttctcaatttgctgacactttgctggcatttctccaaaaagccattcccgttgtttttggaggcgactggctacactacggaggatgttcttatgcaagaacctaaagcaggaattttgaagccagctttcaccattttgcttgatagagacaaaaagtctatacttctattaattaggggaactcatagcatcagagatacattaacagctgccactggtgctgtggttccatttcaccataccattgtacaggaaggtggtgttagcgacttagtactaggatatgctcattttgggatggttgccgctgctaggtggattgcaaagctctcagggccttgtctggcacaagcattgcagatgtacccagacttcaaaataaaggttgttggacattcactgggaggtggtacagctgctctgttgacatacgttctgagggaacagaaggagtttgcctctactacttgtctggcatttgctccaggggcagctgcatgtatgacatggaaactggcagagtcaggagtgcattttatcactacagtcatcaatggagctgatctggttccaacattttctgctgcgtcagtagatgatcttcgttcagaggttacagcgtcagcttggctaaatgatctccgccaccaaattgaacaaaccagaatcctaagcactttttatcgttctgcgtcagccttgggatcccggcttccatctatggcaaatgctaaagcaagagtagctggtgctggcgccatcttaagacctgtatctactgggacgcaggttgtaatgaggagagctcgcagtgtagcacaggcagcatggacaagaccagcactgcaactgtcctcatggacttgtattgggccaagacggcgaaataatatatctacctcaactgtcacatcagaggaaataatagcatctacaggcggtggatctgaatccacttcattgttgactgaaaccactgcggaaaccacagagacagttacatcagaagctgtatcagaagtggttcagagttctgtttctgtggcggtcgatgctgttgacttggtagatgacaagggagatagcgatgatgacatcgtcgatcaccatggggacgaggacaggatgactgatgtggagctgtggcagcaacttgaaagtgagttgtaccggaagagggagggagaagaggatgacatagccgaagagatggctgaaagtacaattgctgaggaggtgggtggcgtggctgaagatgtgctcagcgagacaaaggaagtgcataggttctaccctcctggaaaaatcatgcacatattattctccagcagggaagaagcagatcgtggagaggagcctgaggatgatgttacggatggggaggcacaaagcagcatagggatcttcttgacgccaagatctctgtacggcaagctgaggctttcgaaaatgatgatcaatgaccattacatgcctatatacagaagaaacattgagcagctgatcgcggagcttgagaaggattcctcggatcaaatagggtgcgtcaggtgtagttga

SEQ ID NO: 35005 - DNA, 960 bp, Zea mays
  Peptide Sequence Number=SeqID_76784
atgggggacttgtggaccaacataagggttgatctcgcaaagatgcaaaccacgctccagaaggttgagcaagggctgctgcaaatcaaggcaacagtgcaacatgagcagcaccaactggcgttgtccgcacggctccagacgtcggcgactgtgggcatacaagctgctgctcgtggcttccttgcacgactgagagtgcgggagatgcgccagcagatggtcgaggcagccttggtgacggttgacctcgacacacgggggcgcgaccttgcctgtcggacgccatcagcagcgacaccgggctgctatctccaactgcgagcatggtgctcgtccatgtgctcccctttcgtccagatggcgttcatgggatccagatggctgcacacgtgcaagtccaatgcgcgaagggtgtccgccttatcttatggggttaggaactccgacctgatcgaagtgaacaaaaccgagttcatgactccctcagcgttcatctttctctacgaaaataacctattcctgacattctgcaataggacggttgcagcctggaatttccgtggagagctagttacatcgtttgaggaccacgagttgtggcatcctaactgcaatacgaataacatatacatcactgctggccacgacttgatcatctcatattgcaaggtctcaaagcagagggcagattgtgttgacagtgaggctggggaagttctgtccatgggatcaattaacatgagcgacatctttactggaaagtgcgtcgccaagatctcccccgctgaccctactctcacaattgctcctcggaggagaggcgacgatagcagatctaccatccgcagtactgtcccggaagctcttgaggacatcactgctctcttctacgacgaggaccgcaatgaaatctacaccggaaacagcaagggcctggtgcatgtctggtcaaattaa

SEQ ID NO: 35006 - DNA, 597 bp, Zea mays
  Peptide Sequence Number=SeqID_76785
atgggggacttgtgggccgacataagggcaaatctcacaaagatgcaagcctcgctcctagtggttgagcaatggttgctgcaaatcaaggcagcagagcaacgtgggcgacagctggcgttggccgcacggcaccagacgttggtagttgcgtgtctgcatgctgtggcgcgtggcctcctagtgcgccagcagatagggccctaccagcagatgctcaagacaaccttggtggcggttgacctcgacgcacaggggcgcgacctcgccctgtcggacggccatcggcaaccgtgtcggcctgctgtctccaagtgcgagcatggtgagtgtcgcgtgagcgatagacttcaactctacggcagtggcggtagggaaggcactcccctcgtcatcgacaagggtgcacttcttagcaccaccacatttcgctaccggcccccaagagggcacctccgctgttcattgttgcgacctccaggtggtcatccatgtgctcccctttcgtccagatggcgtccatgggatccaggtgactgcacacgtgcaagtccaatgcgcaggggtgtccgccttatcttaaggggtcaaaaataa

SEQ ID NO: 35007 - DNA, 458 bp, Zea mays
  Peptide Sequence Number=SeqID_76786
acagactgaatcatgagcactatgctatctcttcaaaattgatgttcgcattaaccaaatatctttctggtacaagctttgttgatatacgaatcgagaccatggattcggagaacgcaaagctccgaagagcactggctcatttaatcaaagtagtggagcagtgttgtgccgacatcgtcgatgtcgtccacggtgccttccaactagttagcggaccagtcctgaatgaaatgaatcgtgctttagttcagatcgaggatctcgccaaggaccttgatcacctagctctggaaaaagactgggagatggagcacatggccccttctcctattgccacatcatcagaaatagaggatgagcttctgcttgattatgattcagagttgaatcctgacgatattgtcggctacgacgatggacgcgactactccaccgacgacacctatccctactag

SEQ ID NO: 35008 - DNA, 801 bp, Zea mays
  Peptide Sequence Number=SeqID_76787
atgtggagaaatccagacgtccggtatccggggtcgggctcgggctcgcgcggtggtgaaaaatccggagccgctgttgtgccgtcgctggcgacttccatcgaagtcggcgaggggggctcgcggcgctgctcctcggcggcgccacccaagctgggctcgaagaggccgtgctcgagcgggtccggaggcagaccgctctcggtggttggaggcaaggaggtcggcgccgacgactcaaagatccaaggagcgggtggttccgtgggtgttcgtcgccgtcgaaccgccatcgccaagaagttgagaagatcgacgaagccgacgaaggaagctggggagaaacgcaagcgcatctcgacgccaccttcttcatcgtcttccattaggtcgggtggtccagatccgaagaaaaaaagctttgttgatatacgaatcgagaccatggattcggagaacgcaaagctccgaagagcactggctcatttaatcaaagtagtggagcagtgttgtgccgacatcgtcgatgtcgtccacggtgccttccaactagttagcggaccagtcctgaatgaaatgaatcgtgctttagttcagatcgaggatctcgccaaggaccttgatcacctagctctggaaaaagactgggagatggagcacatggccccttctcctattgccacatcatcagaaatagaggatgagcttctgcttgattatgattcagagttgaatcctgacgatattgtcggctacgacgatggacgcgactactccaccgacgacacctatccctactag

SEQ ID NO: 35009 - DNA, 912 bp, Zea mays
  Peptide Sequence Number=SeqID_76788
atgaggttccgctctgagcgcgaggatgtcacaatcactgccgatcagatccgacagctatttggcttccctgtgtcgacgactcgcctgcacagtctctgctatggcacttcagatcctccacgtcgccctcacggcggtgtggctcccgggacagctcacgtcgcggctctgttccgcccgcctttcacagatgggtcgcgacgttctccagcagacttcactactgcagcgaagtacttatatgagctcgtcagacggacactcctgcctaggatgggatacagggaggctaccactcatattcagctttggctccttggtgccctggtatcccactctgagtttgatgttgtggactttctgatctgtgagattgaggacactgttctggatgggattcgtgctcgacgacagctgccctatgctcactacttgtgccacatctttgcgcagctgatccagccacctcgttttcagagtacccttgaggcctcacgccttgtgtttggatcttaccgtcctgctcctgagattccagtgccagcttatgctcctgtgtttgacactcaggccgaggatgctgcacttcgacagtttgactcccagggtgcagcagctgatgatgatgatgatgatgatgatgatgatgattttggggttcctcttccgcctccgcctcctatgcctccacgctcacatgatcatgaggctgggagttcccgtgctgcccctgctcctccagctttggaccctgctcttgcttcgattcttcagactctcacccagcagcagcagactctcacccagcagcagcatactctcacccagcagcaggctctcctggcagccgagcaggcccagcatgcaggacaggcaggatgctcttcagcagcagcttattcaggatag

SEQ ID NO: 35010 - DNA, 696 bp, Zea mays
  Peptide Sequence Number=SeqID_76789
atgggatacagggaggctaccactcatattcagctttggctccttggtgccctggtatcccactctgagtttgatgttgtggactttctgatctgtgagattgaggacactgttctggatgggattcgtgctcgacgacagctgccctatgctcactacttgtgccacatctttgcgcagctaatccagccacctcgttttcagagtacccttgaggcctcacgccttgtgtttggatcttaccgtcctgctcctgagattccagtgccagcttatgctcctgtgtttgacactcaggccgaggatgctgcacttcgacagtttgactcccagggtgcagcagctgatgatgatgatgatgatgatgatgatgatgattttggggttcctcttccgcctccgcctcctatgcctccacgctcacttgatcatgaggctgggagttccccgtgctgcccctgctcctccagctttggaccctgctcttgcttcgattcttcagactctcacccagcagcagcagactctcaccccagcagcagcagactctcacccagcagcaggctctcctggcagccgagcaggcccgtttatctgaccgtatgctcttcgatgttttcagagcatgtaggacaggcaggatgctcttcagcagcagcttatttcaggatagggcagagaatagggcattcatga

SEQ ID NO: 35011 - DNA, 4035 bp, Zea mays
  Peptide Sequence Number=SeqID_76790
atgacggcggaggggacggcgtgcaacggcgccggcgaggcgccgaaggcggaattcgtgcccgagaaggtggtcaccgcgtcgctggaggagaaggcggccggggagcgcgagggcgaggacgtcggcgggccttttgtggtcgtgaacggcggcgattctgacgggcactccgaccgtggctcagatctgggcaaggcgtccggcgaggagtcgtcgtccgaggaggaggacgtgcccggctccaatgtagctccggacttggccgtgggcggagatcacgggtccgcccgaggggaagtgagtgctcagggtgcggcactcggtgcttcgtcggcggacggcagtggtcgtgcttccgacggcgctgagggtggcgcggatgagggcaaaggcgaaccaagttccgattttgatgctgaagcggcgccgcaggaggacgttggtgaagaggacggtggggcagctgctctggcgtccagcgggtgcgaacctgccatcaccggtgctgattctgaggcggcaccagctgtggatgatgaggttgaaggcaaggagggcacggtggatggaagtgctgttgctgatgtcgctgaagcggtggtgcatcaggaagttagcacagagcatgatgatgccctaacgcttcccaagtcttctgcttccatggagtccgaggttattagagaggataacaaagaacagagcaccgctgatattgtggggccacatgagcagggtacatgtggggcaagtgctttggtggagaatgagcatctttgtgctgacatgagggctgattcatttgtagctgttactgagcctgacagtcaagaggattatgctgtggagtcctgcatgcgcgatgatgtcctaatttgtaccgagtctggttctgccgacatcgagtctgaggttaatggaaaggatagcaaacaagaacagagcaatgctgatgtcgtggaggtcatagggcagggtgtagttagggcagatgcgctgatggcaaatgggcatctttgtgccgacatccaagcagattcttctgaagctgctactaagcctgataacattgctaatgagagcaaactgactgaagttgcagaatcaggagaggatgctgctgccagtggagaactggatgccatcgatgcatcatcacaaaccaatgggcatatttatgttgcctcgggtgctgattcttttataattgcttctgagtccaagtctcattcctttgagacggatggacaagaaactgatcagcaagaagaggaagttccacaaactgaagctgaactattggatggagtgctaaaaccaactgaaaggaactgtgcacgcagtgttgaggaactcataggagaggaagttgacacagatgggcatcccagtgtagacggtacagctgatgcttctggggagcaagaagccaagcccatgcaggtagaaggtgaggccacatgtggtattctcgaatttgaagaagtggataaggatggtgaggatagtttgtgtaatgactgcatggttggtgttgtttcctctaatgaggaaacagagcttcctatgaaggaaagaacagatgaagctgtccccagtgttaatgttggcgagtcagagcaagtaactgaggatacaagccaagatatcatgcagggtggattggccaggggagtttttataggcacaatttttgttaagccagtatcagatcctcatgttgaatcaagcctcgtacataaagtcaaggcagaagttcatttagttgatgaaatcacagcagcagatttgaaagctgaaaatatggtcgaagtgaaaagaacagatcgtgaagttgacgaaatagaggtaaaagcgccaggtactcacgaaattgggaattcttcagaagtagaaccgaaggaagagtttgagatggaggttgatgatgctgtttcattgcatgaagctgcagcttctgcatcagaaaatggttctgaagaaaaatctagcaacattgctgttgatcaagttgaacctgtcaacctgaatgtagatgaactcgcggtagatgatgatcaacccagttttaatccaggttatggatctgctaaatcttctgatgtggccgaaacaaaaaatgtggaagcacaagtgacagaacagaagggcaatgcacaccatgcttcaggtgagtggcatggagatcatacgcaagtcattggaccacagaggatctacataattaaagttccaaaatttgccggtgatgatctctgggataagatccaggctgcacaggctcacttagaccaactgacccaggaaagagacgcaattaaccgccgtaggcaaaaacaaaaggctatatgtgatgaatacagggagaagtttgaggcagcacgtcaagaagagcgggaagcaagggctgcccatggagataagaagaatgatttaaacagtgtgcgctcagtattagagaaattgcaccaagcaaattcagttgaagaacttgatgagcttattgcaaagaaagagaggattatgcaacatgagaccatttctttgaaagaagaaaagcttttaattaaagagattaatgaattaaaatcccaacggaagcagctgtccgccaccatgggctcaaaggctgaaatcaatgaggcatttgaccaaaaagatcacattcatgagcggcataaggtgttaaagaaggattctgatgttttattcagcaacctgaaagtcctagaggagaacacaagaaagattcaaaaatcttttgctgatgaaagaacagctctcagaaaattaacagaggaacaccgagcagctaatgaaatacgtcaaaaggcctacagcgattggactgagcttagatcagagcccagcaagaagaatgaatactttttcaagtacagggacgcccgaaatgcagcagaaaatttcagagccaatggagatataaatggacttatatcacactgtaatagtcagattgagagagttatggaaatatggaacaaaaacgaggacttccgcaagcagtatgttgaatcgaacaaggttagcacactaaagagattagggacccatgacggacgaaaacttggccctggtgaggatcctccggtcattccaagccgaagaccaagcaacatttgtccattgtctgcctcaagcccggaaatgatcaccttagcttcaacaccagcacctgtattggctgctgcagctgcagtcccttccaaagagaactcctttcctgctttggcagcccctcagaccagtaagcgcgccaaatcaaaagcatctggtagctctgcccagattaagaacaaatctgttatagtatcagaggaagaagatttggaacagactttaaaggagaaggctcatcaattggagttagctaggaaggcagaggagttagataggaaggcagaggagttggcgcggaaggaggaggaactaagaaaagagagggatgcagctgaaaaggagcggcttaggatggagcagaaggctaaggctaaggaggctgaggagaggaagaggcggaaagcagagaaggacaaggaaagagccgagttcaaagcacgcaaggaagctgaggagagagagaagttgcattacttaatcatacataaagatagaccatccatgcaacaagttccaattctaattccgaccttgttcgagcatttccagaagaaagcaaagagagacaaaaagaaaggcgcagcaccagcagattcgagcgccattggtgacagccatgctgctgcttcggctacagcagatactgacagtaatgcatcagacaacccaagggaagctgacgtttctcaaccagcggtggctcccaggaggccggctagaccagcggcggcaatcaagcaactgaacaggttgcagcccatgccagcgcccctgcgtaacaggggcaggaggaaactgcggcagtacatcctgatcgcagcggcggtgctaacggtgctggcgctgttcgtggcaggcaactacattcccaggctgaggtcgcactcctaa

SEQ ID NO: 35012 - DNA, 360 bp, Zea mays
  Peptide Sequence Number=SeqID_76791
atgagcgggaggagcagtcttgggaggagctccgcgagtgtgccgaagcaacgggacgtccccaaaatcctccagcagggcgccgaggtggcggaccttcggttgctctgcgccgatctgagagccgaggcggcagcggcacgcgcagaggtgcaacgacggcagtcggagttcgaccaggttgctaatgagcgagaccaatctcagggccgggctgccgaggccgaaagccgggctggagcccttgcagcagacctagccgtagcccaggccgcagcctcggagcagcgtgcccgagccggagagctcgagtccgcccttgatgagtccaccagggcgcttgccggggtggccgagtag

SEQ ID NO: 35013 - DNA, 225 bp, Zea mays
  Peptide Sequence Number=SeqID_76792
atgtcctcctcgacgctacgcacagagaaaggccaggagcatgaccgactcgccccgtacccgcgtcgacgagcgtcggtcgactcgcgactacgactgtgggcggaggtagcagtagccactgcgcgagtcagtgtcagggctggtgtcggacgaatacggggaggaggctcctgctcctacgccctctgccgagaatggggtggcgcgaaggtggaggcatga

SEQ ID NO: 35014 - DNA, 186 bp, Zea mays
  Peptide Sequence Number=SeqID_76793
atgtcctcctcgacgacacacacgaaaaaggcaaggagcatgaccgactcgcgactgcgaccgtgggtgggggcaacagccactgcgcgagtcggtgtcagggctggtgtcggacgaatacggggaggaggcgcatgctcctacgccctctaccgagaatggggtggcgcggaggtggaggcatga

SEQ ID NO: 35015 - DNA, 255 bp, Zea mays
  Peptide Sequence Number=SeqID_76794
atggcgaaaacgatgccactatgcgagtcggtgtcagggctggtgtcggacgaatacggggaggaggcacatgctcctacgccctctgccgagaatagggtggtgcggaggtggaggcatgaggagagagagaaaagaaacatgatggtgaacgagatggtggcaactgagacaaagaccatcattatcgtgtggaggtataaatggtcaaatgggccgtgtctggcgaaccggtccgaggcacgacccatttaa

SEQ ID NO: 35016 - DNA, 419 bp, Zea mays
  Peptide Sequence Number=SeqID_76795
atggctcgagttattggaatttggaagacaagcagaaaggcacgcctcgccgaacagctaatctcccctgtcgttggttcgtccaaggtcgcaggatcacccgtcgccgcagttcaggacgcgagcgacgacggcgccagggtcgtggtgctagtcgcgggttctcccgtcgattccgcctccgattccctccctcctcccgttgcggcgactcctgctcctgcggcggaggccaagcaggagtcggtgtcggagacggaggaaactaagcaggcggcggcggcggcggcagcaccagcaacagcggcaggaggtgtgcaggccatggcggtcaccgtagtgcgggacgtcgagacgggcctggacgcgagcaccagcgaccgggacggtgacaagccttcctggttcacacctaagag

SEQ ID NO: 35017 - DNA, 375 bp, Zea mays
  Peptide Sequence Number=SeqID_76796
atggcggtcaccgtagtgcgggacgtcgagacgggcctggacgcgagcaccagcgaccgggacggtgacaagccttcctggttcacacctaagagattacttgtcatgttctgcattatcaacatgctgaactatattgatcgaggagtaatagcaagtaatggggtcaatggtacccgcaaaagttgttctggtggcacatgcacctcgggctcaggaattcacatttatggttgggttgttggtgtcttcgttgatatttgcaagccttgtaaaaagtttcttttttttattgttgggtttgtgtatagaattcaaatttgggtctatggtgtattcaaatttggtgaattcaagtttgaagagaacaattag

SEQ ID NO: 35018 - DNA, 498 bp, Zea mays
  Peptide Sequence Number=SeqID_76797
atggcggtcagggacttcttccagaaggaagacgaggacgaggaagtggaagcggaggagctggcggtgggcggcaggagcttgcgcaaattaggagatgaactcaccacaattttagacctctggatgaatcagtgctcgtcgcgggaggaggcgccaagccagccccctcctccatcccgccaccccgccggctccgactcgcggacgccgcttctcgcgcccgccttcgcggccgtcgtcgggcactggccggcgcgcctggccgtggccgcgatgttcggggtcaactccggcctcggctacctgttcatgctcgccgtcatgtcgttcaacggcggtgtgtttgtcgccgtcgtcgtgggcctcgcgctcgggtacctcgcgtgctcatcggggaggaccgcgggggcgaggcggctggagaggattcgggctacaatcagggttaaggtgccaacccaatcaggagcgcggattaaggagatggttagttag

SEQ ID NO: 35019 - DNA, 3438 bp, Zea mays
  Peptide Sequence Number=SeqID_76798
atgtcgtctcgcttccaccacggcggcggcgacgaccaccgcgtgggcgacgcgggcgacgccgccctcgcccgcgacatcgtcacgctccacaaggcgctctccctcgacccttccacccaccgccgccgcaccctaccactcccctccccatcccccgtcgtcactgagcagccgcgtaacaagccccgtctcaagccctcctcctcctcgtcgtcgtcgcgtaagctcctgccgtccacccctaactcctcctccgcttccacttcctcgtcctcgtcttccttctggaagaagtccctgactgccatttcgcacctgggccgccgccgcctcgacttcgcgttcgcgctgcatgtgcactccgtcaacggcctccccgctgcgctcgatgggtctgcggtctccgtacgcttccgccgaatgtccgtgtccgcctccacccgccccgtcgtggcggccctcggcgccgccgcgttcgaggaggcgctcacgctgcggtccccggtctacttctcccgcggcgcaaaggccgtggtcaagtacgagccccgttcctttgttgtctccgtcgccgcctccactctcgagcttggtaagcacgaggtcgacctcacccgcttgctcccgctctcgttcgacgatctcgaggacggcggcgactccggcttcgggaagtggagcagcagcttccggctgtccggccccgcccgcggcgcgcggcttaacgtaaccttctcttgctcgctcctcgcgggtggcgtcggcagcgagcagcacaaggccgtggaagtggcgggggtgcggcgcggatcgatggcgcggccggtgtcagtgcaggcaccaacgcctgtgcccgcgcggagcagggacgtgagggtgctgcacgaggtgctgcccagcttgaggtctgccaggtcgctgccttttgttggtgatgggggtcttgatgcgaggaaggaggaggtggcagcactggactgcatggaggacgggtctccggaggcaaagcactgcacatcagtagaggttaagaagggggacttggtgcgcccagatggggattgcagcacgatggagttcaatgttgttgggcatggagttgaggttgcttcatatgacccacaaaggctcaaacatgtggaaaccagcaatgaggctgatcaaaatgaggatccagggttcaaaattgacgaagaggtatcattcaagcctgtgctagtatgtggtgatgtcgctgaggatcagactgttggagtgaagactgaggtggcagtctgtgatgttgctgttcaaagggagaatgtggaagacaaacatgatggaataatcaaagccaattcactgcctacctctgctctcgaagcagaggatcagttgggagcagatgtagaactggaggacctggaatgtattttgaacgagctcttagttgctaagccggaggaatttgaatcaccagtagtagaagataagtattctaggcgattgagttgcacagctgatagttacaagtctgacagtaggaagggcagatcacgcagcatggatatttcaacagattctgttgctaatgagttcttggatatgcttgcaatagagcatatcccatttgggcaaccctcagatagtgatcccgagtcaccgagggaacgactttggaagcagtttgaaaaggaagcactagcatctgacaaagctattcttggtttggactttgatgatggaattgaaggacctatttgtgagaatgttgtggaggatttcgatctctctgcaatgatacatgaggctgagctcgagcttcagaatggaagtcaacccattgataccaaatttcgagctaagtcgctggaagacgaagaaactgaggccttaatgcgtcaatttgggctaaatgagaagtccttccaatcttctcctcctgaaagtagaagtgggtttggtagccccattaacctcccacctgagcaacccctggagctaccaccattggctgaaggtttaggtccatttattcagaccaaagatggaggatttctgcgatcaatgaacccagccctgttcaaaaatgcacaaaacagctgcagcttggttatgcaggcttcttccccgattgtactgccggcagagatgggatctgggattatggatatattgcatggtctggcatcagttggaattgagaagttatcaatgcaggcaaacaaacttatgcccctagaagatgttaatggtaaaatgatgcagcagattgcctgggaggctgctccagctctggagtctgctgaaagatatgacccgttggactatcatagcgttgatgctttggtaggagggggtggaaatgctccctccagtaagaagaagaaatgtaggtgtgctgatctttcatcatccttgggtggggagaatgcttcagaatatgtttcacttgaggaccttgcaccattagctatggaaaagattgaagccctttccattgagggtttgaggatacaatctggcatgtcagaagaagaggcaccctccaatatcagtgcaaagcctattggggaattttcatctctgcaaggaaagtgtgcagagaatacctggtcccttggtttagagggaactgcagggttgcagcttctggatgttaagcagagtggagaagaagttgatggattaatgggcttatccatcactctagatgagtggatgaggcttgattctggggtggtggacgaagaagagcaatacagtgaccggacatcaaagatacttgctgctcaccatgcaaaatccatggagttagctgctgagaatcggaatggggacagaaagaacaggagatctggtagaagatggggcctgttaggaaataactttacagttgctctcatggttcaactccgtgacccactgcgcaactacgagccagtgggcacaccaatgcttgcattaattcaagttgaaagggtttttgtacccccaaagcccaaaatctacagtactgtctcagacaaaggcaacagcgagcaggatgatgaggaacccaagaccgaaaaggttccagataaggcattggtcacggaagagaaggctgaggaattagaggatcccattccccaattcaaggttacagaagtgcatgtcgctggtttcaagagcgaacctgagaagaagaaaccatggggcaatcaaacgcagcagcagtctggctctagatggttgcttgcagctggaatgggcaagggaaacaagcatcctctgatgaaatccaaagctatagtgaagccaaccaaagaggcagctggtcaggcaggagacatcctctggagcatttcttcacgtgttcatggagccgggaccaggtggggcgagctaacaggaagcaagagtcattcacggaacccaaatatcatgcttcaaaaggacaagagatttcggtga

SEQ ID NO: 35020 - DNA, 480 bp, Zea mays
  Peptide Sequence Number=SeqID_76799
atgccggttggctggtctccgcacaggatgctctcgagcggggggtccaggcggcacgagctgccatggggcaagcctcccagaccgaccccctctgtcagggcggtcgtcgtgccgggggaggctgctgacacggccatggccctgagcccgcctgacgcgtcgttggtgtcggcgtcgacccctgccgcggtcgctgccgatttgcccgcggagccgtccatcgctctcgacgtcgggatggttggggcgtcgccgctcgctgtcgtccccgacccccccgttcctggccctgaggagggggcggacgctgttgccgaggtcggtgaccggaaacctgccaccttagccgagggggagcccagcgcgtcgatggcgatggtgcctgacgtgttgactgcaggggaacccgacgccttggcggaggagcacgtaacaccgcggcccgtctcggggggcggtgtcctcatccccgcgtag

SEQ ID NO: 35021 - DNA, 621 bp, Zea mays
  Peptide Sequence Number=SeqID_76800
atgaagacttggtcattcttctacaaccatacccttgagagtcttttccttagtcggatgaatcaacaagaagctcctacaggagttggagagtttctacgagattttggtgttccagtggtcctgtggcgactacttcaagaggtcggatataccgaagcacccaagtaccaatggtcacgcactgttcttagaggacaaccatggtatgaggtagtactgcgtattccagaacgtgctagaaaaccatcttggccgtattggatgttccatgccgaaggaatgactccttgggagggtgctcaggtagctgccttagaggtgttaacaaccatttgttaccagagaagggaagaaatacaagccacatctatgaggttgttccctgcagttgccttaagtgacccattggtgtatcatcaccaggcccgattaatggaaagcattcctattgggcaggattctgttgaatcggcatctgctcgagttttgatggccgtgctagagttgcaacttactcgagggcacagtcgtcaaaagtggcagcagttgtacactgggagctatgcagcatttaagatgatggaaaaggccaagaacattgcttgtactcaagcataa

SEQ ID NO: 35022 - DNA, 558 bp, Zea mays
  Peptide Sequence Number=SeqID_76801
atggaaagcattcctattgggcaggattcggttgaatcggcatctgctcgagttttgatggccgtgctagagttgcaacttactcgggggcacagtcgtcaaaagtggcagcagttgtacactgggagctatgcagcatttaagatgatggaaaaggccaagaacattgcttgtactcaagcacaagaacgacttgaggaaacaaaggttcaagcggaacaagttattggactagagcatcaggtgacagaacttcagatgcaataccaagctgatcagaatcgcattaaggaacttgagcatcagctaactaatgctcattctaaattagaaattttgagtaagcaacaagaagaagtttgtctgtatgctgttgctgttagaaaagaccttaaggaaaccatgagcttcataagccatcaggatcaggcgatcaaagaattgaatcgtgctcatcccatggagtttcaagtagcacaacggcttgtcaaccatctgcagcaagcagtgcataggctcaatgttgccttttatcctactcctgcaccggcggactaa

SEQ ID NO: 35023 - DNA, 721 bp, Zea mays
  Peptide Sequence Number=SeqID_76802
atccggtgaagcgcgcagtgcggaggggatccggggccgctgttttggatcggcaccgctgcgcagcgaagttggacgccaaggccgcgagcaggggcttcttgctgctgcacaaggtgaaaaaagaaggaggggggagagcagagctgctgctcggccatggagatgtggtcggggaaggcgctggcttggggagaagggatgggacagctagggggcagaggaggtcgacagccatgggagaaactcgagctccctgtttgatgcagccgcgaacagcagagggaggacgaagacccggctgctactgttgttgggcgccggccatggagaagcctctgcgcacagggaagaagtgttccctactggggaggtccgtaggggcgcgcgccagggggaggatagggagcgccggccagggagagaatggagcagagagcgtcactggggaagggcgccatggctggggtgtcgggcttcatcctttgagcagggcgtcggcaaggggcttcaacaggggagcgccatgggaggaaaacggcgccggttgtgctccttgctgggcgccatggaaaggagagcagaggtgctgcacgtggggaggagggtgcagggagcttggagttgctgctggctgctgcgtgagggagaagaaggcagggaaaaggcagtggcggctaggaaaaatggaggggtgggagtgcaaaaatgccaaatgcaa

SEQ ID NO: 35024 - DNA, 399 bp, Zea mays
  Peptide Sequence Number=SeqID_76803
atggagaagcctctgcgcacagggaagaagtgttccctactggggaggtccgtaggggcgcgcgccagggggaggatagggagcgccggccagggagagaatggagcagagagcgtcactggggaagggcgccatggctggggtgtcgggcttcatcctttgagcagggcgtcggcaaggggcttcaacaggggagcgccatgggaggaaaacggcgccggttgtgctccttgctgggcgccatggaaaggagagcagaggtgctgcacgtggggaggagggtgcagggagcttggagttgctgctggctgctgcgtgagggagaagaaggcagggaaaaggcagtggcggctaggaaaaatggaggggtgggagtgcaaaaatgccaaatgcaagtga

SEQ ID NO: 35025 - DNA, 1266 bp, Zea mays
  Peptide Sequence Number=SeqID_76804
atggagtgcgagctggaggagctgcagttcctgggcgtcgtcggtatctaccgcttctccgcggagatcctccgaggcccgcactgcccgctcttcgcgtgcatcgcggccgccttcgcgctgcccctctccgcgctcttcctcctgcacgtcgccatctcccacgcgctcttcacccacatcgactccgacgacacggccctggacgcatcctccccgggcaccgacacgcagcgccgcttgctgtcccgcctcgcctccgactggctcgccctgctcctcttcaagtccgcctacctcctcgcgctcctcctgctctcgctcctctccgtcgtcgcctccgtctaccgccaagcgcgacgcgctcaccttcccgcgcgtgctctctgtcgtgccccgcgtctggcggaggctcgccgccacgttcctcgccaccttcgcgctcctcttcgcctaccacgccttcgtcgtgctcgtcttcgtcggcctcctcgtcgccgtggacaacggctccggcctcgcgggcctgctcgccttcctcgtcgccgtcaagcgcggaacagtgtgctgatggggcacaaggtatcatttgtggccatcactctcatctccatgattgccattcttactcaatcttggattaagttcatcgccttgtatctcagtcacgactcgctagaggccaacatcggtcatgtctcactagaggccatccccaggtgggagacgcagtcattggctcgcccgaggccatccttaggtgggagacgtagtcacgcctcgggtgggagacacagtcagggttcgtccaaggccaaccagtcatgcctcgcacgaggtcaacctcatgcgagagacgcagtcacctcgaacgagagacggtcgcctcacccgaggccaccctcggacaagagacgcagtcacgcgtcgcccgaggacaccctcaggcgggggacgcagtcactgctcgcccgaggccaccctcgagcgggagaagcaatcaaagctcgcctgaggcacccgagggtgggagacgcagtcgcgctcgcccaaggccatccccgggctggagacacagtcatgcctcgcccgaggccaaccctgggcgggagatgcaatcacgacttacccgaggcaacctcgcagtcacagctcacccgaggtcaaccccggtcgggagacacagtcacgcctcgcccgaggccaacctcggacgagagacgcagtcaagcctcgcccacggccaacctcgagtgggagacatag

SEQ ID NO: 35026 - DNA, 588 bp, Zea mays
  Peptide Sequence Number=SeqID_76805
atggagtgcgagctggaggagctgcagttcctgggcgtcgtcggtatctaccgcttctccgcggagatcctccgaggcccgcactgcccgctcttcgcgtgcatcgcggccgccttcgcgctgcccctctccgcgctcttcctcctgcacgtcgccatctcccacgcgctcttcacccacatcgactccgacgacacggccctggacgcatcctccccgggcaccgacacgcagcgccgcttgctgtcccgcctcgcctccgactggctcgccctgctcctcttcaagtccgcctacctcctcgcgctcctcctgctctcgctcctctccgtcgtcgccttcggtctaccgccaagcgcgacgcgctcaccttcccgcgcgtgctctctgtcgtgccccgcgtctggcggaggctcgccgccacgttcctcgccaccttcgcgctcctcttcgcctaccacgccttcgtcgtgctcgtcttcgtcggcctcctcgtcgccgtggacaacggctccggcctcgcgggcctgctcgccttcctcgtcgccgtcaagcgcggaacagtgtgctgatggggcacaagggtaa

SEQ ID NO: 35027 - DNA, 174 bp, Zea mays
  Peptide Sequence Number=SeqID_76806
atggagttccgactgccatgcatggtcttgtcgaccattggcatctcaaagcctgagaagctagaagggaagagcacccagcaatgctccatgcacctccaccaggtcttgaatgaggacctccggcttgttcttggtcagcaagaacggatgatcaatggcgccaacgtctag

SEQ ID NO: 35028 - DNA, 258 bp, Zea mays
  Peptide Sequence Number=SeqID_76807
atggagttccgactgccatgcatggtcttgtcgaccattggcatctcaaagcctgagaagctagaagggaagagcacccagcaatgctccatgcacctccaccaggtccacgtctgcttgccctcctctaggaacaaaactaggctgctgtaccagatgtcgctagacttcgctccgtggctcaagcacgtcttgaatgaggacctccggcttgttcttggtcagcaagaacggatgatcaatggcgccaacgtctag

SEQ ID NO: 35029 - DNA, 222 bp, Zea mays
  Peptide Sequence Number=SeqID_76808
atgcccgttcctcgaacggctcgcgcgcgcacaacggctgccccgcgaacctctcgtcccgtcgcattaacgctgcggcgggacaggcgacgcctttggcaggcgaagcaggcgacgcttcacctccgccatgatgaccgcgtcaaaaagggaccaggaaaggggatactccgaaagggatccttctctgtgaagaaagcgggccccgagccctcctactga

SEQ ID NO: 35030 - DNA, 1608 bp, Zea mays
  Peptide Sequence Number=SeqID_76809
atgcaggcggcatgcaactgcaccaagggggcgcaccctttcgacttcgacgcatccagcatggaggcccaggcccacacgtcatggaaccggcgcgccggttactacgtgcaaaaaactgcagcgccacttgcgccagcgccgcgccttctcgactatggaaccggtgtcgcgactcgaggcaaccctgctcatggcccagcggtgccaaccaggcacgccggtcatgggtcagtcagccgcgggagaaggcgtgacgcgagagagctctcccacggcgtgaaggcgaaacgcccgttcctcgaacggctcgcgcatgcacaacggctgccccgcgaaccactcgtcccgtcacagctggcccctcggaagggttcgacagccgcctcagagcacccgggctccgcgcccactactggctggccccccgacgggttcgacagtcgccccagagcacgtagagtgagggatgactctgggtacgttcgatacataaccaaggctcggtctacgctcccgaggaacggaagaccaaggcagattcacgcctcgcccgagggtctcctcaagcaacgggcgcaccctcgactcgcccgaggcccagctcgggtaggcttcacggagaagcaaccttggccagatcgcctcgccagccgaccagatcgccggagcattcaatgcaaggatcgtctgacaccttatcctgacgcgcgctttccagtcgacaaggccgaacaaccaagtctagcctcgggcgccataggaatctccgcctcgcccgaccccagggctcggactcaacctcgcctcggacgacgatctccgcctcgcccgacccccgggctcggactcagcctcaactccggacgacggtctccgcctcgcccgacccccgggctcagactcgacctcgactctggaagaaggtctccgtctcgcccgacccccgggctcggactcagcctcaactccgaaagacggtctccgcctcgcccgaccccagggctcggactcagcctcgacctcagaggagtcaccacctcgctcaggccgaccacgccacaaagggaggccatcattaccctacccctagctagcctaggctacggggaacaagaccggcgtcccatctggctcgccccggtaaaacaagtaatgatggcaccccgtgtgctccatgacaacggtggttctcagccccctacggaagcaaggatacgtcagcaaggatccgacagccccgacagctgtgcttctacagggctcaagcgctcctctaacggccacgacggccacatgaacagggccccaacacctctccgacagccacgtcggcacggctctcatacgaaaaaaaaggtggccgcgcaggagaacggggagcctcacgccccctgtctctctctccctcgcgagcgagcgcttgtaaccccctactgcaagcgcatccgccctgggcgtaggacagcacgaggccgcgggttcccccttactgttttccccccttgtgtctccgtctcgcgccgacccatctgggctaggacacgtagcgacaatttactcgtcggtccagggaccccccggggtcaaaacgccgacatcccctaa

SEQ ID NO: 35031 - DNA, 681 bp, Zea mays
  Peptide Sequence Number=SeqID_76810
atggtgtgtttgggcctcggcggccgcagaaaacacacgctacaagataatccaatcctgcaggctcggatcttgacagttgaagggagcagcagcaccctcggcgtcaactacaccttcggcaaggaatccggctcgagcagacggctcggccagtcaccccgaggcctcggccagctgtcccccgaagacatcagcccggcccgaggcctcggcaactcaattccggcgacggtcccaccagtggatgacccggccaggctctggccgaccaagtcttcttttcgagccaactctgcctctgtccgtgctgacaccgctacccctggcttcggctcatcgaagagcggccgaggggttcctttaactaagcaagagaagcctcggacagcaaggccgaccgagccgagggactcctatgcctccgggatacggatacctcacttgtacgaacaaccccacacgattggggggcctgcggagcaacagaaggccgacggacggctcaccgtcgcccgctccagcagtagcgataatgacccccgctacgggtggccgaactatagcagcgatggcctcagggcggacgccgctgcaaccgtgccctcgcccacgccgacgctcgagaggcgaggacaagtacaaagagccggaggcccgaagcgcggatggtggcggtga

SEQ ID NO: 35032 - DNA, 279 bp, Zea mays
  Peptide Sequence Number=SeqID_76811
atggcgagcgtcatcagcttcagcgcgttgggctcgctggctcagctggctctggctcggctcccggtgcccctctcctcgcgagggcagttgtcgcgccgtgcgcaccggaggaccgccccaagacgtcgcacgctgctagggcggcgttcgtgttctggggctgtcctgcctttgcaccggtacggcgcctccgcgcggagcgtcggcgtgggcgagggcaaggttgcagcggcgtccgccctgaggccatcgctgctgcagttcgaccacccgtag

SEQ ID NO: 35033 - DNA, 210 bp, Zea mays
  Peptide Sequence Number=SeqID_76812
atggagacagatgaatgcgaggagacgactatgcatgatgtgaacaacatcgaggaagagatgcacaggaagcaagctcacgctgcccatgaggcgtacgaggaggacgacgagatgccgggcggagcccagagagtgcagtgcgcgcaacagattcagaatagaaagcgccctgtcgggcgctctatcggcatgagacaatctatctga

SEQ ID NO: 35034 - DNA, 978 bp, Zea mays
  Peptide Sequence Number=SeqID_76813
atgttgctcttccgccacgtggggaagacgtcgtcaattccgccgccggcgggcgggttgtcggccgccgttgtcgttgtcgcgcggcgggggaaggagtatcatgtcatagctgccgtcgagggacatgaactcaagactcccgagacggagcaccgtcccgggctggaaaagttgctggagactacccatctggagcttgacgggaagctgttcgtcaacacgcagcaggcccctacctggcgcaccaactatcggcgtttcgaccccggggggtccctggaccgacgaaaggatcactccaaattcaaaagaaagggtgaagatctcctctatgagcataccttgtctctgaccgaagcactatgtgggtgccaatttgttcttacacatctggacaacaggcagcttctcatcaaatcagaccctggtgaagttgttaaacctgaccaattcaaggcgattaacgatgaggggatgccaatttaccagaggcctttcatgaaggggaagctatacatccatttcacggtggagttccctgactcgctggcaccagagcagtgcaaggctctcgagacagtacttccaccaaggctttcatccaagctaacagacatggagacagatgaatgcgaggagacgactatgcatgatgtgaacaacatcgaggaagagatgcacaggaagcaagctcacgctgcccatgaggcgtacgaggaggacgacgagatgccgggcggagcccagagagtgcagtgcgcgcaacagattcagaaacaattggttcgaatctttgttggtggcaacaaagaaagaaactgcatccatatcattcccgtgaaacttctgctgcttctggtgctttatgggattctaccaacatcaacttccttaaatcaggtaccagcagtagtgttcaactgtgagacgaaccaggaagccttgctggaactgaaggttgtcctagcctcctag

SEQ ID NO: 35035 - DNA, 312 bp, Zea mays
  Peptide Sequence Number=SeqID_76814
atgggcatctacactctgattttttccccttttataaggaagcagattgagactgaaaagctgctagcccagttagttgagactgagatgaacatacatttgaaggaggacacttacaaaggaaagaagtttaatgcaatatgtcacttcttgggctaccaagctaggggagcactgccttcaaagtttgattgcgattatgcctacgcaagtccctcaccagctcatttagtaaagaatattgattgttgttggtttaacacgtgggttgttggtctcaggttttggggcatgtgtgctaccacatcatag

SEQ ID NO: 35036 - DNA, 1842 bp, Zea mays
  Peptide Sequence Number=SeqID_76815
atggattctgactacggcgtgcctcgcgagctctcggaggtgcagaagaagcgcacgctctaccagcccgagctgcccccctgcctccagggcaccactgtcagggtggagtatggtgatgctgcaattgcagctgacccggcaggtgctcatgtgatcagccatgcattccctcatacctatgggcagcctattgctcattttctcaggaagacagctgttgtccctgatgctaaggtcatatctgaacaccaggcggtcagggttggcattgtcttctgtggcagacaatccccaggaggccacaatgttgtttgggggctctatgaggctatcaaggcccacaaccaaaacagcaaactcattggtttccttgtcataaatgtggatggcattttgaaaatcttcgacccaactttcatgggtttgtttcgtcaaactagcagcatatgcaggcatttcttaggtggatcagatggtctgctagcacagagaaccttggagatcactgataaagttattgcttcatataaaaatcaaggtggatatgacatgcttggtcgaacaaaggatcagattaggacgacagagcaggtcaatggtgctatggctagttgccaagctttgaagttggatgctctggttatcattggaggtgtcacttccaacactgatgctgctcaacttgccgagacatttgctgaggcaaagtgtgcaacaaaggttgtaggtgttcctgtaactttaaatggggaccttaagaaccagtttgttgagacaaccgttggctttgacaccatatgcaaggtgaacgcacaacttatcagcaatgtatgcactgatgctctatctgctgagaagtattactactttattcgcctgatgggacgcaaggcttctcatgtggcattggaatgtgctcttcaatcacatccaaacatggttatcctaggagaggaggtggctgcttccaaacttacaatttttgatattacgaagcagatttgtgatgcagttcaggcaagggctgaaaaagacaagaaccatggggttattcttattcctgagggccttgtggagagtattcctgaactatatgctctgcttcaggaaatccatggcctccatggcaaaggtgtttctgttgagaatatctcttctcagctttcaccttgggcatctgcactctttgagtttttgcccccttttatcaggaagcagctactactacatcctgaatctgatgattcagctcaactttcccagattgagactgaaaagctgctagcccagttagttgagactgagatgaacagacgtttggttttggggcatgtgtgctaccacatcatagctgccggattgaacagttacatggctacggtgacaaatcttaagaatccagtgaacaagtggcgatgcggcgcgactcctatttcgtctatgatgactgtgaagcgatggtcgcgtggcccttcagccacccaaattggaaagcccgctgttcacatggctagcgttgacttgaaaggaaaagcatacgatgtgttgagacagaattcttccagctttttgttggaagatgtctacagaaacccaggcccgctccagtttgaaggaccaggtgccgattcaaagcctatttcattgtgcgttgaggatcaagactatatgggcagaataaaaaagttgcaggaatacttggagaaggtgaagaggattgtgaagcctgggtgctcgcaggatgttcttaaagcggcgctgagtgccatgtcttctgtgacggaaacactgaacatcatgacttcatcttctaccggccagactccactgagtcattag

SEQ ID NO: 35037 - DNA, 258 bp, Zea mays
  Peptide Sequence Number=SeqID_76816
atgtgggtagtcactcaatctgaactcgtacggtccaaccccagggttatgaaggctggggagcaccgggacgataaggaaggggaatgttttgtccggattggacatggcggtggcctgactccttccggtataaccgttaaggttaggacgtgcgaggaaagaaagagattcggcattcgggtctcacgacgaaaaaggagatcgggtaagagttacgactgttcccaaccttgcctgtggctgttggaccgctga

SEQ ID NO: 35038 - DNA, 357 bp, Zea mays
  Peptide Sequence Number=SeqID_76817
atgtgggtagtcactcaatctgaactcgtacggtccaaccccagggttatgaaggctggggagcaccgggacgataaggaaggggaatgttttgtccggattggacatggcggtggcctaactccttctggtataaccgttaaggttaggacgtgcgaggaaagaaagagattcggcattcgggtctcacgacgaaaaaggaggtcgcctcctgggactagtaattgtatcacatttgagtcccagaggattggggacgcttcattaagtcatcgccgacttaagccgattgctccattagttgggtatagtggtcactccaagttaagcaagcgcgagcatgttgcaccgtcttaa

SEQ ID NO: 35039 - DNA, 309 bp, Zea mays
  Peptide Sequence Number=SeqID_76818
atgaaggctggggagcaccgggacgataaggaaggggaatgttttgtccggattggacatggcggtggcctaactccttctggtataaccgttaaggttaggacgtgcgaggaaagaaagagattcggcattcgggtctcacgacgaaaaaggaggtcgcctcctgggactagtaattgtatcacatttgagtcccagaggattggggacgcttcattaagtcatcgccgacttaagccgattgctccattagttgggtatagtggtcactccaagttaagcaagcgcgagcatgttgcaccgtcttaa

SEQ ID NO: 35040 - DNA, 1092 bp, Zea mays
  Peptide Sequence Number=SeqID_76819
atggatcgcttcgaaggagcgcaggagcacaacagggtcagcaagaggtcgctcaagaactgggtggtaaatatctcagacgtacgcgcgacgaggacaaggcccagccccggcgtagagcaacgagggcgagatcgcgaggccgccgagcacggccagccaccttcagcatggctccgctcctccccagtgaagcacttcgcgcgcggcggcgctgatctcttttcggtaggcggtggcaggaggctaaagaagaagcagtgggtgatagaccatcttgtgcatgaggggtttgaaagcactgctcggcatgttgatataccctacctccctatgctggtacctccgaagaaatggaaaggggtgaatagaagagttcatgatgttgttgagactatctggagtcaaggtggaggcattgcagggctggtggacaaggcaaataatcagaggaccatgatgaaatgcagaaatggaagtaccagcataaagaaggcaaagaaaactaaccgtgagctgcatgctgagagatgtgacactgagctcaaactctcggttgctcgtaaaatgagagaggaggatggattttattaccctcacaatttagatttctgtgggcgtgcataccctatgcatcctcatttgagtcacctaggttcagatctttgtcggggtgttttagagtatgctgaagggcggccactaggaaagtctgggttgtgctggttgaagatacacttggctaacaaatatggtggtggcattgaaaagctttctcacgagggcaagctagcttttgtggagaaccaactgtttgatatatttgattcagcagcaaatcctgttgatgggaactactggtggacgaatgctgaggatccctttcagtgtttagctgcatgcatggacctttctgatgcacctttcagaactcttggtgtcatctccacctatgtctatgtggttctcgtgcagcttgccatggtggagtccatgccggtgtcacagttcgtggccgtctcagttgttgtggccactgggctcatcctaaacttcatcaattactttggctggctctctagaaccctctag

SEQ ID NO: 35041 - DNA, 942 bp, Zea mays
  Peptide Sequence Number=SeqID_76820
atgaggggtttgaaagcactgctcggcatgttgatataccctacctccctatgctggtacctccgaagaaatggaaaggtattagcatgttgcgaggcattagatatccttgggagtactaaatggagggtgaatagaagagttcatgatgttgttgagactatctggagtcaaggtggaggcattgcagggctggtggacaaggcaaataatcagaggaccatgatgaaatgcagaaatggaagtaccagcataaagaaggcaaagaaaactaaccgtgagctgcatgctgagagatgtgacactgagctcaaactctcggttgctcgtaaaatgagagaggaggatggattttattaccctcacaatttagatttctgtgggcgtgcataccctatgcatcctcatttgagtcacctaggttcagatctttgtcggggtgttttagagtatgctgaagggcggccactaggaaagtctgggttgtgctggttgaagatacacttggctaacaaatatggtggtggcattgaaaagctttctcacgagggcaagctagcttttgtggagaaccaactgtttgatatatttgattcagcagcaaatcctgttgatgggaactactggtggacgaatgctgaggatccctttcagtgtttagctgcatgcatggacctttctgatgcacctttcagaggaatgctcactgggctgctaggtaacctctcgcccctctcctatttcgccaataagagagagacgaaggctgtcattgtgcagactcttggtgtcatctccacctatgtctatgtggttctcgtgcagcttgccatggtggagtccatgccggtgtcacagttcgtggccgtctcagttgttgtggccactgggctcatcctaaacttcatcaattactttggctggctctctagaaccctctag

SEQ ID NO: 35042 - DNA, 616 bp, Zea mays
  Peptide Sequence Number=SeqID_76821
atgatggtcactcggtcagccatcaccaaacggaagggatggcgacgcaaggggcaggaagggcggttttctcttctctggctaaagtctctcgggttgcgaaaacctaagaaggaggcaggaagcggagcgaagaaccgtcaccagaccctctcccagggaccaggaaagggggataccccgaaaaggatccttccccgtgaaggaaccaggctccgagcgtccttactgatcagaggttcgaaggctggccccccgaagggtttcaatagccgcctcagatcgcgtgggccctacacccactactggtcagaggttcgaaggccggccccccgaagggttccacggccgcctcaggctactcgggctccgcgcccattactgatcaggggttcgaaggctggcccccgaagggttcacagccgcctcagacgccgagcgagggatgaccaggggtacgttcgatacataaccaaggctcgggctgcgctcccgagctcaccggaaacaccatgttcggcgcccatcgagggctcgggggctgctctcgcaaacccggctccggcgaaaccgttgacagcgtcaacataccagcccgagaacttgggccccgacc

SEQ ID NO: 35043 - DNA, 495 bp, Zea mays
  Peptide Sequence Number=SeqID_76822
atggaaaagggccatggatcgcgcggcgagatgatggtcacccggtcagccatcaccaaacggaagggatggcggcgcaaggggcaggaaggacggttttctcttctctggctaaagtctctcgggttgcgaaaacctaagaaggaggcaggaagcggagcgaagaaccatcaccagaccctctcccaggtatataaagaccaagggaccgggaaagggggataccccgaaaaagatccttccccgtggaggaaccaagctccgagcctccttactgatcagaggttcgaaggctggccccccgaagtgtttcaacagccgcctcagatcgcgtgggccctacacccactactggtcagaggttcgaaggccggccccccgaagggttccacggccgcctcaggctacccgggctccacgcccattactgatcaggggttcgaaggctggcccccgaagggttcacagccacctcagacgccgagcgagggatga

SEQ ID NO: 35044 - DNA, 234 bp, Zea mays
  Peptide Sequence Number=SeqID_76823
atggtcacccgggatggcgacctccggttcgatggtggggaagcgagccaggctgcggcctctacccctccctcggcctcaaggattttcgtcatccaggccaagatgaaggacgaggcgagtcggggggctgccaccgcatgggtcggctgcctttttcttcccccgcgcctgggggagaatggcatccctcagtcccacggggacttcctccagccatgctgggataggtag

SEQ ID NO: 35045 - DNA, 396 bp, Zea mays
  Peptide Sequence Number=SeqID_76824
atggtgtctccggtgagctgcaagcgggtaatccgagtggacgtccgtgccccgttcgttgggggtcggctaggggcccagaggcacgcccaaaagtacctgcggaagtcggagaagcgcgtccacctggcgcagttgcatgccgcctgcatggctgcccgcccctcccgcccgttggtctgggcaaaagtggggggtcgcttgggtgggccttggagcgtgttggagaagactcagcccgcggcgtttggggcgcaccctggttgctcccctccgccggtggccacccaagatggtgacctccagttcgacggtggggagagcgtgccaggctgcggcctctacccctccctcggcctcaaggattttcatcatccaggccaagatgaaggatga

SEQ ID NO: 35046 - DNA, 453 bp, Zea mays
  Peptide Sequence Number=SeqID_76825
atgacagaccatgctctcgacactcaacaacggcgatgccaacagcgggaaaccgttcttctacatgccaccattgaatggcagatgttcaatgtactatccactagagcattgggggcacgttcatggacattagagttaactgatgtctggtctggtatcaaggaagagatgtttttaattgtgtttacgctaatcaagttaatgaatttggtacatgtaataacatctaagccttttggaggctgccggcgtgaagcactggccaccgggtgctgcacgccaacagccaacagggggcaccgtgcaggtgggcagaagcagccagcgacaacagtagggcacagatcaaatccttcttttgaagacaataatgacaatgatgttgttccaaagcccgtggttgctgtggctgagcatttgcatgtgcctcgttgttccatgattgtgtag

SEQ ID NO: 35047 - DNA, 703 bp, Zea mays
  Peptide Sequence Number=SeqID_76826
atcaaatccttcttttgaagacaataatgacaatgatgttgttccaaagcccgtggttgctgtggctgagcatttgcatgtgccttggtctaaagaagtgacgcttgatgataaagacttgaggtatggtgctgaaaaggagcttggagcaaatggccacaaccttgaccggtgtgatagtgttcaagaggatgaggtgagcatggcctacatgttcgtccacatgttcgggattacgctgttcggcatggcctacatgttcgtccacgacggcctggtccaccgctgctttccggtcggccccatcgccaacgtgccctacttccgccgagtggctgccgctcacaagggagataatgattatcttgatatggtgtttactcaagtgtccttggaaggtgtggaagcaggacgcggaggcgaagggaaggacgcgctgttcgtcgagttgtggaaggcctgcgcggggccgctgtcctgcgtgccgccgctcgggcagaaggtctactacctcccgcagggccacatcgagcaggtgaggcagacagggagggagggtgccctggcgatgcccgtctctcgttattgctgggacgggttccctgtgcggcaagttgttagaggcgacgtgccagatggccgggctcttcggtcagcgatcacgattcgcgagctgccagtagacggagaaaggatctgttga

SEQ ID NO: 35048 - DNA, 507 bp, Zea mays
  Peptide Sequence Number=SeqID_76827
atggcggattttgatacccatgggtattttattgggtcatttgttatgtccatcgggtatggtgggcatggtgggtatgagtatgacttcatgtgcccactgggtatgttacccactgccatccctatgcaggatacaacgaggaatggaggatcactgtttggagaatgcaggaaggttaaggcactgtgcgagaaggccaaggagatattgatgcaggaaagcaacgttcagcctgtcaagagtccagtgacaatatgtggtgatatacatggacaattccacgatcttgtagagcttttccgaattggcgggaagtgtccagacaccaattacttatttatgggagattatgtagatcgtggctactattctgttgagactgtcactatgctagtagcactaaaagtgaggtatccacatcgaattacaatccttcgtggaaaccacgagagtcggcagatcacacaggtgtatggattctacgacgaatgcctacgaaagtga

SEQ ID NO: 35049 - DNA, 1023 bp, Zea mays
  Peptide Sequence Number=SeqID_76828
atggcggattttgatacccatgggtattttattgggtcatttgttatgtccatcgggtatggtgggcatggtgggtatgagtatgacttcatgtgcccactgggtatgttacccactgccatccctatgcaggatacaacgaggaatggaggatcactgtttggagaatgcaggaaggttaaggcactgtgcgagaaggccaaggagatattgatggaggaaagcaacgttcagcctgtcaagagtccagtgacaatatgtggtgatatacatggacaattccacgatcttgtagagcttttccgaattggcgggaagtgtccagacaccaattacttatttatgggagattatgtagatcgtggctactattctgttgagactgtcactatgctagtagcactaaaagtgaggtatccacatcgaattacaatccttcgtggaaaccacgagagtcggcagatcacacaggtgtatggattctacgacgaatgcctacgaaagtatggcaatgcaaatgtatggaagacatttacggatctttttgattattttcctctgacagctctggtggaatctgagattttctgccttcatggtggtctatctccatcaattgaaaatcttgatagtgtgcgcagcttagatcgagtccaagaggttccccatgagggacctatgtgcgatctcttatggtcagatccagacgaccgatgtggttggggcatctcccctcgcggtgctggctacactttcgggcaggacatatcagagcagtttaatcacacaaacaatctcaaactcgtagctcgggctcatcaattagttatggagggatataactgggctcatgagcaaaaggttgtcaccatattcagtgctccaaattactgctatcgatgcggcaatatggcatccattttggaagttgacgactgcaacagccacacattcatccagtttttacagagtcgtggaactggccaaaaagaccggagtaccatttgcacctgtgtagcgtaa

SEQ ID NO: 35050 - DNA, 303 bp, Zea mays
  Peptide Sequence Number=SeqID_76829
atgaaggccaagtcacaccagcaaccaatcatcctaagaagtacctgcaaaaattatgccacaagcaaggctgagtatactaatactcagctagacttacccggttacaatggatcaagcagtcttattggctgcgagaagcagacgattcgaatcgagtttttatccttgcaagtgaccgcacttgtacccaccataaccggaatgggagaccacgtctcaggtcgcgtgaggggatatgtccactgccaggttcactcaggtatccgcacgttaatccttattccaattttcatctcgtag

SEQ ID NO: 35051 - DNA, 219 bp, Zea mays
  Peptide Sequence Number=SeqID_76830
atggatactagtatgctaggtcgagtagctgctttgctaattagggatctcggtagaagtcgagtgatttttctagcactcgcgcgaggtccatggggacgcgtggtctacgagatgaaaattggaataaggattaacgtgcggatacctgtgtcaaggtacttcttaggtcgattggttgatggtgtgacttggccttcatccctgccaccgggatag

SEQ ID NO: 35052 - DNA, 666 bp, Zea mays
  Peptide Sequence Number=SeqID_76831
atgggggatgcccgcagtcctttcgccttatcgttggggggaacgcaactccgtgggagtcggtacctttcagccatcgttcggcttcaaggattttcatcatgcagcccggctgcacccctccgccggcggtcacccaagacggtgaccactagcccctggatggggagaggcaagccgggctgtgatcttggtcccgccctcagcttcaaggatgttcatcatccttgctggggcggagagcgaggcgggccggggctctacctcccgcgcggtccggttggccgcctcttcttccagcttcaggtggtggcaaccatcctccagctctgcggaggaggcgtcctccagccatgccggggaaggcgaactgttgctgcccagctaggatgcaacattccgccctcttcctcgctttcgtggcgaggacgggaacgaggacctgccggtgcgctttggagcggctcgctctttggctttgatggctggttcgcgtcccttgagtgggaacgcgaacgagagccttccggcggccgcgtccgtcctgggaccatggctgctgctgcagaggtcgctggcgagtcacccggaactcgtcgccccgcaggctccccggtgtggaggttgttcatacccgcggggacggaaccggagttccgtttgtaa

SEQ ID NO: 35053 - DNA, 392 bp, Zea mays
  Peptide Sequence Number=SeqID_76832
atgcagcccggctgcacccctccgccagcggtcacccaagatggtgacctccggcttgatggcagctacaccgtgcctggctctcggacgcgagtggcttcggagccgctcgcggcgccggcgtctgccacggcagctggaagaggttcttccgccggcgggatagccagggccggccacggaccgacctccaactctatggccttctgcccgtccttgcctcacgagtttgggcatgggcgggggcctcttggcagcagcatccgccctgaggtcagtgctgccgctgttcggccccccggagcagaagtcgtcgtcgtcgccgctgctggagcgggtgacgacgcgccgttcgtcggtcttctgttgctccgcaggccctcccccatgga

SEQ ID NO: 35054 - DNA, 396 bp, Zea mays
  Peptide Sequence Number=SeqID_76833
atgcagcccggctgcacccctccgccagcggtcacccaagatggtgacctccggcttgatggcagctacaccgtgcctggctctcggacgcgagtggcttcggagccgctcgcggcgccggcgtctgccacggcagctggaagaggttcttccgccggcgggatagccagggccggccacggaccgacctccaactctatggccttctgcccgtccttgcctcacgagtttgggcatgggcgggggcctcttggcagcagcatccgccctgaggtcagtgctgccgctgttcggccccccggagcagaagtcgtcgtcgtcgccgctgctggagcgggtgacgacgcgccgttcgtcggtcttctgttgctccgcaggccctcccccatggagtga

SEQ ID NO: 35055 - DNA, 570 bp, Zea mays
  Peptide Sequence Number=SeqID_76834
atgagttatttgttttctcatgtttggacgaagatcgaggagcatgtgagcaccaagacgacggtccagatacggagccatgcccaaaagtacttcctcaaggtccagaagctcgggctggttgctgggccgccgccgatgtacccgaggcgccacttcgccacgcagcagcagcagagctcagtggccggtagcagtgtggccgccataccagatctcgcggcgctaatcgagggcatgggccatgccgtcaccgacgataaggtgtcatgcatgatggaggaggtcgacgccgacgacgaaggctgcatcaacctgcccgtgttcgccgcgctcatggagtttgcgtccgctgccgccgccgtcgaggatgacgtggaccacgccttcatggtcttctacaccgacgacaacgacctcatcacgctcgccgagctcgcgtgtgtcctgcgtagccttgggggagcctgccaccatcgcctagatcttacgcccagcaccactcctcttgttgtgcttggtgtgcgattctttaatgatgatgcattcttgcctgttcttggtgggtaa

SEQ ID NO: 35056 - DNA, 873 bp, Zea mays
  Peptide Sequence Number=SeqID_76835
atgcaatccgcatcaaggcgctccccctcggcaatctcgcatcgcggtgccccctccatcctcgcgtgtgccccgctctccttcacgaagccccgctccctgcagtccccttccatcggcgacaccatcctcgccggcaaatcgcgcctcgcgatgcaatcccccatggatccgatcggacccgttgccgtcccggtgatccctgaagcgtcggccgcctgcctccccacccccacctgccacctcgtgttgccagcagagatgtcgcgcgaccccccaccccgcaaggaccaccacacaattggtgtctcttgcttcgcctacaaggctttgagaatcgaggagcatgtgagcaccaagacgacggtccagatacggagccatgcccaaaagtacttcctcaaggtccagaagctcgggctggttgctgggccgccgccgatgtacccgaggcgccacttcgccacgcagcagcagcagagctcagtggccggtagcagtgtggccgccataccagatctcgcggcgctaatcgagggcatgggccatgccgtcaccgacgataaggtgtcatgcatgatggaggaggtcgacgccgacgacgaaggctgcatcaacctgcccgtgttcgccgcgctcatggagtttgcgtccgctgccgccgccgtcgaggatgacgtggaccacgccttcatggtcttctacaccgacgacaacgacctcatcacgctcgccgagctcgcgtgtgtcctgcgtagccttgggggagcctgccaccatcgcctagatcttacgcccagcaccactcctcttgttgtgcttggtgtgcgattctttaatgatgatgcattcttgcctgttcttggtgggtaa

SEQ ID NO: 35057 - DNA, 369 bp, Zea mays
  Peptide Sequence Number=SeqID_76836
atgacaaaaaaagaaaggtatatcttcatgtcggtgagcgggtacagggatgacaaaaaaaagaaagcgaaaacagtaggggaagccctaaacaaactagttcttgaggcatttggcaatgcaaaaaactatcaggaacaattcaagtcgttttggaatttttttgttgagattcagtttgatgcaaatgggaagatatcacgagctgctataagggcctatcttgttgaaagatcccgtgtctgtcaaatatctgatccagaaagaaactaccactgcttttgcatgctctgttctgcaccatcagaactagataccatgattgggcttggggtttcccccgccaccctattcatgtgcaacatctaa

SEQ ID NO: 35058 - DNA, 771 bp, Zea mays
  Peptide Sequence Number=SeqID_76837
cgagaagctcaaagaaggggaagacatctacatctatcagtttccgctgtggcaattaatctctggcgcgctggcagagcccccaagaattcatctctggcgtggccgctggtgctacccatcttcaacggcgcggcctacatctacgaggcgcacgtccggcactacttcaagatcggcaactacgtgagccccagctacagcgagcaccaccgccgggtgctgcagatgacgagcctcgacgtgtgcagttttagttgtgttaatttggagctgctgcaggagcacgttgtcacggcgctttcagtggagagctactacaggtttaattatgccaaagatcaaataaaaacatgtgttgagtttccagagtgttttgtatcgaaaacagtaggggaagccctaaacaaaccagttcttgggcatttggcaatgcaaaaactatcaggaacaattcaagtcgttttggaattttttgttgagattcagtttgatgcaaatgggaagatatcaggagctgctataagggcctatcttgttgaaagatcccgtgtctgtcaaatatctgatccagaaagaaactaccactgcttttgcatgctctgttctgcaccatcagaatttgatgcaaatgggaagatatcaggagctgctataagggcctatcttgttgaaagatcctgtgtctgtcaaatatctgatccagaaagaacctaccactgcttttgcatgctctgttctgcaccatcagaaacctcaatggtggcctaa

SEQ ID NO: 35059 - DNA, 2193 bp, Zea mays
  Peptide Sequence Number=SeqID_76838
atgaaagaaataggcttgaaggtggataaattgatatttttaaaaatggagcaagctcttacatggaaacaagaatcaaagaaacaaaaatcaagttgtgaaggcaaagcctggccccgtgaaaccgccccatcagccgccaacaacgacggttctgccgctgccaaatcctccacagacgcgctcgcaggcctcagcacctgcccaccccgcttgaacgcgcctacatcacggcgaccgccgccgccgaggccggcaaaacctaatcccaggagcttcccaccccgcccacgccttcgacagctcacgctcgcgctgctccacagcctgacgccggactacgacgacgaggaccttgcgccatacgatgtaaagatcttcagcctgagattattcagagacaaatgttacattgagatttttcctgttgttgagaaatctataatagtgcgatctgatgacgaagaacgtaagagggatgagaggaacagaaaacaaagagaatactatgcacgaagaaaggttgatgaaaccacagaagaaagagatgcaagaaataaaatgatgcgtgattatcgcgcgaggaagaaggctgagacaggtccgtccgatgaacatgagcgtcatcgggaggagaggaatagaaaacaacgagaataccgtgcaagaagaaaggctgaagaaaccaacgaagaaagggaggcgaggaataaaagaatgtgtgattatcgagcgatgaagaaggctgacacagtactatactcgcctagacagacacaggcttatgctactggatcttcgatcgtaatacaaaccaacacacagatggcagagccggtaacgcctgttgttgcgaggggctctttgcaccaactgccaacatcagtggaaccattttcaaccaactcacaggtgacagagccggtaacgcctgttgttgcgaggggctctttgcaccaactgccaatatcagtggaaccattttcaaccatttctcaaccttcaacctataatcaatccgcaattactgcatctaccatgggcaatctcataatgaaccgagcgaggtacatcaatatggatgatgcagatagagaaattctactgcataagcgacgtgaatacaaaaggttgagacaatgtgtacaagacgacacgataactgagcatccaataacaccacatgatttcaatattgctcaacataatgaatatactagaagtcgggaatttcatggagaagatgatgcatttgaatcatatcgtctgcttgggtactccagtcataccgaagatccatatgactatgtctaccataagttgccagatagacaccatgttctgcgaaaaatacctgattgttgttattgcggagccatgaaatttgaatttgagccacacggaatgtgttgcagaaagggaaagattaaagtgcacatacctgatgttcctactgagttgaaaaggttgttcaccagtcagggagatgacgatgcaaaatattttagaaaaaacatacggacacggagatcaccagaccttgatattaatatcattaaaaatatcttgacaatattagagggaaatccatatgtacaaactttcaatagacttggatccattccaaatctagatgactatgttattgaactcaacactaatgtaacgcctgaccaacgaaggtacaatgcgcccactgcctcacaagttgctgctatttggttcgaaggaaatgacccacaaagaagttttgatagaagtgtgatcatatatgctacaggagatcgccctacatgtatcaaagcataccatggttgttacgacccattggcatatccattattttttcctcggggccaaactggctggaatcggtttatgccatacaatgaaacccctacagtaaatgctacattcaatgctcctgaccacaatgatactcgatctgttaataatgaacatacaactcattattatttggatgaagacaaccaacaagatgactacgacatttcgaatggaggagtgattcaatctgcaaggtttgtgacagcaagggagtattactgtttcttaatacagctagagagggggtttttaatatcttgttatttggagggtgagtggccgcaatgggtcgttgacatgtatatcaagattgagtctatgaggctgatgatatcgatcgcctga

SEQ ID NO: 35060 - DNA, 3252 bp, Zea mays
  Peptide Sequence Number=SeqID_76839
atgaaagaaataggcttgaaggtggataaattgatatttttaaaaatggagcaagctcttacatggaaacaagaatcaaagaaacaaaaatcaagttgtgaaggcaaagcctggccccgtgaaaccgccccatcagccgccaacaacgacggttctgccgctgccaaatcctccacagacgcgctcgcaggcctcagcacctgcccaccccgcttgaacgcgcctacatcacggcgaccgccgccgccgaggccggcaaaacctaatcccaggagcttcccaccccgcccacgccttcgacagctcacgctcgcgctgctccacagcctgacgccggactacgacgacgaggaccttgcgccatacgatgtaaagatcttcagcctgagattattcagagacaaatgttacattgagatttttcctgttgttgagaaatctataatagtgcgatctgatgacgaagaacgtaagagggatgagaggaacagaaaacaaagagaatactatgcacgaagaaaggttgatgaaaccacagaagaaagagatgcaagaaataaaatgatgcgtgattatcgcgcgaggaagaaggctgagacaggtccgtccgatgaacatgagcgtcatcgggaggagaggaatagaaaacaacgagaataccgtgcaagaagaaaggctgaagaaaccaacgaagaaagggaggcgaggaataaaagaatgtgtgattatcgagcgatgaagaaggctgacacagtactatactcgcctagacagacacaggcttatgctactggatcttcgatcgtaatacaaaccaacacacagatggcagagccggtaacgcctgttgttgcgaggggctctttgcaccaactgccaacatcagtggaaccattttcaaccaactcacaggtgacagagccggtaacgcctgttgttgcgaggggctctttgcaccaactgccaatatcagtggaaccattttcaaccatttctcaaccttcaacctataatcaatccgcaattactgcatctaccatgggcaatctcataatgaaccgagcgaggtacatcaatatggatgatgcagatagagaaattctactgcataagcgacgtgaatacaaaaggttgagacaatgtgtacaagacgacacgataactgagcatccaataacaccacatgatttcaatattgctcaacataatgaatatactagaagtcgggaatttcatggagaagatgatgcatttgaatcatatcgtctgcttgggtactccagtcataccgaagatccatatgactatgtctaccataagttgccagatagacaccatgttctgcgaaaaatacctgattgttgttattgcggagccatgaaatttgaatttgagccacacggaatgtgttgcagaaagggaaagattaaagtgcacatacctgatgttcctactgagttgaaaaggttgttcaccagtcagggagatgacgatgcaaaatattttagaaaaaacatacggacacggagatcaccagaccttgatattaatatcattaaaaatatcttgacaatattagagggaaatccatatgtacaaactttcaatagacttggatccattccaaatctagatgactatgttattgaactcaacactaatgtaacgcctgaccaacgaaggtacaatgcgcccactgcctcacaagttgctgctatttggttcgaaggaaatgacccacaaagaagttttgatagaagtgtgatcatatatgctacaggagatcgccctacatgtatcaaagcataccatggttgttacgacccattggcatatccattattttttcctcggggccaaactggctggaatcggtttatgccatacaatgaaacccctacagtaaatgctacattcaatgctcctgaccacaatgatactcgatctgttaataatgaacatacaactcattattatttggatgaagacaaccaacaagatgactacgacatttcgaatggaggagtgattcaatctgcaaggtttgtgacagcaagggagtattactgtttcttaatacaagctagagaggggattgagtctatgaggcttgactggtactctaaccctgttaaccaggaaattatacgggctgaactataccagggtcttgtggatgtaatttctgccggggagaatagagcttcagaggttggcaagagaattgttttgcctcgtacattccaagggggtgatcgtgatatgcagcaaagatttcttaatgcaatggctattgtccaacgtcttgggaaaccagattacttcatcacaatgacttgcaatccatactgggaggagattacaaacaatcttctacctggccagacaccacaagatagaccagagctggttacaatggtatacagggccaaattacgagacatgaaagatctattgatcaaaaaagcatattttggccaagttgcgggctatgtgcatgttaccgagtttcagaaaaggggattgccacatgaacatattctattgataatgaacctacacaataagttgacaagcccagatgcatatgacaaagtgatttgtgcagagataccagagaaggataaataccatgttttgcataatctggtcatcaagcatatgctacatggaccttgtggagttttaaataaaaagtgtccttgtatggtcaatgaagagtgtcgttttcgctatcctcgacaattctgtgctgcaactcaacaaggaaaggattcataccctttgtataggaggagagatgatgggcgtcgtgtaaaggtaagaggatcttgctcaagcatcaaagccattaagtacatgtgcaaatatgtttacaaaggccacgatcgtgcatcattctcagttgaccctgctcataaggaagatggagtaatcaatgagattcggcagtacagggatgccagatacatatccccacctgaagttgtacataggattcttggttttccattgtttggtgtcaatccatctgttttgcaactccaatgccatttaccaggtatgcagtctgttattattgacgagacaactaaactacaagacattgtcaatgagccaacttcttctatgacaacactcacagagtacttcactaagaatcgtgctgatagttttgcaaggacattattgtataaagattttccagaatactacaggtggattcatggtagcaagcgctggcagagatga

SEQ ID NO: 35061 - DNA, 582 bp, Zea mays
  Peptide Sequence Number=SeqID_76840
atgagcgcacctgaccttggtcctggatctgacgatgagcgcaccatgcagttccccaggacggtgcccgtggtggggaagttgagggaggtcgtcgacgctgccaaggccgcggccgcgacgggggcgacaaggcacgcacgctgggcgtggggatggagcgtggagcaagaggtggagggaggagggtgcgggaatggggatgatggtgttggacgagtggcggagatgacagaaggagttgtcacggatagaggagcgtgtggggatgaggacggctctcatcgcagacaagctcgccggctgcatcacaggccgcacgggggcgtcggtggcggtattctcgtttggcgagttgcgggcgggcgatgcgaggagggtgaggcgatgcgaggaggacgacatcgtgggtggccaaggaggactgaggcggtgtcagttgcagctgcgagggaggcgggaaggggaggggagggcggtcgagcaaatgaacggtgcagcgggcacgggggtgatgctcgacgaacgaacggcgtagattggctaaaggcagaacgcaaggaggcagcctaccccttatag

SEQ ID NO: 35062 - DNA, 1068 bp, Zea mays
  Peptide Sequence Number=SeqID_76841
atgtcgtcctcctcgcatcgcctcaccctcctcgcatcgcccgcccgcaactcgccaaacgagaataccgccaccgacgcccccgtgcggcctgtgatgcagccggcgagcttgtctgcgatgagagccgtcctcatccccacacgctcctctatccgtgacaactccttctgtcatctccgccactcgtccaacaccatcatccccattcccgcaccctcctccctccacctcttgctccacgctccatccccacgcccagcgtgcgtgccttgtcgcccccgtcgcggccgcggccttggcagcgtcgacgacctccctcaacttccccaccacgggcaccgtcctggggaactgcatggtgcgctcatcgtcagatccaggaccaaggtcaggtgcgctcatcgtcagatccaggaccaactgaccaaggtcagctgcaacgtattcaaggcatccgagggcaggctttgcatcatcagtgtcgtgaacggtgtcgaacaacttttaaacggaattcagaagtcaggtcaggtgcagtggggcttccaagcgccgggaacgcgtgaggctggtaaccggttgtatgtgggggcttccaaggcgctggcgatgcgtgaggttgtatgtgggggcttccaaggcgcttgctccagactttgtggtgatagaaataactcaagatcagtaactaagtatgaccccaaagagttaaatctatttcacgttgggcatgaggatggaacaaatggcacatttatgatcggtaatgagagctttcctgcatctctcttggatctacctgctgtggtggagtcatacaaaacatatgatgattctgtactaattaaaactgctgatgttggtcagcagctggggaaaaatggtggattctttcatggtgttcgcagtctaagttttggggttgaccttcaagaaataaggctgatgggtgtactgcagagaattgcaatagcttatctgttgaccgccctccgtgagatttggatcagaggagatgtagatgtagactatggatacgatttgtttaagcgataccgctactag

SEQ ID NO: 35063 - DNA, 471 bp, Zea mays
  Peptide Sequence Number=SeqID_76842
atggggctggagccaccgtcgggcggccatgttagccatggttactacacgcccagtggcaagaaggtgtcaggtgcctctattttcttcgagagcatgtcgtacaaggtgaacccacagactgggtatattgattacgacaagcttgaagaaagagcaatggatttccaccctaaaattctcatctgtggtgggagctcttaccccagagagtgggactttgcacggatgagattgattgctgataagtgtggtgcggtgcttctttgcgacatggcacatatcagtgggcttgtcgcagcaaaggaaagactaatgattgcacccgcacaacctggctttgttgaaacacccattttttgcgtatctcgagagccaggcccagagggaatctttgcatctgcagagccagactgtagaggctggccagacaaccaaacacgtgaaggttgcatccgtgagcctggctaa

SEQ ID NO: 35064 - DNA, 709 bp, Zea mays
  Peptide Sequence Number=SeqID_76843
ccacatcccgctgtccgagctcctctccggcgcccccgacggccccgtccccgccaagttcgtcgcctaccaggtgcgcaagatctcctccggcaagccccagggagtcctcaacctctcgtacaagctcggcgaggtcgccaacggctacgcccccgccccgccgcccagtccgcctacgcccagcctccaccgaccgccgcgtacccgcctccttcaggcaaggcaaggccgacgcgtacgcccccctgccaccgcatacccgccggcagccaaggccgacgcgtacccacctccatacggcgcctacccgcccgccggcggcaaggccgacgctgcttacccgccctcatccggctacccacccacggcaggcaagccaggcaaggggggcgaaccggtgacggcttacccttcggccggtcccagcacggcggcgccctacgctgctcgtctaccgcagtacggcggctatggttacccgccgcagcaggccgcgggctacggctacccgtccccgccgccgcagcaggtcgggtacgggtacggctacccgccgccgcaggccgccggctacgggtaccggcctgctcggaggcgccgtcgggggcctcctgatcgacgacatgatctcggactcgtcagcgtacgacgccgggaaaaaccagagtcaaacaacaagcacaatctgcagcaacaatggctgtga

SEQ ID NO: 35065 - DNA, 471 bp, Zea mays
  Peptide Sequence Number=SeqID_76844
atgatgagcggtgtggtgccttcctccctccatgtcctccttcgcgccgagcgcgccctccgcgaccgcgacgtcggcgaggtccacatcccgctgtccgagctcctctccggcgcccccgacggccccgtccccgccaagttcgtcgcctaccaggtgcgcaagatctcctccggcaagccccagggagtcctcaacctctcgtacaagctcggcgaggtcgccaacggctacgcccccgccccgccgcccagtccgcctacgcccagcctccaccgaccgccgcccaaggccgacgcgtacccacctccatacggcgcctacccgcccgccggcggcaaggccgacgctgcttacccgccctcatccggctacccacccgcggcaggcaagccaggcaaggggggcgaaccggtgacggcttacccttcggccggtcccagcacggcggcgccctacgctaggaagtag

SEQ ID NO: 35066 - DNA, 999 bp, Zea mays
  Peptide Sequence Number=SeqID_76845
atgtacgacaagctccggcgcagctgccgcttggacgcggtgcagagcggctgctccgcgttatccatcgtcaagcagggggacctcatggtcgtcgccaacgggtactaccttgctgatgagcccggggtgcacttcgttttacagcccagccaagagtcatcagtactcggtatgtcgcgcgcgttcgacgattactatatcgaggactatggcgtcatcttggcgccagaggtgacgcaggggaggaccgacaaaaatgaccagttcgtcatcctcgccaccgttggggcgtccacacatcgcgttctgccatcgctccccgccccgcaatccccgcccgcaatccgctggaaggtgctcgccgatggaaggtcccgccccgcagcggagaatggaaggtcctcacgcccgcacgcccgctggaaggtccgggaagaagcccaaaccgacacccaagcaggccaaaccggccaggtggggatgaagaagaagggggagaccgagagggtggagctcgttgtggacgacacgaccagggcggccgcgtcggccgcgacggaccgcccgcgcgaggtgttgtccccgaagcgccggctcccgctgcggaaggtgtcgggtgactacggcccaccggtgctgggcgcggtccgcgaccggttcgagtacttctacgggccgggtggctgcgacggcttcttcgcctcccgcgtgcgcgcgcacggctccaccgttgtgcggctcaacatgccgccgggccccttcgtggcgcgcgacccgcgcatggtggcgctcctggacgccgcctccttcccggtgctcttcgacacctcgttcgtcaaggaggagcgcgtctccgaccggaagcgctccgccatggctgaggagatccaccagaaccaggatgaggaggaggaggttgtggcggtgtcttccgggaagaagaccaaactggaattgcttagggctctatggaatgcctcctttcgtgatacatag

SEQ ID NO: 35067 - DNA, 432 bp, Zea mays
  Peptide Sequence Number=SeqID_76846
atggaaggaaagcctgcaagatcggtcgatttggctgagcatgagaaagaagttataaaacatctttatctgctaactatgaaacctgtcatttctgttgctaatgtaatagaatctgatcttgctgaacctgatatcaatcctcgtgtcaaagaggtggctaaagcagcatcatatttgcagtatggcgtgactgcgccacaagcagctggagttattcatagcgactttcagaaaggatttattagagttgaaactgtatcctacgatgattttgttgcagctggttttcttggagtagcaagggagaaaaggactggccaaaaccttgatgtggttgcttgttattctatgggttttggtttggttttacaagtgttattagcattataccttgtgctcgtgctcatgtacaaatttctcaaattgtaa

SEQ ID NO: 35068 - DNA, 900 bp, Zea mays
  Peptide Sequence Number=SeqID_76847
atggcgacggagaccggcgcgaaccggctgctgtcctactcgtccagcgggccctgggagctgtggcccgacgtctccaactacgtcctgcaggtgctctcgcggggacggcgggcccgcggcgacggtcacgaccacgacccggcgctgctcatgtacttcctcgactccggcggcgggtcgtacaccgaggtggtgtccagcgctcaggtcaggtggttccacacccagtctcagttcctgaatccagatggaaggatcctcgagctcatcttctggcacataccgagcacggcgtacgccaagatagagaagaggttagataagcttaacaacagcaaaactaaagatacacaagtaaaagtgaagaatttgatcttgctgaacctgatatcaatcctcgtgtcaaagaggtggctaaagcagcatcagacttgtagtctggcttccttcttcctcacaattgtttctattgtaatatttgaagaggtttttgtaatcattataactgcatgtgattctacatcatatatgatgcttgattgcacaaatgaaattccaaatgtgaattttgtccacgcgcccacggattacaatgagattcgctatgatggtatacttgtcaattctattgaggcaagaccagtattctcaagaatactttctcaaagtcagatgtttgatttggaccatgtgtctgtggcttcctacagtcttctgcatgagcctttcaaatccatacctatcatttggactatgcatgaatattctcctgtacatcatgctaaagaatataatgccccctcagaagcatttcaggttgatagctttattgctaaaagttaccatgaagatgtgaagattagcctgcatgtaaagatcagagtaaaaggactgtga

SEQ ID NO: 35069 - DNA, 1215 bp, Zea mays
  Peptide Sequence Number=SeqID_76848
atggcgcgtgtgacggaacctcccaagtcattaggcccacctacagttgtccttgtccaacagacatcagacaaccctgtagatgttcctgaatcacttgacaacaagtcttacctgactaaagaaaagactctcaagggtgtgctggttatcagggagtcaagacggagacactacaccgagactcctttctcgtgcaagtcacccgcccggtctcagcttaatcatttcaacccaaaaacttggtacctggcagaggtcaccgacaatttacatagggacccctcgaattctattcctttacacgacaaagtccttgacggcgcttcgcacgggaagctcaactccggcgagctagactggccggagggggccaagaccggcgctagtcttcggttcacccctgattctaccccagagaagtatttcccctcactcaatttccgaattggagctctaccgtaccctgtccacgaggacagtgcggagaatctaaggaacaacgtgttcccggcgacccgtggtagtctagttcaattggatgatttggggtgttacaacgcgacgcgccctcccccaccccgagcccctctccctccctcgcgctcggccctcggcgtggcgagcgcgacgcctcggcgtggcgaacgcgacgcctcggcgtggcctgccctgctcgcgtgcccccagcgcggtccgccaagcccacggcatggcgcgacctggctcctcggggcggccgtggcgctcgcgcccccgccccggcacggcgaccctccccacgcggtggccccctgctgccctggcacggcacggccccgctgcctacgcgcggcgtgcccaacgcagcctgcccgcggcgtgcgcgtggctcgtttgttgcgtgcgcagcgcgaccagcttgcggtgtcccagaacccggtcaatgcggccttgcgcgctagagcttgcgcgatgtatgcggctagctcgactggcgttgttcttgttatgaatattattatcgacttgactgataccctgctgggtcaccttggtagtgatcaatggagagtcatgatctccgggcagaaagggaatcacgacttgtgggtaaaagatgttcggattacaggtggcgatgagaatggtggttttggtattgactatggtaatggagaagatgaaaccgtggaggaagacttccaggagttccaagattacgacgagttttag

SEQ ID NO: 35070 - DNA, 219 bp, Zea mays
  Peptide Sequence Number=SeqID_76849
atgaagctcaacgcagatgcatgccgtacctgcctcctggacacggtggcggaacagaaggaggcggaggcggcgatattccaagggtttgggttgggggaccgcgagcccgaatctggtggtcatgagaatgatagttttggtattgactatggtaatggagaagatgaagccgtggaaggagacttccaggagttccaagattatgacgagttctag

SEQ ID NO: 35071 - DNA, 258 bp, Zea mays
  Peptide Sequence Number=SeqID_76850
atgacgctgcgactgcggggggatttcaacccgtcggctcctaccttcggcctctactccagtctcatccgtttcaccagcaaatttgacagcatagtgtactccaacaaatctcactattttgagtgccctccattccatgaaagggaggaacttgtaaggtgcgaagccaggaaacagcaaagcgcgttctcgttggttctcctaatagcgtttgggctccttggcattgttctaggttacattgttaagaaatga

SEQ ID NO: 35072 - DNA, 529 bp, Zea mays
  Peptide Sequence Number=SeqID_76851
tcgcaacgggggcaccacacacgatgagactggagtagaggccgaagataggagccgacgggttgaaatccccccgcagtcgcagcgtcgtgatggtgcgaatgttgcggctggagtagagaccgttgtgtgctccaagaagacaatagcccctagatgccgaggtagccgaagtcgaggtggtcgcggtcggaagacgcgcaacaaaagtctgatcttcgggaggggtcgacgttcgagcgtcaacgatcgacagggcgacacagcaaaagggcactggcaggccgaccttcctgcttcttcgatcgaccagacgtcaaggagccctgccagggaggccgacagcagcgccacgcggctgcgctggtcacgcgacggaatcaacgaaggcgaggaagggggagggcgacggggcggttctaacccaggtaaggggcctgcgccggacctgtcaagggacgatgacggcgccggcgccgggagaagcttgaagggtgaggcgctgctgggcatcaacgcgagcagttag

SEQ ID NO: 35073 - DNA, 264 bp, Zea mays
  Peptide Sequence Number=SeqID_76852
atggaggtggtgggtgcgctggaaaagggggggtgggcggcggtagtgcgctgcaaagggggcatgggcggcggtgctagtgcgcatggaggcgggcacgcgtgcggggggcacagggctctagccaaagtgaagaaaaacttcactacccaatgcacgcagaggactgggcatactaacttcagaccaggcaattctcttctggcaaggattgcacacaacttcaatctgagacatctcctggatgggtcaacagggagctga

SEQ ID NO: 35074 - DNA, 612 bp, Zea mays
  Peptide Sequence Number=SeqID_76853
atgacgatgaataggaactatgaacgaacgatgaacgatcgaatgattgaacgaacgaacgatcggaatttcggcagcataacggattctatcgatgagtattaccatcatacagaggaggaaaccaaagactatgaaccatgtgcaacagtcttcaacccaagaatcaccaagcattgtgatcttaggggcgagggagtggaaaatggagttgcttgcgatttggcagaggggatttatctggagtgtgctttgagcgagttgggagttgagggagctggtggggggtttataggcgagcgggggtgctggggggtgtggagtggtagtgatggagcaggtgacacgaggcagcaggtgcgacaaggggaagggggggctattgccggcgacgatggcggtagtgggtgcgctgcaaagggggggtgggcggcggtagtgcgctgcaaagggggcgtgggcggcggtgctagtgcgcatggaggcgggcacgcgtgcgggggcacggctgtattcacattccttcaagccgaaggtttgtccttcatgaccttcgtccgaaatccattatatccgaagggaaataatgatccaaaggacgaagggttttga

SEQ ID NO: 35075 - DNA, 2388 bp, Zea mays
  Peptide Sequence Number=SeqID_76854
atgccctctgccctcggcagacggcagctcatctcgagtgctcccttctcgcccaccacggccgtgctcgcctctggtccgtcggttggaccttcaaggttgcactcttattcgcctgctctggaatctgggatggcacatcggtggccggtgcagtgggggcactggaccactgttttaaagcggtccaacgccttgtatcgccataccactttaaaaccatgcactggactctaccgacgtcatggattggacctagtcactagggctctaggaagcacactgcctcgaatgaggaggttatttctggcgtgctgccgctacctgcagttcacatctgtccctgatgctatcagagctacttcacctgttaacaatgtctacgggtcatggaggaggtatatcttcacaaacgctgataaggttctaccatgggaggcgccatcccgtgaaattctgttgaggaagataaattgtgctatgaaggatgggaatgttgaagaggcgctgcaatctttgagcaattacaagaagcttcacggtcttcctgagccgcgggtactgaatagtataattgtgtcgctgtcctacatgtctagtaggaggtggcttcagagggcatttgacatggttctctcagtttatcaaattaatagaaatcttctcaattgtggctcactgatgaggctagcattggcgctcgcaagagatcagatgcctatcccggcctccacagtcctgaggataatactagagagtagaaagcttcccgatgttgatatgctgaccatgtcgtttctgcatatgttgaagtcacaggtaggctcctaccttgccactgatgttctgattgagacttgcgagagctttttggaccaagttacagataggcgggagatgaaaaaactggacccaataaaaaacaatgccaccttgttcaatatggttttggagtcatgtgtgacctttaaatgcattatcaaggcccagaaaataatggaactgatgtcattgatcggagttgtggccgatgtaaatacagtggtgatggctagccgtgtctttgagatggttgggcaacgggatgagttgatacatatgaaaagaagcatcgattctttaacatctttgacatttcttcagtactacctgcatttttatgacagtctattgagcctccatttcaaatataatgacatggatgctgctgcaaagtttttaatcgatctgcatcagcaaccaaagcctggtgttttattttgcaatgaaagccaattcggccttgttgttcttactgatggaaaccttcttcatactgaaaaggctcttgctaaacttatcataggctgtgtgaaatcaagaaatatgcatatactgtctaacttttttattatgtcatgtcaatatggtctagagctaatttctcctcaagatgtggttactgcttgcattcaaatgggatggttgcatgctgctcatgatatcatagataacttggagtcagccgggattccagttgggattactggttacgtttctcttctgagagcatatgagaaggagaataagtcagaagaagtcaatggccttcttcaacagatacaaaagatggcatctaccatggatgatgttcatactgattcaccatttactatcaataatattgccgaagtagtgaaatatgaaatgtccttcagtagttcatctttggttgctgctttggctgatgaaattaaacattacaaccctggagagcacttggcattagagctcaataattcggttcttttcttctgcaaggcaaaaatgatggaagatgctctttgcacatataagtgtatgagagagcaaaatatcagacccacatctcatactttttgtcatatgttgtgtggttattcttcaatggacatgcatagggagatcaccatgttgtggggagaaataaagcgcagacatgaatatggagagctagatttggatagggacttgcttgatagcttggttttgaattttcttaaaggtggatatttttcgagggtgatggagatcattagttacatgtcaaaacataacatttactgtgacaagtggaaatacaggcgtgccttcctgaagctacacaagaacctgtataggaatttggattcattgcatgacaaaacagaagctcaaagtaaaaggattgaagatcacctgcagcgggggaagagggttgaggctgtggagagctttggggagctcagccttagggaggtggtgatgtttgcgctgggagaggtgggcctctccaagcagacggagatccagttggttgacgtgcttctttcttcagtatggcctacatgcactgcattacttcttatcgaagtacatttgtttccatga

SEQ ID NO: 35076 - DNA, 261 bp, Zea mays
  Peptide Sequence Number=SeqID_76855
atggtgttcgcagcaccctgcagcggggggaagagggttgaggctgtggagagctttggggagctcagccttagggaggtggtgatgtttgcgctgggagaggtgggcctctccaagcagacggagatccagttggttgacgtgaccagcggcgtgttcggctcccacaccggctctagaaagacgttcttctacttgctccttgtttattgttcaggctattgtaggaaaaaaacgtataatgcgagccatcttatctaa

SEQ ID NO: 35077 - DNA, 120 bp, Zea mays
  Peptide Sequence Number=SeqID_76856
atgtcgagatggctgaggtgcctccgcctccggctccttcggtcctggtcatccctgattcccccgtttttgaccatggggagggggcggccgttgtcgccgaggagctcgtggacatga

SEQ ID NO: 35078 - DNA, 2367 bp, Zea mays
  Peptide Sequence Number=SeqID_76857
atggacggacaaggaagtggggtggatcatacccagtcgaagccaagggtcatttccaatgttgatgacgatgacggtgtcgtatttgaagacgatgctgatgagaacgagggatacctattcgctggacaatatgaggataccgatgaggatatagagatcgatggtagtcaagatgaatcgactgccactgatgttcctgacccatacgacaaggtgtacatcaacatccctgaagaaacacatatgctcaagactgttcccaactgcggttattgcaacgcgaagaaggagggtggggcaaagcataaacaccttgagctttacttttatgatgatgatcccattctcgagcatcggtaccaatctcctagccatttatctgtgcctgtacgtgactactattgctacaaattccaaattcgtcccggggtattcaatccaatacttcatggaaagcggcttttccagcagttcacgatcaacacgtacataaagattgagagctctcgtttagatttcatatgcaagaatcaggatcggttaagggtagacctttaccagggcttggtggatagcatgctagatggagatattagagcagataaggttggcaagcgaactgtgctgtcgacgtcgtttattggcggtcctcgtgacatgagacgtcggtatatggatgctatggctctggtgtggaagtttggtaaaccagacatatttcttatcgtgacatgtaaccctaactgggatgagataaggagggagcttctccctgggcagacaccgcaagatcgtccggatcttgtagtgcgtgtctttcatgcgaagctacaagagttaaagcataggctgactaaacatgatattcttggtaagaggaagtacaagctcacatgtcctgagcagtacggccttttgatctcagccgagatcccaagcaataagtaccctgaactacgaaagatggttatcaagcatatgacgcattgcctacgtcgtgacgatgaccgtaaagaaaaggcccgagggtgcgaactggacaatagatgggttgtcccttataacccatacctccttcgtctcttgaactgtcacatcattgtcgaggcatgtgggagcatcatggctattaaatacctgttcaagtacatatacaaaggccatgatcgtgtgtctgttgttatgagagatgtgagcaatgcagatgatgatgttgatgagatcaagcagtatagagatgtaaggtgggtgactcctccagaagccttgtggaggatatacggctttgatcttagtcagatatctccacctgtgatgcagatgcaactccatcttccaaacatgcacatggtggcgtttcacgagtggcaaatggtcgagcgagtcatcaaccatccaggtgttgataggtcgatgctcatagaatattttgaggcgaataggctacacgaggaggctcgtggcatcctatatcgtgacttccctgagtggaacatgctgcagttaatgggaaaggacataaagacattccctctaccttctatcatcgacgcgtatggcgatgctattagtactgctagggagggtagattgttctttgtggatggacctggtggcaccgggaagacttatctatacagagtgctgctcgcgacgctacacaaccagggaaagattgcagtggcaacggctaaatctggtgttgcggcttccataatgcctggaggaagaaccgcccattcacacttcaagataccactcactattgacgatggcgttgtatgtagcttcacgaagcagagtggaacaacagagttgctacagaaagcatctctcattatctgggacgaggcttctatgactaagagacaagccgtggaggcactggacaatagcatgcacgatataatgggtcgccccggactgccatttggtggtaaaaccattgtcttcggtggagatttcagacaggtcttgcctgttgttcgtaaaggatcaagggctcaagtggtcgcgtctttgctatggatgtcttacctatgggagtccatgtcccagttaaatcttgttagcaacatgagagcaaaaaacgacccttggtttgtgaagtttttgctgcgcgtaggcgctagaactgaggacacaaatagtgacggtgacattcgtcttcctgacgatgtatgtgtgccttacagtgggagtgacaacgatcttgacaacctaatagactttgctttcccaaatctgaacgaaaatatgtctaattccacctacatcacttcaagggcgatattgtcaacacagaacaacttggtggatatgataaacgttaagatgattgatcgttttcaaggggagcatatg

SEQ ID NO: 35079 - DNA, 1671 bp, Zea mays
  Peptide Sequence Number=SeqID_76858
atgaagaagtcatcgggctcgggctcggtgtcgttggcgcggagcatcccggagctgtacgaggagaggggagccagcaacctccgggagttcgggttccaggagctccgggccgccaccagcgacttcagccgcctgctcaaggtcggcgaggtggcttcgggagcgtttacaagggcgtcgtccgccttcctggcgggcccgccggcggcacgaagttcaaggttatctcattctggcatatctcatttgcctgctgatgaagtgaagcctttggttaaatatgataatgatgaagatgcacactcacctggtggccgtggaaggggtcgtggtggtcgaggccgtgggcggggcaggggcagaggtggacgtggaaatgggttcaatgagtatgctgatgctggttgggaagacgatcacgcccctgcatatatgggcaatggatatgcccgcggaagaggtcgcagtttcaggggccgtggtaggagaggcgacgacgataaccagcctgaataccaacatgtcggaggtttcaaaggcatgagagtgatgagggtcaaaaatctgaacctctacgcttttggtttatatatgcaaccaacttctatccgtgagaagttgggtcctaagtatgcttcatttccaactgacaagctgatggagaaccctgatttctatagaaatgggttcaatgagtatgatgatgctggttgggaagacgatcactcccctgcatatatgggcaatggatatgcccgtggaagaggtcgcagtttcaggggccgtggtaggagaggcggcgacaataaccagcctgaataccaacaggtcggaggttattacgagtgttcatgctccagctttagattttcaccatttgtaatggaactgaaaccagcctctcatcgaagtggaaacctttttttagtcgtaaacatttacatggtttatccagtggtcctgtgtacgtcaaattttgtccacattgaaccagtacgaatgacatcttccttgaaagttatagaaatgcttcaaagttcaaatggcattcagcatattccatgtgctgctatttcagcactcatttctcgtgctggcaatgcaaactggaataggaagggtttgctcctcatccaatcgaattgggcaccgatggtgaaggcctacgggcactcgcgcttgaagaactccgagtacttggaggcgcggcagctcgtcgatgcggaaggcctcgcagccgctcttgcacgcaaggatgctgtcggccgaggagcgcagctacagctcgccggggcagctctcagtgaggttttcttgcggcaggcgaggacgggacagttgtcgcggccctcgtgcggggtcacggacaggcccacattgaagtcgtccaccacgctcacgccgtacgaggtctggtcgttgtcgtggtggaggttcacccacgctagcgtcgtgggcaccgcgtcgccgagcccgccgcagtccccgtggcgcagtggagctgcgcgccggcgccggcgtagcccgtgcgcgtccagatgctgccagaccaggggtgggccggcgccaggaacgacttgtgggagagcggcgggaggaatcacaactgttggtgcttgctggtcgattatcaccactccaatagataccatcaagactcggctttag

SEQ ID NO: 35080 - DNA, 576 bp, Zea mays
  Peptide Sequence Number=SeqID_76859
atggggagggctatcaataagattgtcatggctgtggaattgatcaaggtactcctgatggctctggtgcttactaatattacttatcacttgattctaattgttactgttattactgtgaagaggaggattgttgacctccatcagaataccaccactggatctactgatattactgatatgtgggagccattggaggaaggcctacttccgcttgagacaacaagacatgtctctatgatcactataactctttcaaagaaggagatggacacatcatctatcggatatcaatctcctttgcctgctgatgaagtgaagcctttggttaaatatgataatgatgaagatgcacactcacctggtggccgtggaaggggtcgtggtggtcgaggccgtgggcggggcaggggcagaggtggacgtggaaatgggttcaatgagtatgctgatgctggttgggaagacgatcacgcccctgcatatatgggcaatggatatgcccgtggaagaggtcgcagttttaggggccgtggtaggagaggcggctacaataaccagcctgaataccaatag

SEQ ID NO: 35081 - DNA, 438 bp, Zea mays
  Peptide Sequence Number=SeqID_76860
atgcctggctcgctggctcagctggccctggcgctgctgccggtgccacctcccaccgctggggcagagcgtggctgtccgcccaccgtacaggcggctattgcaccgtgcgcaccgggggaccgtccaagacgtcgcacaccgctagggcggcgttcgtgttcttggattgtcgtgtcctcactccggcacgacgcctccgcgtggagccgcccagagcggaggtcgttgttgttgctgctgcagcggtcggcggcgagccacctggagtttgctgtcccgcagaaccctcggctgctctgtgatgagccagagctagaggcagcggtgtcagcgtggacagaggcggagtcggctcgagaagaagcttcgtcggcccgggagcgcgtggcctccctggccgaggaggtgcagcaacggcagctggagcttggctag

SEQ ID NO: 35082 - DNA, 345 bp, Zea mays
  Peptide Sequence Number=SeqID_76861
atggtggtgaccaccagttcgacggtggggagaagcaagtcgggctgcggcctctgccccgccctcagcttcaaggatcttcatcatccttgctgttgcggggggcgagctgagccggagctctacctcccgtatgggccggcgggccacctcttccatcagcattcaggggagagggcgctcaccggcctagcggagggggtggacttcgacaatgcggggccggtcggccgcaagcatcgtcagctccagcatgtctggctcgctggctctggcgctgcttccgatgccacctcccaccgctggggcggagcgtggctgtccgctgtaaacactggaatttag

SEQ ID NO: 35083 - DNA, 183 bp, Zea mays
  Peptide Sequence Number=SeqID_76862
atgcaggttacctccaagcatctcatgtatatctgcaaggagaatctacacccacgaaaggcattgagtgcaatagaggtgaaggaacttttgtatgaactatgtcatattatgttgaatgaagctattgaattcccttattctatgatataccgtagcaaggtgtacatgtgtgatatatag

SEQ ID NO: 35084 - DNA, 696 bp, Zea mays
  Peptide Sequence Number=SeqID_76863
atggctgtagaagacccaggatcagtagatactattgagaactacgttaccacagatcaccttgtctttcctgttcacaatgtcaggcacaaggatttactgaatctttttaatagaatggagagttctataaggttgctacgcctacggaagaggatggctaaatttaataatatttccacccaggtggaaatactcgcaaaagaagcaatccagattaagagggtacttctacatgagaaaagcctatgcatgtatgctgatatggaaatcatacttgtaatggatgttgtggaatacacaagtcctgatcaatctccatccatggcaatttgtgatgctttttactcgaagcttttgacatttttggatgctcatcaaaaggtcccagccaaagagcaagttgatgcactatcaaaggaattgtttgcgctttcaactgtcacagttcaagtaagactcctaggaatgcttggatttaagttgataaaacgattatgttcaccattacagctctgtttgtatgaactatatcatattatgttgaatgaagctattgaattcccttattctatgatattgcgatatgaacgaaggctttatgccgaaggtccgaaaaaacaccttccctttgctagaatagcaacattcaatgacaagtggggtctttcaactttcaacgcatcaagcgtataa

SEQ ID NO: 35085 - DNA, 600 bp, Zea mays
  Peptide Sequence Number=SeqID_76864
atggctgtagaagacccaggatcagtagatactattgagaactacgttaccacagatcaccttgtctttcctgttcacaatgtcaggcacaaggatttactgaatctttttaatagaatggagagttctataaggttgctacgcctacggaagaggatggctaaatttaataatatttccacccaggtggaaatactcgcaaaagaagcaatccagattaagagggtacttctacatgagaaaagcctatgcatgtatgctgatatggaaatcatacttgtaatggatgttgtggaatacacaagtcctgatcaatctccatccatggcaatttgtgatgctttttactcgaagcttttgacatttttggatgctcatcaaaaggtcccagccaaagagcaagttgatgcactatcaaaggaattgtttgcgctttcaactgtcacagttcaagtaagactcctaggaatgcttggatttaagttgataaaacgattatgttcaccattacagctctgtttgtatgaactatatcatattatgttgaatgaagctattgaattcccttattctatgatagttaagaacaaggcaacataa

SEQ ID NO: 35086 - DNA, 378 bp, Zea mays
  Peptide Sequence Number=SeqID_76865
atggaacatagaccgaaagacgaggggagccaggaccgggagggagacgaggtgaaatacctgaggcccgtggaggcggagcacagacgcggcgacggagcagagactggaggccgagccgccgaggggatccgggagcgggagggagacacgccggcgccgatggagcagagaccaggcggcggcgatggagcagagaccaggcggcggcgatgtactctagggttttctagaatcgtcgtgagcgccaggcgatggagcagagaacagccgccagacgattctggaggagtggagggttttctaatcgccaggggaggccgggaggatagggttttctccacttcagtcgtgcctgagtcgggcctttccgtttaa

SEQ ID NO: 35087 - DNA, 396 bp, Zea mays
  Peptide Sequence Number=SeqID_76866
atggagatggagcagagaccggaagactacgggagccgagagggagactggaagccgaggggaaccgggagccgagagggagacagggtggatgtgggtgaaatacctgagacacggcgagcccgtggagcagcgagccagcgacacgacgtcggcgatggaacacagaccggaagacgaggggagccgggaccgggagggagacgaggtgaaatacctgaggcccgtggaggcggagcacagacgcggcgatggagcagagactggaggccgagccgccgaggggatccgggagcgggagggagacacgccggcgccgatggagcagagaccaggcggcggcgatggagcagagaccaggcggcggcgatgtactctaggtctagggttttctag

SEQ ID NO: 35088 - DNA, 537 bp, Zea mays
  Peptide Sequence Number=SeqID_76867
atggtgcaagtaacagtgcatagtgcacaatggagggtttgcattgccattgtgacctcgtattgtgtagttgctgttgaatcagttgggcgacaaatccccatagctttcctggacagagttaaggaagacttcaccaaaaagtatggaggcgggaaagcagctactgctgcagcgaacagcttgaacagggagtttggatcaaagcttaaagagcacatgcagtactgtgtggaccaccctgaggaggttagcaagcttgccaaggtgaaggcccaagtctccgaagtcaaaggagttatgatggaaaacattgagaaggttcttgaccgtggcgagaagattgaactgcttgtcgacaaaactgaaaatctgcgttctcaggcacaagatttcaggcagcagggcaccaaggtgcggcggaagatgtggctccaaaacatgaagatcaagctgatcgtgctgggcatcatcatcgcgctcatcctcatcatcatcctgtcggtgtgccatggcttcaagtgcggcagcaagtga

SEQ ID NO: 35089 - DNA, 606 bp, Zea mays
  Peptide Sequence Number=SeqID_76868
atggggcagcagtcgctgatctacgcgttcgtggcgcgtggcaccgtggtgctggccgagtacaccgagttcaccggcaacttcaccaccatcgccgcccagtgcctgcagaagctccccgccagcaacaacaagttcacctacaactgcgacggccacaccttcaactacctcgtcgaggacggattcacgtattgtgtagttgctgttgaatcagttgggcgacaaatccccatagctttcctggacagagttaaggaagacttcaccaaaaagtatggaggcgggaaagcagctactgctgcagcgaacagcttgaacagggagtttggatcaaagcttaaagagcacatgcagtactgtgtggaccaccctgaggaggttagcaagcttgccaaggtgaaggcccaagtctccgaagtcaaaggagttatgatggaaaacattgagaaggcacaagatttcaggcagcagggcaccaaggtgcggcggaagatgtggctccaaaacatgaagatcaagctgatcgtgctgggcatcatcatcgcgctcatcctcatcatcatcctgtcggtgtgccatggcttcaagtgcggcagcaagtga

SEQ ID NO: 35090 - DNA, 1698 bp, Zea mays
  Peptide Sequence Number=SeqID_76869
atggaggggctggcgaccgtgctgctcctctacgcgctcctcgtgctcgccctcgagtcgccgctcgtctccacctcgccattcggtggcgccgcgggcggtacagcgcggaagctccacctctccttcggcgcgggcgagcgcgcggcgcccgtccccggcgcgtcggcgcacgggcaggatcatcggctctcccgcttcgcctccggcctcgacgtccgcctcctcgactccgcccgctccggcgcgctccgccggtgcccgcactcgatcgcgctcaccgcggaggagctcggcgcgcggggccgcgtggtggagctgccctgcgggctcgcgctggggtcccacatcacggtcgccgcgacgccccgggcgccgcacgaggagcggaaccccgcgatcgcggtgctcagggacggggagcggcacgccatggtgtctcagttcatggtggagctgcaggggctcagggcggtcgacggcgaggacccgccccgcgtgctccacttcaacccgcgcctccgcggggactggagcggccacccggtgatcgagcagaacacctgctaccgcatgagctggggcgccgcgcagcgctgcgatggatggaggtcacgcccggatgaggagactgtggatgggttggtcaagtgcgagaagtggattagggacgatgatgacaggttggagaaatcgaagacaacatcaaagacggcatggtggctgaatcggctgatcgggcagaaggaggaggtcaatttcggttggccatttcctttcgtggagggcaggctctttgttcttactctcagtgctgggttggagggttaccatgtgagcgttgatgggcgacatgtcacttcgtttccttaccgcactgggtttgtgttggaggacgctacaggcctgtcactgaatggggacctagatgtgcattcagtgattgcagggtctttgcccactacacacccaagttttgcgccacataattatctggagttttctaatgtttggcaggctcctctgctgcctgatgagccagttgagattttcattggcattctgtcagcagccaatcattttgctgaacgtatgggtgtgaggaagacatggatgtctgctgtccacaagtcaccaaacatggtggctcgtttcttcgttgcactgcatggcagaatggaagtgaatgcggagttgaagaaggaagctgaattttttcgggacattgtttttgtgcccttcctggacaactatgatcttgttgttatgaagactcttgcaatatgcgagtatggggttcatgttgtctctgctaaatatgtaatgaagtgtgatgatgatactttcgtgagacttgattcagtagtcactgaaattaagaaggagtggccacaagaggtgtatccgttatatgcaaatggccctggatatgttatatcatctgatattgctgattttatcatgtcagaattcatgaagcaaaagttgatgctcttcaaaatggaagatgtgagcttgggtgtgtgggttgagcagttcaataagacaagacccgttgaatacgttcacagcgacaaattttgtccaaatggatgcgtccctgactactatactgctcattaccaatcgccaaggctaatgctatgcatgtggcagaagttactggaaggaagaccagactgttgcaatgcgagataa

SEQ ID NO: 35091 - DNA, 1839 bp, Zea mays
  Peptide Sequence Number=SeqID_76870
atggcgggggcgggggctaccttccgccgccgcgcgatggaggggctggcgaccgtgctgctcctctacgcgctcctcgtgctcgccctcgagtcgccgctcgtctccacctcgccattcggtggcgccgcgggcggtacagcgcggaagctccacctctccttcggcgcgggcgagcgcgcggcgcccgtccccggcgcgtcggcgcacgggcaggatcatcggctctcccgcttcgcctccggcctcgacgtccgcctcctcgactccgcccgctccggcgcgctccgccggtccatagcggacgccgtcgcggcgggcgcccgcgcgttctccgacctcgaggccctcgaccccgccgccgtcgccgcgccctccggcgagagcgacgcggccaggtgcccgcactcgatcgcgctcaccgcggaggagctcggcgcgcggggccgcgtggtggagctgccctgcgggctcgcgctggggtcccacatcacggtcgccgcgacgccccgggcgccgcacgaggagcggaaccccgcgatcgcggtgctcagggacggggagcggcacgccatggtgtctcagttcatggtggagctgcaggggctcagggcggtcgacggcgaggacccgccccgcgtgctccacttcaacccgcgcctccgcggggactggagcggccacccggtgatcgagcagaacacctgctaccgcatgagctggggcgccgcgcagcgctgcgatggatggaggtcacgcccggatgaggagactgtggatgggttggtcaagtgcgagaagtggattagggacgatgatgacaggttggagaaatcgaagacaacatcaaagacggcatggtggctgaatcggctgatcgggcagaaggaggaggtcaatttcggttggccatttcctttcgtggagggcaggctctttgttcttactctcagtgctgggttggagggttaccatgtgagcgttgatgggcgacatgtcacttcgtttccttaccgcactgggtttgtgttggaggacgctacaggcctgtcactgaatggggacctagatgtgcattcagtgattgcagggtctttgcccactacacacccaagttttgcgccacataattatctggagttttctaatgtttggcaggctcctctgctgcctgatgagccagttgagattttcattggcattctgtcagcagccaatcattttgctgaacgtatgggtgtgaggaagacatggatgtctgctgtccacaagtcaccaaacatggtggctcgtttcttcgttgcactgcatggcagaatggaagtgaatgcggagttgaagaaggaagctgaattttttcgggacattgtttttgtgcccttcctggacaactatgatcttgttgttatgaagactcttgcaatatgcgagtatggggttcatgttgtctctgctaaatatgtaatgaagtgtgatgatgatactttcgtgagacttgattcagtagtcactgaaattaagaaggagtggccacaagaggtgtatccgttatatgcaaatggccctggatatgttatatcatctgatattgctgattttatcatgtcagaattcatgaagcaaaagttgatgctcttcaaaatggaagatgtgagcttgggtgtgtgggttgagcagttcaataagacaagacccgttgaatacgttcacagcgacaaattttgtccaaatggatgcgtccctgactactatactgctcattaccaatcgccaaggctaatgctatgcatgtggcagaagttactggaaggaagaccagactgttgcaatgcgagataa

SEQ ID NO: 35092 - DNA, 555 bp, Zea mays
  Peptide Sequence Number=SeqID_76871
atgcagctcgccagcggaaccggggcaccgccctccctgtcgaagtcctgtggctccgcgctgaggcagaacacaggcctttcctcccgcaatccctcgaagagcggcaggaagagcgcaccgcggaggaggtcccacacctcgccgagcttggcggccgcgatggaaatccccgagtcattgccgccgctccggccgaccgcgcaagggagagacgggacccagtcggggatttgggagaaggtcttgcgaagaaaggggaggtggttggcgcgacgcgcgcttcacggcgggggtgtacggcggggagtgcttggcgcgggcatgcatcgcgacgcccggcgtgcgtgtgggcggcgggagtttcgcggcggaggtttcgcggcggggggatgcggcggccgtaaggagcgtcgcggcgggggatgcggcggcctgcgggcgcggcggttgtttgccgggcggcctggaatcgcggctgggtggttgcgggtgcgagcgttgggcggggatcccggctgggtgcgtgcgggcgacgggatccgcgggaggtag

SEQ ID NO: 35093 - DNA, 530 bp, Zea mays
  Peptide Sequence Number=SeqID_76872
gcgtcggagacgatgcagctcgccagcggaaccggggcaccgccctccctgtcgaagtcctgtggctccgcgctgaggcagaacacaggcctttcctcccgcaatccctcgaagagcggcaggaagagcgcaccgcggaggaggtcccacacctcgccgagcttggcggccgcgatggaaatccccgagtcattgccgccgctccggccgaccgcgcaagggagagacgggacccagtcggggatttgggagaaggtcttgcgaagaaaggggaggtggtttcgcggcggggggatgcggcggccgtaaggagcgtcgcggcgggggatgcggcggcctgcgggcgcggcggttgtttgccgggcggcctggaatcgcggctgggtggttgcgggtgcgagcgttgggttgtgatcgtgcttgaaggcaatactggaagcagtgttcttaaggcagtaagcgatgcaaggtcctcagttaatccttttgaaaaaactcctctgttctcacacattccattcttgcattga

SEQ ID NO: 35094 - DNA, 471 bp, Zea mays
  Peptide Sequence Number=SeqID_76873
atggaggtggtggagggggcggtggcagtggcggtggcgggaggttccacccttaccgtggttcttccgactattctagcggcggtggagggtacgtacagaggcggtagtggcgttggtaacgacttcagcgaccagaggcaacattacggcggcggcaacagaggcggaggccgtggggatttccaaggttcgttccaaaagccgcgggcgcggacttcgtgtgggaggccaagctgcctctccaaggatccggacaacgtccggggatacgctatacgtggccaacctcggggactcctgcgccgtgctcggccgtcgagtgggcggcggcgggggggaggggcggccatcgccgagcgtctgtccgccgagcacaacgcggcatccgaggaggaccccacgctggtgccgaggttcaatgagggtgtcgtgagcctgctctgggatgcggtcgtggtgtcccgctag

SEQ ID NO: 35095 - DNA, 1038 bp, Zea mays
  Peptide Sequence Number=SeqID_76874
atggaggtgagactgagagatggaacatctgaggcaactaatgcccaggctaaaaccaccacatggtggagactgcccccgctccctacccagcgaaacccccgctcccgcacgcccgcgcgccagcgaaacccccgctcccgcaacggcctcccgcacgccccgccgacctccgctgctgcaaagccgccgcgaaatccgcacccacgcatccctccagtaccgaaccgcccgcgcgccgcagccctttgtccgcgccggagcctggcaccgaaccgccgcggattccccacgaccgccgcgaatttggtgggaaaccccacgaccgccgcggattccgcttcctatgcccattccctgctctctacatccacgaatcgctcctcctggcgcaatcctctccatccgcgaatcgcgtccgcttccctgctctccaaggttttcttcgccctccgccgagatccacagattccccattcgccctccaccgagatcggcatgggcgcgggcgcgtcgggcctggcaagcacagagcccagcggcaaggtggcgcgcggcgccgggctgggtgacctcccggagctgtgcaccgcggaggtgctgctccgcctcggcgcgctggatatatgccggctcacgcggcttaacctcgcgttccgcggcgccgcgggcgcgaacttcgtgtgggaggccaagccacctctccaaggatccggacaacgtccggggatacgctatacatggccaacctcggggactcttgcgccgtgctcggccgtcgaatcatccctctcctcccaagtgcggatgcctaggacctccttgccctcagctcctcctgctcatgtccaagccgctctacctgggcatcatcctcacgggtctcttgcgcttctttggtggctgccgcgacggcaagtcgagagcaccacgcagatgaacgtctcgttcgcggtcaagcaggaccccacgctggtgccgaggttcaatgagggtgctgtgagcctgctctgggatgcggtcgtggtgtcccgctag

SEQ ID NO: 35096 - DNA, 315 bp, Zea mays
  Peptide Sequence Number=SeqID_76875
atgtcgacgagagagagacgcgtagctacctcgctcgtcgatgacgtcgagggagtagtgaacgatgtggtggagcttgagggcgtcgtccgcctccgtgaagctatgcagtgtcaggacatggtactgctccaccacgaagtcgaggtggaatacccggacgggcaacccaccgaaaagcaccaagcgacgctgctggagtttgggaaggttgaaaatggcagatccaccactgccatggccctgaccgttggtattccagcagcaataggagccctggtagcaaacctaaccacaattttacttgaacaataa

SEQ ID NO: 35097 - DNA, 738 bp, Zea mays
  Peptide Sequence Number=SeqID_76876
atggagcacttggatctaattcatatcttggaatctaatgcaaagaggctcagactaccagagcttccagattttgctctggaacacttgccgaatcggaattccttgatatatggagacctttatggtatctccaaagaagcatctaccatatacagggctactcttcgttacgaaggttttagtgagataatggcaaccctgacgaaaattgggttctttgatgctgcaaatcatccactgatggaagatactaatcgcccaacacataagggtttccttgatgaactacttaataatatctccacaactaacacagactttgatattgaagcctctgatggatatgatgatgaattgattgccagactgctgaagttcgggcattgcaaagatacggaaatagctgttaagacagtcaaaaccatcaagttcttgggactgtacgaagagactcaaattcctacgggttgttcaagcccatttgatgtgatttgccaacgaatggaacagaggatggcttatggccataatgagcaggacatggtactgctccaccacgaagtcgaggtggaatacccggacgggcaacccaccgaaaagcaccaagcgacgctgctggagttcgggaaggttgaaaatggcagatccaccactgccatggccctgaccgttggtattccagcggcaataggggccctggtagcaaacctaaccacaattttacttgaacaatag

SEQ ID NO: 35098 - DNA, 594 bp, Zea mays
  Peptide Sequence Number=SeqID_76877
atggccgataaaggcaaaggcaagggtatcgtcattggcgatccccgcatgtcagatatatcacaaaaggagattgctcgaaaggcttcggacgagaaggctaaaaagtccgaagacactggggggcaggcacagttaatgaaccaaacacatcagcctagcccgagcatcgtagatgattatgttgtgctaaccagtgtcgatagagatgacttacctgatggtggaagtagccattttgctcagacagtgaaagctttaaaggagctcaaacctggaatactggtagagtgcttaacctcggattttcgaggtgacctggaggctatctcatctttggcaaactctggcctagatgtttatgcacacaacattgaaactgtgaggagtctacagagggttgtgagggatccccgggcagggtatgatcagagcttagcagttctcaagcatgcaaaaggttccagggaggacatgattacaaagtcttctatcatgcttggtcttggagagactgatgaagaggtgaaacaagccatgatggatctacgggcaattggtgttgacatccttactttgggacagtacttgcag

SEQ ID NO: 35099 - DNA, 732 bp, Zea mays
  Peptide Sequence Number=SeqID_76878
atgagctcgcggtatgctcttatttatacgcccagtgcgttaaaaattgaaagaccccgcctgtcagtgaatgttgctattctagcaaaggaaaggtatcttcggactcgagtcgatatcgcagtaggagaagcccaaagtaacacgaaggttgatacaacgccgaagatgacaaaggctggaatgacatctgttgctgaaagtatcactgagagcctccgacggtctcgccagatgatggttcaggaagtggaaagaagtgctagtaccttggcaacatttggtgaaactggaagaacgtatgaagctagacttgttgcaatttatagacatgtaagagagaacggagttgagggacaacctatttctgtttcaacagaacagtttgcatgtcattttttagttgcacagtaccgacaccaagttctatcctcatgtgtaaataccacagtatatggttttcattatcccttgaacatgaagcatatagtcttgaaactaacaactttcaccatcgtgtatgtggtcccaaagcgttcttatgatgctcgaaaggcccttcagaaaaatgttatccaactaagcagcagtctgatagttggagtaaagcctattgatgcagtgcaccggcagcagctggacgagagtttcgctccaagcaactcaggtggatttatggcttccttgccttcgaagtcacttggcttgaagagcacaggcgcatcgaactag

SEQ ID NO: 35100 - DNA, 549 bp, Zea mays
  Peptide Sequence Number=SeqID_76879
atgacatctgttgctgaaagtatcactgagagcctccgacggtctcgccagatgatggttcaggaagtggaaagaagtgctagtaccttggcaacatttggtgaaactggaagaacgtatgaagctagacttgttgcaatttatagacatgtaagagagaacggagttgagggacaacctatttctgtttcaacagaacagtttgcatgtcattttttagttgcacagtaccgacaccaagttctatcctcatgtgtaaataccacagtatatggttttcattatcccttgaacatgaagcatatagtcttgaaactaacaactttcaccatcgtgtatgtggtcccaaagcgttcttatgatgctcgaaaggcccttcagaaaaatgttatccaactaagcagcagtctgatagttggagtaaagcctattgatgcagtgcaccggcagcagctggacgagagtttcgctccaagcaactcaggtggatttatggcttccttgccttcgaagtcacttggcttgaagagcacaggcgcatcgaactag

SEQ ID NO: 35101 - DNA, 1350 bp, Zea mays
  Peptide Sequence Number=SeqID_76880
atggatatagtggtggaggaaggaaatgtcgatgttggcaatactgctgaaccatcgtatgaggttgtggctataagtggttgtttaacacaattgtcaactaatgacactgatgaacatgaactgaagagcgaggatagtaaggtcagtgttggtaatgctgcaaaacaatcacacgatgttgtgggagtaggcattgactgtattttcaatcatgttaaagtgtcaactgaagccgatcttggaccaaaaccggatgtgatacacctgacatctttggatgttccaaatgaatcaagtcaaatacgttctgatgcggatatggtagagcagaacaaacaagatgctttggacacacttattagaatatcacaacataaaaaaccaaagaaattgaatgtagctcgagttgtctctgaagattataagtgcaccccagaagatgttcagcttattgaatacattaaaacattaccgggggaacaagttgtggtgaacatcgacagcgcatggttaaatagaaatgatatggaatgtctttttcatggcgacatccaattgtctggcgaagcccttagtgcatatatacactgtattagggatgaagagcatttacttcatagagaaggtggaaaagtcttcttggagaacacattcatttccagtctgcttaagcgtgatggcgaccctaaggataatggttcagagatcgaggaagtccctcgtgagaaaataaggaattgtcaaagattgctctctgaaggggtagttagtgggagagcaatcactaaagatgaagcccatcctataataagccggctagcattgttaatatacaaggctcaggactctcactatgatctcagcacaacaatagtgacattgaagaaccatgccctggcactagaggagcgtgcaaaggcagcaattgttcagagtgctgagtttggccagttagcagcagaatccttcccgaagaatctgcactgtctaactgtgaaactgaccgaggagtggcttcggaaccctaagcataggagtcgctcagaggagaaccggaattccacacgattggtggataataataatctgtatcatttctgtatattctctgataatgtgctggccacttcagttgttgtcaattctacagtctccaatgcaaatcaccctcaacagcttgtgtttcatgtggtcaccgacagaatccattttggcgcaatgtcaacattattcctcataaatgacttcaaaggttgtactgttgaagtccgatgcatagatgagttctcgtggttgaatgcttcttcatctcctcttgttaggcaactatctgaggttgaaacttag

SEQ ID NO: 35102 - DNA, 1250 bp, Zea mays
  Peptide Sequence Number=SeqID_76881
attataagtgcaccccagaagatgttcagcttattgaatacattaaaacattaccgggggaacaagttgtggtgaacatcgacagcgcatggttaaatagaaatgatatggaatgtctttttcatggcgacatccaattgtctggcgaagcccttagtgcatatatacactgtattagggatgaagagcatttacttcatagagaaggtggaaaagtcttcttggagaacacattcatttccagtctgcttaagcgtgatggcgaccctaaggtgctcttaaattgtgttcattccaatgaatatagaaaactttcactggtacctggcagttctgaatgcaaaaaactgaggtttaagctacctgcaatattatgggactcgagattaaacacaaagaaaagacatcaaaatcttgaccacaatgtggatgaagatggagagagttcaagtgatgttcaaataatcgatactccatacaacgccaaatatttaaagaaacattggattcaaagcactaaaccttatccaatttctttaagtcttcaaaaatttaaagatatattggatgtaaataagccgatgaatacatattgttttaacatggctgttcggatgatcgcatgcaatgatgccttgttcttgttggaagacaaataccactacatggatctacagttttgttactccataactaaatttggtcgagaccctcgccttcgtgcaaagccagatatcaacatgttggcaaaattattagaatgttggcctgacatggagtacgatgtttcagattgcaaacaaattctattgcccttttctttcttgggtcacttcaccttatatgtacttaacatggacactagaagcatctatataatggactccatgcctataccatcatggtttaagggtgatcatcctagcatgcattatatccataatatacattatattgccaataatatgaatgctgtcatggaattggctaatcctacatggaaagacaatatttatatgtggcgtcgtatagtaccaacatgggttccaagaacattaaactgggatttatctggctttcttgttatcaactttatgcacgattggaatggtatacggttaccctgcatttgcactaatgggaatgacctgaggaccaaattcttagtagaattattgaagtacaaggacaatgaattcaaagacaacattccagaaaaaatacaagaaattattaggcacatcagatag

SEQ ID NO: 35103 - DNA, 571 bp, Zea mays
  Peptide Sequence Number=SeqID_76882
tgcaggacattttgagacaggatcttctattccgctgcaacctactcgaagagtcttctcactccactgcgtactaagtcttcgagtagggcgacatccagatcctgttcccgggtcaaagggaactctcaaccctgctaatggactttgcaatggcacgaggttggtggttcgtggtttccaaaaaaacagtattgatgctgaaattgtccttggccaacatgctggaatgcggattttcttgcctcgtatacccctgtgcccctctgatgatgagatgttccctttccggtttaaaaggaagcagattccaataagactaagttttgccatgacggttaacaaggcccagggccagacgattcctaatgttggtgtgtacttgccggaaccagtgttctctcatggccagctttatgttgctctatcaagggccaccgctcgatcgaaagtgaagatacttgccattccagtccatgatgagaagaagaagggggttgaaaggaactcagcgataaatggcgcaacatacacaaagaatatcgtttataaggaggtccttacgtcgtag

SEQ ID NO: 35104 - DNA, 642 bp, Zea mays
  Peptide Sequence Number=SeqID_76883
atggcacatcgaggatcactacataaggacgtgacttacaaccaatgtggtaacagctacagttatgtggttgcaggacattttgagacaggatcttctattccgctgcaacctactcgaagagtcttctcactccactgcgtactaagtcttcgagtagggcgacatccagatcctgttcccgggtcaaagggaactctcaaccctgctaatggactttgcaatggcacgaggttggtggttcgtggtttccaaaaaaacagtattgatgctgaaattgtccttggccaacatgctggaatgcggattttcttgcctcgtatacccctgtgcccctctgatgatgagatgttccctttccggtttaaaaggaagcagattccaataagactaagttttgccatgacggttaacaaggcccagggccagacgattcctaatgttggtgtgtacttgccggaaccagtgttctctcatggccagctttatgttgctctatcaagggccaccgctcgatcgaaagtgaagatacttgccattccagtccatgatgagaagaagaagggggttgaaaggaactcagcgataaatggcgcaacatacacaaagaatatcgtttataaggaggtccttacgtcgtag

SEQ ID NO: 35105 - DNA, 471 bp, Zea mays
  Peptide Sequence Number=SeqID_76884
atgcgtcgacctttgccgcgcccagccccttgtcgcgccaagcgccaggaccacctcgtggccaagcgccgagcaccgcgcccagaccaccacgtggccgagccgccgtcggtcttctccatccggcgccagggagccaggcgccctccaggaaaccgcgccatgaagcaacagggcctctctgcgcgtcctcgggagcagccgccagcgcgagagatggccaaaccgtgcgctcgctcgaccagggagccgcgccacctggcgatgtgtggcccgcgcgcctggcttgaggccgccaggtctgcgcgcctcgccgggctgctgtgtcgctccgagcggcggccgtggccgatcgtccgcgccgagcacgtgacccggactggaaaccgggctcgcgaccgtgcaggggagccgcgctgggggcgcctctacgcctgccttcgctgggaagagccgccgggttgcgcctag

SEQ ID NO: 35106 - DNA, 1170 bp, Zea mays
  Peptide Sequence Number=SeqID_76885
atggcgctcggcaaagggccgttagcggccactagtacagagaagttctatagtggcggttttggtgaaagaagaatagaaaggtacgatgcctatggctcttcttcaaattcgccaccattcacatcaccacgagagccggacgtcacaagggccatcgcggccacggtgctgcaagcaccggccgtcacggatgcggactccgccacgggtctggtgagccacgactcttgcttgggtggcgaacccgacccttggcggccacgggcgaacgaggccgaccacggctcgagcgcagccggcctggctccggcgaggactcctcggcgtaggagccagcgcggactctgctggccacccggcgcggtgcgtgctcggctagccggcctcagcgagccccgacggaccacgtcggtcctcctcgggcgcggctccacggctgcaacgcccctggtagtggcgggcggcggctcgaccgccctcgaatccccgtcggccgcacacggaggaccggcggcgctccctgtcggccgcgcgtccgaccagtcaaccacggacgcggccccgcgcgagacaggcggctgggggctcggcgcggccctacgaggcgctcggcgcggcctcctcggcacgctaggcgcaacccggcggctcttcccagcgaaggcaggcgtagaggcgcccccagcgcggctcccctgcacggtcgcgagcccggtttccagtccgggtcacgtgctcggcgcggacgatcggccacggccgccgctcggagcgacacagcagcccggcgaggcgcgcagacctggcggcctcaagccaggcgcgcgggccacacatcgccaggtggcgcggctccctggtcgagcgagcgcacggtttggccatctctcgcgctggcggctgctcccgaggacgcgcagagaggccctgttgcttcatggcgcggtttcctggagggcgcctggctccctggcgccggatggagaagaccgacggcggctcggccacgtggtggtctgggcgcggtgctcggcgcttggccacgaggtggtcctggcgcttggcgcgacaaggggctgggcgcggcaaaggtcgacgcatggcggcggcagaggagcaccagctccatggaggcggctggggcaaagccctggcggcggcggctga

SEQ ID NO: 35107 - DNA, 1437 bp, Zea mays
  Peptide Sequence Number=SeqID_76886
atgacgatgacggagaagatactggcgcgggcgtcggagcgcgcggcgctggagcccggggagaacgtgtgggtcgacgtcgacgtgctcatgacgcacgacgtctgcgggcccggcgccttcgacatcttcaagaaggagttcggggaggacgccagggtctgggaccgcgagaagctcgtcgtcatcccggaccactacatcttcaccagcgacggccgtgccaaacgcaacgtcgacatcctcagggacttctgtgcggagcagaacatcaagtacttctatgacatcaaggacctcagcgatttcaggttcatgtcttggcttctctgcctggtatcagtaataccagaatttaggttcctagcttgtagcttcccccttccggagcattttacatttcggagttgtctgcaggctaatccggactacaaaggcgtctgccacatcgcacttgctcaggaaggccactgccgaccaggcgaggttctcttgggcactgattctcatacatgcaatgctggagcttttggtcagtttgcaactggaatcggaaacactgatgcaggttttgtgttgggcactggaaaggctcttctcaaggtgccacctactatcaggtttatattagatggagagatgccgccttatttacttgcgaaggatctgattttgcaaattattggagagatttcagtatctggtgcgacctacaaatcaatggagtttgttggatcaactgtagaaagtctaaccatggaagagcgtatgacactatgcaacatggttattgaagctggtggaaagaacggtgttgtgcctgctgatgaaactacatttaaataccttgagggtaagacatcagtcgattatgaacctgtctacagtgatgctcaagccagattttttagcgactaccggtttgatgtatcaaaactggagccagtagttgccaagccacattcgcctgacaaccgtgctccagcaagagaatgcaaagatgtgaagatcgaccgagtctatattggttcttgcactggtggtaagaccgaggatttccttgctgctgcaaaggtgttcttagcctcgggaaagaaggttaaagttcccacatttcttgtccctgccacacaaaaggtgtggttggacatatatagcctccctgtaccaggatctggtggcaaaacttgctcccagatatttgaggaggctggttgtgacacaccagcaagtcctaattgtggtgcttgtttgggtggccctcgtgatacatatgcacggatgaatgaacctactgtctgcgtgtccaccacgaacaggaactttccgggcaggatgggccacaaggaagggcaaatctacctggcgtctccctacactgcggctgcctcagccctgacggggtatgttacggaccccagggacttcctcatgtaa

SEQ ID NO: 35108 - DNA, 1509 bp, Zea mays
  Peptide Sequence Number=SeqID_76887
atggcctcctccgtctccgccgccgccaaggccgccgcggcgttcgcgcacaaggtccaggtgaagagcgcgatgacgatgacggagaagatactggcgcgggcgtcggagcgcgcggcgctggagcccggggagaacgtgtgggtcgacgtcgacgtgctcatgacgcacgacgtctgcgggcccggcgccttcgacatcttcaagaaggagttcggggaggacgccagggtctgggaccgcgagaagctcgtcgtcatcccggaccactacatcttcaccagcgacggccgtgccaaacgcaacgtcgacatcctcagggacttctgtgcggagcagaacatcaagtacttctatgacatcaaggacctcagcgatttcaggttcatgtcttggcttctctgcctggtatcagtaataccagaatttaggttcctagcttgtagcttcccccttccggagcattttacatttcggagttgtctgcaggctaatccggactacaaaggcgtctgccacatcgcacttgctcaggaaggccactgccgaccaggcgaggttctcttgggcactgattctcatacatgcaatgctggagcttttggtcagtttgcaactggaatcggaaacactgatgcaggttttgtgttgggcactggaaaggctcttctcaaggtgccacctactatcaggtttatattagatggagagatgccgccttatttacttgcgaaggatctgattttgcaaattattggagagatttcagtatctggtgcgacctacaaatcaatggagtttgttggatcaactgtagaaagtctaaccatggaagagcgtatgacactatgcaacatggttattgaagctggtggaaagaacggtgttgtgcctgctgatgaaactacatttaaataccttgagggtaagacatcagtcgattatgaacctgtctacagtgatgctcaagccagattttttagcgactaccggtttgatgtatcaaaactggagccagtagttgccaagccacattcgcctgacaaccgtgctccagcaagagaatgcaaagatgtgaagatcgaccgagtctatattggttcttgcactggtggtaagaccgaggatttccttgctgctgcaaaggtgttcttagcctcgggaaagaaggttaaagttcccacatttcttgtccctgccacacaaaaggtgtggttggacatatatagcctccctgtaccaggatctggtggcaaaacttgctcccagatatttgaggaggctggttgtgacacaccagcaagtcctaattgtggtgcttgtttgggtggccctcgtgatacatatgcacggatgaatgaacctactgtctgcgtgtccaccacgaacaggaactttccgggcaggatgggccacaaggaagggcaaatctacctggcgtctccctacactgcggctgcctcagccctgacggggtatgttacggaccccagggacttcctcatgtaa

SEQ ID NO: 35109 - DNA, 963 bp, Zea mays
  Peptide Sequence Number=SeqID_76888
caaggaggtccatgtgagttagaagttcttggaaagaagggtatggtccaattaaatggaagactggtacaacaaattatcgatgctattttggttctggacattgatgatcctccgtgcgctattgctgcaggagctcttttatttgttttggcaagtgatcctgttagcaaggtgctttgcaagctacggcgccttgagcaaggaggtccatgtgagttagaagttcttggaaagaagggtatggtccaattaaatggaaggggcttagcacgagtaggagtgtgcgctcgcgacggcggcttgcacaggaatcactggaccaagataaagtcggcggtgaaccagattgagacgcacccttacttccagcgcgactctcttgtcaagttctgccagaagcacgggatctgcgtgaccgcgcacaccccgctgggtggctccaccaccaacgccgagtggttcgggagggtgtcgtgcctggacgaccctgtcatcaagagctcggctgagaagtacggcaagacgccggcgcagctcgtcctccgctggggtctgcagcgggacacagtggtgatccccaagacctctaaggtggagaggctgcaggagaactttgacgtcttcggtttcgacatctccggcgaggacatggagaggatgaaggccgtcgaccggaagtaccagactaaccagcctgccaagctctgggcatcgacctgtgaaggcaattgtaaggatctgagaaccttgagtggtcgcatgaaaaaggttggacagtacctcttgcgcaggcgaacacattatatgtctcagtttgagaaattagctatggagctcatgccaaaattgggagaacactttgttgaagaaatgataaacccaagcatgtatggaagccggtggtttatcacagttttctcgtgttccttcccatttcatctaactcttagagttttgtaa

SEQ ID NO: 35110 - DNA, 462 bp, Zea mays
  Peptide Sequence Number=SeqID_76889
agctcggctgagaagtacggcaagacgccggcgcagctcgtcctccgctggggtctgcagcgggacacagtggtgatccccaagacctctaaggtggagaggctgcaggagaactttgacgtcttcggtttcgacatctccggcgaggacatggagaggatgaaggccgtcgaccggaagtaccagactaaccagcctgccaagctctgggcatcgacctgtgaaggcaattgtaaggatctgagaaccttgagtggtcgcatgaaaaaggttggacagtacctcttgcgcaggcgaacacattatatgtctcagtttgagaaattagctatggagctcatgccaaaattgggagaacactttgttgaagaaatgataaacccaagcatgtatggaagccggtggtttatcacagttttctcgtgttccttcccatttcatctaactcttagagttttgtaa

SEQ ID NO: 35111 - DNA, 927 bp, Zea mays
  Peptide Sequence Number=SeqID_76890
atggcgcttgatcgaagcattactcttctttctgatgacgctgtcgtgtttctctcaggtgcgacatacaacacgaagaagggaggcgacgacaccggatcttcgaagccgaaaggtggtggctccttcgtgccaaggcatctcaggccaggtgatacttcatcgctcttgctgggcactacattggctacagagggccatattcttctgctatgctgtgtaaatcatgtttgtcactttcgttcttgtcctatgtcatggatacgaaacccgcacaaattccgccaggtgattgatgcaagcattgtgtatgatccttggacaagggaatcgcaggggtttggttttgttaccatgccttgtgtcaaggaggcatatcgctacatcaaatatctaaatcgttttgtgatgcaagatcaggtcataactgctgagaagcctcttgggttgaactttttcgacaatctactgagtgacattatgcccgctgatcttgagttgtcacctactgacaagcatatctttattgaggagttgcttctgaatgcattgaataagcaagttaggtctgcggaggatagtggtggcagacgaactttgaagatgtgcttggggatgctaaagttcatgagaaatcgctcggatcaaaactttgttgcttatagaaaggtttacccttcttggagatggtatgaaaagcaagatggtattgaacatatacaaagcaacagtgaagatcaagctcctgagttttacaacattatgttagaaaggtcaaagggagaccgatatggatatgacttggtttttgttgatgcgatgcacaaggccaactacgcgagtagaatctgccactcctgcaaccctaactgcgaagcaaaaatttatgtgtatgatgtgcatgaggtatttttttggagggagtaa

SEQ ID NO: 35112 - DNA, 465 bp, Zea mays
  Peptide Sequence Number=SeqID_76891
atggcgcttgatcgaagcattactcttctttctgatgacgctgtcgtgtttctctcaggtgcgacatacaacacgaagaagggaggcgacgacaccggatcttcgaagccgaaaggtggtggctccttcgtgccaaggcatctcaggccaggtgatacttcatcgctcttgctgggcactacattggctacagagggccatattcttctgctatgctgtgtaaatcatgtttgtcactttcgttcttgtcctatgtcatggatacgaaacccgcacaaattccgccaggtgattgatgcaagcattgtgtatgatccttggacaagggaatcgcaggggtttggttttgttaccatgccttgtgtcaaggaggcatatcgctacatcaaatatctaaatcgttttgtgatgcaagatcaggtcataactgctgagaaggtcataggtctacgacttcgtgcttga

SEQ ID NO: 35113 - DNA, 945 bp, Zea mays
  Peptide Sequence Number=SeqID_76892
atgggaagcaatgaccctaacacaccctcgaaggcttcaaaggcgtcagaacaagatcaacctccagctaccaccacatccagtggaacagcttcagtgtaccctgaatggcccagctttcaggcctactcagcaattccaccgcatgcgttcttcccccctaccgttgctgcaaatccacaggcccatccatacatgtggggggctcagcccatagtgccaccttacgggacaccgccaccaccaccttatgtgatgtatccacctggaacagtatatgcccatccctctacacctcctgccatgcatccatttggccattatcctatgccaacaaatgggcatgctgaaactcatgattcacactcaaaggacaatgatgggaaggaagatggcaattctcagaacggcatgtcttattcaggatcgcaaggagtggtaaaccaaaccatggcgatgcttccaatgcaaccgggtgcaatggtcggaggagttcctagctccacggcagctaacctgaatatcggagtggactactgggcagctccgggttctgcggctgtccccgcagcgcacggcaaagcgccagctggttcagctcgaggagaccaatgggatgaaagggagctcaagaagcagaagcggaagcagtcaaacagagagtccgctcgcagatcccggctgcgcaaacaggctgagtgtgaggagcttgggcaacgtgctgaggctctgaggtcggagaactcgtcgctgagggccgagctcgagcggatcagaaaggagtacgaacagctactttcacagaacgcttccctaaaggaaaagctgggggctgccagtagtgattcgcttcctgatatgaacgaacagaacgacggcgacggagacggcggctacaggaagcagcctgattccgatggccaccagcctgggagcgagtcctga

SEQ ID NO: 35114 - DNA, 690 bp, Zea mays
  Peptide Sequence Number=SeqID_76893
atggcgatgcttccaatgcaaccgggtgcaatggtcggaggagttcctagctccacggcagctaacctgaatatcggagtggactactgggcagctccgggttctgcggctgtccccgcagcgcacggcaaagcgccagctggttcagctcgaggagacaaatgggatgaaagggagctcaagaagcagaagcggaaacagtccaatagagagtccgctcgcagatcccggctgcgcaaacagatagtaaattggctcaaacacagccctactgaaatggagggttacatttgccccggttgccttgtactatccatgtacctattaatgccgggtattgcatgggatgagcttgaagaaaatctcctccagagagtaaactcattatttcaaagttctgatttggatttctggagaaaaggaaggtttttagttcgaaccaactcccagttggtatcatataaagcaggaatgacccgtttatcaaaattgtggagaacatggaatacccctgaattgacccttgtgtcaccaattgctgttgttggtgggcagaagacctccctcattcttaaaggccacaatctatctattcctggcacacagatccactgtacaagcatagggaagtacatatccaaagaagttttgtgctcagcatatccaggtagaaaacaggttcaggggtaa

SEQ ID NO: 35115 - DNA, 828 bp, Zea mays
  Peptide Sequence Number=SeqID_76894
atggagacctccgcagcaaccccgacccggccgccccacccggcggccgcttccccatcgccgtcgccctcgtcgtcgctgaggctgtggaggtcagcggcgcagcgcaacgtgcgcaatcagtggtcccgtctgagcgccgccaaggagcagtggctggccgccgttgctgatggccgcgcccacgcctccgcgctcgtcaacgcccacctctgccgcaggcaggcctcctttctctctgcgtggggagcaatacagtgggatgcttctgtcggcctacaaggagatggtaatttaccactacaaagttatgctgattcagttactaaaaatttagatcccatagtgcatggcattaagttttctgaccgccaagataatttgaatgattcaggggatggtggaggagccccagtattcaaatggttctccatattagaatttgagactcttgcccaggagcttgttcagatgtttgtttcagagcaaaagttgaagaggctgctactcttggaatttctctcgattgctttaaaggaaggtgtagaactccagacatcattaaattggggtgatgaactatatgatggtgaatcaaatgaacttcagagtattggccttcagtcaggagatgcctactcaccgcctgaaaattggtgtgcagaacgtttagggagtcagcgacctggcaatctccctctgcatgaagttttacagaactcgcaccttgaatttggttgtgataacagtgacgatttcttacatcatctcagaattggtgaaatatttgagcttgttgaggaggagatgaagattaaactgtcttga

SEQ ID NO: 35116 - DNA, 591 bp, Zea mays
  Peptide Sequence Number=SeqID_76895
atggtcaagtccaaggccatcagggtccacgagctgggcggccccgaggtgctgcggtgggaggaggtggaggtcggggagcccggtgaaggggagatccgcatcaggaccaccgccgtcggcgtcaacttcatcgacatctactttcggaagggggtctacgccgcgcccaccatgcccttcaccccaggaatggaagccgttggcgtcgtcaccgctgttgggcctggcctcactggcaggaaggtgggcgatgttgttgcatatgccggcaaccccatgggctcctatgctcaggagcagatccttccagcggctgtcgctgttcctgttccaccttccgttgatcataagcaagcagcttctgtgatgctcaagggcatgaccgcccatgttctgcttcgccgggtattcaagagcagggccgtggagggggccgtggaggggagcgacgacaacggtgatatccgtgcgaggattagaaatgcggcagcatctgctagggttcgcgaaggcaatgggaaccagggatgggtcatcggcacagtggagcagacgcgagactgctcactgagtgtgaatcgtggcaac

SEQ ID NO: 35117 - DNA, 1161 bp, Zea mays
  Peptide Sequence Number=SeqID_76896
atgcagttgtgcatcaggcagagcagggccgtggaggggagcgacgacaacggtgatatccgtgcgaggattagaaatgcggcagcattcgctagggttcacgaaggcaatgggaagcagggatgggtcatcggcacagtggagcagacgcgacactgctcaccgagtgtgaatcgtggcaatgggctacagtgcgaccctagccccttcaccggcatcctcttcctcctcctctcccctcctgatttattctctctcccgctaaatggatgggcacgctacagcggagaccttccccgcagccgcttccttcgcacacaagcgcgcgcgctcggaatactccgaggaaggagctctaggcgaaccacgggcgacagaaccgccgccggagaaggtacccgtcgatccgccctcgcccgcgaatcgtttgtcttcgttcggccggcgagcagcagtgggggtcctccacgcgaatccgccgtccagcttcgcggaccggcgacccggccgatccgtgcgaagacgccggtgccgctcgtctctgtccgccggcacgtcggctgcggggtggaggtcaaagggaggtcatcgattcgccgacagatctacgctcagccgatttgcgtcattcgagcttcaaggtccaagctgacgcggcgccgacgtggaccggagctcggcgccatagatcttggcgccgagctccgaagtaaaactccctcgtcgtcctctctccaatcccgcggctcccgtctcctccaccgcgctctcgtctcctccaccgcgacaatcgtctcctccaccgcggcaaccgcgccccctcgcccaccggccaccgcgcgcgctcctcctccggccgccgcacgtcccggcccctccaccggcgaccgggcggcgcgccccatcgcgcctgcccctcgaccgggtgccgcgcgcccgtgcagctccggcggcgcgtgcccccactacccggcagcctcgcccccgccaccgcccctggcccgagagcctcgggcccgcgacctcccaaccgcgccccgcccccctgcaccacgcaccacagcgagccccagctccctccaccgcgcgccgcagcgagcaccggctctctccaccgccgtcccccgccgcagccgcaccaagctccgcctcgcctcctag

SEQ ID NO: 35118 - DNA, 1932 bp, Zea mays
  Peptide Sequence Number=SeqID_76897
atgccgctttcctacgacgctgatgccaaagctgacgactactacaatgcgcccggtgtcgagatcatggtgtccaacttcggctccacctccaccctcagctacctcgagcctgatctcatgctacccatgcggtacaggaacattctagcgggcatgctggagaaggccgtctacgaggaaggccatgacctgttcggtgtgttgtatgaatcccggtatggactggcgggtccggggccaccatcgcaggggggcaacgcgtacctgcagcacctcaggctgcgggtggagtcggcgtgcacaaccaacggtagaaggcctgcgatccttgtggtgcacaatctgtgcggtctctttacgctgcagctgctgccgtgcagcccgctgcagtggcgcgcggtgcacatgcagcgcctcggcacgctctccacgccgtggggcgactctgtgcaggagatgctcgagaacatatttgattgtctctactgcgtgttcagagtcctggagaataaggagaggttggtcaaggctgaaggtgttgagttcatgctcatcatgcaaccatggccaccacctcatatgcaggttgagtttgggtgtggcagtgctgatttatgtccaattccatggccgtttttcaccacaattggtaccaatgaggagataattgacatcacatctgatgatgacaaggttgataatgtggttgatcagctgattgatgaacagatcgcagcagtagtctttgtgccagcgtgtatggaagctacgcctaataatggaataaatacaagcaaaaccatggagacctttgctgctcatcagtctcctgagtatgatagtggattgaaagataaggatcagagaatatcatttgaagatgagatatctgagggtgggcaagctgaacaaagtactccacaacaggaattgtgtgctatgccaccagatactagtgaccgtgaaactgttgagaggacaaccagaagtattgaggtggagcatttctctcaggttgagtcaaagcataaaatgaactctatgtccgtggaagcttctgagcatgtcactatcactcagattgagaagaagcaggttcaacaagttgagataactcaggagttagattcactgccgatatgttctagggagcattctgatgaggcacttgaaggggagagaacagtgcaggctgggttggaacaagagtgtgaggtgctggggatattgtcaacaatcacctcggatatttttgcaatagggctcagtccaaatcagtataccgtgtatttttatcagaatttgatggcctgcatgatgttgatctgtcgcagattcttgctgtcatttggacgtagttgggatgttgtgatactaggagatggcttgtccgtcaggcttacaccttggcaaccatttgatactgatatctacatctttcctgtgaacagaccagaatcatctccaagtgtctttggtattgcaacagaatcaacgcagtgtgcctatgattcccaaggaaacagtgtctcgacaatcctcttgatgatgcaaagatgcctttatgaacagatgatgcaatacaaatctgaagagggctgtactcgggtagtgaaatgcctcccaccggctgacgcaagtttacttgtctgggctgttaatcagatgacagatccattgattgcattgatgtatgcggtccaagtgatgaattttctcaaggacaaagatgagtcacctcgagaggatgttttgctgctccagaaggacccatttgatggcaacaggcatcagaaacccaacgtgacacttgccatctccttgaggaaagatccaggagtcattgctgcgtgcactgccccaaccaacgaagtaccaacatatgtggaggactacactagtagctcaaaatctgcaactgctggctag

SEQ ID NO: 35119 - DNA, 2661 bp, Zea mays
  Peptide Sequence Number=SeqID_76898
atggcgcacatggagctccgcttgaccgatgcgttggctggccgtggtggcgagcacaggatggaggacgcggtctcagggctctcttcagcagctcccacaggcttcgatggagagcctactttcgacgaggagctcggcaactccatcaccgagtctgtcgacgtctcgtgccacgaccatctcttcctcctcgacaccacctgggactgctcgcagcagcacaacgccagcatcccaggacggcgccagcatctcggtcgcagcacgcggctgcagcgccgaccgctacagcacctgatcgtcgaccccgtcagcgccgtccatggcagcgacgactctgagctgtcccacagtgaggtcgacagggtccttgcgaccgtcgtgctctccaacccgcgcgagaaggtccatgacgggctcgtcggcgtgacggagttcgcgcatcgtcctctcgccgtctacgacagctacgtcgagcacgacctctacagcttcatcccgctgctcttctacaccgagcaagccaaagaggagcaagtacccgtcgacacgcccaccaggtgttcgatgagagtcctcaactgcagaacctttcctcgacaagggcttcaaggacatccgtccagcccggtgtgtccactcgtgcgtcgccacgatggcgggttccacctctggttcgaaccctccgtgttggtcgcaccgcgcaccaggggccgcgctgagcagatgccgctttcctacgacgctgatgccaaagctgacgactactacaatgcgcccggtgtcgagatcatggtgtccaacttcggctccacctccaccctcagctacctcgagcctgatctcatgctacccatgcggtacaggaacattctagcgggcatgctggagaaggccgtctacgaggaaggccatgacctgttcggtgtgttgtatgaatcccggtatggactggcgggtccggggccaccatcgcaggggggcaacgcgtacctgcagcacctcaggctgcgggtggagtcggcgtgcacaaccaacggtagaaggcctgcgatccttgtggtgcacaatctgtgcggtctctttacgctgcagctgctgccgtgcagcccgctgcagtggcgcgcggtgcacatgcagcgcctcggcacgctctccacgccgtggggcgactctgtgcaggagatgctcgagaacatatttgattgtctctactgcgtgttcagagtcctggagaataaggagaggttggtcaaggctgaaggtgttgagttcatgctcatcatgcaaccatggccaccacctcatatgcaggttgagtttgggtgtggcagtgctgatttatgtccaattccatggccgtttttcaccacaattggtaccaatgaggagataattgacatcacatctgatgatgacaaggttgataatgtggttgatcagctgattgatgaacagatcgcagcagtagtctttgtgccagcgtgtatggaagctacgcctaataatggaataaatacaagcaaaaccatggagacctttgctgctcatcagtctcctgagtatgatagtggattgaaagataaggatcagagaatatcatttgaagatgagatatctgagggtgggcaagctgaacaaagtactccacaacaggaattgtgtgctatgccaccagatactagtgaccgtgaaactgttgagaggacaaccagaagtattgaggtggagcatttctctcaggttgagtcaaagcataaaatgaactctatgtccgtggaagcttctgagcatgtcactatcactcagattgagaagaagcaggttcaacaagttgagataactcaggagttagattcactgccgatatgttctagggagcattctgatgaggcacttgaaggggagagaacagtgcaggctgggttggaacaagagtgtgaggtgctggggatattgtcaacaatcacctcggatatttttgcaatagggctcagtccaaatcagtataccgtgtatttttatcagaatttgatggcctgcatgatgttgatctgtcgcagattcttgctgtcatttggacgtagttgggatgttgtgatactaggagatggcttgtccgtcaggcttacaccttggcaaccatttgatactgatatctacatctttcctgtgaacagaccagaatcatctccaagtgtctttggtattgcaacagaatcaacgcagtgtgcctatgattcccaaggaaacagtgtctcgacaatcctcttgatgatgcaaagatgcctttatgaacagatgatgcaatacaaatctgaagagggctgtactcgggtagtgaaatgcctcccaccggctgacgcaagtttacttgtctgggctgttaatcagatgacagatccattgattgcattgatgtatgcggtccaagtgatgaattttctcaaggacaaagatgagtcacctcgagaggatgttttgctgctccagaaggacccatttgatggcaacaggcatcagaaacccaacgtgacacttgccatctccttgaggaaagatccaggagtcattgctgcgtgcactgccccaaccaacgaagtaccaacatatgtggaggactacactagtagctcaaaatctgcaactgctggctag

SEQ ID NO: 35120 - DNA, 777 bp, Zea mays
  Peptide Sequence Number=SeqID_76899
atggtgaaccggaacatgctggggccgcggacgcggtacgcgtacctggccgtggcggagccgtggcccaaggtgtccgggtttgcgaaagtggatgccggcaccagggaggtggtggtggtcgggtcctgcatgactcccgccgactccatcttcaacgacgccgacgacgggcaccagctgcagagcgtgctgacggagatctggcgtgacgagccgacggcggcgcctgtcccccgacgcaccgactccatcttcaacgacgccgacgacgggcaccagctgcagagcgtgctgacggagatcaggctcgacacgcgcacgggcgcgtcgacgcggtgcgccgtgctgccggcgtcagcgcaggtgaacctggaggtggggatggtgaaccggaacatgctggggcggcggacgcggtacgcgtacctggccgtggcggagccgtggcccaaggtgtccgggtttgcgaaagtggatgccggcaccggggaggtggtggtggtcgagtcctgcatgactcccgccgactccatcttcaacgacgccgacgacgggtaccagctgcagagcgtgctgacggagatcaggcgtgacgagccgacggcggcggtgagggcgaggaggatggggccaagaggaggacagaccggattgccggactcgacgccgcttccccctgcgcacatcgcgcctgctctcccgagcctgccccccgacgcatcgactccatcttcaacgacgccgacgacgggcaccagctgcaaagcgtgctga

SEQ ID NO: 35121 - DNA, 1134 bp, Zea mays
  Peptide Sequence Number=SeqID_76900
atgtgcgcagggggaagcggcgtcgagtccggcaatccggtctgtcctcctcttggccccatcctcctcgccctcaccgccgccgtcggctcgtcacgcctgatctccgtcagcacgctctgcagctggtacccgtcgtcggcgtcgttgaagatggagtcggcgggagtcatgcaggactcgaccaccaccacctccccggtgccggcatccactttcgcaaacccggacaccttgggccacggctccgccacggccaggtacgcgtaccgcgtccgccgccccagcatgttccggttcaccatccccacctccaggttcacctgcgctgacgccggcagcacggcgcaccgcgtcgacgcgcccctggtgcccgtcgtcggcgtcgttgaagatggagtcggtgcgtcgggggacaggctcgggagagcaggcgcgatgtgcgcagggggaagcggagtcgagtccggcaatccggtctgtcctcctcttggccccatcctcctcgccctcaccgccgccgtcggctcgtcacgccagatctccgtcagcacgctctgcagctggtgcccgtcgtcggcgtcgttgaagatggagtcggcgggagtcatgcaggacccgaccaccaccacctccctggtgccggcatccactttcgcaaacccggacaccttgggccacggctccgccacggccaggtacgcgtaccgcgtccgcggccccagcatgttccggttcaccatccccacctccaggttcacctgcgctgacgccggcagcacgacgcgccgcgtcgacgcgcccgtgcgcgtgtcgagcctgatctccgtcagcacgctctgtagctggtgcccgtcgtcggaggacggcatcgtcgaatccggctgccgtgaactgccggtcgggccgcgcccagccgtggtcgagcaggtcgccaaggcgttcggtgccgtggtggtggtgggggggggggtaacggcgtcgccaaggagaggagaggaggggcgccatgccagatccgaggtcgacggcgtggtcaccggaggggtggggcggccgcgccgacgggggatccgggcgtcgtggcggcccctggacggtggcgatgcgttggatctagggagcgcgaggtag

SEQ ID NO: 35122 - DNA, 829 bp, Zea mays
  Peptide Sequence Number=SeqID_76901
atgcagctggagcaccagtctctgggtgcgaaaaaggcgaaccgccgcgcgaggaacgaactgtcgcgcacgatcgcgcatcgcctcggggccgctgcggagagatattttattaaccaaggcggcgacaacgaggcgccccgcacgtggcctaatggagccgccagacgtggggccatgggtcagtcagccgcgggaacagatgtggcagttgacgtccgaagccgccacgtgtccagagaaggtgatacactccatggcgtcaacagtggtccggagccccacgcgagagcgccggacccctggatatacattctggaccccaaggatggtcccgaacccccggatatacagtccggacccccaaggttggtcccggacccccacgtgtgcaagctggacccctggaatgggatccggaccctccgtatggggtccggacctgtccgcatacgcctctgctccccgcccaggcggagacccgatgctgccacgtggcctactacgcgtgacgtaagccagcgggcggagcctgacgtaaggcctccgggttacgcgacccctacatttattgcggataaggcgcgctgcctgcccactccgctgacatgcgatgtgccgcctcggcatttaatgagccatgtccatcccgtaggcggcgtgcctgtccattccactggcaggcgatgtgccgcctccgcatttaatgagacctgtccatcccacaggcggcatgcctgtccgttccactggcagactgcacgcccatactgccgcgtgcactacgcccatcattactcgtacgttaccaaggaagctgccgcctcat

SEQ ID NO: 35123 - DNA, 279 bp, Zea mays
  Peptide Sequence Number=SeqID_76902
atgaggcctttgcagctttatgctgatgggggttaccagctgagaattaggagccttgaggacatcctgttcgttttctcgatcttcgccctgttcttcctcaccaacttgctgcccccgcccatggtcgcagtcgcgagccgaccgatgctcgtcgacgcggtgaggagtccagggctgggaaggtactcgcatcctcttgaccttctcgggctaacacctggcgagaagacgcccatgaggaccgacgaacaggaggacaccccgacaagaacctag

SEQ ID NO: 35124 - DNA, 450 bp, Zea mays
  Peptide Sequence Number=SeqID_76903
atggtcctcgtctcaattgccgccacctcattcgccatcctgcttcttttctctctcccctcatgtccccgcctccgcaccaccccattctcggcagagggcgtgagaacaggcgtctcctccccgtattcgtctgacaccaatcccgacaccgactcgcgtagtggctattacacatccacgaggacgtcacacaacatgcgtgcaccatcgtttttgccgtcgtcagacatcctgttcgttttctcgatcttcgccctgttcttcctcaccaacttgctgcccccgcccatggtcgcagtcgcgagccgaccgatgctcgtcgacgcgggtacgggcgagtcggtcttgctcctggcctttctatgtgcgtgccgcacgaggaggacacagtggcgcctgccacacttaggttatcttggcagtgaggagtccagtgctaaggactga

SEQ ID NO: 35125 - DNA, 300 bp, Zea mays
  Peptide Sequence Number=SeqID_76904
atggacctgggtggggtggtgatggccgcggacgacagtgcttcagagctcggcctgctcggcggcggcggatataccggggacggggcaaatacagccaggggagaggacgacgagaggcaacaggtcgaagcaggcgacgccagcatccgtcgtcgtcgtggacgcggtggctgccaccaaggaggcgacaccgttcttgctgccgtcaatcttttccatggcattactaattacccccacgaaaacaagaaaattctcagcgatttctccacagacaaaggcaatgtatctttctaa

SEQ ID NO: 35126 - DNA, 1857 bp, Zea mays
  Peptide Sequence Number=SeqID_76905
atggccgcgcccggaggcctggaccaggactgtgcacaggacgccgccattaagctcttcggccgcagcatcccggttctccactcctccgtcttcgccgccaccgctgcggccgcatccgagtgtttgtacgggaattttcttccaatacgtgtttcttcaacaagtcactctccgtatttacggccgtatttatggggagatttatgttggtttatcccttacccagattctaatcataaagatacattgcctttgtctgtggagaaatcgctgagaattttcttgttttcgtggggcctaatcttgttggacataagtgcattagcatacttctatagtcggaccaataatttgttgaaaagcaaaagcacaagttctaacaacctcagttgtgtggcatggaatgcaaatcatgtaacacattgggtggttcttgttagcaccaaattatcaaatgatgttagaagcaatgatggcatgccatgccttccaaacatgtctttgattgtcaaaacaaatcccttcccttccaagagcaatatgaagaatggtttacaggcaatcagcagtcagcatgggaaaatggaagctgattccaactctgaggaagctaagaatagtttacaagctatcatcagtcagcctgggaaaagatacgattccaagtctgaggaagctaagactgaatctggtggatctggccaagagaaggtactcaagaagccagataagattctgccttgccctcgctgcaatagtatggaaacaaagttctgctacttcaacaattacaacgtgaaccagcccaggcatttctgccgaaactgcaagaggtactggactgctggggggactatgagaaatgtccctgtaggttctggtagacgcagaaataaggatccatctcatcaccatcatttcaccaaggtgtgtgattataccattgctactaatggagatgtttctgatgcaactcagcgccagtccgttgcagccaagccatgtctccttcaaggttcaggaaaacaaaatgaaacagcgtgcaagtctgtatctccagtcagtaatattaaagagcagaacaatgccgaccttatttccttggtctctggtgataataaggaagagaaatcatgtgcatcttctgcagtggtatctggttcctccgaaaattggatgccagaaaatacagttaaaaaggaggaggataatacttcagcgtacggtaatggtgtgaaagtacctgatcacaaaatgcagcctcaccatgctggacctgtttcggtgttctccagaaatcctgctgcagtcatggcgactaatcagtgctcagaagatggtattcatacgccgggaaatggtacggtcagtcctctttcactgccaccactacccatggtaccaaccccaggaatttgtgcacctgctgttccattccctttccctctcgtgccagccttcgtgagctgcattcctggctggccaagtggactatggggtgcaccatggcctggaagtagtgcccctacattactatctcttcctccaaacggtttagctctttcaggaagcaactctggggtgttaggaaagcatacaagggtagctaatttgcaggaagaacagaaggcagaaaagaagttttgggtccctaaagctctccgaattgacaacccagaagaggcagcaaagagttcgatctgggcctctcttggtatcaagcctgatgacagaatcatattcaagtctttccagtccaaggatctgaaaaatagtgcgactaagacgccagaatccctgcaggccaatccagcagcgttttcccgctctcagacatttcaggagagggcctga

SEQ ID NO: 35127 - DNA, 231 bp, Zea mays
  Peptide Sequence Number=SeqID_76906
atgttcggattgcaggtgacaatgagactgattgttcttggttttgactctggtaatgctagtccactacagccaaacaggacacttgctgagtatgttgatgtgtactcacccttgctctacacaccaacccccccttccccaggttgtcagcattgcgaccactgctcaagagaagacgaagccgtggaaggagacttcaaggagttccaagactacgacgagttctag

SEQ ID NO: 35128 - DNA, 111 bp, Zea mays
  Peptide Sequence Number=SeqID_76907
atgttcggattgcaggtgacaatgagactgatggttcttggttttgactctggtaatggaattagaccaggtgaccaacaacaatattcatcgtattcattagaaagatag

SEQ ID NO: 35129 - DNA, 192 bp, Zea mays
  Peptide Sequence Number=SeqID_76908
aggatccagggtgtagttcgcttcgccgtcgtgccgtcaatggggctcggtgtatgcggcttgctctgccaagggatgttcggattgcaggtgacaatgagactgatggttcttggttttgactctggtaatggagaagatgaagccgtggaaggagacttccaggagttccaagactacgacgagttctag

SEQ ID NO: 35130 - DNA, 726 bp, Zea mays
  Peptide Sequence Number=SeqID_76909
atggctccgccctcgccctccccccaacctgtccacgcccgcgcggcctccctcgcaccccacctcaatctcctacggacgtccccgcatctcgcggccgccgtgcccacgcgccatcggccttcccccattgtgccccccgagcacggcgtcgcgtggaagcccgtgccatacccgcaggcccgccacccacctcccctggcgtgcaacagctttcacgctcccctgcccccgccatgcccgcactggatctgcagaacatccgctgctggcacactccttaggtgcggcggctgcacctgcacagccggttcgtcaccaagctcggggggagtggctcgtggcagtcgcctcgacgtcgtcctccgtgccgtccgacgaggtgtcgtcaccccagatccggatcccgcccccgtcatcggcgtctcctccctcacccgcccgagacccgcgcgtcgatgtcgcccaatccgcatccctcgctccaccctccccgacgcacgcgggttcgcctccgacgccgacctgactcgctcgccttcacctctgcccatggcgccttcaagcccccccatggtggatgcgcgatgcaactcggaggtcttgcaatgtgtcggcgtgttcgttcaaggacgagagggggaacagcggattcatccccgccaggcttcaggtcagcatatgcaggatgaggatgtcgggcggccgtacaggaagttcctctga

SEQ ID NO: 35131 - DNA, 645 bp, Zea mays
  Peptide Sequence Number=SeqID_76910
atggctccgccctcaccctccccccaacctgtccacgcccgcgcggcctccctcgcaccccacctcaatctcctacggatgtccccgcatctcgcggccgccgtgcccatgcgccatcgcccttccccgtcgtgccccccgtacccccatgctcgcaactgccaacacatggctacctccatggccgccgccttcactcgctatctctcctcacccttccctgtaccgcatccaccggatctaggagcacggcgtcgcgtggaagcccgtgccatacccgcaggcccgccacccacctcccctggcgtgcaacagctttcgcgctccccctgcccccgccatgcccgcactggatctgcaaaacatccgccgctggcacactcctcaggtgcggcggctgcactgcacagccggttcgtcaccaagctcctcaatgaccttttcggagtccagtccaggggtgactgcgcgtgcgcggtacggcccgcgctcctcggcgtcggcgaggacctcgcgctacgcatccgtgacgccatcgttaagggctaccacggcatgaagcctgggtggacgcggttcaggttggcctactacctatcccacgacgagttcttcaaatgcccgctcagtagtgtaccacaataa

SEQ ID NO: 35132 - DNA, 231 bp, Zea mays
  Peptide Sequence Number=SeqID_76911
atgaagctgtggaaggagacttccaggagttccaagactacgacgagttctaggtgtgggttagcggcaacccccagtcggctgcctgtgaaggccgcgtttatctacgtttcttttccgcactttgatttattggcgagagactccaacttgtggagattcctcgcaaacgggaaaagtgataagaaaaaggaacaccgtggtattcaagttgatcattggatcacttga

SEQ ID NO: 35133 - DNA, 2097 bp, Zea mays
  Peptide Sequence Number=SeqID_76912
atggaggccgctatgtactcagcctcgcaactggacatgaccaccacatgctgcttgaccgactacccagttgatgggacacttgccgaggaagaagatgatcccgcttgtgctcttgctggtgtcgatgtcgccggcgtggtcgctgtcgctgtacccgacaaggaatcgactaacgtagccgacggagtatgccagatccggtcgtgtgtggacgaggtagcgaaggctccccacaagacgccggaaaacagtgccgcctgccccgctccgactgctgtggcactcgacagagtgaggctgacagcagctaagtccagcctcgggcgccatggaagctccgcctcgcccgacccagggctcggactcagcctcggcctcggaagacggtctccgcctcgcccgaccctagggctcggactcagcctcggcctcggaagacggactccgcctcgcccgaccccagggctcggactcagcctcggcctcggaagacggtctccgcctcgtccgacccagggctcggactcagcctcgaccccggaagacgaactccgcctcgcccgaccccagggctcggactcagcctcgacatcggaagacgaaatccgcctcgcccgaccccagggcccagactcaacctcgacctcggaggagcctccgcctcgcccgacctcgggctcggacccgccacgtcacagggaaggccttcattaccctacccctagctatctcaggctacggggaacaagaccggcgtcccatctggctcgccccgggctctcgtacgagaaggttggccgcgcgggagaacgagctggcggacagtctctctctctccctctctccctctctcactctcccacgcggacgcttgtaacccccctactgcaagcgcacccgacctgggcgcaggacaacacgaaggccgcggggaccccccggagtcgaaacgccgacaggaagtgccagatgaataaggatgagtcaattgcttccttgccaattgatgaattgatcgagaaggctgatggctttgctggtgtctttccagaacacaagtatgagatcgtgaaaggcttgcaagcaagaaaacatatatgtggcatgactggggatggtgtaaatgatgccccagctttgaagaaggctgatattggtattgcagtagcagactctactgatgcaactcgtagtgcttctgacattgtcctaactgaacctggccttagtgtgattattagtgctgtgctgacgagtcgggcaattttccaaaggatgaagaattacacgatctatgctgtatcgattaccatccgtattgtgcttggttttatgcttcttgcgctgatatggaagtttgacttcccaccatttatggtcctgatcattgccatcctcaatgacgttcttggtggttatttggccatgatgactgtcattttcttctgggctgcatacaagactgactttttcccgcggctgttccacgtcgaaagcctcgagaagaccgcccaggatgactttcagaagttcgcctctgccgtgtaccttcaagtcagcacggtcagtcaggcccttatcttcgtgacacggtcgcgcagctggtcgtttgtggagcgtcctgggttcttgctggtcttcgctttcttggtggctaagctgattgccactctgatcgctgtatatgccaactgggcgttcactgcgatcaagggcattggatggggctgggccggtgtcatctggctctataacatcgtcttctacttcccgctggacatcatcaagttcctcatccgctatgcgctgagtgggagggcatggaacctcgtccttgagcagaggattgcgttcacgagcaagaagaatttcggcacggaagaaagggagcgcaagtgggcgcatgcgcagaggactctccatgggctccagccgccagaagcatccatcttcgagaacaagacgacattcaatgagctgaaccagctcgcggaagaggcccgcaggagagccgagatggcgaggttgcgagaagtgagcaccctgaaggggaggatggagtcagtggtgaagcagaagggtctggacatctag

SEQ ID NO: 35134 - DNA, 749 bp, Zea mays
  Peptide Sequence Number=SeqID_76913
acttctccccctcacctcagcgagaggtggagtatgagaggccgccttcccctgcacatcagtcagagatgccccctgcaccaccacggggcatcccagctgctggaggagaccctgatggagacaacgatgccgacggtggcagtttgagccacaacacggagctctcggaggagccagagggatggatcgctagacccatcactcgtgacgccgctcgtgggtgtcacttctacgacgctctcgatacccagctgcatcgggacttcgaccgacacacttggtccaacgagtaccattgtgttgtctaccagcattgtcgcgggttatacccggaccagtgggaggctacttgcttggtgcgccgtccggatgatgatctccggggtgcagaggccttttcagagcactattctattactgagaaagatactgctgaggcagccatgcaagatgcagcacgacaggcactttctcagtattgctcgttgtttagtggggtagctgacggcctcgacctaaagtactaccctcgtcgttcgaccggcagtgctggaggtgtggttgtctcgccagttggtgagggcaatcccaggctaaacagcatggtcaatctggatgtcgtgctcaacacagagttggaccacgcccttgatgagttgggcaagcacccttaccattcaccgccccgtggtcgcttcgactattgtaccccagactgcaggacccggatagatttggatccctag

SEQ ID NO: 35135 - DNA, 1161 bp, Zea mays
  Peptide Sequence Number=SeqID_76914
atgacgcccgcccacgcgcccaactccctttttagagccccgccagtgccagcgctcgccccccgcctcatttcgcatagcatcgccctctctcgcgctctgccctcgccatcagacgccgccggagacccgtgtccacttcctcggacatctagctcgccggagaccgccccaagcctccccgagctccgccccgagttgtactttccaaatgtattgaatgcattctcggtttatctagacaacgagcagtccgaggttcctgagtgtgttgttggagacctccctgagcaacaacctgcggagcgtccactacgtcgcatggtgccaggtcagtccagtcacctagagagactgcatcgttacctgcacgaggagcaggagcgccgacgccaggagcaggagcagcaggactcctccccctcacctcagcgagaggtggagtctgagaggccgccttcccctgcacctcagtcagagatgccccctgcaccaccacggggcatcccagctgctggaggagaccctgatggagacaacgatgccgacggtggcagtttgagccacaacacggagctctcggaggagccagagggatggatcgctagacccatcactcgtgacgccgctcgtgggtgtcacttctacgacgctctcgatacccagctgcatcgggacttcgaccgacacacttggtccaacgagtaccattgtgttgtctaccagcattgtcgcgggttatacccggaccagtgggaggctacttgcttggtgcgccgtccggatgatgatctccggggtgcagaggccttttcagagcactattctattactgagaaagatactgctgaggcagccatgcaagatgcagcacgacaggcactttctcagtattgctcgttgtttagtggggtagctgacggcctcgacctaaagtactaccctcgtcgttcgaccggcagtgctggaggtgtggttgtctcgccagttggtgagggcaatcccaggctaaacagcatggtcaatctggatgtcgtgctcaacacagagttggaccacgcccttgatgagttgggcaagcacccttaccattcaccgccccgtggtcgcttcgactattgtaccccagactgcaggacccggatagatttggatccctag

SEQ ID NO: 35136 - DNA, 348 bp, Zea mays
  Peptide Sequence Number=SeqID_76915
atgacgcccgcccacgcgcccaactccctttttagagccccgccagtgccagcgctcgccccccgcctcatttcgcatagcatcgccctctctcgcgctctgccctcgccatcagacgccgccggagacccgtgtccacttcctcggacatctagctcgccggagaccgccccaagcctccccgagctccgccccgagttgtactttccaaatgtattgaatgcattctcggtttatctagacaacgagcagtccgaggttcctgagtgtgttgttggagacctccctgagcaacaacctggtgaaggcaagtgtcctctgacctattatgtcctacatactttatga

SEQ ID NO: 35137 - DNA, 396 bp, Zea mays
  Peptide Sequence Number=SeqID_76916
atggatctgacacggtgtggaatgggaggagccgaagcggagattggatcaaagtgcactgggcaggagccaagcaaatctggtggacgcctaaggatcagggcgtggtgcctcccgcactggtccgcggctgctggagcagctgccacggctggcatcgcagtggtcttgttaacctcaagagggtcatttattggattgtttgtgtggaaggcagttggttactacaatgctggaacagtggagtttattgtggacactctttctggagagttctacttcatggagatgaatactcgactccctcctcccctcctagatcccgtgatctgctacgaagctgccatcaacgccctcctccccctctccgctcagctcctcctcgctctttcgtag

SEQ ID NO: 35138 - DNA, 360 bp, Zea mays
  Peptide Sequence Number=SeqID_76917
atgccgtcagtggttgcccacataggggcatgctccaccatgcgcgcacctcgccctgcatgccggcagacataccctgcggctgcccacacaaggctgctaatggcggaggctgagcgccgccatggatctgacacggtgtggaatggggaggagccgaagcggagattggatcaaagtggactgggcaggagccaagcaaatcgtgtccaggacgactgggttcgctatgctaagatgactgaagaaattggagagcaactgcatattgtcggtgatgaccttgtcactaatcccactgcatttttggcacatatggtctatatgaaagaattgatgaatctcgaaggatgtggttaa

SEQ ID NO: 35139 - DNA, 576 bp, Zea mays
  Peptide Sequence Number=SeqID_76918
atggaggatgaggcgagtcggggggctgcctccgcgtgggtcagttacccttttcttcccctggcgtctgggggagaatggcatcctccagtttcgcggagacttcctccagccatgccgggaaagggcgaagacctgccggcgcgcttcgaggcgtcggcagccggagatggcttctctaccgatgagattgccaactccgccagtagccctgggtctccgtctcctggcctgaatggctggctctcgtcctcggtgggtgagagtccttctgccgtagcacctgccccgaagccgctgctgaagctgcttcgtcgcccggggcgggggtggttgtcgctgttgccggatcgggcggcggcgggccgcccgtcggtccgcgatcgctccgcggactcgcctgttgattatctgaaccgcttcaccaagcatgagtcgccccgtgtcaaggtgacgagtgagagtggggatccttggaccgcgtcgccgtccgaggctaggttggactttgctgaaggtgttactgcccccttccagcgtcaagacccgagcctgcaaaatcagagtgtcttgtag

SEQ ID NO: 35140 - DNA, 333 bp, Zea mays
  Peptide Sequence Number=SeqID_76919
atgaacaaaaaaccctggcattcgaagtgccattacaaatggaactctggttccgtccccgcgggtacgaacgaccccacaagattggggaacccgcggagcgatcgcgggccgacaggcggcccgccgccgcccgatccggcaacagcgacaaccacccccgccccgggcgatgaagcagcttcagcagcggctttggggcaggtgctacgcgcggacaggcagcgcttccggcgggagcagtgggcaacgcttcgccttcgccgtaataactgcgacaaaaaagcagggaccgggaaagggggataccccgaaaaggatccttccccgtga

SEQ ID NO: 35141 - DNA, 1092 bp, Zea mays
  Peptide Sequence Number=SeqID_76920
atgcacgggtgctggggccagaccgtgcccgtccctgcgccggatccgaggccgaggccgtgcccttgcctggaggaccgccgaggagccagccgtggagccgcgcccgaggaggaccgccgaggccgggcggccgggcacgcgccgcgccgggatgcacgggtcctggggccagaccgcgcccgcccctgcgccggatccgaggctgaggccgcgcccttgcctggaggaccgtcgaggagccagccgtggagccacgctcgaggaggaccgccgaggccgggcggccgggcacgcgtcgcgccgggatgcacgggtgctggggccagaccgcgcccgcccctgcgccagatccgaggccgaggccgcgcccttgcccggaggcagagcagttctctgctcgtgcccacgcggaggccgagcgggcctgcctgcgcgcacgccgggtggcgaggccgaacactactcacatctgtgcacatgcagtcgctggggagcccctcccgatttggcctgcctcccccgaaattgtcggcgttctcgcccctccccgtcgcgccgcgcgatgctagccgtgattcccgcgtccgcccgcccgacgtctataaacttgttctgcagatgcccctcccgcccatcgtcatccatcccctgcctccgccgcggacgaccttccttggccaccaccagggggcttctgcaggcgagcgtgcaggggggagctgtggcccatggtgttcgacttcacgccccgtgcaacccctcctcaccgtgtcggcacgctgcccgtcttcgtctcatctcgttggtgctcctccctccctccctccctcgggggcctgcttcctccccatgattcagtctgttgcaagatatgtaagtatacacactggtattagtattgtctatgcatggagtcagggtgtcaatcatgctataatacgtcatgctaacaaaacttcgtacaattgttttccagctataatacgtcataaccagcctgaagtttgggcattttgcttgggaaatggctacgctggattgaaggatgctcttggttcaaatgattccagacttcaaagaatttgctaa

SEQ ID NO: 35142 - DNA, 255 bp, Zea mays
  Peptide Sequence Number=SeqID_76921
atggtcttagtattttatgtcccactgcaagctaatggtagtaatcgatgcatttttgaaaatcaggtctatgcatggagtcagggtgtcaatcatgctataatacgtcatgctaacaaaacttcgtacaattgttttccagctataatacgtcataaccagcctgaagtttgggcattttgcttgggaaatggctatgctggattgaaggatgctcttggttcaaatgattctagacttcaaagaatttgctaa

SEQ ID NO: 35143 - DNA, 195 bp, Zea mays
  Peptide Sequence Number=SeqID_76922
atgttcaaggtggtcgcggcggcgacgacggcaaagagtcgttggacaacccgctggagccagggtgtcaagcatggttctgctataatacgtcataaccagcctgaagtttgggcattttgcttgggaaatggctatgctggattgaaggatgctcttggttcaaatgattccagacttcaaagaatttgctaa

SEQ ID NO: 35144 - DNA, 1038 bp, Zea mays
  Peptide Sequence Number=SeqID_76923
atgacgccgccgtccatcttccaccaccatcgctgcctcgtctccctcccctccgcttccccgacctggacctcgtcccgtcgtctcatccatcaactcgcaaaacccacagtcctgtccctacatctgcgtccagtcttatcctcttccttcgcggttgccgccgtcggcgacgacgaggatgtcgtagtcggggattgcctcgtgttcgacgacgacgctttcgaggaaccggacctggacctcccctcgtccccgtggccgtcggctagcgcctcacgccacggccggaggtcggaggcaggcgagagcgacagcctggtgccggagaggtggaggcatgccgaggaggagatcaacctgacgaagaaggataagcgccgcatcgcgcacgggctgcggttcgggagccgcctcgagcggcgggcgcccccagctgttgctgctcctgatgaattccgcgcgtaccgcaaggggatgctgagcgctgagcgtgagcatgtttctcatgtataccgggggccgctggagaggactcctccgccggaagtgaaggaacatccaccgccggagccggagcctgggacgcgtgtggccccgaggaatccgaggatggggatgggcgttggcacccttgacgacattgatgagtttttcagaagtagggaatatgttcaggatgagatggaggacagcaagagtcctaagggccgtcagaagttgttctcaaatgaggagaagattcttctgaacaagcgagtgcctgatctggaaacagctacttctagtaaatggcttccacttcacacccttgctgcatctggtgatttctatctattgaatagccttttaaaacataacgtggacataaatgcgcttgataaggatggcttaccagcgatccacaaagcaattctttcaaagaaggctgctattatcaattatcttttaaggaactcagcaaatccattcatccaagataaaggccaatctagggcgtcatccaacaaccctcatgaagtgcccagcccaacgtag

SEQ ID NO: 35145 - DNA, 465 bp, Zea mays
  Peptide Sequence Number=SeqID_76924
atggaggacagcaagagtcctaagggccgtcagaagttgttctcaaatgaggagaagattcttctgaacaagcgagtgcctgatctggaaacagctacttctagtaaatggcttccacttcacacccttgctgcatccggtgatttgtatctattgaatagccttttaaaacataacgtggacataaatgcgcttgataaggatggcttaccagcgatccacaaagcaattctttcaaagaaggctgctattatcaattatcttttaaggaactcagcaaatccattcatccaagataagagaagggataagctacgcgattatataactgcattcagtctccaaaaactgttactggatgaagccacactttatgactcaccccactactggaagtttgttagtgggcctgaaccagggcagacccagtgccggagacaagagtggggtctagagaagggataa

SEQ ID NO: 35146 - DNA, 1512 bp, Zea mays
  Peptide Sequence Number=SeqID_76925
atgtctttatccaatcaccatgaccgcacaattacttatcaaatagtttcatgggaagaattaatagctttggtagatgcccatgttctgagaaggctacagcttcctaatgcaaaattgttaatggatacttacgtcaaagacatggttggggagagctctaatgatcgtaatgacagagcaattcgtgttgctgcacgttggtaccaaagtcatcttggtgagagcgtgaaggttctactgatcacaaatgacagagataacaaaaggaaagcgattgaagaaggccttaacgctgagacagttgagtcatatgtaagatcgcttgcacagcctggtttgcttgatttggttgttgttccaactagcggagatgtttctatggaagatgtagacgatcatagaccatcaaagaagaaagtaatctacaatgagcacaaacctatgtcagaaattacatctggtttgcggtgtggaatctaccatcaagggaagcttcgagttaatcgttacaatccgtttgaagcttatgttggaagcgagagcattggtgatgagattgttatccgtggccgctcaaatatgaacagggcctttgatggtgatatagttgctgttgagctcttgccacaagatcaatggcacgagtcaaagtcttttatagcagatgatgatgaagaagaagaagaagatgttcatttagtccctaatagtgctgatgatgctcctcggaacactaattccacacaatcaacagttggatcatcagctccttccatttctagtcgtccagttgggcgtgttatgggtataatcaagcgaaattggaattcgtactgtggatccttgcagccgatgcccatgcctgctggtagtgggggtgtcgctcatgctttatttgtttcaaaagatcgaagagttcctaagattcgaattcaaaccaggcagcttgagaatcttgtgaacaaaagaattgttgtcgcggttgattcatgggatgttttgtctcgatatccatcaggacactatgttgtcttaatagagaatgatatcaacaccaggcctttctctacacaagtccttgcttgtttgccacctttaccttggacattatcaccagaagatctggctaatcctaatagacaagacttacgccaagtgagagtctttagtgtggatccaccagatgtttgttcacttcgtgctgatgttgaacggttggcattctctgtcatttgggaaatgactccggatgctgatgttatatcaacgagatatacaaagagtgttatcaaatcttgtgctgcaatgtcttatgttgaagcccaggcaagaatggatgacagccgcttagttgatccactaactgtagacttgcggaacttaaattcattggcaaagatcatgcgacaacgccgttgtgaaagaggggctttgactcttgcttctgcagaagtaaaatttgagattgatagtgaaactcatgatcctcttgacataggtgcgagttaa

SEQ ID NO: 35147 - DNA, 2568 bp, Zea mays
  Peptide Sequence Number=SeqID_76926
atgctgcagagcaagtcattcgtgaagaagacgaagcaaggccgcatccaaaaggtcgtcagggagcactacctccgcgacgacatctactgcggcttcgtcccctgcaccgcctgcgccgcagccgcggagcgaaagcttggcgccgctgccgccgccatcctcgtcgtcgacaccaacgtcgtgctccaccagatcgatttgctggagaacccggcgattgaggatgtcgtcctgctgtcagtggtgctggacgaggtgaagaataagaacctttcagttttcaacaggatcaaggcactgtgtatcaacaaagcacgtagattctatgttttcgccaacgagcagcatagggatacttacgtcaaagacatggttggggagagctctaatgatcgtaatgacagagcaattcgtgttgctgcacgttggtaccaaagtcatcttggtgagagcgtgaaggttctactgatcacaaatgacagagataacaaaaggaaagcgattgaagaaggccttaacgctgagacagttgagtcatatgtaagatcgcttgcacagcctggtttgcttgatttggttgttgttccaactagcggagatgtttctatggaagatgtagacgatcatagaccatcaaagaagaaagtaatctacaatgagcacaaacctatgtcagaaattacatctggtttgcggtgtggaatctaccatcaagggaagcttcgagttaatcgttacaatccgtttgaagcttatgttggaagcgagagcattggtgatgagattgttatccgtggccgctcaaatatgaacagggcctttgatggtgatatagttgctgttgagctcttgccacaagatcaatggcacgagtcaaagtcttttatagcagatgatgatgaagaagaagaagaagatgttcatttagtccctaatagtgctgatgatgctcctcggaacactaattccacacaatcaacagttggatcatcagctccttccatttctagtcgtccagttgggcgtgttatgggtataatcaagcgaaattggaattcgtactgtggatccttgcagccgatgcccatgcctgctggtagtgggggtgtcgctcatgctttatttgtttcaaaagatcgaagagttcctaagattcgaattcaaaccaggcagcttgagaatcttgtgaacaaaagaattgttgtcgcggttgattcatgggatgttttgtctcgatatccatcaggacactatgttgtcttaatagagaatgatatcaacaccaggcctttctctacacaagtccttgcttgtttgccacctttaccttggacattatcaccagaagatctggctaatcctaatagacaagacttacgccaagtgagagtctttagtgtggatccaccagatgtttgttcacttcgtgctgatgttgaacggttggcattctctgtcatttgggaaatgactccggatgctgatgttatatcaacgagatatacaaagagtgttatcaaatcttgtgctgcaatgtcttatgttgaagcccaggcaagaatggatgacagccgcttagttgatccactaactgtagacttgcggaacttaaattcattggcaaagatcatgcgacaacgccgttgtgaaagaggggctttgactcttgcttctgcagaagtaaaatttgagattgatagtgaaactcatgatcctcttgacataggaatttatcaaatccgtgaggcaaatcaaatgattgaagaatttatgttggctgcaaatgtttctgttgctgagaagattttgaagcatttccccttatgttcattgctaaggcgccatcctagcccaacaaaagagatgcttgagccattactccgtactgcctcttcgattggcctaaatctggacgtgtcatcctcaaaggcattagctgaatcacttgacaacgcaaagagcaatgacccatacttcaacaagcttattagaattttggcgactagatgcatgacacaggctgtttatttctgcagtggagatttgaccttttctgaatattaccattatgggcttgctgcttctctttacactcatttcacttctcccattcgcagatatgcagatgttgttgttcatagattgctagctgcagctctgaatattgcaaagctcccaccaatctttcaggatggtccacaacttacaggcattgctgacaacctgaattacaggcacagaaatgcccagatggcaagcagagcatcagttgaactccacacccacatatatttcaagacaaggccaactgacactgaagctaggatagtaaagatcaaggcaaatggtttcatagtatttgtcccaaagtttggcatagaagggcccatctaccttactccgaagggcgacaaaggcggtgattgggttgttgacgaggtgcaccagagagtaaccaagcccggaacaaacatcagctatgctatcctccagactgtcaggattcatatggaggttgttgaacctcagcctcatcgcccaaagctgcaactcaccctgatatga

SEQ ID NO: 35148 - DNA, 1245 bp, Zea mays
  Peptide Sequence Number=SeqID_76927
atgggcaaatccgtggagtttttgcgcgaagaaaaagggaacagggtccaagaaggcgcaatcgaagattcggaagggtggatggacttggcgttgaagggagggaaagggtggagagtggaagggacaccggtagccacgtcggcgggggttatggcgggggaaggagagggtggagacttggcgccagctgctggcgtccgaggaggagggaggcccacgtccgtggagggaggcctgggtggcggcgtcggcgtcggcgctgcgccggcgttggaggagcttttgccggaactttccctcgaggagcagccacggttgcagaaccaatcccacgagcgtgaccgcatccggaagcgacataacaagcactctcctcctccccgtccgtcgttgacctcggtacggtacgtgatggatatgggatcgatgggaatggatttcgtggcgccggcgttggaggagctgctgccggatctttcccgcgaggagcagctacggttgcaaaacaaatcccgcgggcgtgaccgcatctcgaagccacgtaacaagcacgctcctcgtccccgtccgtcgccgttctcggaatgggatcagtgcaacttcatcaaaattccccaggtcctccacgctctcgcccactacaatgccaggcaccctggtggcgagttcgatgttgtgaagcccctgaagcagagccgcgtgggattccggggccaggcatggttccatgtcaacttctgggctcgccccagcagcagcagcagcaacaataacaagacaatcaagcgcttctttgctgaggtgcactacaagccaaccccgatcagcagcccctcctcgtcttcgtcatcacttgcaataactgcagttcctatagttgaaatatgcatcattatcgctaccgagacattttacaccctaagggctgccgtaagttcgtctgtggaaacgacaaggaccggtttgaacagcgactggacccttgctgctgcactggaaagtatggcccgtgaattggaaaaggaattaaccaaagcgactgaagaatttacaattgaaatacaatcattaaaaggaaagatcagcggacttatttcagagaaggaatcaatatatgatgaactgaagtctactcaagaaaaggtgcagctggaaatgagccagagaaaaggccttgaagatcaaattctaaggttcaaacagtctgtgtctgatagttgtgctgaagaggatctggattag

SEQ ID NO: 35149 - DNA, 381 bp, Zea mays
  Peptide Sequence Number=SeqID_76928
atggcccgtgaattggaaaaggaattaaccaaagcgactgaagaatttacaattgaaatacaatcattaaaaggaaagatcagcggacttatttcagagaaggaatcaatatatgatgaactgaagtctactcaagaaaaggtgcagctggaaatgagccagagaaaaggccttgaagatcaaattctaaggttcaaacagtctgtgtctgatagttgtgctgaagagtctaaaacatcatgtagtatggttagatcaggatctggattaggcaacacagcttttgtgtccaaatcagaaaaattaagagaggctctatctggtcagagaggtaccatatcaaagatatttgaagaagataaggtcacaaggggcatataa

SEQ ID NO: 35150 - DNA, 1446 bp, Zea mays
  Peptide Sequence Number=SeqID_76929
atgtctacgtctcgtattgctcgtggcttgaggattttcccttacggacggaatattgctgttgttgtgtcggcagttatgaacaaggaccgtcaagacgctgcgcagaagcgtcgggcagttattaggatcgcagatcctaggcgtgaggcgaagagagcgcgggggagcgcgaaggctgcggcccccggcagcagccagccggtgccggatgcgaaactggccgcgcctggatccggcaagtcgtcggcgagcgcgaagacagccgccgctggcgggaccaagcctcccccggtcgaggctgcgaaagggcgggagctgccctcgcgggggaaacgtgttgccgacttcggcacgaacatcagcgtggaggactattttgttgggtcgggcgagggacaaatggttgttgtcccgccttcagtggcgaccactttgccgtcggcggtggcggccgactttgccgaccgtgttgcgtctggtgtcctgactgcggacgtggctgccgaagtcgagaggcttcaggcacagcacgcggatgccgtccgggagaagtcggctgcggagagcaaaaaccgcaggctggcggagaaagtggccgccttggaggccgagaagatggacctccgacgccaactgatggaggaaaggagggaggcgaaccaggccatcgctgaggcgcaggctgcgcaggcggaggccaaagtggcgcgggcggagggaagtcttgccagccaacgcgccgaggagtgggaggcgaggttcaacgccctgcgtggccgcgtggacaaggccgaggcctctatgcgcttggaggttgagcggacgctcgcacggttcgtggactcgtaccgcgagctgggtgcacggactgctgacttcgaggtgcccgaccgggaggcgggccttcgcttcctcgaatggttgcaggaggagttgctggtactcccgaccatcgtcgagggtttcatgtcctttgcctcccttgtcacctgcgagggggccatgaatgcgttgtcccgtgagggctgcaaacactacgaggtcttcgaccaatcagacgagagctttgaacgcgagatcttcaaggccgaagaccatgttgtgaagcagtcagcgggggcactttttgataggatgtggggggcgcatggtcgggaggctgtcagggagcgatccgaccaggcgagagagcagatggagcgtgccgaggacgtcaaggaccttggaggtctggtcggcgcgccgcccgaggctgcggaggtcaatccggtgctgccctcggatgccggtgaaggcccctcggtcgtgcccatgcctgctatggccggcgaagaccctgtgtcggcccctgcgccgacggtcgaaggtgctctgaaggtggcaaccgagccgacagttgaagaccccacggccgcggctaggccttcgcaggtggctaagtag

SEQ ID NO: 35151 - DNA, 1704 bp, Zea mays
  Peptide Sequence Number=SeqID_76930
atgccgaggacagagtgtctgcggagctgggatatccgtgggtccaacgacaggttgaatcgggtcttcgacctgaaccgcttgccgtacggtggttatcctggggaagacgccgccgaccgccgcgggaagaaactgatgggcgggaccgaggaagggccttcgcaggatgctgccccggctgctaagaagaggaaattaggtactatggtggggggaatgggtgtgtctgataattttgctgtggagttgatggggacatacatgtctacgtctcgtattgctcgtggcttgaggattttcccttacggacggaatattgctgttgttgtgtcggcagttatgaacaaggaccgtcaagacgctgcgcagaagcgtcgggcagttattaggatcgcagatcctaggcgtgaggcgaagagagcgcgggggagcgcgaaggctgcggcccccggcagcagccagccggtgccggatgcgaaactggccgcgcctggatccggcaagtcgtcggcgagcgcgaagacagccgccgctggcgggaccaagcctcccccggtcgaggctgcgaaagggcgggagctgccctcgcgggggaaacgtgttgccgacttcggcacgaacatcagcgtggaggactattttgttgggtcgggcgagggacaaatggttgttgtcccgccttcagtggcgaccactttgccgtcggcggtggcggccgactttgccgaccgtgttgcgtctggtgtcctgactgcggacgtggctgccgaagtcgagaggcttcaggcacagcacgcggatgccgtccgggagaagtcggctgcggagagcaaaaaccgcaggctggcggagaaagtggccgccttggaggccgagaagatggacctccgacgccaactgatggaggaaaggagggaggcgaaccaggccatcgctgaggcgcaggctgcgcaggcggaggccaaagtggcgcgggcggagggaagtcttgccagccaacgcgccgaggagtgggaggcgaggttcaacgccctgcgtggccgcgtggacaaggccgaggcctctatgcgcttggaggttgagcggacgctcgcacggttcgtggactcgtaccgcgagctgggtgcacggactgctgacttcgaggtgcccgaccgggaggcgggccttcgcttcctcgaatggttgcaggaggagttgctggtactcccgaccatcgtcgagggtttcatgtcctttgcctcccttgtcacctgcgagggggccatgaatgcgttgtcccgtgagggctgcaaacactacgaggtcttcgaccaatcagacgagagctttgaacgcgagatcttcaaggccgaagaccatgttgtgaagcagtcagcgggggcactttttgataggatgtggggggcgcatggtcgggaggctgtcagggagcgatccgaccaggcgagagagcaggtgaagatggagcgtgccgaggacgtcaaggaccttggaggtctggtcggcgcgccgcccgaggctgcggaggtcaatccggtgctgccctcggatgccggtgaaggcccctcggtcgtgcccatgcctgctatggccggcgaagaccctgtgtcggcccctgcgccgacggtcgaaggtgctctgaaggtggcaaccgagccgacagttgaagaccccacggccgcggctaggccttcgcag

SEQ ID NO: 35152 - DNA, 2040 bp, Zea mays
  Peptide Sequence Number=SeqID_76931
atggggatgatccgcaagattaatctaatgggtgtgcccctgcaggtcgaagatattctctttaatattgacaagaaaaagcaaagaaagagaggatgcttcgcatgtggggagaagggccacttcagggacaactgtccaactatgaccgaacctaaaaaggaaaggagcaaaggcaaggcgctaacaagtgtaaagacttgggatgattctttaagtgaagatgaacctccaaggacgcgcagccaccggtcctcatcacgctcatcatggtcatcacgcaaatgccttatggcaagaggtaaaatgagcattccatcctctagtgatgaaagtagtagtgatgatgaagacgacgacacatcgagggatgcccctcgccggagccgcgacggccgcgaacctgccacgactcgccccctacgcccaagtaccagcccgcccaccacgctgtcttcgccactcggcatcgccgacgtggcggccctcgccgacgccgacgccaagagcgtctccccgcccgcatggccggacgacgacgacgacgacgtcgccgggagggacgactgggtccaccatctcccgccccttgacatgcacatgccgccgctcggcctcggcgccgcagaggcctgggagccccacgcgcaacctccgggtccgggcggcctcaccctctcgcacgcccagcagacccacgacagcaccttcctcggctggtttattgccgacgacgtcgccatgtcgggcgtcatggacgaccacaactcccactcggtacttcatgacctcgaccacataccctcttcctccgtgccgccgccgcagttccagcctctcgcgccccacgtgcactacccgcccaagctgcaccaccaccaaaaccccgtggtgcccgcgtcgcctcccaagcacacgctcctgaaacccaagccggaggcgccggggaccgacgacgcttccacggcggtggaccagctcgccgaggccgccaagcttgccgaagccggagacgttttcggcgcccgcgagatactggcgcggctcaactacctgctcccgcccggcgccgcgacggcgacgccactgctccgctccgccttctacttcaaggaggctctgcgcgctgccctgtccaccaccgcctccgcaaccgccgccgccgccgccgcgccggtggacgtgctcctaaagctcggtgcctacaaggacttctccgagctctgccccgtgctccagttcgcgcacttcacctgcgtccaggccatgctcgacgagctgggtggcgctgcctgcatccacgtgctggacttggacatcggcgtcggcgagcagtgggcgtcgctcatgcaggagctggccagccgccgcccgggcgccgcgctcaaggtcaccgcattggtgtccgcggcgtcgcaccacccgctggagctgcagctcgtccacgagaacctgtccaacttcgcggccgagacgcgcgtcccgttccagctggccttcttcaacctcgacgccatggaccccgcggagctgctcgctaccgccgccggcgacgccgtcgccgtccacctcccggccggctccgtgcacgcccccgcggtgccgtccgtccttcacctcgtcaggcggcttggcgccaagcttgtcgtctccgtggaccgcagctgtgaccgcggcgagctgcccttcgccgcgcacttccagtcctgcgtgttcctgctcgagtccctggacgccgtcggcacgggccccgacatcaccgccaagatcgagcgcttcttgatccagccgaggatcgagaggtgcctggcggagaggtaccgcgccgcggcggcgggcgacaagacgccgccctggcgggcaatgctcgtgtcggccggcttcgtgccggtgcaggcaagcagcttggcggaggcgcaggcggaggcgttgctcaagaaggtgcccgtgcggggcttccgcgtcgagaagcgcgccggctcgctcgtcctgcattggcaacgcggggagctgctctccgtgtccgcctggagatgctag

SEQ ID NO: 35153 - DNA, 780 bp, Zea mays
  Peptide Sequence Number=SeqID_76932
atgggggcagcggcacgcaggatgcgtaggaaggctggggggcgctgcgcgtggcggcggcgcgcaggaaagcagggggcgctgcgcgtggggtgcgcagacgccgaggaggggccatcgggcatgcccgggagtagaggggaggggctgtggcggggaacagctcggcctgcctcgacggtggagggctgcggcgctgctgggcggacgagggttacagggaggttagcccggccgccgccgccgctgctccactggagagcgcgcaggcaggcgagccaggccgccgctgcaccactggagggcgtgcaggcagtgcgggtggaggtcctgtcgagaaccgacggctgcgccgccaaggagagagaggaggccgccagccgccgtggaggtcagagaccgcgcactgttgagaggtcggcggccagtgagggagggaggagaacacccggcggatctgggccggcggctgacccgggtgcacgccgaatggggccgacagggacgggcgccggtgtggaggaaggcggccgtcgcggaggggcagaggcccagcgcggctggggtctggggcggcgttgcgcgagcccgaggcggatctgggccggcggctgcccagcgtggccccgcacggcggcgcgggcacgctgccctgaacccgtcgacagccgcaaccgcaagcaccgtgccgtgcagctgaagccttttgcttcgcttgcccctgaagacctggtagcggaaggacagtctacgaggctctgtgactctgttaccaaatga

SEQ ID NO: 35154 - DNA, 990 bp, Zea mays
  Peptide Sequence Number=SeqID_76933
atgccgagacgtcaaagagccccgccagggaggccgacagcagcgcacgcggctgcgctggtcaaggtgtccacgcccgcggcagaaaagaaggggaatgtcggatccggccgggaaggccacggcagtgacggatccggacgaggagacgcgatccagccaaagggacggcggatcgagccgagaaggacgcagcaacatggatccggccgggaaggccgcggcagcgacggatccaacgaaggcgaggaaggggagggcaacggggcggttgcagccaggcaggggcctgcgccggacctggcaagggatgatgacggcgccggcgtcgggagaagctcgaaaggttggcgctacttggtgacagcgcggtcagttaggtggccagcgcgaagaggaggacggcgcgcgcagggcgcacaggaaggccaggggcactgcgcatggggggcagcggcacgcaggatgcgtaggaaggctggggggcgctgcgcgtggcggcggcgcgcaggaaagcagggggcgctgcgcgtggggtgcgcagacgccgaggaggggccatcgggcatgcccgggagtagaggggaggggctgtggcggggaacagctcggcctgcctcgacggtggagggctgcggcgctgctgggcggacgagggttacagggaggttagcccggccgccgccgccgctgctccactggagagcgcgcaggcaggcgagccaggccgccgctgcaccactggagggcgtgcaggcagtgcgggtggaggtcctgtcgagaaccgacggctgcgccgccaaggagagagaggaggccgccagccgccgtggaggtcagagaccgcgcactgttgagaggtcggcggccagtgagggagggaggagaacacccggcggatctgggccggcggctgacccgggtgcacgccgaatggggccgacagggacgggcgccggtgtggaggaaggcgctttctctgagagcgag

SEQ ID NO: 35155 - DNA, 627 bp, Zea mays
  Peptide Sequence Number=SeqID_76934
atggcttcttcatttgttctcaatccatatggattggatgagattgagcgtccacaatctgtgttctgccatcgcgtgctccccacgcccgcggtccccgccgccatcctcgcggtcgcagccgagcacagccaccgcgcccgcaaatcacgggactccccttccatccatggcaggtacgccgtccgcgcgtccgctagggcttcaactcctcctcctcctctccccattgctcagtgtagacagtccccaaatcaacggaaggtgtcgaggatctcctaccccgccatcaacggaaggtgtacccctgccaaggccgccatcaacgccctcctacccacgccgtccatggaaggtgcccgaggttccaccccatcgcgccctcctccccatctgctctgccccaccctcctccccacgtcgtcgatggcgcgcgcagatcccaggtggccgaggatccgccccaccctcctcccccaccttctagacccctgccgtgcccccgcatgcgggcacgagcccgccatacgcgcgcgccgccagggcgctcgtcgccatcgtgcaggccagcatgaccccgtcgacggccttgccttaggatccgctccctgcccctggacgatgtaa

SEQ ID NO: 35156 - DNA, 520 bp, Zea mays
  Peptide Sequence Number=SeqID_76935
atccaggtggccgaggatccgccccaccctcctcccccaccttctaggcccctgcggtgcccccgcatgcgggtatgtctcgcatcacgagattccggtctccatcggcgcgatccagtcccccacccatccgcgcgatcccctctcgtgttgcggcgcggatctcctcctcggcgcgcagatcggcgcgatccactcccgtgtcgcggtgtcctcctcggcctctccccctggtggcgagggatttgttagagatggccagatgggaaacgggtcagagaacgtgctctcaagaagaacgaggagagttgatcctcttgaaggactgaggaaatataagagaggcaaaaaccgcgtcaactgcgcccgtgcgggtgagggatcactagaggctggactcgcgctagagatggtcaaggcaaaagcaagggtccggtatgatattgacattcccttagttcctttgcgttactgcggtggtgtgaatggggacgcttcgagtgctcagtattctgaataa

SEQ ID NO: 35157 - DNA, 978 bp, Zea mays
  Peptide Sequence Number=SeqID_76936
atgaacgcgctctcccgcgaagggtgccggcacttcgaggtcttcgaccaagccgatgaagattttgagcgagatatctttaaggttgaggaccccgtagtgaaggaatccgtcggagccatctacgaccggatgtggggtccgcacggtcgcgaggtggtcagggagcgggccgagacggcgagggctcaggcggcgcgtggcgagagggtggacgacttcggggcgttgaacagcgcactgcctgacccggagccgaccccggcggaggccgtgtctggggtcgccctggagccgaccccggagactgcggaagacgcaccggatgcccccgcatccgctgcggccggcgaagacctgcccccagaggtcgccgaaggtgcgcctgatgcccccgcagctgccgcgccgagtgctgaagatcccgcagcggtggcggtggaaacagcggcggaagcaacggcggagccaacggcggaggctcccgcaacgtcagggccttcgcaggttcaagattttgggcctgcgcacgcaaccgctactactaaatttttggcggcttcgaccgcgggagatggtaatgaatgtggtggatctgcatctgagttttttgattttgctgactctgggagctcggttgagtggactgaggagtcgtcgtcgaaggatttggactactttgcggccttggatgtggctgcggcggaggcttcgccgcacgccgcggacgcaggagatgtgccaggtcctagcaccgggcgacgacgacgaagggcggttgcgaagcgtagagttagtggggcggagggggctcgacttcgtgtgagtagggctggccggcaggaactgttgtctttgccggccgccgtgaatacaggtgaaggggaactgcgaagtctttttgcgggtgaggagcttaggataatcttatttaattatagggagatgggaattattcctaaggttgagccgatgtag

SEQ ID NO: 35158 - DNA, 1407 bp, Zea mays
  Peptide Sequence Number=SeqID_76937
atgggaggacttggggtttccgatggctttgctagagagttgatgaggacgtgcgcggccccgggggaaaggatgtcttcgcccgagctccgggagtcttcggctcggatgctaaaggttaccgggggttgctggcctaggaatgttcctatcccccgcgcggccagcggggacgtttttacatctcgcatggttcgcaaatggagagtttttccttacgggcggaatattgctgctgttgtgtcggcagtgatggacaaggatcgccagggggctgcacaaaagtggcaggcggctatcaggattgttgaagccaggccaaagaggcaaaagcgggggtcggcgacggctgcggcccccggcggaggcaagccgccgctggcggcgaagtctggcgtccctgcatctagcaaggcgccagaggcagcggcgggcgccggaggctccaaaccggcgaaggctgtgccgccgctcagcagggtggcggaggccgcgaaggcggcccgagcgttgccgtcggcaggcaagcgtgtcgccgacttcgccaccgacatttgtgtggaggactatcttggtggtaagtcgctggcttttttttttaaattcattggtgcgttgcaagggtcggacgagggccagcttgctacggttgcgcctgccgcggcgatcgcgacggctgccatagtgccgaaggcgaggggcgagggccttggctccggaggcgaggtgtcggccctcgcggttgtcagggacgaggcggacgcagcgacccgccggctgaaggaggtgacggaggcactgagtcaggtggctgacttcgccagccgtactgcgtcgggggccctcacggcagctgtgtctgccgaagtcgagagacttcggacgcaacatgctgacgctgtccgtgagaagtcagcctccaacagcaagtgccgtaaactgacggacaaggtggccgcattggagagggagaaggctaacctccggcgccaactggcggcggagaggagggaggccaacgaggccatcgccaaggagcaggctgcacaggcggaggccaagctggcgcgggcggagggcaatcttgccaaggagctcgccgaacatctgcaagagcggctcaccgccctggagagccgcgcgaagggggccgaggccgcgatgcgtgcggaggccgaacagacgcgcacgcagcttatggatacatatcgtgagctgggtgcgcggaccggtgacttcgaggtgccggaccgagagcccgggcttcgttgcctgcaatgggcgcaggaggagctgctggactccccgctgtcgtggggggttatgtcgtacgcctccctggtacctgcgaggggcgatgacgcgctctcctgcgaagggtgccggcacttcgaggtcttcgaacag

SEQ ID NO: 35159 - DNA, 729 bp, Zea mays
  Peptide Sequence Number=SeqID_76938
atgggtaccgactggaaaccaaaggcgtacaactctagaagaggatcaatgctagaaaggtctacaaaatctctgatgagtatgtgggatagtatcaaaactcagtgctctatctttgctggttacatgatggttgtgcttcgacaaaactccaatggccttactgatgcagacaagacttctcttgcagcaactaggtttgttgctgttgaaaagaagcccttccatttcttacattgttgggaaatattgaaggatcaaccaaaatggatgtaccagcacatcggtatccaaaatccaccacccaacccaatcgactctcgtccatcaagctttacttcgaagaggccactaagtcgtgattcgtccaaggaaaaggcaaagaagcaaaggtctgttgacacatcatccactgattctgagtacctcacgcggatgggtgaactatctttggaacggttgtctgtgtataaatcagtagctttaactgagaggaagttggagtccatgaacaaaaacgagaggcaaaaactcatcttggagaggaagaagctaaacctagagaaacttaggatggatccacagaaattgaaggaggacaaggaagaggaggtcatgatattgagcatggatctgagtaaatgtaaccccctacttcgacaatgctacgaggctaagcaacaggagatattggcaagggttactggaaactcgtcgtcaagcaagtga

SEQ ID NO: 35160 - DNA, 576 bp, Zea mays
  Peptide Sequence Number=SeqID_76939
atggccttactgatgcagacaagactttctcttgcagcaactaggtttgttgctgttgaaaagaagcccttccatttcttacattgttgggaaatattgaaggatcaaccaaaatggatgtaccagcacatcggtatccaaaatccaccacccaacccaatcgactctcgtccatcaagctttacttcgaagaggccactaagtcgtgattcgtccaaggaaaaggcaaagaagcaaaggtctgttgacacatcatccactgattctgagtacctcacgcggatgggtgaactatctttggaacggttgtctgtgtataaatcagtagctttaactgagaggaagttggagtccatgaacaaaaacgagaggcaaaaactcatcttggagaggaagaagctaaacctagagaaacttaggatggatccacagaaattgaaggaggacaaggaagaggaggtcatgatattgagcatggatctgagtaaatgtaaccccctacttcgacaatgctacgaggctaagcaacaggagatattggcaagggttactggaaactcgtcgtcaagcaagtga

SEQ ID NO: 35161 - DNA, 1176 bp, Zea mays
  Peptide Sequence Number=SeqID_76940
atggaggacttgcgtacaatgaccctgatcattgtgattgggaaaatcatggcctttgagatgtcgcgaaaaatgtgtcggggagaggaaccaacttcctcaaggccatatgcttttgcatgtgatgaaaggaagggtaaaaagaaggctcccactccaagttcctcaagtgaagaagaggaagaagaagaaagtgatgatgaagaagataatcaaccatcaacatcatccttcaaggacgaagaaataatccgacgcgtcggaaaggtaatggggatgatccacaagattaatctaatgggtgtgcccctgcaggccaaggatcttctctttaacattgacaggaaaaagcaaagaaagagaggatgcttcgcatgtggggagaagggtcacttcacggatagctgttcaactatgtccaaacccaaaatggggaggagccaaggcaaggcactaacaagtgtcgaaacttgggatgactcatcaagtgaagacgaacctccaaggacacgtagtcaccgatcctcatcacgctcatcacgattatcacgcaagtgccctatggcgagaggtaaaatgagtattccatcctctagtgatgatagcagtagtgatgatgaagaagtatctttgattgaattacctgaaattattaagaagatgcttttacttcttgctttgaatcaagttcctgttaagaatgttgtcatagaaacatgttcggacaagattgaaatggagaatgagcaattaaagcaagaggtggctcgccttggcaaggctttgtatgacaagaaaggcaaagacaaacaaatccaacctccacaggataacaccactgcgggagtgaacaagcctgtggagggagaaactatgatttgtaggctatgtcacaaagaaggccacaagtctttccaatgcaaggcgaagaccgaggataagcaaaagctcaagaaaaagccaacaagcaaaatcttgaacacctacatcaacaaggtggacaaaaagaccgctacaccatacttaatcaagaagaaaaagaatggaaaggtgatagcaatcaaggccaacaagcaagccaacaaaggaaagggggccaaaagcatgtgggtgccaaaggaaattatttcaaccatgaaaagcaccaagaaggtttggatcccgaaagagaagtga

SEQ ID NO: 35162 - DNA, 1152 bp, Zea mays
  Peptide Sequence Number=SeqID_76941
atggaggacttgcgtacaatgaccctgatcattgtgattgggaaaatcatggcctttgagatgtcgcgaaaaatgtgtcggggagaggaaccaacttcctcaaggccatatgcttttgcatgtgatgaaaggaagggtaaaaagaaggctcccactccaagttcctcaagtgaagaagaggaagaagaagaaagtgatgatgaagaagataatcaaccatcaacatcatccttcaaggacgaagaaataatccgacgcgtcggaaaggtaatggggatgatccacaagattaatctaatgggtgtgcccctgcaggccaaggatcttctctttaacattgacaggaaaaagcaaagaaagagaggatgcttcgcatgtggggagaagggtcacttcacggatagctgttcaactatgtccaaacccaaaatggggaggagccaaggcaaggcactaacaagtgtcgaaacttgggatgactcatcaagtgaagacgaacctccaaggacacgtagtcaccgatcctcatcacgctcatcacgattatcacgcaagtgccctatggcgagaggtaaaatgagtattccatcctctagtgatgatagcagtagtgatgatgaagaagtatctttgattgaattacctgaaattattaagaagatgcttttacttcttgctttgaatcaagttcctgttaagaatgttgtcatagaaacatgttcggacaagattgaaatggagaatgagcaattaaagcaagaggtggctcgccttggcaaggctttgtatgacaagaaaggcaaagacaaacaaatccaacctccacaggataacaccactgcgggagtgaacaagcctgtggagggagaaactatgatttgtaggctatgtcacaaagaaggccacaagtctttccaatgcaaggcgaagaccgaggataagcaaaagctcaagaaaaagccaacaagcaaaatcttgaacacctacatcaacaaggtggacaaaaagaccgctacaccatacttaatcaagaagaaaaagaatggaaaggtgatagcaatcaaggccaacaagcaagccaacaaaggaaagggggccaaaagcatgtgggtgccaaaggaaattatttcaaccatgaaaagcaccaagaag

SEQ ID NO: 35163 - DNA, 450 bp, Zea mays
  Peptide Sequence Number=SeqID_76942
atggcacccaagagagctaacccgaaggctgacgaggctgcgaaggcagcactactcgccgcaagaaagggcaaggccctcgccctcacccaatccacccaccaagaggccactgaagacgacactctccgcacctgcggccctgagggacaaccgcagccaccctcaggcttcgcaccaccggagggcgtggacctcaccgaggacggtgaagtcctcggtgtaacaccgtcgagctcgccctactgtgcttgcctgtgctcgtcggccatctccctggtggccgacctcgcccctgccccagccacagcttccccttcggccctgctgctgcaagcactcagcctctcctatggcacacgccccacctgcgacaccgtcgacccccggtccagttttagaatctgtctaaattctgtacaggttccggaaattggattgtttggctaa

SEQ ID NO: 35164 - DNA, 510 bp, Zea mays
  Peptide Sequence Number=SeqID_76943
atggccgccgccgccccagccatctccctggtggccgacctcgcccctgccccagccacagctcccccttcggccctgctgctgcaagcactcagcctctcccatggcacacggagaaatcccatgatttgggggaagacgaagtccaagcacaacccccgccaatcgctcgatgaaaaatctaaaccaaaaccctcagcgttttcaagggttccggagggattttatgttggtaaggatgatatggcctcccgcccaaagctgtctggtattcagaagcaggttttggcgctgtataggggattccttcggacagcacgccttaaggcccctgaagaacgccgcaggatcgagtctgttatcttggcagagttccgtgacaacgcaaggagtgttgaccttaggaactttgtacacatagagtacttgttgaggagagggaagaagcatcttgagcagctcaagaatcctgatattactggactcgctacccttgtagtaaagaaatga

SEQ ID NO: 35165 - DNA, 432 bp, Zea mays
  Peptide Sequence Number=SeqID_76944
atgaaaaaggaattagcagacctggggacgactggccgcggtgagggtgttcttgcggtggcggaaagtggatttggggagaatcagaaattctcgagctctggtgaacgattgtggctgattagtggtggctgccgcaacgaggaagagggagccacggggatcaccggagtgctctccagctcaccgtcggcgaggatcttttaccgtgtgcccttatctgcccatcccgagcacaagtcgggccggcaacggcacgaatcacagcggaattggtcgtcggtggtgggtttgctggcgaccttatctgtttcagctgtacactgtaccatggtgaacaccccatcagagaacctgacagccagagttgagggtcgatttccttccaaatttctgtggcaacacaaaccaaactctgcagcaaagttatag

SEQ ID NO: 35166 - DNA, 375 bp, Zea mays
  Peptide Sequence Number=SeqID_76945
atggcgagcaacacaccagagcgcgacaccgacgagctataccggtcggagggggccaagaccggcgctcccgagcgccgcaacgaggaagagggagccacggggatcaccggagtgctctccagctcaccgtcggcgaggatcttttaccgtgtgcccttatctgcccatcccgagcacaagtcgggccggcaacggcacgaatcacggcggaattggtcgtcggcggtgggtttgctggcgaccttatctgtttcagctgtacactgtaccatggtgaacaccccatcagagaacctgacagccagagttgagggtcgatttccttccaaatttctgtggcaacacaaaccaaactctgcagcaaagttatag

SEQ ID NO: 35167 - DNA, 336 bp, Zea mays
  Peptide Sequence Number=SeqID_76946
atgtccatcgtcacgcagggggacctcatggtcatcgccaacgtcggcgactctcggtttgttctgggcaccgcatccgacgatgtgccatcacgccgtccatatcatcgtccacctgaagtgtactacctcgctgatgagcccggggtgcacttcgtatggcagcccagcgaagagtcattggtacttgccatgttgcgtgcgttcgatgactacaatatcaaggattgtggcgtcatctcggcaccgaaggtgatgcagaggaggaccgatagcaatgaccagatcgtcatcctcgccaccgtcggggtagcttttgtgccagcttgcctttaa

SEQ ID NO: 35168 - DNA, 471 bp, Zea mays
  Peptide Sequence Number=SeqID_76947
atggcgtcgtcgtcgaatgcggtgcccggaacaacccgagagtcgccgacgttggcgacgaccatgaggtccccctgcttaacgatggacagcgcgggagctgccgctctgcaccgcgtccaagcggcggctgcgccggagcttgtcgtacatagcggcacatgcggccacgtaggactgtttctagaggtcgaactggcagtcgccaagcttcttcttgtcgtcgatgagcgaccccaacgcgagtgcctcttgctaatggtgtttgttcggggttttaaaaaacaggaagaagaagaaaagaagtggagagtggctgtgtacagccaaaggctgtttcgtgctggggcaccggactgtccgggcgagagactccaagttgtggagattcctcgcaaacgggaaaagatcaaaggaaagaaaaacaccgtggtattcaagttgatcattggatcacttgagaggagttga

SEQ ID NO: 35169 - DNA, 2535 bp, Zea mays
  Peptide Sequence Number=SeqID_76948
atgcctttccatggcggaagggtggtgcggagtcccgccttcgcgctgagtctgcaaaaccgcgatccggccgcctttgtgcgtgaggcggaggatggggcggtgcggctcgtgggacgttacgtgccgaggacagagggccagcgcagctgggatatccgcgggtcgaatgaccgtttgaacagggtttttgaattaaatcaattgccatatgacggctaccctggtcaagatgatgtggaccgccgtgggaagaagccggcgatggagactggagacgaccctgcgccggcggccgccccatcctctaaaaagagaaaattaggtactgctatgggagggcttggggtttctgatggttttgctagagagttgatgaggacatgcgcggccccggggggaaggatgtcttcgcccgagctccaggagtcttcggctcggatgctgagggttaccgggggttgttggcctaggaatgtttctatcccccgcgcggctggccaggacttttttacatctcgcatggttcgtgaatggagggtttttccttacgggcagaatattggtgttgttgtatcagcagtgatggacaaggatcgccagggagctgcacaaaagcgccaggcggctgtcaggctcgttgaagccaggccgaagaggcagcggggggctgcgaaggctgcggcccccggcggaagcaggccgccgttggcggcaaagtcgggcgtccctgcatctagcaaggcgccggaggcaacggcaggcgccggaggctcgaaatcggcgaaggcggtgccgccgtccagcggagtggcggaggtcgcgaaggcggcccgagcgttgccgttgtcgggcaaacgtgtcgccgacttcgccaccgatattagtgtggacgactatctcggtgggtcgggcgaaggccaacttgctatagttgcgcctgctgcggcgaccacgacggctgccgcagtgccgaagacgaagggcggggctcttagcgccggaggcgaggtgtcggccctcgcggttgtcagggatgaggtgggcgctgcgtcccgccggctgaaggaggtgacggaggcgctaagtcaggtggctgacttcgccagccgcactgcgtcgggggccctcacggcagctgtggctgccgaagtcgagagacttcggacccaacatgccgacgccgtccgtgagaaatcggccgccgacagcaagtgtcgcaagctggcggacaaggctgcgctggcggaggctaatctggcacgggcggagggcaatcttgccagggagcgcgccgagcagttgcaggagcggctcaccgccctggagagccgcgtggagagggccgaggccgcgtcacgcgcggaggcagagcggacgcgacaactgctcatagatacataccgtgggctaggcgcggggaccggtgatttcgaagtgccggaccgagagcccggacttcgctgcctggagtgggtgcaggaggagttgcaggcactccccactgtcgtggaggggtttatggcgtatgcctccctggtcacctgcgagggggcgatgaacgctctctcccgcgaagggtgctggcacttcgaggtctttgaccaagtcgatgaagattttgagcaagatatctttaaggttgaggaccccgtagtgaaggaatccgccggagccatcttcgaccggatgtggggtccgcacggttgcgaggtggtcagggagcgggccgagacggcgagggctcaggcggcgcgtggcgagagggtggacgacttcgggtcgttgaacagcatgctgtctgacccggggccgaccccggcggaggccgtgtctggggtcgccctggagccgaccccggagactgcagaagacgcgccgggggcccccgcatccgctgcggccggcgaagacctgcccccagaggtcgccgaaggcgcgcctgatgcccccgcagctgctgcgccgagtgctgaagatcccgcggcggtggcgttggaaacaacagcggaagcaacggtggagccaacggcggaggctccatcaacgtcagggccttcgcaggttcaagattttgggcctgcgcacgcaaccgccactactatgtttttggcggcttcgaccgcggaaggtgatgatgaatgtggtggatctgcatctgagttttttggttttgctgactctaggagctcggttgagtggactgaggagtcgtcgtcggaggacttggactactttgcggctttggatgtggctgcggcggaggcttcgccgcacgccgcggatgcagaagaggtgccaggtcctagcaccgggcgctggcgacgaagggctgttgcgaagcgtagagttagtggggcggagggggctcggcttcgtgcgacttctgcgcggacagtcttcgcgatagacttcggttttttcgcacttgttgtgctagtccggctgcacccttgggcgacttctgcgcggatagtcttcgcgatagacttcggttttttcgcacttgttgtgctagtccggctgcacccttag

SEQ ID NO: 35170 - DNA, 384 bp, Zea mays
  Peptide Sequence Number=SeqID_76949
atggagtccttgctgctggaatttctgggcgtccatgggaggtggagcgcagagctgctgcgcagtggggcaaaaggggagcaagggctggcagccatgaacaggggggctgctgctggcgccatggacgtggacctcgtcgaggtcgacccaaggagcttctgcgcgcaggggaggaaaacaggggcgagggaacgctgtgcagggcgtcatgactgctggccggagatggagtgcggtctgcaacagagggggctcggccacggcaagagcagggaaggggaggctggctgtcggccttggtcgcggccagggaaggagacgccatggagggctccgtgcgtcctgctgcatagcgtcgagcacatggcgaggaggacctag

SEQ ID NO: 35171 - DNA, 242 bp, Zea mays
  Peptide Sequence Number=SeqID_76950
atggcgcccaaaaaaaatcccctagccgagccacctctcccagccagcgcccctgttcccctgctccttctccctcgcacagcagcagctcgccccaccttccctcgctgcgcagctcctcggcgaaacgccgctgttcctgcaagccccggcttcctcgctgctaccgctgcgcgcatgccaagtgctcggcataatgtcaagggagatgtgttgttgcagcacgttgtgacgctcgccgg

SEQ ID NO: 35172 - DNA, 534 bp, Zea mays
  Peptide Sequence Number=SeqID_76951
atggatacaaaaacagcaagggtagcgggatgtctcaccgagggtcgacgatgtcgcgagcgggtctgcgccaaaaacagtgaacacccggcgagcgtcacaacgtgctgcaacaacacatctcccttgacattatgccgagcacttggcatgcgcgcagcggtagcagcgaggaagccggggcttgcaggaacagcggcgtttcgccgaggagctgcgcagcgagggaaggtggggcgagctgctgctgtgcgagggagaaggagcaggggaacaggggcgctggctgggagaggtggctcggctaggggattttttttgggcgccatgactgggagcagagggtcaagctgctgctgctatggagtccttgctgctggaatttctgggcgtccatgggaggtggagcgcagagctgctgcgcagtggggcaaaaggggagcaagggctggcagccatgaacagggggctgctgctggcgtgagggaggagtggaagagctgcagccgtggggaggaagaaggtgaggggtga

SEQ ID NO: 35173 - DNA, 462 bp, Zea mays
  Peptide Sequence Number=SeqID_76952
atggatacaaaaacagcaagggtagcgggatgtctcaccgagggtcgacgatgtcgcgagcgggtctgcgccaaaaacagtgaacacccggggagcgtcacaacgtgctgcaacaacacatctcccttgacattatgccgagcacttggcatgcgcgcagcggtagcagcgaggaagccggggcttgcaggaacagcggcgtttcgccgaggagctgcgcagcgagggaaggtggggcgagctgctgctgtgcgagggagaaggagcaagggaacaggggcgctggctgggagaggtggctcggctaggggatttttttttgggcgccatggctgggagcagagggtcaagctgctgctgctatggagtccttgctgctggaatttctgggcgtccatgggaggtggagcgcagagctgctgcgcagtggggcaaaaggggagcaagggctggcagccatga

SEQ ID NO: 35174 - DNA, 405 bp, Zea mays
  Peptide Sequence Number=SeqID_76953
atggcgcccaaaaatcccccagccgagccacctctcccagccagcgcccctgttcccctgctccttctccctcgcacagcagcagctcgccccaccttccctcgctgcgcagctcctcggcgaaacgccgctgttcctgcaagccccggcttcctcgctgctaccgctgcgtgcatgccaagtgctcggcataatgtcaagggagatgtgttgttgcagcacgttgtgacgctcgtcgggtgttcactgtttttggcgcagacccgctcgcgacatcgtcgaccctcgccaccgtcaaaatcacgctccgcgtttggccgttcgacgaaatgccaagccttatggacagcccatgtgactagcctcgattcgtccaggttgttcacttggtattttgtggattaa

SEQ ID NO: 35175 - DNA, 405 bp, Zea mays
  Peptide Sequence Number=SeqID_76954
atggcgcccaaaaatcccccagccgagccacctctcccagccagcgcccctgttcccctgctccttctccctcgcacagcagcagctcgccccaccttccctcgctgcgcagctcctcggcgaaacgctgctgttcttgcaagccccggcttcctcgctgctaccgctgcgcgcatgccaagtgctcggcataatgtcaagggagatgtgttgttgcagcacgttgtgacgctcgccgggtgttcactgtttttggcgcagacccgctcgcgacatcgtcgaccctcgccaccgtcaaaatcacgctccgcgtttggccgttcgacgaaatgccaagccttatggacagcccatgtgactagcctcgattcgtccaggttgttcacttggtattttgtggattaa

SEQ ID NO: 35176 - DNA, 5704 bp, Zea mays
  Peptide Sequence Number=SeqID_76955
acaaaatatcaccgatggaccccagttgacagttgccaacttgccacattttgaggggggtcacttgcagaatactactctttatgatggaatgcagtttatgccagcatttgatcttgcccagtgttttggcatgagacaaaattttacttccatggatcaagatttaattgctgatggaaacgtaccacaaagatcagctcatttacgcagaagaagagatcttccacaaacatcaacattacccaaggttgcagtgaaccatgagttaggaagtgctggcacgtctatggatccatcattttttaacaatacaatcaaacaaagtcctagtgaaaacagaagttccttaaagcctccaatatttcttatggagaacagtaatcatcagccacatcatcatacagttgcactacctgttcaatatagtgattttttcattaccagcttgggagaaattgacaatcggacaagttaccacaattcataccagatatggccagttgggtttacgtcttactggcatgatagagttactggttcactgtttgagtgtgaagtgcacgatggagggaattttggacctttgtttaagatgagaaggttaccgtgttcagcattccaacttccggatgcatcaaccacagtgtgcctaaatgttgttaggaacgctgatacaatagaaacgaaggaaggtagtgatttgattgaagatactgccaatgatgctaatgataatatttctatgctcttatcagatttctctgagacgaatcaagatttcttatcatgtctaggtaatgatttggagggtaaagaaagtttagggtgcagtaatgtagaaactaaggatatgacagtgccagatgtgctgtcagatcctggctctttcagttgggcaccgaccaatgatgcaaatatgtatgacaaaattggtgacttcagttatgaaggaacatcaccttcctcagtctggaggatgatttcttgtgctatgatggaagcctgtgaaaaaatgtacaaggagcatggccatttggtattattctgcactcacagtagtgaaaaatctccatttgactatgaaagtggacctcagcgcactgatggtcctttcaatctattggctaagttttgctcatcaaatgggcctaaggtaccacagtttatagaaaaggagaatgatgtgcagtcaacttgtgcattacttaaagaatggctgtatccagacagaatcgggtttgatttggaatttgttcaagaatttgtggaatctcttcctaaatccggggcttgttcacactatcagttcttgtgtaacaggactggaattaactcttcactgacgattgcaagtggcacactggtagctgttaataaaaatagtccaatgcatgcgagacatggatctgtagtgagtgggccgcaggatcatgctcagcctagctcttctagcatccgtgagcttcctccaggaaatcctattagccgcaagcttgcaccagaattggctggggatgttttccagatattggagtttcttggacgatttgctgaaatcatcggcctgaaagaacttccttcaattgagcaagtagaagatgaactcattgacccatggccaatgcatccaaataaaaatgacatccacaactacatggatcacaatccaccgatgaattcacctgctaatgtttcttcatcgtactcgaatggcgaatcaggtataacttctattgaagaaatggtatatgtgtctattccagttgagacttcttcagcacgagaagctgctcaaaataagttggctgcccagacacttgggagatgtagtggtttagtgctgcctgagatccacattgcactcttgaaggttcttttcaccgaacttgtatctagagtcgcaatttttgtggatccaagcattgatttaaaagaatcaaaatccagacgaggaagaaaaagggacactgatactctaacaagagagttaaagattgatatgctgactgctaacaatttgacttggccggagttggctagaagatatattttagctgtttcttccatgagtggctgcatggatttatctgatatttctagtcgagaaggagtgaaattgttccgctgcctacaaggtgatggaggtatcctgtgtggagctctacccggggttgttggcatggagaaggatgcatcgctacttgcagaggctgaaacattgatatgcaattcttcagcaaatgaagggaataccgtctttatgatggattacaaggatactgatattgtagattctcctgaggagcctgctagtgacactacgttgccagattgggtgaaatcattggagcctgtgagaaaattgccaactaatgtgggaacaagaataaggaagtgtgtttatgaagctttggagagaaaacctccagaatgggcaaggaaaattttggagcactcaatcagtaaagaggtctacaagggtaatgcatctggaccaaccaagaaagctgttttatccgtcttgacagaggcatgccgtacaaaagtaccccagaatacagaaaaaccaagaaaagagagaaatattatctccatctcagaggctgtcctgaaaaagtgccgtattgccctgcggcgtgctatttcctctgatgaatcaaagcagtttgctaatttgcttggaacaactctaacaaattccaatgagaatgaagatgagggcatccttggatttcctggtatggtatcccgccctttggatttccgcacaattgatataaggttggctaagggagcttatcgcggatcttgggaggcttttcttgatgatgtacaagaatatgcctttctggttttcaatagggttctagagcctgcttttcatagccaaaaggtaatttgtaatctgcaaactgcatttgctgatcgacctgaagtgctgataatggttgttgcactgtctgagagttttgagtcattgtataagacagaggtacaagaccttgttgagaaatttgacagatatctaagcaatgaaaatgatagctcagaaatccaccaggagctacaagatgctctcacggcagcaaacaataaactgccgaaagcaccatgggaggatggtgtctgcaaagtctgtggaatcgaccgtgatgacgagagcgttcttctatgtgataattgtgactctgaataccacacttattgcctgaacccaccactggcacgcataccgcttggaaactggtattgtccatcatgtactgcccaaactcatgttgcagtgcaagaacaaaagaagtgccttggggaggaagctcatgtttttattgagaaactcaacaagttagctgttgcgatggatgagaaagagtactgggagctaaccgtagcagagagaatctatttgctaaaatttctatgtgacgaattgcacaacacagctctcatcagagaacatctagatcagtgttcagacaagtcaaatgatctccagcagaaattacgtcacctgaattatgaactgaaagagttaaggtatcgggtagaaataaaaaatccttatgccacacaaagtagatggatgaaaaatgaccaagtaagcaatagttcaggactcgtggagaatcagcagcgtgctatgcccacagcctcagagcatcttgaagaggctgaacaggttaatgttggagttaacctgaacaaccctgctgaaggggttcctgctgcactattggatgtgggtaaaccttgcagtactgacaatggcatatccagcacatctgttattgaaggaaataaatctttggggctttcagaacaaccatcaaagataattactgaccagactgatcgggactctattgccgaaggatccaatagttgcgagaaatcattagttggcaaaagtggtacttgtgatccgaatgtgggagagactcatgctgctacagttatcaatgcaccaaatggagatttacctgatgaaaatgctatgacattgtcccaagataatattgaaacatcgacatctaaactggttgaccatgatgctgatatgaacgaatcaaataatttattggagaggatttcacagttgcatggttcaattagcacagtagagtcacagcttagtatggcatccttgagaggagagtgcctgggtagggattctgttggtcgattgtactgggttacaggaagaccttgtaagcgtcctcgtcttgttgcagatggaagcatgatgatacccaaggacagagacattagcatggttacaagccattctcagtcaacattcgatagaggttggaattcggcatcacttgttatttatgaatctgatgaagaaatgaagtgtcttgttgactggctaagggacattgatccaagggagaaggatctgaaagactctatcttgcactggcaaaagtctatttatcgccaggctagtttccccatcactgatcctccagtgtccaagttttcaaagagtgagccacttatggagcttccaaacaccaatgcttttatagttttggagcaaaagtatggtctgcaaacggatcaggacactagtgagctatccaaaaggagaggaacgaagtcaaggtcgggttctgaagaaagagtatatcgctgcgactgtttagagcctatatggccttctcgacaccattgcttaaattgtcatgaaacttatctcacattgatggaatatgaagggcataatggtggaaaatgcaccagcagtaacgactgtcctaatgaaagtaaagaaattgatgagccgaaactgaagggcagcaagtctgatataaaggaaaaagatcctgtagttcataattgttccgttgaaccatctaacagtggaaaattggagtcatgcccttatgactttgaagaaatttgtagaaaatttaccacaaatgattcaatcaaggagacggtgaaggagattgggctgcttggctcaaatggaattccatcttgtgtaccttcacctgcatatttccttgacccgccagttctgctaaatgaaagtaaaagaaatgacgataaaccaaatgattggacttcctcattgcaggaatgccaagctgtgtctgccaaaatgtcagggcaagagggatctcaagttggccaagatttttctggcaatgcaggtgatgaggagttgccaaaatctaagaagcctgtcagggatagtacttcagccaaggaagcaccttcaacagacatatccacaagattgctaactgttaatgggggattggttccagagtcatcactgatgcctgtaataggcaggaattttcatatcctgaagcagctaaagattaacttgcttgacatagaagcagctttgcctgaggaagcattcagagcctcaaagtctcagcaaataagaagacgttcatggcgtgcttttgtgaaggatgcagaattaatatcatatgtggtattggcaatcaatttcttgcagagcatgataaaagccgagtttctgaagaaagattggtggtactggtcctccttcactgcagctatcaagacaacaactgtatcatcgcttgcgctcaggatttacaccctcgacgactgcatcatgtacacaaaggatccagctccaaacctgcagccagctgacaatgcaaggtctggaaacaaggggaagaggaagaaagacatagattcatga

SEQ ID NO: 35177 - DNA, 972 bp, Zea mays
  Peptide Sequence Number=SeqID_76956
atgggtccggacccccatgggcaagttccgaacccctgcatatatgaactgaacctcggggcagggtccaggatctccacgggtacagaccgaacccccgggatgggtcccggacctctctgtgtggggtccgggccactctcagtagggtcctgggattctgggacaaagagtacctggaccttagtcaaggccaggcagagacaaaatatcaccgatggaccccagttgacagttgccaacttgccacattttgaggggggtcacttgcagaatactactctttatgatggaatgcagtttatgccagcatttgatcttgcccagtgttttggcatgagacaaaattttacttccatggatcaagatttaattgctgatggaaacgtaccacaaagatcagctcatttacgcagaagaagagatcttccacaaacatcaacattacccaaggttgcagtgaaccatgagttaggaagtgctggcacgtctatggatccatcattttttaacaatacaatcaaacaaagtcctagtgaaaacagaagttccttaaagcctccaatatttcttatggagaacagtaatcatcagccacatcatcatacagttgcactacctgttcaatatagtgattttttcattaccagcttgggagaaattgacaatcggacaagttaccacaattcataccagatatggccagttgggtttacgtcttactggcatgatagagttactggttcactgtttgagtgtgaagtgcacgatggagggaattttggacctttgtttaagatgagaaggttaccgtgttcagcattccaacttccggatgcatcaaccacagtgtgcctaaatgttgttaggaacgctgatacaatagaaacgaaggaaggtagtgatttgattgaagatactgccaatgatgctaatgataatatttctatgctctttatcagatttctctga

SEQ ID NO: 35178 - DNA, 339 bp, Zea mays
  Peptide Sequence Number=SeqID_76957
atggggaagcctaccgatgaaggaggcgggaggcctggggtcggagggcaggtccaggagctccttgctcgactctcccatggtgctcctgtaaagcaagggcaaacaaatgatgcaatggcaaaagcactaacctgcgcggctgcacggtcggacgcggaccgcggatgtgcagaggctgtgcgcctgtgctgtctgctcgccgtcactgttgtgcgcgcgcctgtgctgtgcgcttgtgctgtctgcttctgctcgccgtggagcgtggaccctggtcggtgcttccgggatctgctggaggccaagcggtggaccggtggtcggctggtcgcgtag

SEQ ID NO: 35179 - DNA, 948 bp, Zea mays
  Peptide Sequence Number=SeqID_76958
atgggagagtcgagcaaggagctcctggacctgccctccgaccccaggcctcccgcctccttcatcgagtcgcttctcgctggcagggagcagcagcagcaggataaggagggaaagcgtaagttgggggcgtccactgatcccctgcccaaaagccaaggtactgttgaactagctcttcagcttgtggatctgtgcagtgtgcccactgcccactgcctagccatagcgtcagctagcccaagcagtgaggcctgtggaagaggaggtgaggtctcgaggggtgaggggcagagggtcgatggtgaggccgggaggtaccaccgcaccagcgtgaaggagaacagatacggagtggaggggaggcttctcgctcggcactcagagaggtgggcagctgccaattcagctagggtggctggagtccttttgtgggctgttcttggattacacagaagagttgtagtggaatttttctgggctcgccccaggctgcagccacccccagccctggggcctgaatccgcctctggctcgtacattatcgggaaagtgaaggatttcttgggggagattgcaagggccaaccagaagttgcagcttgatgcacagaacaagcctcctgtggagtacgatattgaagcccttactgggaacgaggaggaatacattgagatggatctgcttctaggtgtcgctgatcttcattcagagcaggctgtggaggcagctgaagcaacaataaacggacgccagacttcagaaatgtcatttgcttgcagctcatctgactcggaagatgatagtgatgacagcgatgaagatgctgatgacaaacctctcacgtctgacaaagataataaatgtaaaagtcctgatgatgcggagatgggtccagcgaaaggaaagaagcccaataaaagacagaaaattgttgttctcaactag

SEQ ID NO: 35180 - DNA, 555 bp, Zea mays
  Peptide Sequence Number=SeqID_76959
atggtgttggtgcaggtggatctgtgcagtgtgcccactgcccactgcctagccatagcgtcagctagcccaagcagtgaggcctgtggaagagaggaggtgaggtctcgaggggtgaggggcagagggtcgatggtgaggccgggagttatcgggaaagtgaaggatttcttgggggagattgcaagggccaaccagaagttgcagcttgatgcacagaacaagcctcctgtggagtacgatattgaagcccttactgggaacgaggaggaatacattgagatggatctgcttctaggtgtcgctgatcttcattcagagcaggctgtggaggcagctgaagcaacaataaacggccgccagacttcagaaatgtcatttgcttgcagctcatctgactcggaagatgatagtgatgacagcgatgaagatgctgatgacaaacctctcacgtctgacaaagataataaatgtaaaagtcctgatgatgcggagatgggtccagcgaaaggaaagaagcccaataaaagacagaaaattgttgttctcaactag

SEQ ID NO: 35181 - DNA, 807 bp, Zea mays
  Peptide Sequence Number=SeqID_76960
atgggagagtcgagcaaggagctcctggacctgccctccgaccccaggcctcccgcctccttcatcgagtcgcttctcgctggcagggagcagcagcagcaggataaggagggaaagcgtaagttgggggcgtccactgatcccctgcccaaaagccaagtggatgctggaacagttgcagatgcaggaatagcagaagcaagcaagcaatggtgttggtgcaggtggatctgtgcaagggtcgatggtgaggccgggaggtaccaccgcaccagcgtgaaggagaacagatacagagtggaggggaggcttctcgctcggcactcagagaggctgcagccacccccagccctggggcctgaatccgcctctggctcgtacattatcgggaaagtgaaggatttcttgggggagattgcaagggccaaccagaagttgcagcttgatgcacagaacaagcctcctgtggagtacgatattgaagcccttactgggaacgaggaggaatacattgagatggatctgcttctaggtgtcgctgatcttcattcagagcaggctgtggaggcagctgaagcaacaataaacggccgccagacttcagaaatgtcatttgcttgcagctcatctgactcggaagatgatagtgatgacagcgatgaagatgctgatgacaaacctctcacgcgcggtgccaagcagggtagggttggggccaagggcgagaccgaggtcgacacggctagtgcgctctcccctggaagcccctctacgcagcgtaaaggaacaggagcacgctgcagatag

SEQ ID NO: 35182 - DNA, 510 bp, Zea mays
  Peptide Sequence Number=SeqID_76961
atggtgctcagatctcctctccaccaccaacgacgaccaccaccatggcagccgccttccttgtgcacctctacctccgcagctgtggcctccctccggtgcctcctcacagccccctccaccggcctcatcctcccgtccccatctgagtctgactcctctgcctctctcccagtcctcctgccttctccgtccccgattggtgctccaagtggtcatatcaaccagaacttatcaaggaagtgtgaagcattagctgtgttaggtttggcagaatatggtgatgaaatagatgtgattgccccacctgatatcatgaagcagattttaaaaattccatactccaaggcacaagtatctattgctgtaaaccgcctgatgttgatgaaggtgaaaagatattcagaagacaagccatgctcctacttagagtcattgttctccagtatcttgcttgtgtcaattgtctttctttcgcattaccctattggtcacagggttctcgcttag

SEQ ID NO: 35183 - DNA, 780 bp, Zea mays
  Peptide Sequence Number=SeqID_76962
atggaggcttggatgcagggagagagtgtggagaaccacactcgcgctcgctcgcctcgcttggcctggcctggcctgggcgaggcagggcggggcgaggcgaagggcgcggacgcacgacatgcacgtgaatggtccaccaaaattcggcccctcgtcttgcggacgcacgacatgcacgtgaatggtcctcacacgactgctcgtgatcttttcgtcgaccctgctgctttgacgtcgtcgaccctactacttcgacatcgtcgactctgctgcttccactcacgccgtctaccgctagggttcctcggaacccgagccctagcacacagacaccgcgcctgcggacactgctcgctccccttctcctccgtcgccgccaccgcagaagcctctaccacgcgcgaccagctcgccgccgcgcccgccggggccgacggcctgcacgcgctcgccgagcaggtggtgcagctcgtgctcgccgacggctccggcgccagcagcccgcgcgtcgccttcgccgacggcgtcttcgtcgactcctcgctgaagctcaagccggccttcgaggaggtccccgtgggaaagtacagggccgacacccagtccgtcgacttccagaaaagttcatactcttatgacagtggtcatatcaaccagaacttatcaaggaagtgtgaagcattagttgtgtcaggtttggcagaatatggtgatgaaatagatgggattgtcccagctgatatcatgaagattcagcctatcctacaatggtcgtga

SEQ ID NO: 35184 - DNA, 381 bp, Zea mays
  Peptide Sequence Number=SeqID_76963
atggaggtggatggcgggttgattcttaaatattacgggggctcttatgcaaagtgctatggccgaaggggtataggcaattctccatcgttggatcctcagccaagcgcccagattagaccgagaactctactgaacggatcagatcgcacgaagtccacttcgccgcgaccgagcgccaaggatccggcggcgacgacccgagtccgccgttcgagtccctgttatacggcgcggaatgttcttcgcctcccactacccgtcaagctcggtgccaagccttcctctacggactgctcgagactacgtgccatccagtggcaagtcatccccccgacagcgcctggagcattgccccaccgcatccacgccagtgcctag

SEQ ID NO: 35185 - DNA, 381 bp, Zea mays
  Peptide Sequence Number=SeqID_76964
atggaggtggatggcgggttgattcttaaatattacgggggctcttatgcaaagtgctatggccgaaggggtataggcaattctccatcgttggatcctcagccaagcgcccagattagaccgagaactctactgaacggatcagatcgcacgaagtccacttcgccgcgaccgagcgccaaggatccggcggcgacgacccgagtccgccgttcgagtccccgttatacggcgcggaatgttcttcgcctcccactacccgtcaagctcggtgccaagccttcctctacggactgctcgagactacgtgccatccagtggcaagtcatccccccgacagcgcctggagcattgccccaccgcatccacgccagtgcctag

SEQ ID NO: 35186 - DNA, 1008 bp, Zea mays
  Peptide Sequence Number=SeqID_76965
atgcagaacccgcacgactatcccttagtcgcatggcagaagtgctgtgtgggatcaagctgcgcctcgccccagccgcgagcggctactctgggtccacagcagcgcccgaccccaccacatgggcgggtccgaggccgtcacgagtccagagaaggtgacatactccaaagcatcaacagtgagtccggacccccacgggagagcgccggacccccggatgtacagtgcggacccccaaggatggtcccggaccctcggatatacagtctggaccccaaggttggttccggacctccacgtgtgcaagccggacccctggaatgggatccatacccctccgtatggggtctgggtcgccctcagtggggtcccaaggtccaggacagaacgtacacgggctttgggcaggacccaagcgggggtcccgtgccgacacgtgtccaggcccagtctagtacggacctgtccgcatatgccccccgctccccacccaggcggagacccgatgctgccatgtggcctactgctcgtgacataagccagcgggtggagcctgacataaggcctccgggttacgtggcccctgcatttattgcggataaggcgcgctgcctgcccacttcgctgacaggcgatgtgccgcctcagcatttaatgagccctatccattccgcaggcggcgtgcctgtccattccactggcaggcgatgtgccgcctccgtatttaatgagacctatccattccactggcaagcagcgacctatcagtcccataggcggcacgcctgtccgttccactggcagactgcacgcccatactgccgcgtgcactacgcccatcattactcgtgcattaccaaggaagctgccgccgcatgtcaacgctgcgcgggctacgaacatctcggcgcctggagattgctctgcgtcacctgcattagttgctctaggtattccatccattatgttcttgggcccacatgtcggggctcagcacccttgtaa

SEQ ID NO: 35187 - DNA, 780 bp, Zea mays
  Peptide Sequence Number=SeqID_76966
atgcagaacccgcacgactatcccttagtcgcatggcagaagtgctgtgtgggatcaagctgcgcctcgccccagccgcgagcggctactctgggtccacagcagcgcccgaccccaccacatgggcgggtccgaggccgtcacgagtccagagaaggtgacatactccaaagcatcaacagtgagtccggacccccacgggagagcgccggacccccggatgtacagtgcggacccccaaggatggtcccggaccctcggatatacagtctggaccccaaggttggttccggacctccacgtgtgcaagccggacccctggaatgggatccatacccctccgtatggggtctgggtcgccctcagtggggtcccaaggtccaggacagaacgtacacgggctttgggcaggacccaagcgggggtcccgtgccgacacgtgtccaggcccagtctagtacggacctgtccgcatatgccccccgctccccacccaggcggagacccgatgctgccatgtggcctactgctcgtgacataagccagcgggtggagcctgacataaggcctccgggttacgtggcccctgcatttattgcggataaggcgcgctgcctgcccacttcgctgacaggcgatgtgccgcctcagcatttaatgagccctatccattccgcaggcggcgtgcctgtccattccactggcaggcgatgtgccgcctccgtatttaatgagacctatccattccactgggcaagcagcgacctatcagtcccatag

SEQ ID NO: 35188 - DNA, 831 bp, Zea mays
  Peptide Sequence Number=SeqID_76967
atgccgctgctgctccaccagccgctactgctcctgaacgctagtgccgaccaccatctcccatggcgcaggagctccccaatctcctcttgccagggcgccgtcactgagctcgccctgccccagccatggacgccgtcaggccacccgtctcctatctcccctcgccctcatcctctggctgctgccccttcctattcctggtggctgagtcttcttccatggatgttggctgtgctgccctccctggtgctcacctctgccccctgcgttggatggccggttgctcctgccctaggtttgtcaagcgctaactctgctccatctatccctgctcgaatcttgctgattggccctgcgcagattatcctcatgcccggccgcggtacaacagcaatagccatgaaaccccatcgtgtcgcgccctcgacgtgttcgacggaatatcgcagcacgtgccgacccgatctgcagccctggttgcgaggacgtcgaaccccgctaccgtcgacgttgtgcctcgcgcttcaccaatgcaatgaaatgtctgagcgaatagacgacatgcgacccgagtttgattctgctaggttgtttgatgtgtattttactcattgtgatttagttgatgatgtgtttacagtgagctacatggctgagcgcattgtaggtcaaggttcttttgggattgtcttccaggctaagtgtttggagacgggtgagactgttgccataaagaaggttcttcaggataagcgttacaagaaccatgggattgtgattagttacttcattgcaaaaaaatttaggaacagtattaatgtgtggtaa

SEQ ID NO: 35189 - DNA, 1404 bp, Zea mays
  Peptide Sequence Number=SeqID_76968
atgccgctgctgctccaccagccgctactgctcctgaacgctagtgccgaccaccatctcccatggcgcaggagctccccaatctcctcttgccagggcgccgtcactgagctcgccctgccccagccatggacgccgtcaggccacccgtctcctatctcccctcgccctcatcctctggctgctgccccttcctattcctggtggctgagtcttcttccatggatgttggctgtgctgccctccctggtgctcacctctgccccctgcgttggatggccggttgctcctgccctaggtttgtcaagcgctaactctgctccatctatccctgctcgaatcttgctgattggccctgcgcagattatcctcatgcccggccgcggtacaacagcaatagccatgaaaccccatcgtgtcgcgccctcgacgtgttcgacggaatatcgcagcacgtgccgacccgatctgcagccctggttgcgaggacgtcgaaccccgctaccgtcgacgttgtgcctcgcgcttcaccaatgcaatgaaatgtctgagcgaatagacgacatgcgacccgagtttgattctgctaggttgtttgatgtgtattttactcattgtgatttagttgatgatgtgtttacagtgagctacatggctgagcgcattgtaggtcaaggttcttttgggattgtcttccaggctaagtgtttggagacgggtgagactgttgccataaagaaggttcttcaggataagcgttacaagaaccatgggattgtgattagttacttcattgcaaaaaaatttaggaacagtattaatgtgtgtacccattgcttgaagcttcatatcgatggagctcgcatcttccatgcgtctgcggcacttggagttcttgtagatagactcgtgaaagctgctgattcagttttggtatgcctatcgaaagggttaggcacacccgtcggatcagtgattgttggttcaaaggccttcattgacaaggccagaattctccggaagaccctaggcggtggaatgagacaggtgggagttctttgtgctgctgctcatgttgccgttcgtgacactgtgggaaagcttgcggatgaccacaaaaaggctaaagctttggcagggtcttatatggacatatcaactctttgcgagttcaagctctgcaaggtgaggtctgttctgtttggccagaaaggcatcccctacctgaacacctacgatggccgcaccatgcgctaccccgaccctctcatcaaggccaacgacaccatcaagatcgatctggagaccaacaagatcatggacttcatcaagttgtatttgccctttcatggactttatcaagttatatacttagttaggctcaatgttagcacaaacagttga

SEQ ID NO: 35190 - DNA, 976 bp, Zea mays
  Peptide Sequence Number=SeqID_76969
atggaattaccactagacgcgcagagcagcggaagacgtctcgatgtagacgaacgcgtcgagcagtgccgtgcagtcgccggcgtccttcacgtcctcgcacggttcgtccaagtgctccagatgcagcacctccgagccccgacagctgtgcttctacaggactcgggcgctcctccgacggccacgatactgcgtacacagggctctagcacctctccgacagccacgttggcatgtacacagggctcaggcacctccctgccggacatattagcgcatagctacaccctcattgtacacctggaccctctccttgcatctataaaaggaaggttcagggccctcgggcgagaaggtcgtcgcgcgggaggatgggctgacgaacaggctcactctctctccctcgcgaacgcttgtaacccctactgcaagcgtagacccccccggcgcaggataacacgagccgcggtttccccccttgtgttccatctcgcgccaacaaccatctgggctgggacgcgcatcgacaattttactcgtcggtccagggaccccggggtcgaaacgtcgacagtaatcaatacttcgcttatcattttcatatggggacttgatggcccgggccgcgtcgccttcacggcgcggtcgatcggaccagcagctgcggcgttgctttgcggagccaacgacgtcccgaaaggaaaaggaagcacgctctacctcgacgttgctgcgggattggatctgcatcaactctccgtcaatccggcaggtctccggccaagccgaactgtcctacgcgacaggcttcgcttccgttcgctgatcaagaaatgtggtatgaaatatctagtggacgatttacttttattggcgcaggcgctgtatcactccgcccagcaggccaccagcccgtgcgccgtcacgcttgcgactgcgaccttggcccagcggctgtgcatggcctcgcgcg

SEQ ID NO: 35191 - DNA, 1038 bp, Zea mays
  Peptide Sequence Number=SeqID_76970
atggaattaccactagacgcgcagagcagcggaagacgtctcgatgtagacgaacgcgtcgagcagtgccgtgcagtcgccggcgtccttcacgtcctcgcacggttcgtccaagtgctccagatgcagcacctccgagccccgacagctgtgcttctacaggactcgggcgctcctccgacggccacgatactgcgtacacagggctctagcacctctccgacagccacgttggcatgtacacagggctcaggcacctccctgccggacatattagcgcatagctacaccctcattgtacacctggaccctctccttgcatctataaaaggaaggttcagggccctcgggcgagaaggtcgtcgcgcgggaggatgggctgacgaacaggctcactctctctccctcgcgaacgcttgtaacccctactgcaagcgtagacccccccggcgcaggataacacgagccgcggtttccccccttgtgttccatctcgcgccaacaaccatctgggctgggacgcgcatcgacaattttactcgtcggtccagggaccccggggtcgaaacgtcgacagtaatcaatacttcgcttatcattttcatatggggacttgatggcccgggccgcgtcgccttcacggcgcggtcgatcggaccagcagctgcggcgttgctttgcggagccaacgacgtcccgaaaggaaaaggaagcacgctctacctcgacgttgctgcgggattggatctgcatcaactctccgtcaatccggcaggtctccggccaagccgaactgtcctacgcgacaggcttcgcttccgttcgctgatcaagaaatgtggtatgaaatatctagtggacgatttacttttattggcgcaggcgctgtatcactccgcccagcaggccaccagcccgtgcgccgtcacgcttgcgactgcgaccttggcccagcggctgtgcatggcctcgcgcgccgtacgaagcctatgcgatggtgcacatggagcctatgtgcctgtactgctgtaccgttag

SEQ ID NO: 35192 - DNA, 651 bp, Zea mays
  Peptide Sequence Number=SeqID_76971
atggaggtccgttgccaaaccagcttttgccagaatgaagatggtttccccaagttgctgagagcatgcacagttcgcctcggaatcaggagccagccagagtatgatggtcgtgaattcatcgagcatggcacagagaagtgtgtcgtgactgtatacattggatccagtccgcaccatgtggaatggagtgtcactgctgctgggcatagattcaaagacacctgccaagtcgtcgctcgcaaggcattgaggaccctgtgtcaaatctatgaagaagaagtggccgacaccccactcagattcttttcgccctttcagagaaaccgtccagtttggatggccaggatgcgtgcattggaaggtcagcagctgcttgaagacgacccctcagtcgtgtacctcactgcctacctgctcaccctggatgccaccctgaagcaagcaaaggaggagcatgtccagaagttgatgaaggcctacttggtcacccgcaaccaatgtagagccctgtggatccaagatcccgtttcatccaacccagtgcagtccatgagagctgaagatccccagattcttgaaggtcacccggtctctaccagaggagaaaagaagacttgggaactcccggaaggagccatagtcttgtaa

SEQ ID NO: 35193 - DNA, 903 bp, Zea mays
  Peptide Sequence Number=SeqID_76972
tcactcaatctgaactcgtatggttcaaaccccagggttatgaaggctggggagcaccgggaggataaggagggggaaagttttgtccggtttgggcatggcggtggcctgactccttctggtataaccaataagaaaaaggagatcggaagtcagatggaggtccgttgccaaaccagcttttgccagaatgaagatggtttccccaagttgctgagagcatgcacagttcgcctcggaatcaggagccagccagagtatgatggtcgtgaattcatcgagcatggcacagagaagtgtgtcgtgactgtatacattggatccagtccgcaccatgtggaatggagtgtcactgctgctgggcatagattcaaagacacctgccaagtcgtcgctcgcaaggcattgaggaccctgtgtcaaatctatgaagaagaagtggccgacaccccactcagattcttttcgccctttcagagaaaccgtccagtttggatggccaggatgcgtgcattggaaggtcagcagctgcttgaagacgacccctcagtcgtgtacctcactgcctacctgctcaccctggatgccaccctgaagcaagcaaaggaggagcatgtccagaagttgatgaaggcctacttggtcacccgcaaccaatgtagagccctgtggatccaagatcccgtttcatccaacccagtgcagtccatgagagctgaagatccccagattcttgaaggtcacccggctatggataagcaagagcatcccgagtcctcccatgatcccccaccagagttggttgagcccctcaccatgaagaagattccagcaccgtcccgtgagatcaaagaagaagctacaagcaccccgccagcaccgccgccctctgaggagctataa

SEQ ID NO: 35194 - DNA, 790 bp, Zea mays
  Peptide Sequence Number=SeqID_76973
tcggaagcagtgtggggacgctacgacctcggtgctcgcccacgagtgcgtcggccggccgatccgtgcctccctccggatcgcggacccccccgcggtgtcccgtctctacgtccactggaccagcattccagccattgaccaccacgactccattctattccgggtgcttcccccttgcttcacccgggttcccccttgcttcggcggtggacgcaccgaccctgagttggataagtggttacaaccgcaccggcgccagcaacaacggaccatgattgaagaagacatgggcatcctctgccatggagacaagggagatcaaactctgcttgctacatcatccacttttgcctctgatgctgaaatgaaatggagtgttgagaagctacagatccctgccgacatgaagatcaacctctactcgtttaagactgatgtcgtcatcaccatcggcgagaggtgcttgtgctgggttgactactaccatggtatgttgctcattgatgtcctcactgacagcaacagcaacagcaggctccgttatataccactcacatctaaggctttgaagactgatcgtgtgtacaaggacggtaaacctgatccgtttcggcgtctcagtgtctgtgatgggggtatcattaagggagtctgcattattactaaaaagcactcttctccttatcctcacgacgaagcggcatggactttgggtggtagctaccaaggtggagggggcaaggaggtgaactggcacatggggcccgcgaggttattcattctttaa

SEQ ID NO: 35195 - DNA, 201 bp, Zea mays
  Peptide Sequence Number=SeqID_76974
atggcctggagcctcgcgccgacgtcgaggcggtcgagggggtggtgtgacgggagacgacgcacgcggggcaaggggcatgcgccgcgagcgggcggggcgcggcggccgcagcgcggcggccgcacgtcatctgttgggtcgaaggctgggggtgggtattgcacggctgatggtcgggaattaagtgagacaatgtag

SEQ ID NO: 35196 - DNA, 1250 bp, Zea mays
  Peptide Sequence Number=SeqID_76975
agtacaacgaaggcgtccacaccccttgcccccgcctactgccgcccgcgcgccccgcctgctcgcccacagggcgaggcaacgcctccgccccgacgccctcgtcttacccatcagccgtgcaatacccacccccagccttcgacccaacagatgacgtgcggccgccgcgctgcggccgccgcgccccgcccgctcgcggcgcatgccccttgccccgcgtgcgtcgtctcccgtcacaccaccccctcgaccgcctcgacgtcggcgcgaggctccaggccatcggggacgaatccgggccagggctcccgagcaggccacggtctacgacgatgcctacgatccctggaccctggatgacaccgacaatactcgagtggagccgtgagggtggggtgggctctgagaaaggcagaactccagagggcaaaagtgacatttcgcatggggttgtgtgtcggaagcagtgtggggacgctacgacctcggtgctcgcccacgagtgcgtcggctggccgatccgtgcctccctccggatcgcggacccccccgcggtgtcccgtctctacgtccactggaccagcattccagccattgaccaccacgactccattctattccgggtgcttcccccttgcttcacccgggttcccccttgcttcggcggtggacgcaccgaccctgagttggataagtggttacaaccgcaccggcgccagcaacaacggaccatgattgaagaagacatgggcatcctctgccatggagacaagggagatcaaactctgcttgctacatcatccacttttgcctctgatgctgaaatgaaatggagtgttgagaagctacagatccctgccgacatgaagatcaacctctactcgtttaagactgatgtcgtcatcaccatcggcgagaggtgcttgtgctgggttgactactaccatggtatgttgctcattgatgtcctcactgacagcaacagcaacagcaggctccgttatataccactcacatctaaggctttgaagactgatcgtgtgtacaaggacggtaaacctgatccgtttcggcgtctcagtgtctgtgatggtggtatcattaagctagtctgcattattactaaaaagcacccttctccttatcccttcaccatagcaacatggactttggttgatatctaccaaggtagatgggagaaggatgtcaacttgaccatgggagccagcgagttcttcaatctttaa

SEQ ID NO: 35197 - DNA, 927 bp, Zea mays
  Peptide Sequence Number=SeqID_76976
atggtgggtacaagtgcggtcacttcacgacggccagtcggggtcagtgaggcattgtacgccaaggcgttccgccacacctgggtgattaggacttcttattgctcagaggaggaaggctttcctcaccttcttcgaagctgcgcactgcgcttggggatccgcaagaagcccgaatatgtctggaaagagtaccgtgaaaatggaatggaaaagtgctctatgggagtctacttgggagaaagccggaactacccaaaccaccctcctttccaaattaccttcatcgggcaccgcttccgagacacatgccagagcgttgctcgaaaagccctcaaacaactgtgccaaaactataaccgagagatctttgagactcccctccgatatttcccacccagcaataaaaacaccccaacctggaagaaaagactccaggctctttcaggaggagatcccatagaagatgatcccactatcgtctacatggccggatacctccacaccctcgacaaccactacgatgagctctcctctcattgtacccacctaaactcccgagtggaaagcctagagcagcaagtcaaagagcttacgcaagagaaggcatctctccaggagagtctcagcatagtggaaggcgaggaagccaacacccgtgaagcctatcggaccttgaagatagactttgacaagaagctaaaggcactcgcccccaaaaagaagatccagaagaagaccactaaccaaggatgccagatagagaagaagaagaagaaggcccctctagccctacctccccccagaatcgatgactggtccgacgaagaagatgtatccctagccagcctcgatgatcttctcaaggcatttggggacaccttagacaaggaactcgctagcacctcgaagaacgccctcgtgtag

SEQ ID NO: 35198 - DNA, 1191 bp, Zea mays
  Peptide Sequence Number=SeqID_76977
atggcgcgcagcctcgccccggtcccggctcctccctgcgcggccgtggcccctgtcccgcctcatcgcggccccggcgtgcccgctcgcgacctggcgcgtgtggcccctgcccctgcccctccccctgtcccagcgcgacgcggcttcggctcgcgcggctgcggtgcccccgcgtggcgtggccccctgcccgtggctcggccccggcgtggtgatgagaatgatggttttggtattggctatggtaatgttaagtggtattctttccatttggaaaggatggctcatcttagacacaccgcacagaagtctgtcatccccttcttaccctcttgtctcgctgagcgtccgctttaccgtccagtgaccgcaggagatagagtctgtgaggagctgctcccctatgcttccgctggaggcgcccctgcaccaccactgagcgccctagccgctagagtagctgctggaggagacctagatgacagaggtggcgacagcagctcgagccacaacaccgacctttcagccgaccaggagccggaaggatgggtcgcccgacccatcactcgcgacgctgctcgcgggtgtcacttccacgacgcgctcggcaccctgctacgccaggcactcgaccaacgtacttggtccattgagtatcgctgtgtggtcttccagcacagtcgtggggtttactcggaccactgggaggcaacctgtttggtgcgccgtccggagaacagtctccgaggtgcggagatctgctcagagcacttttccatctctgagcgggactcagctgaggcggccatgcaagatgccgcacggcgtgcgctttcgcactactgctcagtgctcggcggggtagccgatggtctcaacctgaagtattacccccaccgtccatctggcagcacaggaggcgtgattgtctcacctgttggtgaggacaatcctaggttgagcagcacagtcaacctagccaccgtgctaaacacagagctggaccatgcattagacgagctgagtagggctcgtgctgagatcgcccagttgcgggctgagcgtgcggagcatcgtcacctggaggatggctcccccgctcccgtcgggactcagcacccgtgccgctcacctcggcgtggacaccaggcttatggtgacaccgactgcaggaccaagataaattaa

SEQ ID NO: 35199 - DNA, 1038 bp, Zea mays
  Peptide Sequence Number=SeqID_76978
atgcggaaggtcttcaaaaaggacgtcgcttcgaatataccagaaacatgtgtgccaggtggtgatgagaatgatggttttggtattggctatggtaatgttaagtggtattctttccatttggaaaggatggctcatcttagacacaccgcacagaagtctgtcatccccttcttaccctcttgtctcgctgagcgtccgctttaccgtccagtgaccgcaggagatagagtctgtgaggagctgctcccctatgcttccgctggaggcgcccctgcaccaccactgagcgccctagccgctagagtagctgctggaggagacctagatgacagaggtggcgacagcagctcgagccacaacaccgacctttcagccgaccaggagccggaaggatgggtcgcccgacccatcactcgcgacgctgctcgcgggtgtcacttccacgacgcgctcggcaccctgctacgccaggcactcgaccaacgtacttggtccattgagtatcgctgtgtggtcttccagcacagtcgtggggtttactcggaccactgggaggcaacctgtttggtgcgccgtccggagaacagtctccgaggtgcggagatctgctcagagcacttttccatctctgagcgggactcagctgaggcggccatgcaagatgccgcacggcgtgcgctttcgcactactgctcagtgctcggcggggtagccgatggtctcaacctgaagtattacccccaccgtccatctggcagcacaggaggcgtgattgtctcacctgttggtgaggacaatcctaggttgagcagcacagtcaacctagccaccgtgctaaacacagagctggaccatgcattagacgagctgagtagggctcgtgctgagatcgcccagttgcgggctgagcgtgcggagcatcgtcacctggaggatggctcccccgctcccgtcgggactcagcacccgtgccgctcacctcggcgtggacaccaggcttatggtgacaccgactgcaggaccaagataaattaa

SEQ ID NO: 35200 - DNA, 723 bp, Zea mays
  Peptide Sequence Number=SeqID_76979
aaggtcgatacggtcgaggtggcgcctgcttggtctcctccgcttgagaaccccgatgcggtattggaagccctaggtgggctcagcctcgccccatgtggacgacacgagaggcacaggccggccccacctttcaaggctgacgaaataagacgacggatcacgatccatatgggaccaaatccctcatatgacgatctatcagattttttcacgtcctacgcggagctctcgacattatacgacgcagaagtgacgttctactacagtggctctaacaacaacccgacgccttcgcacctcagctgtgccacgccctggcgtttcacggtctcaaactcggacctgagtccccctgagagcgacgaagaagagccctccagtggctacccacggggtaatggatcttcgatcgagaaaggctgcaagaacggcagaatgagcgccttaggatgggtctggatgagccatcgggcgacatccgaatcgctcgtgaggaccctagtgcctagggacagagggtgtgacatcgtggctccagctgaagggagcctcagacggtacattccgatcgacgctgagaagttgcaaccccagcaagggtcctcgacccatgtctcgcagatgctcagggtcttccatctcgtagaactcgaagagcttgatctcgggaccagtggttcaccaagtcttgattgtcgattcctcgaagctcaggaatag

SEQ ID NO: 35201 - DNA, 1249 bp, Zea mays
  Peptide Sequence Number=SeqID_76980
gcctgaggacggcgatcttggccacgctgccgaccctcgacgagagcggcgtggcggttcgccagacccccaccgcgggatctggatcttagatgcactggctggaggtccccagcccgccaatgtggctcccagcgccaaccccgctgtggcccccagccccttggacaagggtaaaggggctgcgagcagtgcctccaccccaggtggctccagggtgtcgaaggaggagaggcgatgcaggctgcgtcgcgctgacgggtcactcgtttcggagccccccagaagcgccagaggactgcaggcggggccgaggaggccagctcccgggcccacggcgcgcagaggcgcgtcagtcctccggtcctgccaccatcaccatcatctaggggtgatcacccctaggggcaccagcagcagcaacagcaacagcagcccgcaacagcagcaggatcagcgattgcctcgcttccagggccactggaaggttcagggccccaagggcgcgtccagttccatccccccgcctgctccggaggagatggaggtggtgtttgggcggcgccttcggtcaggtgccgagcaagaagcggcgccagtccccctccctcgcatgttgtcccgtgcccgccaggtccttagtgacactagggcagcaatcttgtgggagtgggagacgcttgaggctgagctccagcgcctcagcgactggcgcacccaactggaggagcgcaccaagtcggcgtcccgacagttcctctccgagcggtcccaactcgagcgggaccgcaaggagtataagggagacctccagaaggtgtgcgccagggagctggaggccgcccggagggaaaagaaggtgaccaggagggaggaggccatgtcccagcaggaggccctcacaacagagtaccaggccaagctgagcgccctggaccagactctggaagcccagcgggcccatcaggtcaaggctgtggagaggctgcaaaagtggcagcaagagctcgagggcaaggtcagcgatgccaccctcgccgaggagaacctcaaggcgaaggagcagtccttggacaggcgggagatggacctcgccaggagagagacgaatctcgtcttcagggaagaaatgctcacccggtggggcgagttgctggctaagcatgagctcgaggcagaggagaaagagaggaagctggaggagcagatctgccagttcaatgcagcgcaggcggcgtcgggtccctag

SEQ ID NO: 35202 - DNA, 594 bp, Zea mays
  Peptide Sequence Number=SeqID_76981
atggacctcgccaggagagagacggatctcgtcttcagggaagaaatgctcacccggcggggcgagttgctggccaagcatgagctcgaggcagaggagaaagagaggaagctggaggagcagatccgccagttcaatgcaacgcaggcggcgccgggtccccatgtgatggaggccaccaggaaggcccttgaagatctccaagtggagcaccgcgccggggtccagcgtattgccgcgtgggccggcgaggcaagcacggcactggtgccgctagggattagccccatcccagtgtcggagctgccaacgtcgatctccgatgcgcttccggtgctggactctgccgccgatcgcctccagcgtctggaccagatcctcggggcccgcctagaggcagagggcggcaagctctaccgggcggtggttgaatacatcctgacgtacttctggagtcatgaccccgccatatccttggcgccggtgatcgctggttcggtagccgccatagaagacgccgcccgggagagtgtacaagacgccgtggagctggtggccgagcgcttccagcgcgatcctgctgacgaactatag

SEQ ID NO: 35203 - DNA, 1290 bp, Zea mays
  Peptide Sequence Number=SeqID_76982
atggagcttagccttgagcagatcaggaaagaggccgttgatctggagaacatctctatggaggaagtgtttgccttccttaaatgctgcaaggaagggctcagcaccgaggaagcccagaaacgcgtcctcatgtttggtcccaataaattagaagaaagaaaggagagcaaggtgctcaagttcctaatgtttatgtggaacccgctgtcgtgggtgatggagatggccgccgtgatggccatcgcgctcgccaacggcgacaaccggccgccggactggcaggactttgtcggcatcgtggtgctcctcgtcatcaactcgaccatctccttcgtcgaggagaacaacgccgggagcgccgcggaggcgctcatggccaacctcgcgcccaagaccaaggtgctgcgggacggccaatggagcgaggaggacgcggcggtgctcgtcccgggcgacatcatcagcatcaagctcggcgacatcgtcccggccgacgcccgcctcttggagggcgacgcgctcaagatcgaccagtcggcgctcaccggcgagtgcctcccggtcaccaagagccccggcagcagcgtctactcggggtccacgtgcaagcagggcgagatcgaggcggtcgtgatcgccaccggcgtgcacaccttcttcggcaaggcggcgcacctcgtcgacagcaccaaccaggtcggccacttccagaaggtgctcaaggccatcggcaacttctgcataggtgccatcgccatgggcgtaatcgtcgaggtcgtcgtcatgtacgcggtccagcaccgccgctaccgcgagggcatcgacaacctcctcgtgctgctgatcggcggcatcccgatcgccatgcccacagtgctgtccgtcaccatggcgatcggatcccacaagctgtcgctgcagggcgctatcaccaagcgcatgaccgccatcgaggagatggcgggcatggacgtgctctgcagcgacaagaccggcacgctcaccctcaacaagctcagcgtcgaccgcaccctcgttgagatcttcgccgcgggcgttacgaaggacgacgttatcttgttcgccgccagggcgtctagggtggagaaccaggacgccatcgacgccgccatggtcggtatgctgggtgacccgaaggaggccagggacggcatcgaggaggtgcacttcttcccgttcaaccccgtcgacaagcgaacggctctcacctacatcgatctggccgatgggagctggcaccgtgtcagcaagggtgcaccagaacag

SEQ ID NO: 35204 - DNA, 2859 bp, Zea mays
  Peptide Sequence Number=SeqID_76983
atggagcttagccttgagcagatcaggaaagaggccgttgatctggagaacatctctatggaggaagtgtttgccttccttaaatgctgcaaggaagggctcagcaccgaggaagcccagaaacgcgtcctcatgtttggtcccaataaattagaagaaagaaaggagagcaaggtgctcaagttcctaatgtttatgtggaacccgctgtcgtgggtgatggagatggccgccgtgatggccatcgcgctcgccaacggcgacaaccggccgccggactggcaggactttgtcggcatcgtggtgctcctcgtcatcaactcgaccatctccttcgtcgaggagaacaacgccgggagcgccgcggaggcgctcatggccaacctcgcgcccaagaccaaggtgctgcgggacggccaatggagcgaggaggacgcggcggtgctcgtcccgggcgacatcatcagcatcaagctcggcgacatcgtcccggccgacgcccgcctcttggagggcgacgcgctcaagatcgaccagtcggcgctcaccggcgagtgcctcccggtcaccaagagccccggcagcagcgtctactcggggtccacgtgcaagcagggcgagatcgaggcggtcgtgatcgccaccggcgtgcacaccttcttcggcaaggcggcgcacctcgtcgacagcaccaaccaggtcggccacttccagaaggtgctcaaggccatcggcaacttctgcataggtgccatcgccatgggcgtaatcgtcgaggtcgtcgtcatgtacgcggtccagcaccgccgctaccgcgagggcatcgacaacctcctcgtgctgctgatcggcggcatcccgatcgccatgcccacagtgctgtccgtcaccatggcgatcggatcccacaagctgtcgctgcagggcgctatcaccaagcgcatgaccgccatcgaggagatggcgggcatggacgtgctctgcagcgacaagaccggcacgctcaccctcaacaagctcagcgtcgaccgcaccctcgttgagatcttcgccgcgggcgttacgaaggacgacgttatcttgttcgccgccagggcgtctagggtggagaaccaggacgccatcgacgccgccatggtcggtatgctgggtgacccgaaggaggccagggacggcatcgaggaggtgcacttcttcccgttcaaccccgtcgacaagcgaacggctctcacctacatcgatctggccgatgggagctggcaccgtgtcagcaagggtgcaccagaacagatactggctctctgcaactgtggagacgacgtgtgcaacttggttcacactgtgatagacaaatatgccgagcgtggtcttcgatctcttgcggttgcaagacagcaagttccggagaagagcaaagagagcctcggagatccatgggaattcgttggtctgcttcctctgctggaccctccgaggtcggacagctccgacacaatcaagcgcgcgctcgacctcggtgtcaacgtcaagatgatcaccggtgaccagctcgccattgccaaggagaccgggagacggctagggatgggcaccaacatgtacccgtcgtccgctctgctcgggcagagcaaagatgaagccaccgcttcggtccccgtggacgacttgatcgagaaggccgacggctttgctggcgtcttcccagagcacaagtacgagatcgtaaagaggctgcaggagatgaagcacatctgcgggatgacgggagacggggtgaacgacgcgcccgccctgaaaaaagccgacatcggaatcgccgtggcgggagccactgatgcggcacggagcgcctccgacatcgttcttacccaagaaggcctcagtgtcatcatcagtgccgtgctcaccagcagggccatcttccagagaatgaagaactacactatatacgcggtgtcgatcactattcgtattgtgctcggattcttgctgattgcattgatatggaaatttgatttctcgccatttatgatcctggtcatcgccattctaaacgatggcactatcatgactattgccaaggacagagtcaaaccgtcgccgctccccgatagctggaagctaaatgagatctttgccacgggcgtggtgtatggaacctacatggctgtgatgaccgtggtgttcttctgggccatgagaagcacagacttcttctctaacaccttccacgtgagatctctgcgcggcagcaccgaggagatgatgtctgccctgtacctgcaagtcagcatcatcagccaggccctcatcttcgtgacgcggtctcgcagctggtgcttcgccgaacgccccggcttcttgctgtgcgcagcgttcgtgatcgcgcagatcgttgccactctgattgcagtgtgggccgactttgggttcgcccacatcagaggaatcgggtgggggtgggcgggcgtcatctggctctacagcgtcgtcaccttcgtcccgctcgacctgttcaagttcgccatccgctacgtgttggctggcaaggcctggaacaatctcctgcagaacaagacggccttcacgacgaaaaagaactacggcggggaggagcgcatggcgcagtgggcgacgacgcagcgcagcctgcacggcctcccggtgaccgagcccgaggccggcggcaggcgcagcggcagcttcgtggagttgtcggaggtcgccgagcaggccaggcgacgagccgagttcgcgaggcttcgcgagaagaacacccttaggggccagctggagtcgtcggcgaggctccgcggcgtcgacctcaacgcgatcaaatcgccgttctacagcgtgtag

SEQ ID NO: 35205 - DNA, 813 bp, Zea mays
  Peptide Sequence Number=SeqID_76984
atgggcgcaccggacagtccggtgcacaccggacatgtccggtgccccagccacgtcatcctatccgttgagattggagctggtcgaccgttggaggctttgtccttatgtggcaccggacagtccgggtccgggaaaggggatactttgaaatggatccttctccgcgaaggaagcgggccccgagccctcctactgatcaaaggttcgaaggctggcccctcggaaggtttcgatagccgcctcagagcactcgggctccgcgcccactactggtcagaggttcgaaggctggcccctcggaagggttcgacagccgcctcaggccactcgggctccgcgcctactactgatcaggggttcgaaggctggcccccgaagggttcgacagccgcctcagagcacgcagagcgagggatgactctaggtacgtccgatacatggccgaggctcgggctacgctcccgaggtaccctaggacatttccgagaccagcaggagcgattctgtaacggaatcccactagagggaggcatcgagccctcggaccctatcaaacaggaccaggtccgccaaatcacctgcagggtgacactaacagtagccaagtccagcctcgggcaccataggaagctccgcctcgcccgaccccagggctcggactccacctcgacactggaagacggtctccgcctcgcccgactcccgggctcggactccacctcgacctcagaggaatcaccgcctcgcccgaccttgggctcggaccgaccatgctacaggggcgtccatcattaccctacccctagctag

SEQ ID NO: 35206 - DNA, 414 bp, Zea mays
  Peptide Sequence Number=SeqID_76985
atgaagaagaagagcaagagagatttagagatgaagcacaaaactacagctctcaagctcactcaaagatttctctccaaagatttgaaatgggagaggcaagagatgtgtgtgagagagagggaggtgtttcttgggttagaaatggagttcaaatcgtgctccctgctttggggagagaggggggcggttgaaccgcccctgacagctcctggcgacctgtttgccagtctgactggcagactgcagatcagaggtcagaggggtcagagaccagctgaactgcccctcaggaccagttcaaccggtcttgaccactcagctgaaaagctcaacacagctgaagtcaagttcagctggaaagctcagctgcagttgaagaagttcagctgcttttcagcaagaacactctag

SEQ ID NO: 35207 - DNA, 270 bp, Zea mays
  Peptide Sequence Number=SeqID_76986
atggagttcaaattgtgctccctgctttggggagagaggggggcggttgaaccgcccctgacagctcctggcgacctgtttgccagtctgactggcagactgcagatcagaggtcagaggggtcagagaccagctgaactgcccctcaggaccagttcaaccggtcttgaccactcagctgaaaagctcaacacagctgaagtcaagttcagctggaaagctcagctgcagttgaagaagttcagctgcttttcagcaagaacactctag

SEQ ID NO: 35208 - DNA, 1029 bp, Zea mays
  Peptide Sequence Number=SeqID_76987
atgatcactgggctcgcgatgaatgatggcgaacgacaggccctgtcgctcttatggaagatgcagatggttggcgttcaaccaaatgacataactttcatcgggttgctgagcgcttgcacccactctggtcttgtgaatgagggccgccggttgtttgacagtatgatcgaggactttgggatacagccattcccacaacattatggtcttatggttgatttgattggccgctctggtcgtgtcatggaggccttgtatttcgtcaagagcatgcccgtggagccacaccctggcttatggggcgcactagctagcgcctgcaagatgcatggcaaggtcgagcttggtgaggaggttgccaagaagctcattgaactggagcctcgccatggcagccgatacatcctgctgtcaaacttgtatggctctgtgaatagatgggatgacatggcctctgtgcgtaagatcctcaaaaggcgcaaggtgcccaaaggcactggcaatgcagtggttgggatgacatcggcatccttgtgtgtgtttccctttactcttggctccagtggcagcaaaccaagctaccttggcgttcagaagagtcctccgtcccttgctctctgccctgcaaccaataactgtgtttccacatcagaggaaataagcgactcaaatcactatgctcccccatggaactacaatcccaaggatgggcggagcggtaaacccataaccaaagaggaggccatgaaagaactaattgaagtcgtcacgaagacaaagccggacaacttcactcctcgcatagtagagaaaaaagatgattatatccgagttgaatatgagagtcctatatttgggtttgtagatgatgtggagttctggttccctcctggcaacaagaccatggttcagtatcggtcggcgtctcgatcaggatttatcgatttcaatgccaacaagaagagagtaaaggagctgagattggctttggaaaagaagggctgggcttcagaaagcaacttctga

SEQ ID NO: 35209 - DNA, 1977 bp, Zea mays
  Peptide Sequence Number=SeqID_76988
atggggagcggcggcatccgtaacgccaggccctcctcctggctcgccgccgtggccgccgctgccgcaccaccaatcgcccacgccgtcctcctcacctccggccacctctcctcccgtgcctccgccaactccctcctccgcgtcgccccctgctcctccgcctgcgcgctcatcctccgcctcctgctgctccaccgcctccgacccgaccacatctccctctccttctccctgcacgcctgcgcccgcgtcgtccccaccaccagccgctacccgctcacggtcacgggcctcctccactcgctcgccctaaggcttggccacgcccgcgacgtctacgtcgccaacgccgccgtatcctcctacttcgccgcctccgacgtcgcctccgccgaccgtctcttcgcggaggtctccaccgacgtcgccgacgtcgtcacctggaccacaatggtcaccggccacgccagtgccggcggcctgggccgggcgaggcacttcttcgacgccatgtccgagcggaacgtcgtatcctggaacgcgatgctgagcgcgtacgcccgcgccgggatgctcaccgaggcgcgggacctgttcgacgcgatgcctaccaggaacgccgccacctggagctgcatgatcagtggcctcgtgctgtcgggacgctgctgggaggcgctggggctcttcggtgacatggtccacagcagcggcatcgtgccgaacgagcccgcgctggtgagcgtggtctcggcgtgcgcccagatgcggtcactggaacacggcgcgtgggtgcacgcgtacgccgaacaggagctgcagggggcgatgagtgttgtcctcgcctccgctatcatcgacatgtacgggaaatgtgggggtatccacagtgccatcagggtgtttgctgccatgcccatgaggaacatctactcctggaacgcgatgatcactgggctcgcgatgaatggtggcgaacgacaggccctgtcgctcttatggaagatgcagatggttggcgttcaaccaaatgacataactttcatcgggttgctgagcgcttgcacccactctggtcttgtgaatgagggccgccggttgtttgacagtatgatcgaggactttgggatacagccattcccacaacattatggtcttatggttgatttgattggccgctctggtcgtgtcatggaggccttgtatttcgtcaagagcatgcccgtggagccacaccctggcttatggggcgcactagctagcgcctgcaagatgcatggcaaggtcgagcttggtgaggaggttgccaagaagctcattgaactggagcctcgccatggcagccgatacatcctgctgtcaaacttgtatggctctgtgaatagatgggatgacatggcctctgtgcgtaagatcctcaaaaggcgcaaggtgcccaaaggcactggcaatgcagtggttgggatgacatcggcatccttgtgtgtgtttccctttactcttggctccagtggcagcaaaccaagctaccttggcgttcagaagagtcctccgtcccttgctctctgccctgcaaccaataactgtgtttccacatcagaggaaataagcgactcaaatcactatgctcccccatggaactacaatcccaaggatgggcggagcggtaaacccataaccaaagaggaggccatgaaagaactaattgaagtcgtcacgaagacaaagccggacaacttcactcctcgcatagtagagaaaaaagatgattatatccgagttgaatatgagagtcctatatttgggtttgtagatgatgtggagttctggttccctcctggcaacaagaccatggttcagtatcggtcggcgtctcgatcaggatttatcgatttcaatgccaacaagaagagagtaaaggagctgagattggctttggaaaagaagggctgggcttcagaaagcaacttctga

SEQ ID NO: 35210 - DNA, 432 bp, Zea mays
  Peptide Sequence Number=SeqID_76989
atgaactacgtcgaggagaattgtgctccagcagtttatacaccagaattaagatacgtgtgcattgctggaaggtacattcaaggtgctcctcttctggggaactccgcagctgcttctgatgagatcctcacagttgacactccttcagaaggaggcgatgctgttattgtcagtagcagtgacaattctacatctactccatcagctgtctcgtggcgagcccggttcgttgggcaaggttacaagcagaccaggtacattcaaggtgctcctcttctggggaactccgcagctgcttctgatgagatcctcgcagttgacactccttcagaaggaggcgatgctgttattgtcagtagccgtgacaattctacatctactccatcagcttgtaaccttgcccggttcattgggcaaggttacaagcag

SEQ ID NO: 35211 - DNA, 1551 bp, Zea mays
  Peptide Sequence Number=SeqID_76990
atgcctaggctctccctcaccgtcactgacgacgccgctgccatgccctttgcgcttcggcttggtggttccccagcgcttcgcccgggctcgcagtccccatcgtggctgcgctttggcggcagggccggggtgcggaaggcgctgttctgctccgccgaggacgctaggcggtgtggctcggacggaggggaacgggagcacatgccgagggcgtgctacggcgagaggctgcgcggcggtggtctctgtatccaccgggaggccatcgactggatttggaaggcttacacacactacagcttccatcctctcactgcctacttggcagtgaactatctcaatcgtttcctctcactgtctgagtgtctgagctactggaacaaggactggatgacgcaactcctctcggtggcgtgtgttttacactttcgctttcgctggctgccaaagatggaggaaatccccgtcatgcaatctctggaccttcaggtgggagatgtgtgttatgtgtttgaggcgaagacggtccatagaatggagctccttgttctaaccaccctcaactggaggatgaaggccatcacacctttctcctacatggattacttcctgaacaagctcaatggtggaaacacgaacatgattgtcattttattgagggagattggaaccggctgcttagggtttcggccgtctgagattgctgccgcagttgcagccacagtggccggagaagtggacgcgacaggcatcgagaacgcctatgctcacatagataaggagcctattgatgaaacacatgttcctgaggtcataaatgaagtgccgaagaagttccaatttcatctccccctgtaccactggaggagacaccaaagaagtcatatgcttcaattgtttggacgcgactggaagaagatcgaggagcatgtcggcaccaagacgacggtccagatacggagccacgcccagaaatacttcgtcaaggtccagaagcttgggctggctgttgggctgccgccgatgtacccgaggcgccacttcgccatgcagcagcagcagcagagctcggtagccggtggtagcagcgcggccgccatgccgctgctgcacggccggcaacctacttgcgcgccggtcgccatgccaggtctggccgagcccgacgccgtcgcccatcacggttccatcggatggagcagccccagtgtggtcgtccccgcggccagcagcgacggcggcggcaaggatgcaaggcttggacttggagtgggtggcaggcgcttcggttccaggggcaaatatttggttttacacatgcaggtggatgtgttctcttttgggatagttttatggaagatcttgactggtgaggaaccgtatgcaaatatgcattgtggtgctatcatagctgcttctgatgagatcctcgcagttgacactccttcagaaggaggcgatgctgttattgtcagtagcagtgacaattctacatctactccatcagcttgtaaccttgcccggttcattgggcaaggttacaagcag

SEQ ID NO: 35212 - DNA, 426 bp, Zea mays
  Peptide Sequence Number=SeqID_76991
atggcgcctgcgccgtctccctcggcgactccgacaccgtcatcaccaaggcaaatcgaccggcggttcagcgtggtgaacacgctgctggggaagaactcgtacaacgtcaccgtcaacccagggatcgactacgccttcatcgtcgcgctcgtcaatgaatacttcttcaggtacagggatgaccggaatgcagcagaaattttcagagctaatggtgatataaatggacttaaatcacagtgtaataatcagagcaatcaagtgaagagtgggtcgatggatgcgggcgggtggggcgtgtggagggggaggctgctggagcagcgccgaggcagggggagcggagtcgagggacaggggcgtgggcgcggacctaggagaggcagcgcggggatgaggcagagcgtagccgcggtatcgtga

SEQ ID NO: 35213 - DNA, 222 bp, Zea mays
  Peptide Sequence Number=SeqID_76992
atggacaccgtgcttctggtgagtggcatggagataatgtgcaaggaggagcttgaggcagcacgtagagaagagtgggaagctaggactgcacttggagataagaagaatgatttaaataataatgaatacttcttcaggtacagggatgaccagaatgcagcagaaattttcaaagctaatggtgatataaatggacttaaatcacactgtaatagtcag

SEQ ID NO: 35214 - DNA, 1374 bp, Zea mays
  Peptide Sequence Number=SeqID_76993
atggatctcgcagggcgaggatctcgtggatcacgccggatctgccgctcccaatctctgcatcgcgtggacgccttccatggagtctctggatcgtatctactgaatcctcaggctccagggatggttctcgacatggacgactacgtagacccctatgaggaggtcgtggccgaggacgactctgacaaccctgacaaggacgactcagatgcggagagcaactacaaggataagtcgttcgacctcctcaagtccgacaagcaccggttgcgcaacctggatgacaccttccgtggccccttctgcccctgcaagaagagcaggggtacaagagcaaggacctcctccagcacgctccgacgacatcgatgtctccaacaagcattgacatcacgaccacaaatgtatgagcttggccgccagcctgctaacaccaaactgtctagcaatgagacagtgaggagggtccatgttcgtggaggcaacgcgaagtggagggctctccgattggatacaggtaactgctcgtggggaagtgaggctcttatccgcaagactcacatcctggatgtggtctataatgcatcaaacaatgagcttgtgaggactcagactcttgtgaagagtgccattgtacaagttgatgctgctccattcaagcagtggtacctcactcactatggagtggacatcggtaggaagaagaaggtgcatgtcgctaagaaggatgacactgagggacaagagggtgaggctatagttgaggaaacaaagaagagtaaccatgtgcagaggaagattgataagcgccaccagtatcgtgcactcgacactcatattgaagagaaatttggaagtgggagattgttggcctgcatttctgcccatcctaggcagtgtggtcgagctgatggctacatccttgagggtaaagagctcgagttctacatgaagaagctccagaggagattcaagattaatgttgagtgcaaccatgctactctatctagacattgctgtcaccatgaactagaaaatgcatggattaataggctgcttgtaaatattgatgcaaacactgtggatgatatgcagaatatgcagactgtttctgctacacaaactctagaggttttcaagttgataggtaactgtattgcaaaagaatatggtacttatgcacctaaggagaaaggaaagaatcatactttttttggctctgagaatgaatacttcttcaggtacagggatgaccggaatgcagcagaaattttcagagctaatggtgatataaatggacttaaatcacactgtaatagtcagttaatatatcatttaggagtaatgagttctcagctaaaatgcagttaa

SEQ ID NO: 35215 - DNA, 186 bp, Zea mays
  Peptide Sequence Number=SeqID_76994
gtggtctggtacagatactgtgcgctcgccttctccttcagctcagcacctgcttgtgcttctgatggcagaaaacctgagtgttcaaattcaacattggctacagagacaaccctcatagctggtgtttctttccctttaactgatgatgtttgtaacaaccatagctttactgatgatgagtaa

SEQ ID NO: 35216 - DNA, 1356 bp, Zea mays
  Peptide Sequence Number=SeqID_76995
atgcctaggctctccctcaccgtcactgacgacgccgctgccatgccctttgtgcttcggcttggtggttccccagcgctccgccctggctcgcagtccccatcgtggctgcgctttggcggcagggccggggcgcggaaggcgctgttctgctccgccgaggacgctaggcggtgtggctcggacgatgatgcggaggcggaggagtgtcggaggagaggcgggagccgcgtgccatcagataggaggataaggggcaggaatgcggctgccacggtaggtgatctgcagtcaggtgataacgtccagataacaggaccagtcggcaaagaaatgttgatgcccaaagaccccaacgctaccattataatgcttgccaccggtacagttcaaaggtctgggctagctcttcctgggtgttccaacgagcagctcgttgctctacaaggaggtcagtacatcgatctgtacaaggaggagttcaggaagatgaaggagagagcgtcggagaacttccgggtcgactacgccgtcagccgggagcagacgaacgcggcgggggagaggatgtacatccagacccggatggcggagtacaaagaggaattgtgggagctcctgaagaaggacaacacctacgtctacatgtgtgggctgaaaggcatggagaacggtatcgatgacattatgttggatcaagaatctctcaaatataataatgtgaatggtagatcaagcaggtctgcatatgacgaaattaagttagacttctctcacttccttgatctgaaaataacttttattggtacggtggtctggtacagatactgtgcgctcgccttctccttcagctcagcacctgcttgtgcttctgatggcagaaaacctgagtgttcaaattcaacattggctacagagacaaccgtaaagccaacaaagttcaatatttacaataactcgatgtgtccagggtttggatgcgactggaagaagatcgaggagcatgtcggcaccaagacgacggtccagatacggagccacgcccagaaatacttcctcaaggtccagaagcttgggctggctgttgggctgccgctgatgtacccgaggcgccacttcgccatgcagcagcagcagcagagctcggtagccggtggtagcagcgcgaccgccatgccgctgctgcacggccggcaacctacttgcgcgccggtcgccatgccaggtctggccgagcccgacaccgtcgcccatcacggttccatcggatggagcagccccagtgtggtcgtccccgcggccagcggcggcggcgacaaggatgcaaggcttggacttggagtgggtggcaggtga

SEQ ID NO: 35217 - DNA, 327 bp, Zea mays
  Peptide Sequence Number=SeqID_76996
atggacgcggtccagagcggctgcaccgtgctgtccatcttcaaacagggggacctcatgatcgtcgccaacgccggcgactctcggttgttctgggcaccgcatccaacaacggcgccgtcacgacgtccagctcatcatccacctgaaactcaacctgccacaccggggggtccctcgggccgacgagtgagtgccgcgtgccccagcccagatgggtcgagcgcgtgggcgagcgcgaaggggggaaggagcgaggcggccggagaccggcgtgagagaggtgggaatcccgcggccttcgtgttcgtcccgcgcccaggtcgg

SEQ ID NO: 35218 - DNA, 261 bp, Zea mays
  Peptide Sequence Number=SeqID_76997
atgtcgtgcgcgttcgacgactactatatcaaggactatggcgtcatcttggcaccagagaacaacccgagagtcgccggcgttggcgacgaccatgaggtccccctgtttgaagatggaccgcgcggtgcagccgctctagaccgcgtccaagcgacggttgcgacggagcttgctgaacacagcgatgcatgcgaccacgtagtattgcttccagaggtcaaactggcagtcgccaggcttcttctcatcgtcgattag

SEQ ID NO: 35219 - DNA, 1352 bp, Zea mays
  Peptide Sequence Number=SeqID_76998
accggatcggcggcgccatgtcgcacgacgagctcgccgacaaggagccgtcgtcctccgaggagtttcagctcgcgctgacagattccaagttccggagcctcagccctgcaccgattccgatcccagcttctccgggcatcagatcatttgtcgactcggtgacagctacctgcaagctatatatagtgcctatatccagacccagttcagatggagggctgaagaggaagcgtgatgcattcaacgatgatgctaatccacagaagttcattccttatggtgcttctacttctaggttttatggtgagaacatccaacaattgtgtcctggttgccatgtggaagtactctctcaagatagtggtataaggggatgttggtttagatgtttgattctgaagaggcataaagataaaatcaaggtgtgctacctagaacttcaggatgctgatgagactgaaaacttggaggagtgggttatgctaacacgagttgccaaacctgatcaactgggtgtacgtttccttggaaggccaatggttcgtccacagcgcgtggaacaaagcaaggcctcatgctttgatgttggagccattgttgatgcgtggtggcatggtggctggtgggagggaatcgtgttgtgccaggtgggcagcgggcgtctacaagtttattttccaggagaaaaccgaacaactgaatttggtgaagatgaactgaggtgttcccttgagtgggttggtaacaaatggaatcctttgaagggaagaaaagatgtcacaagcaagctgacctccactgcagattgtggaatcagcacaatttcacgagatcagaaacgtgtccttgccgacctgactaatgatttgaagttagataacttgaggtggaggccaagaaagaggagcagaagatctggctcaagaaagcagtcggacacaagcagtggaagcagcagcggggacatggacctgttcagccccagccccagtggaagctttggtcagcataatttagtgcctgacgaggagacatgcaagagaagtggagagcagacttttatgggtgtgcctgtgcaggttctcaatcttgtgatgtccaggttatttttgccagcacaacccagatccagttttctgcagttttttggaggctcatcagttgtgatcaaagatgtgaaaatgtctcaccaagaaccactccgcttcgcctggtgcggcaagctcatccggtatgcccgcgccgttgccgcgcactacgtctgctccgtcaagggtctctgctttgacctcttcatcattaggggtggaaacagagctttcaatgcatgctggaggtgcacggtgtga

SEQ ID NO: 35220 - DNA, 1974 bp, Zea mays
  Peptide Sequence Number=SeqID_76999
atggactcctgcccagttctacagcatggactccttctagaccgccaacaaccccgtccgcacccaggcatcagcaagacaacacaacaattggatggaatctatgcactctttgcagtattgaggcttgctgttgttgatacaaaagcaggatgctgcgacttcgccggcaacgaggttgttgccctcaccgagagcatcggcaagccgctcgccgatgtgctcaaggagctcgggaagagggttccagactcccttgtgaagacccgcgtcgaggatgatggcttcactatcaaccacactttaatggagttctgcctcgcctggtgcggcaagctcatccggtatgcccgcgccgtcgccgcgcactacgtctgctccgtcaagggcctctgctttgacctcttcatcattaggggtggaaacagagctttcaatgcatgctggagcatcgaaaagaggccaacagtggtgaattttggcccagaaccagaacaaggtgctgccctcaaatcctcgcaggcccagacccaggcccaggtccgaggtgacgattcttctctcctcgcactgtctgttcctgcacatctcgcgctccctcctcccctaaaccccacgctcacccgcggctccggcgacagccgctttggactccggttccctccgtcggcggtccaaaagtccatctccgcgaccgctagccgtgaggatgagcctcctccgcaaccgccgccggcttacaacatcatcccgatccacgacgtggtgatgcaaggggagcacccgtcgctacggttcccggaggtgcgcgcggccgtggaggcgctggcgcacgcggcggacctgccgccgccgccgctcgcccgcggctgggacgccttccgtgccgacctcttcgactggctcggcgccacctgcggcttccagctcgacaacgtccgcaaccagcgggagcacctcgtgctcctcctcgccaacgcgcagctccgcgcaggcggcaccctccccaccgaccaccccgccgacgtgctgcaccactccatcgcgcgggacatccggaggaagctcctcaagaactacaagacctggtgctcctacctcggcaagaggccgcacgtccatgtgcccagcggcggacgccgtgtcgctcagggggtcggccctgacacacgccgcgacctactgtacaccgccctctacctcctcatctggggcgaggcggccaatttgagccggaatgggaccaagccacactcggcctggaggaactatgatgatgtgaatgagtacttctggagccgcagagttttcaggcggctccagtggcccctgtcaccagcgaggagcttctttataaagccaggaaaccccgggcgtattggcaagactggttttgttgagcagaggtcgttctggaatgtgtaccgcagctttgatcgggtattggtgatgctcattctgttctttcaagcagcaatgatcgttgcatgggatggccacactccgtggtttagcctactctaccgtgacatccagatccgggtgctgtctgtgttcatcacctgggctgcgctgcgcattgtacaggcagtgcttgatgcaggcacacaatacagcctcgtgaggacggatactatatttctcgcagtacggatggtgctcaaggtgcttgttgctgttgggtggactatatcacattcattggtgttaaactaccttgaggcagctgctgtgtttctcatcccacagaacgggacgggacaccggaccgcggaggccaccgggaagtacaagcaatatcgagttcctgttcctcacgaggcgacgacctcgcccgacggtgacggcaaccccagcagctggaggacgagtggagatgtgacgcgatgcctcgttggagacgcaccgtggcgtgctgaccttcaccgcctgctgccgccgcgccgtaccgtgattaatgaagcatgctactaa

SEQ ID NO: 35221 - DNA, 432 bp, Zea mays
  Peptide Sequence Number=SeqID_77000
atggaaggccacaagtctttccaatgcaaggtgatgaccggggataatcaaaggcaaaagctcaagcaaaagccatcaagcaaaatctccagcacctacatcaaaaaggtgaacaaaaaggatgctacaccatatttgatcaagaagaaaaagaatggaaaggtgatagcaatcaaggccaacaagcaaggcaacaaaggaaagggggccaaacgcatctgggtgccaaaggaaataatttcaaccatgaaaagcaccaagaaggtttggatcccaaaagggaatctcattgtaaggaaaatgaagtccccggagaatgacaacaatcttccactgcaaaatctccaagaactttcatgtctcacaagcctgccattggttttcaattggtccgccattgactttcgattggtatctttgagactacattaa

SEQ ID NO: 35222 - DNA, 591 bp, Zea mays
  Peptide Sequence Number=SeqID_77001
atgggatttagtgggacggagaggaaacggttcccctttctctcccctggaatcaccaatccgtcctcacgcacggcggtagttccaggcaatttcttccatggacgaacacgagctgcaaagggaaggggagagaaggatcacagccatggggatgcacgcaaggacgttggtcggagcctgctcagcatgcgcgtggggcagcgactgggctcgctgggcagaggtcggacgcgtagccatggctggccgcgacacggcggcgctgggcagcgaactgtgccgcgcgcgggggttcctggccgcgctgaggcccaggcgggctggccggggatggctgccacgcgcgccgagcccacgcgcacccgcgccaggacgtcgggcctggccacgccacaccgtcgatcgaggaaaacagagagagcacgcaggggagagaatgtcgaagggagggaggagagactcacctgcggctgtctcattgtaaggaaaatgaagtccccggagaaagataacaatcttccactgcaaaatctccaagaactctcatgtctcaccagcctgccattgactttcaatcggtatctttga

SEQ ID NO: 35223 - DNA, 684 bp, Zea mays
  Peptide Sequence Number=SeqID_77002
atggctcgtcttagacacactgcacgtaagtcggtgattcctttcctgccgtctcgacttgcggagcgtcctctgcaccgcaccgtgtccggtcagtcgagtcacctggagaggctgcaccaccgcctgcgtgaggagcaggaacgccggcgccaacacagagagcagcagggctcttcctccccaccccagcgagaggtggagtccgtgaggccccgttcctctgttgcccagctggaggtgccccctgcaccaccgcgggacgccccggctgttggaggagctactggaggagatcctggaggagaccccgacgacgacgactcagaccacagcatggagtcttctgagccgcaggaggcggaaggatgggtcgcccgacccatcacccatgacgccgctcgcggttgtcacttccacgacgcactcgacaccttgctgcgccaggctttcgaccgacacacctggtcgatcgagtatcgttgtgtagtctaccagcacagtcgcgggagtacagagagtgtggttgtctcacctgttggtgagggtaaccctaggttgagcagcacagtcaacctagtcgcggtgcttaacactgagctggatcactctctggacgagctgagcagggctcgaacggagattgcggagttgcgtgctgagctggcagagcgccatcactag

SEQ ID NO: 35224 - DNA, 670 bp, Zea mays
  Peptide Sequence Number=SeqID_77003
acacactgcacgtaagtcggtgattcctttcctgccgtctcgacttgcggagcgtcctctgcaccgcaccgtgtccggtcagtcgagtcacctggagaggctgcaccaccgcctgcgtgaggagcaggaacgccggcgccaacacagagagcagcagggctcttcctccccaccccagcgagaggtggagtccgtgaggccccgttcctctgttgcccagctggaggtgccccctgcaccaccgcgggacgccccggctgttggaggagctactggaggagatcctggaggagaccccgacgacgacgactcagaccacagcatggagtcttctgagccgcaggaggcggaaggatgggtcgcccgacccatcacccatgacgccgctcgcggttgtcacttccacgacgcactcgacaccttgctgcgccaggctttcgaccgacacacctggtcgatcgagtatcgttgtgtagtctaccagcacagtcgcgggagtacagagagtgtggttgtctcacctgttggtgagggtaaccctaggttgagcagcacagtcaacctagtcgcggtgcttaacactgagctggatcactctctggacgagctgagcagggctcgaacggagattgcggagttgcgtgctgagctggcagagcgccatcactag

SEQ ID NO: 35225 - DNA, 330 bp, Zea mays
  Peptide Sequence Number=SeqID_77004
atggccaggagaggcgagggccgcctcaccgtagatggagcccacagggggcgcaaggagtggcgcgccttctctggctccttgcttcgctccaatggcgtcgaggtccacgtgccacttcatggagcggatgcagcacagttggctagaatatcttggaacaaagtgcaacacttgtgtgcagcctggttagtgtctctctgttttatggggcctaattttagacgcgatgtagtgtttaccaatgaggttttcattttgctcactggtttctacacagctaataatttgcataagttactaaataggaactcgaccatgaacaattaa

SEQ ID NO: 35226 - DNA, 438 bp, Zea mays
  Peptide Sequence Number=SeqID_77005
atgcttggtgggtgctttcttgtgctaaagaacaagtatcccacggaaccacaaccgtttgtattatctggtgatttccgcctcaccgtagatggagcccacaaggggcgcaaggagtggcgcgccttctctggctccttgcttcgctccaatggcgttgaggtccacgtgccacttcatggagcggatgcagcacagttggctagcctcctcctcccccaattaccggcaaaaacgggtggcgaggagctcctcctggaaggaggagatgtgggcgcagtccaccgccgaatctacgacgtctcgagtagaggcagagcacttgcacggtccacggaggacctcgcccgagccaccgggtcggtcgctgcctccccctccggctctacctcctccacgtcgtcctctccagagccaccagtcctttcccagcgctag

SEQ ID NO: 35227 - DNA, 513 bp, Zea mays
  Peptide Sequence Number=SeqID_77006
atgacttgtggccatgatacaatacagcaagttgacatgctgccccaactgcaggagaggcttgccgttgctatcccatcactgcatgccaacaaggatatccagaacaagtatcccacggaaccacaaccgtttgtattatctggtgatttccgcctcaccgtagatggagcccacaaggggcgcaaggagtggcgcgccttctctggctccttgcttcgctccaatggcgttgaggtccacgtgccacttcatggagcggatgcagcacagttggctagcctcctcctcccccaattaccggcaaaaacgggtggcgaggagctcctcctggaaggaggagatgtgggcgcagtccaccgccgaatctacgacgtctcgagtagaggcagagcacttgcacggtccacggaggacctcgcccgagccaccgggtcggtcgctgcctccccctccggctctacctcctccacgtcgtcctctccagagccaccagtcctttcccagcgctag

SEQ ID NO: 35228 - DNA, 1143 bp, Zea mays
  Peptide Sequence Number=SeqID_77007
atggctcaccggagtttctccgacccgcccgagaccttctcaccatcgttctcccttctctgcccatggattcatggcttcttccccgccactgagttcgtcgtggcgccctcttcccctctgcccaactcctgcgaccccggagccaccctagctcgcgcttgcctcaactccggcgacctcaccgccgcggagaggagcggcgccacccgcagccatctatttccccgctcgtggttcctgagcgagttgctgaagatccctctgagcagcaacctggagcaagagcagcaggactcttccccctcgcctcagcaggaggtggagtccgagaggccgctttcccctgcacctcagccagagatgccccctgcaccacctcagggcatcccgactgctggaggagaccctgacggagacggagacgacgacgacgctggtggcagttcgagccacggcacggagcttttggaggagccagagccggatggatggatcgctagacccatcactcgtgacgctgctcgcgggtgtcacttccacgacgctctcgataccctattgcgtcgggccttcaaccgacacacatggtctatcgagtaccattgtgtagtctaccggcatcgtcgcgggctatacccggaccagtgggaggctacttgcttggtgcgccgtccggacgatgatctccggggtgcagaagccttctcagagcactattctattactgagagggatactaccgagacagccatgcaggatgcagcacgacgagcactttcccagtattgctcgttgttcagcggggtagctgatggccttgacctgaagtactatcctcgccattcaaccggtagtgctggaggtgtgattgtctcgccagttggtgagggcaatcccaggctgagcagcatggtcaacttggtcgtcgtgctcaacacagagttggaccacacccttgacgagttgggcaaggttcgggcggaggttgcggaattgcgtgctgaacgcgcggcacaccactacatggatggtggttctcccgcccctatcgggattcaacacccttaccattcaccgccccgtggtcgcttcgactatggtaccccagactgtaggacccagatagatttggatccctag

SEQ ID NO: 35229 - DNA, 1077 bp, Zea mays
  Peptide Sequence Number=SeqID_77008
atggctcaccggagtttctccgacccgcccgagaccttctcaccatcgttctcccttctctgcccatggattcatggcttcttccccgccactgagttcgtcgtggcgccctcttcccctctgcccaactcctgcgaccccggagccaccctagctcgcgcttgcctcaactccggcgacctcaccgccgcggagaggagcggcgccacccgcagccatctatttccccgctcgtggttcctgagcgagttgctgaagatccctctgagcagcaacctggagcaagagcagcaggactcttccccctcgcctcagcaggaggtggagtccgagaggccgctttcccctgcacctcagccagagatgccccctgcaccacctcagggcatcccgactgctggaggagaccctgacggagacggagacgacgacgacgctggtggcagttcgagccacggcacggagcttttggaggagccagagccggatggatggatcgctagacccatcactcgtgacgctgctcgcgggtgtcacttccacgacgctctcgataccctattgcgtcgggccttcaaccgacacacatggtctatcgagtaccattgtgtagtctaccggcatcgtcgcgggctatacccggaccagtgggaggctacttgcttggtgcgccgtccggacgatgatctccggggtgcagaagccttctcagagcactattctattactgagagggatactaccgagacagccatgcaggatgcagcacgacgagcactttcccagtattgctcgttgttcagcggggtagctgatgttggtgagggcaatcccaggctgagcagcatggtcaacttggtcgtcgtgctcaacacagagttggaccacacccttgacgagttgggcaaggttcgggcggaggttgcggaattgcgtgctgaacgcgcggcacaccactacatggatggtggttctcccgcccctatcgggattcaacacccttaccattcaccgccccgtggtcgcttcgactatggtaccccagactgtaggacccagatagatttggatccctag

SEQ ID NO: 35230 - DNA, 900 bp, Zea mays
  Peptide Sequence Number=SeqID_77009
atgaaaccgtcgctttcgaagaagaagggcaagaagaagaagaagtcctcgctgccggccgccgcaccggcccctccgccggcggagggcgctgcggatacggaggcatgtcccccgctgcccggaaccataaccctaaccgctgccaccgctgctgcggcggtggtttcggagacggagtccagcagcagcggcgaggcctcgacgtgcccatccgcctgcttcaccgcaagctcgtctgggaccgcgtcctcgcactccttctctgccttgtcctcgtcggcgtccacagcttcgtcgtcggccgccggcgaggagcggcgggacctcacctggctgctcgacgcattcgccagcgccaccttcgaccagatcgactccgcctaccgcgaggccggaggggaccctttcgtggccgccggtatcctgtcctccacgcaggacactcacccgccgcagcccccgcagccggcgccgcagcccccgccgccaccagacctctcgccgcgcagtggatctggtggaaggaaggctggtcggaggcccaagcgggttgccgtggccgctacgggcatggtcgcggacgtgattggcaaggagtacacgcgacccgcggctaattctgtagtaagcatgccaaatgcttggaagggtcgggacggggagagcgatggcagcgggtctggtggccgcaaggacagtgttgaagaggcagagcagttcctgtgctccatgctcggggataattccgagcttggcatgggtgttgtcagagacgtgctaggccagtatgggtacgatgttgagaaggtaaacatttattttattggccgcatctcccagggactactcactgggtttataccttttttccccaaatttcaacaaaatcccacctaa

SEQ ID NO: 35231 - DNA, 245 bp, Zea mays
  Peptide Sequence Number=SeqID_77010
aaaacggagaagagagcgaagtgattgaagagaagacaccaccacctttggaatctcgggcaaggacttggctctacttcgacatctgcgagtccgagcctgactcacctactaacgaaggcaagccccggcctgttgatcaaggactatcttatctagccacatgccctgagaatgggacaggtggaggatccgtgggaatagtagacatcaaggtttacgagaaacatatgtcgtgtggttag

SEQ ID NO: 35232 - DNA, 186 bp, Zea mays
  Peptide Sequence Number=SeqID_77011
gcaaagacttggctctacttcgacaactgcgagtccgagcctgactcacctactaacgaaggcaagccccggcctgttgatcaaggactatcttatctagccacatgccctgagaatgggacaggtggaggatccgtgggaatagtagacatcaaggtttacaagaaacatatgtcgtgtggttag

SEQ ID NO: 35233 - DNA, 432 bp, Zea mays
  Peptide Sequence Number=SeqID_77012
atgacacaaactatcatgggtttattggtcatttcatctttaggatccactgaaggtgtttctttcttcaagatcttcggctacgaagcatacccccaacagccagcaacgtccatcgtcccagcacacaagaatttatgtccgaacaacccgagagtcatcgacgttggcgacaaccatgaggcccccctgcttaacgatggacaacgcgatacagctgctctggaccgcgtccaagcggcggcttcgcgggagcttgtcgtacacaacggtgcatgcgaccacgtaggactgcttctagaggtcgaactgacagtcgtcaagcttcttctcgtcatcgatgagcgacgccaacgcgagttcctcctgctcatggtgtttgttcgggtttcaagtaagaaacatggattcatgcttggcgttggtttatga

SEQ ID NO: 35234 - DNA, 558 bp, Zea mays
  Peptide Sequence Number=SeqID_77013
atggccaatcccaaagatcacaacaatgtcgtcctagacattaacacaaggctgactaactcgccgaccaatgaggatgagaaattagaagaccacatgaaaaggctggacgaggaattccaacgacaacaggctcagataagcaaggtggcgaaaaagtggtacctctcgcacttcaaggtagatcaccaccagaagatcatcaagaagaggaaagtaaaggaagacaccactcctgtgcctaggtctcggaccgtccggcccaaggccgtggaccgtccgcgccaccgcagagggcactaccaggcgacctgtcgcaggccgccaccactgttcacctcgcggagccaaacccaaggtattgctcatcacgagaaggtcctagggttcgttgctatttggtcccaaataggtggtgatcatcatagaggtgttgccactgttcttgttgagtgtttggcgctccgaaaaggcgtcaacatactttttggcgactccgctggggacaacgcatatagacctatcaaatcggccctcaatggccggttcaaaggatag

SEQ ID NO: 35235 - DNA, 1683 bp, Zea mays
  Peptide Sequence Number=SeqID_77014
atggcgcccgtctacgctgccgcggaccacggcaccaacggcggctccggcctgaccctgaacccggtggcgcgccgggcgctcagcctcgtcggcgcgcccaccacgccgtcgtcgtccacgccgccggcgtacgggagcatcgtcaccgtgctcagcatcgacggcggtggcgtgcgcgggatcatcccgggcaccatcctcgccttcctcgaggagaagctgcaggagtacgacgagcgaccggacgcgcggctcgccgactacttcgacgtcatcgccgggacgagcaccggcgggctggtcaccgccatgctcacggcgcccaacaaggacggccgcccgctcttcgccgccaaggacatcaacggcttctacctcgaccactgccccaggatcttcccgcccggcggcggcgccggcggtcctctgggcctgctcaagaagctgtcggggcccaagtacgacggcaagtacctccacgccctcgtccgggacctcctcggcgagaccagggtcagccaggcgctgcagaacatcgtcatccccaccttcgacatcaagctcttgcagcccaccgtcttctccaaatacgatgtaaaaacattattattgctgccttgcatggtttgctcgccgattatatatatgctaaacgacgacgacgactatgtgcatgcacaggccatcaccgatgtttccaaggacgccctgctgtcggacgtgtgcatcagcacgtccgccgcgccgacctacctcccaggccaccagttccagaccacggacaaggacggcaaggcccgtgccttcaacctcatcgacggaggcgtcgcagcgaacaacccgacgctgctggcgatgacggacgtgagcaagcagatcctgctgggcaacccggacttcttcccgatcaagccggcggactacggcaggttcatggtgctgtcgctgggcacaggctccgccaaggccgaggagaagttcgacgccgtgcagtccggcaagtggggcctcctggggtggctcagcagcaaggacaccacgccgatcatcgacagcttcagccaggccagcgccgacctcgtcgacatccacgcctccgtgctcttccaggcgctgcactcggagaggcagtacctccggatccaggacgacgagctcacgggacagacgtcgtccgtcgacgtgtccaccgaggagaacctcaaccgcctcgtcgacgtcggcagggggctgctgaagaagccggcgtgcaaggtgaacatcgagacgggcaagaacgagcccgacggcaagagaggcaccaacgaggatgaactcgtccgcttcgccaagatgctcgcaccgctcctgcgtccaggttgcggaccgtccagcctagagccgcggaccgtccgcgccaccgcagagggcaccgccaggcgacccagcgacctatcgcaggctgccaccactgttcacctcgcggagccgaacccaagacctatcagatcagttgcaatggccaatcccaaagatcacaacaatgtcgtcctagacattaacacaaggctgactaactcggcgcccaatgaggatgagaaattagaagaccacatgaaaaggctggacgaggaattccaacgacaacaggctcagataagcaaggtggcgaaaagtggtacctctcgcacttcaaggtag

SEQ ID NO: 35236 - DNA, 195 bp, Zea mays
  Peptide Sequence Number=SeqID_77015
atgcgggggaaggcgaactgttgctccctggccagggtgcagctttccgtcctcttcccgggcggtggtcgtgccgcgcgcgggccggccacgtccaagtccgccttgcaccgtcggctgcaccgggggtcgctcaacacgtcgtacgccgcaagggcggccaggagaaccaccgagggtcctaccgacatctaa

SEQ ID NO: 35237 - DNA, 1698 bp, Zea mays
  Peptide Sequence Number=SeqID_77016
atggatgcacataagttaggttacacaggaaatgatgttcttcaagagcttgaaatactgactataaatgccaaagcagcacaagaggttatattgagtaaaattcttgagaagaatcaggctactgaatacctgaacaaattcatgaatgggtccgtagacatttctgccttcaagagccaggttccagtagtgacgtatgatgtggtccaaccctacattgcaaggattgccgctggtgaaaggtcttcaattttgtgtggagaacaaattgtagagctgctccgaagtcaagtctccaggtacatacgaggccttggcgaggggaaggcaatgtatcttctctttgtgaaagctgaaacattgacaaatgctggcattccagtccgatcagtcctcaccagctactacaagagccctcagttcttgcagcgcaagcacgacctctacaacagctacaccagtcccgacgaggtcattctttgccccgacagccagcagagcatgtactgccagctactctgcggcctggtggaacgccagaacgtcgtccgtctcggagcagtcttcgcctcagcattcctccggtccatcagcttcctcgagaagcactggcatgacctagtcaccgacatccgaaccggccggatcaatcccagcatcaccaacgccgcatgccgggtggccacggagagctttctcgcgcagcccaaccccgagctagctgacgaagtcgaggcgatatgcagctcggagtcatggaagggcgttcttggcaggctctggcctaacgtcaagtacatcgaggccgtcctgacggggacgatggcgcagtacgtccccatgctcgagttctacagcgacggcaggatccccctggtctgcaccatgtacgcttcctcggagagctacttcggcgtcaacctgcggccgctgtgcagcccgaaggacgtgtcctacaccatcctccccaacatggcctacttcgagttcgtgccgttggacgacggcctcaggctggcggaggatggtgaggctgtggagaaggagaagcttgtcggcctcgtggacgtcaaggtcggatgctactacgagctcgtggttaccacatttgccggtctttacaggtacagggtaggcgatgtactccaggtgacaggcttctacaaccgcgcaccccagttcaaattcatctgccggaggaacgtgatcctgagcgtggacgcagacaagacgaacgaggaagacctccacggcagcgtctcccgggccaagaagatcctggaggaccgaggccacatcctactggagtacaccagcttcaccgacacgtcgacggtgccgggccactacgtcctgttctgggaggtgaaggccacgcccacctccggctccgggggcgcgcggctggacgcgcaggtcctggagagctgctgcgtcgccgtggaggagtcgctggactgcgtgtacaggcggtgcagggcgcacgacaggtccgtggggccgctggagatacggctggtggaagccggcgccttcgacgcgctcatggacctgttggtcagccagggcggctccatcaaccagtacaagacgccacggtgcatcgagccgggcggcgccgcgctggagctgctcgactccaaggccaccgcctcgttcttcagcccccgggatcctgaagctactggtgtctga

SEQ ID NO: 35238 - DNA, 348 bp, Zea mays
  Peptide Sequence Number=SeqID_77017
atgcccaagcagttctgcggccagctaatgcgtatgccgttcccggacggctacccggagtacccgacccgccgccagttcgtcgactacctcgagcgctacgccgccgagttcaagatcaagcccgagctcggcaccgccgtgctgtctgcgcgctacgacgagacgtcgtcgggcatctggcgcgtcgtcaccaacggcggcgacatgaaccagggcggctccatcaaccagtacgagacgccacggtgcatcgagccgggcggcgccgcgctggagctgctcgactttcatggccccgcctcgttcatcagcccgtgccccggttggtcgcttctggtgactgag

SEQ ID NO: 35239 - DNA, 1044 bp, Zea mays
  Peptide Sequence Number=SeqID_77018
atggggggctcggagcccggctccttcgcggagaaggatccctttcggggtgaagcgtcgcgtgctcctcctgccagagggcgccgcgtgtctcgccgcagagttaatgcgacggggcgagtggttggcgaggcggtcgttgcgatccgttcgaggaacgggtcacgggtgcaccgtctccacgccgtgagaggaggctctcttgctgtctcaagatgggaccaactgacgcaccggttgctcgacgcgtgggcctgggttcccaagctggcgtgtcagaagtcggagaagcgcgtccatctggcgcgtttgcatgccgcctccggcttgcatgacatgcgggacccagcccccgagtcgcaggggagggccttggagcgtgttggagaagactcagcccgcggcgtctgggggccccggatggggggtatccgccgcctttccgcctcctcgttggaggaacgcaactccatgggagttggtacctttcagccatcgttcggcttcaaggattttcatcatgctgcccggctgcttccctccgccggcgggctggggaggggagtgcgccgagatggggtcggcccctgcgtgggcggtggcccgctccttcactcagtgatggggggagaagcgggcattgcccgtggcgtccggcagctgcagcgtgcctggtcttcagccgcgagtggcttcggggccacttgcggcgccggcgtctgccacggcagctggaagaggttcttccgccggcgcggcggccgggaccggccacgggctgacctccaacttctacggccttctgcccgtccttgcctcacgagttttggcatgggcgggggcttcctggcagcggcatccaccctgaggtcagcgttgccgctgttcggccccccggagcagaagtcgtcgtcgtcgccgctgctggagcaggaatccctcggcccgttcggccttgttgtctggggctcctctagcttagttgacgagacccctcgaccgcccttcggtggaccgaggccaggggtagcgatatcagtatga

SEQ ID NO: 35240 - DNA, 278 bp, Zea mays
  Peptide Sequence Number=SeqID_77019
gaaacagcactattcaccccgttccgactattgtgccaaccaccagggtaaaaccaacgacagatgcaaacatacttgatgtgtttgtccccagggtgcggcaaacatttgatacaagggaagaaacctacctcttttaccttgactatgcaaagttggctggttttagtgtcaggacaaagagcattctgtcgggagcatgcgagaaggacgaagacgaagcgtcggtttggcctgagtgggacggttggctcggaccaggtgctcctggcgcgtag

SEQ ID NO: 35241 - DNA, 498 bp, Zea mays
  Peptide Sequence Number=SeqID_77020
atggccccaccgtcgctgccgcaccttgaatcgcctcaatgctcctcccctaattccttggcgattgttgtggctggaggtgctgatccgatattgccgtctccgattgcgacaacgggagcgggtgtacgcggcggatcaggtgatcccttgcatcacaaaacgttgctgacgccaccgccttcaattccacctggatcgctggtcactccggatgcagcccagctcttccatccgttgcatggtgtatactctaattgcaaacttgagtctctgtttttactcattgattacagttgcatgttgcatggtgtatactctaattgcaaacttgagtctctgtttttactcattgattacagttgcatggatgcaaacatacttgatgtgtttgtccccagggtgcagcaaacatttgatacaaaagaagaagcctacctcttttaccttgactatgcaaaattggctggttttagtgtcagccctctcggggactag

SEQ ID NO: 35242 - DNA, 237 bp, Zea mays
  Peptide Sequence Number=SeqID_77021
atggccccaccgtcgctgccgcaccttgaatcgcctcaatgctcctcccctaattccttggcgattgttgtggctggaggtgctgatccgatattgccgtctccgattgcgacaacgggagcgggtgtacgcggcggatcaggtgatcccttgcatcacaaaacgttgctgacgccaccgccttcaattccacctggatcgctggtcactccggatgcagcccagctcttccatccg

SEQ ID NO: 35243 - DNA, 360 bp, Zea mays
  Peptide Sequence Number=SeqID_77022
atggctacatcacgaggacgaggactccctcatcaaacgcagatgggaacccagggtcgggacctagccctatggcaagtaccaaaccaagaagggctctgcgactctcccccagctgggaaggacccttcaaggaaaaatccaactgaaaatgccttggctcgagcagccaagactttgctcagtctggagcaccggactgtccggtggtgcaccggacagtgtccggtgcgccaggctggctctagcgaacaggctgctctcgggaattcaccggcgacgtacgactataattcaccggactgtccgtgtaagggcgagaggctccaagttgtggagattcctcgcaaacgggattga

SEQ ID NO: 35244 - DNA, 852 bp, Zea mays
  Peptide Sequence Number=SeqID_77023
atgcaggcggcatgcagccgcaccgagggggcgcaccctttcgacttcgacgcatccagcatggaggcccaggcccacacgtcatgtaaccggcgcgccggttactacgtgcgagaaactgcaccaccactcgcgccagtaccacgcctcctcgactgtagaaccggtgccgcgactcaaggcgaccctgcacatgacccgacagtgccaaccaagcacatcggtcatgggtcagtcagccgcgggataaggcgcgacggtcgatacgaccagaaatgggctagcaggaccgggaaaggggatactccaaaagggatccttctccgcgaaggaagtgggccccgagcccccctactgatcagaggttcgaaggctggcccctcggaagggttcaacagccgcctcagagcactcgggctccgcgcccactactggtccgaggttcgaaggctggcccctcggaagggttcaacggctgcctcaggccactcgggctccgtgcccactactgatcaggggttcgtaggctggcccccgaagggttcgacagccgcctcagagcacgcagagcgagggatgaccctggagggaggcatcgagccctcggaccccatcaaaaggggaccgggtccggcgaatcacccgcagtgtccaacacaagtgcctaagtgtaaaaaggtggacaaagtacaaatcaaggataaaggaaaaatccaattgaaaatgccttggctcgagcagccaagactatgctcggtctggagcaccggactgtccggtggtgtccggtgcacccggctggctctgcaaagtggctgctctcgggacttcgacggcggtgtacggctataa

SEQ ID NO: 35245 - DNA, 357 bp, Zea mays
  Peptide Sequence Number=SeqID_77024
atgcagaataggggcatgagaatagtaaaggatggagctaaagcaatgattgtaaccgacaagggaaagaatgcaaccaaggtcaggataggtaaaacaccattatcaaatcaagatggaaaagatgatatttcaaaaggtaggcataagataacatcatggaaagatctagagattacaaagcgagtacggcgaaggcctcgagcgaagggtggcgtcttcgccttcgccccaacatttgcccttcgagggaccagttcgactattcacctggtgccgaagacgtcgctagatggcggagacgctgccctcgctcgaagtggttccgcgggggtttttgacatgactgttgattga

SEQ ID NO: 35246 - DNA, 288 bp, Zea mays
  Peptide Sequence Number=SeqID_77025
atggagggtaggggcatgagcataataaaggatggagctaaagcaatgattgtaactgacaagggagagaatgcaaccaaggtcaggataggtaaaacaccattctcaaatcgagatggaaaagatgatatttcaaaaggtaggcataagataacatcatggaaagatctagagattacaaaggtgcaagataagcatcaagagtcaaggcaagactcaccaaatggcaaggtggagaaaacaatcaaggataagataagtgaggttccgacagaagagttgaagtaa

SEQ ID NO: 35247 - DNA, 318 bp, Zea mays
  Peptide Sequence Number=SeqID_77026
atggagggtaggggcatgagcataataaaggatggagctaaagcaatgattgtaaccgacaagggagagaatgcaaccaaggtcaggataggtaaaacaccattctcaaatcaagatagaaaagatgatatttcaaaaggtaggcataagataacatcatggaaagatctagagattacaaaggtgcaagataagcatcatggtaaagatcaagggatgacaagggttaagatgataacagacaaacacaaccaaggatgtattttagacaaaacttgtgaggcatcaaagaaggggaagcaatcaatggtgaagtag

SEQ ID NO: 35248 - DNA, 318 bp, Zea mays
  Peptide Sequence Number=SeqID_77027
atggagggtaggggcatgagcataataaaggatggagctaaagcaatgattgtaactgacaagggagagaatgcaaccaaggtcaagataggtaaaacaccattctcaaatcgagatggaaaagatgatatttcaaaaggtaggcataagataacatcatggaaagatctagagattacaaaggtgcaagataagcatcatggtaaagatcaagggatgacaagggttaaggtgataacagacaaacacaaccaaggatgtattttagacaaaacttgtgaggcatcaaagaaggggaagcaatcaatgatgaagtag

SEQ ID NO: 35249 - DNA, 318 bp, Zea mays
  Peptide Sequence Number=SeqID_77028
atggagggtaggggcatgagcataataaaggatggagctaaagcaatggttgtaactgacaagggagagaatgcaaccaaggtcaggataggtaaaacaccactctcaaatcaagatggaaaagatgatatttcaaatggtaggcataagataacatcatggaaagatctagagattacaaaggtgcaagataagcatcatggtaaagatcaagggatgacaagggttacggtgataacagacaaacacaaccaaggatgtattttagacaaaacttgtgaggcatcaaagaaggggaagcaatcaatgatgaagtag

SEQ ID NO: 35250 - DNA, 204 bp, Zea mays
  Peptide Sequence Number=SeqID_77029
atggaaaagatgatatttttaaaaggtaggcataagataacatcatggaaagatctagagattacaaaggtgcaagataagcatcatggtaaagatcaagggatgacaagggttaaggtgataacagacaaacacaaccaaggatgtattttagacaaaacttgtgaggcatcaaagaaggggaagcaatcaatcatgaagtag

SEQ ID NO: 35251 - DNA, 816 bp, Zea mays
  Peptide Sequence Number=SeqID_77030
atggcgcctcctgttgacgtggctggcctgcgccctaggttgggcgatgtggaggctcctccgaagccgaggttgagtctgtcttccgtggccgaggccgagtccgagcccctgggtcgggcgaggcgggggtcgtcggctgaggccagggcggagtccgagccctggggtcgggcgaagcggatcggtgtggcgcaggcggcgctgtccttctgtcaggccggtcagtggagcggcgaagtgacggcggtcacttcggctctgccggggggcgcgtgtcaggataaaggtgtcagggcctcgggcgagccggaaatatgttcgccgtcggaggggggccttgggcgagacggaaatcctccggggtcggtcgcccttctttatgctgatgggggttaccagctgagaattaggagtcttgagggtcttaatgcctcgcgtaatgcttcggctggtctggttgttccctcatgcgagctggccgtagcccggggcgagagggtgatcagggacagactcggcttttttacatatgcccctgcgtcgcctttccgcaaggaggagggggggaaagcgccatgttgccctcgatgggcgccgaacatggtgtctccggtgagctgcaagcgggtaatccgagtggacgtccgtgccccgttcgttaggagtcggctaggggcccagaggcacgcccaaaagtacctgcgggtgatctgccggacccggtcccctggcgacggggtccgagggctcgatgcctccctccgatgggattccgttacaagatcgttcccgctggtctcagaaatgtcctag

SEQ ID NO: 35252 - DNA, 1209 bp, Zea mays
  Peptide Sequence Number=SeqID_77031
ccgccgcgcttcgcggtcgtagtggggcggacaccgacacggagcgcacactcctcacggcttgaggcacgactgctgtccatggttgggcagttcgacccgcggctccagcgcacgccgctgcaccacggcacgttcccagctgtggaggccagcactcaacggcctggtggatgccatccagagcctgctggtggacgagctcctggcacgccgctggcctacgacgtctctggcagtgcagtgcttgagatgatgcggaagctgcctcgtgcagaggaggaagacgctggggagacgagaagctatgttttcgcaaatgagtgtctggaccggctgtcaattgctgttggtgagggctctgctaaggtgatgattaagaaaacggagcaggttgttgggatggtgctgaattctttccaggaccctcacccacgggtgaggaaagtgatgtctagaatccacgtgtacactgtacaggcaatatcacgattaacgaagcctgaacggcatcagcctagctctggttgtggcatgatccagtccctagttgtcaaatccaccgacgacagcacacgcagcttggcgttcaggtggctgcagctcgctagcagcctgggactcaactctggtgacttcgtcggcctgcttctggcgcagacaagtcctctatatatgaaaatgttaaatgctctccagctcaacgtcgtcactacgctgctcaacctctccatcctggaggccaacaagaagcgcatcatgcacacggagagcgccgcagacgcgctctgccatgtcatgggctcgagcgccacgtggcacgccaaggagaacgccgtggccaccgccctcagcttggcagccgtccacgccgaggtggaggtcgccacggctgtgctggcgaagtgcggcaacgcagagccaatcgtcaggctgggcggcgacgtggcacagctaataccgaggagccactgcggcatcgcaggtgaggtgatggcagcccatggcagggaatgggccatctggaagctgctgggcaccaacatggaccgcgcgccgcaaggccgcatcgctcagcagggcatggggccggtgggtggcagccacagcatcggagaagtcgccgggtttgaggtggcagtggcagaggagctcaaaggggcacatgactcacgagggagcgcaccgtcccgtgttttggcccgatag

SEQ ID NO: 35253 - DNA, 690 bp, Zea mays
  Peptide Sequence Number=SeqID_77032
atggagaacacgaagctctcgtcggcgctattcgccgggacccacttcgaccgcaagcgcttcgccgccgacttcgcccggtttcgtaaaggcccggctctcccatccgccgccaccccctccgcaccgtccccggagaagaagcggaagcgcaagagcggcaaggcaaaggcgaagaagaataagaagagagcccaggatgcggcggccgccgcctcgtcgggtatggttcgctaccggttggttggcttgctgcttgattttgtggaggggttcagcgtgttcaagggattggctgataataatgcggagctgcgttctgagaaggtggatatgaggaaagatgatgattcggtggctgtgaggagacggaaagagattgagagggaattcgagctcctctgccactgccacctcaaacccggcgacttctccgatgctgtggctgccacccaccggccccatgccctgctgagcgatgcggccttgcggcgcgcggtccatgttggtgcccagcagcttccagatggcccattccctgccatgggctgccatcacctcacctgcgatgccgcagtggctcctgcacgccggcacaggagcaccagtgcggccgccgagccctcccgcgaccactatgtgccgtgccacacctcggtattagctgtgccacgtcgccgcccagcctga

SEQ ID NO: 35254 - DNA, 207 bp, Zea mays
  Peptide Sequence Number=SeqID_77033
atggcccgcgcccgcgactataaagcacccagggacttcgaccgtacccctccgcacgcgctcgacctcaccggagcccaaaaccaccggcgtttgcccgtgcacggcgtgcccgcgaccgcccgatcccctgccaccgtagaccggccaaccgagcccttcccaaccctgtccaaccctcggagaagactgtgcacacctcggtga

SEQ ID NO: 35255 - DNA, 354 bp, Zea mays
  Peptide Sequence Number=SeqID_77034
atggcccgcgcccgcgcctataaagcacccagggacttcgaccgtacccctccgcacacgctcgacctcaccggagcccaaagccaccggcgtttgcccgtgcacggcgtgcccgcggccgcccgatcccccgccaccgtagaccggccaaccgagcccttcccagccacgcccgacccttggaagagactgtgtagagtttgccatttatttcacattgtgcataaagttaaagaaaataggaaaggttctctggaggacatggttgctggagtgacttggccgtccatcttgccaccgggttggactgtcgagtgggaccccgcctcggctgaggaggagcatgaggagtga

SEQ ID NO: 35256 - DNA, 342 bp, Zea mays
  Peptide Sequence Number=SeqID_77035
atgccgcgcgacgtcccgcgactgccgcgcgacgtgctggtttctcgcggggttgttgcggtccccggaaaaccaattccgccgcccacgtccgggcctacacggcgggaggttgacggagatactagagccgctgccggagccgagggagacgtccacggcaccagcccgagaagaggaacaccgcgcagcaggaagcccaagcaccaggccacggtggacagagaccagagaatcaacgagcagcaccaaggcacggcatcaacagcaccacaccaccaccaccgagaacaacagacagccgacgatacggacgagaccaggacacccggaatcgagtag

SEQ ID NO: 35257 - DNA, 426 bp, Zea mays
  Peptide Sequence Number=SeqID_77036
atgccgcgcgacgtcccgcgactgccgcgcgacgtgctgttcacggtgaacccacctcgccatgctgaccagccacgctgccaccaccaaccaccgcacgtagattatctacgtgggaagaccagctcagcgaacacaaggttctgtcccagaaaaccaattccgccgcccacgtccgggcctacacggcgggaggttgacggagatactagagccgctgccggagccgagggagacgtccacggcaccagcccgagaagaggaacaccgcgcagcaggaagcccaagcaccaggccacggtggacagagaccagagaatcaacgagcagcaccaaggcacggcatcaacagcaccacaccaccaccaccgagaacaacagacagccgacgatacggacgagaccaggacacccggaatcgagtag

SEQ ID NO: 35258 - DNA, 894 bp, Zea mays
  Peptide Sequence Number=SeqID_77037
atggctagctacagccatcagcgcggccggctcgtgcctggcctgaagcccctgttcggatgtctggaaagcacaggcatgttcgaggcagcgggccgggaggtggccgcgttccttcgcgtcaagtcgaattggagcaaagctcgaaatggcccgggacagcctgcgggccgtcgagacgacggtcaggatgcaggtcacggcggaggaggacaagctgaacgtctgtggtcctcaggtgcaggtgtggctcaagcgcgtccacgagctttgcctggacaccatcgacgaggattacgtcgccgcgcctcgatctgcaagcctgttgtggacgagctggaggaggtgaacagactgaccgaggaagggaggcggtttaggacatttgggttcaagccaccgccgagggccgtcagtcggttaccccaaaccgagaccgttgggttggagcccatgttgactcgactccatgatttgcttgagaagggtgaatcaagcataatcgatgtgtggggtcaagaaggcatcggcaagacgactctcctacacacaccttcaacaatgatctcgaaaagaaatatcacaattatcagctcagcgaacacaaggttctgtcccagaaaaccaattccgccgcccacgtccgggcctgcacggcgggaggttgacggagatactagagccgctgccggagccgagggagacgtccacggcaccagcccgagaagaggaacaccgcgcagcaggaagcccaagcaccaggccacggtggacagagaccagagaatcaacgagcagcaccaaggcacggcatcaacaacaccacaccaccaccaccgagaacaacagacagccgacgataaggacgagaccaggacacccggaatcgagtag

SEQ ID NO: 35259 - DNA, 372 bp, Zea mays
  Peptide Sequence Number=SeqID_77038
atggcctggtggatctgttgttggtttgcttgtagcataagaaacactcttacgaagctcttaccaaatctaacgtggcacattgtcaatggtgtgtctgacaacattctcaaccacatcatcctagagaacaatgagaacaagcctgtcacaaacagtcgtgacactcaggagatatgccttgaacaaggccttcatatcctcaagatattcgaggattatcatgtcagcaaaacatccatcctgaacgaccttgcctcagcaatgggaaacactccaaacccatacgagcaagccatgtccacttgtgtgaatgaccaagcgatgatgctatcgcatatggtgtggcatgagtctacaatttcactgtag

SEQ ID NO: 35260 - DNA, 771 bp, Zea mays
  Peptide Sequence Number=SeqID_77039
atggaggatgggattggccccgtcaaccggttcccctgcaacgccaacttcgtgaggttcttcatgttcccaatccctgttgggatggtgccgttgaggaggttttatgttgcctctgtatatgctccaatttccttcccttcacttcctctaatagttttgaagaacagagatggcgagcaatctgccattgcagctgtaggttcgctaaaaagtatggatccaaatcggatcattctgaagaaaattgttctgaccatgtatccacagagtctcgaatctgaaatcgatcgtgttgtatatgttccacgatcccaacgacgtaaaatggttcaaggcaagtatttatgcgtgccattgacatatccaatttatccattttcgacgcaacgacaatgttatttttgcagcctattgagcggtggacaaaacatggtcgtcgtggccgcatcatggagaccgttggtactcatgtggcacattgtcaatggtgtgtctgacaacattctcaaccacatcatcctagagaacaatgagaacaagcctgtcacaaacagtcgtgacactcaggagatatgccttgaacaaggccttcatatcctcaagatattcgaggattatcatgtcagcaaaacatccatcctgaacgaccttgcctcagcaatgggaaacactccaaacccatacgagcaagccatgtccacttgtgtgaatgaccaagcgatgatgctatcgcatatggtgtggcatgagtctacaatttcactgtag

SEQ ID NO: 35261 - DNA, 325 bp, Zea mays
  Peptide Sequence Number=SeqID_77040
gtacctcgtccctgcaaatcttacagtcgggcaattcgtgtatgttgttaggaagagaatcaagctcagtgctgagaaggctatcttcatatttgtgaaaaacacccttccaccaacagctgctctgatgtcttcaatctatgaagagaacaaggacgaggatgggttcctctacatgacttacagtgggattgccgatggtatagggaatgaaggccgtgtccctaggtccctccctacacatttgaaacccacttctcatcggtctgggctggacagccgtgtccctatggcatctgctgatgggaagtttgaacctcaatga

SEQ ID NO: 35262 - DNA, 1437 bp, Zea mays
  Peptide Sequence Number=SeqID_77041
atggagagactgctcattttgtggcaagaggaatcgattctgcaaattcttgtgatgccacagtattcttatgaaactctactgtttcagcgcctccattgtggatgtgttgcttcaaagaactcctatgatctacttgacagtggaggaattcaatgtgtcacttgtatgaaaaattcagcagctcagtctgcttctggccaagtggttccaaagctttttccatgtccaaacaatctgctgttttttggtaaaagcgatgagttattgtcaagtagaaaatttgaacaaccaccctctcttatgttggattccagaaatgatgacattgctattgtaaataagagtaatcacctgttcatgggtgtttttcacaaatatgaagatagccttctcagcactgagcttgattctcttcctaacaacacacacgaattgtccaactgtaagatctgcagggacgagatgaatgcagcagggttcaatgctatgcattatgttcattttcctggctcaaaggcaggagatgcacctttaggtgcattttgggcgacacagcatgcacaagatgctcaagctgtagttaataggaaccctttgtttgatggggagtcaattaaggcatcactgtcatcaaagcagaaccaaagctgggtggacaccagcatcagtattcctggcaacaggcatgatcattctggtcaggtgtcactgacaaaggtctctctgacacggagatacaaaattctgggaaaagcagagcacaacaacctcaacccgagccaaaatgcatccgaacttgaacttgaagtgtccaatttgaaggagcagttgaagaaaaccacattagaaaaggctgagatgacatgccctactgatatagaaaatcatattagacatgattgtattattctaacagtatacgttcatttagttgagtctgcatgtcaacagctttctaagaatatgagcctgaagctggataagcttttgagtagctccactaacaacttttgggcatctggtttggtatttgtgatggttctgcgccacttagcgtttatgatcaatgcaacaataaattttagagtagaaggttttaacctactcagtacttcctcaagggtaatttgttcatttgaagggcgttgtatattacaggaagacatggattctgtagcagagaatgctgagtataaggatagggacatcgaatcccttagtttgtgttgttatgttcctggtccaagaggtgtagatgacgagatggaggaggtggacgagcatgaagggcaacatggcatcattagtaggaagcatcttaaagagatgtctattatgctacacgttaaagaagctgaatctcctattatgctatctgttaaatttaaagagagagctctgtatctacatagattgatggagtacacaaattaa

SEQ ID NO: 35263 - DNA, 669 bp, Zea mays
  Peptide Sequence Number=SeqID_77042
atgcgcctaggggtcccttttatagccccaaggcagctaggagccgttgagagcaatccgggaaagcaattcttgccttctgtcgcctggcgcaccggacactgtccggttatattcctgctgacgaaaggtggagtaaaacaggatgacatcggaaaggttatcgccttggatccacagctcttgggctgtagtatcgcacataagctagaagttagtgtcaagtacttccggtcgctgggcatctaccactttgtgctgggtcagatgattgccgacttcccaacgcttctcaggtacaatgtggatatcctgagaccaaaataccagtacttgaggcgtgtaatggtgcggccgctgaaagatctcattgagtttccacggttcttcagttactccctggaggacaggatagaacctcggcaccgaactttggtggcgaacaggatcaacatgaagctgcgttacatgctgactggttctgatgaagagtttgcgcagagggtgcgagaggctgttgagaggagagcgagatttgaagctggaaaggctgctggtctggagacattctcatgttcttcagagacatctagtgatgcagaagctacagaagcagcagcatgccaaaacagcacggatgtggtcggggttctgcaaaaacaagcatag

SEQ ID NO: 35264 - DNA, 648 bp, Zea mays
  Peptide Sequence Number=SeqID_77043
atgcacagtgtttactttcaaattttaaagaactattacttactctgtaagctactcccatctgtctcacatgtgtgtaaatcgcaggttatattcctgctgacgaaaggtggagtaaaacaggatgacatcggaaaggttatcgccttggatccacagctcttgggctgtagtatcgcacataagctagaagttagtgtcaagtacttccggtcgctgggcatctaccactttgtgctgggtcagatgattgccgacttcccaacgcttctcaggtacaatgtggatatcctgagaccaaaataccagtacttgaggcgtgtaatggtgcggccgctgaaagatctcattgagtttccacggttcttcagttactccctggaggacaggatagaacctcggcaccgaactttggtggcgaacaggatcaacatgaagctgcgttacatgctgactggttctgatgaagagtttgcgcagagggtgcgagaggctgttgagaggagagcgagatttgaagctggaaaggctgctggtctggagacattctcatgttcttcagagacatctagtgatgcagaagctacagaagcagcagcatgccaaaacagcacggatgtggtcggggttctgcaaaaacaagcatag

SEQ ID NO: 35265 - DNA, 249 bp, Zea mays
  Peptide Sequence Number=SeqID_77044
atggggtcgtattcttggctaaggtacttcacccagggggccaccaccatcgtctttagaaaccttagcgggttgcttcgtattaagagggtgatgctggagactttgatggagattttatcgacgacgatgatttctaagtctaacgatgcgtcggtcatcttcctgtgggagattgcccctgttatttatattccgctttactttgatgtgatacttgttaaagatacaatgattcagatgatgtaa

SEQ ID NO: 35266 - DNA, 189 bp, Zea mays
  Peptide Sequence Number=SeqID_77045
atggggacatattcttgtctaaggtacctcacccagggggccaccaccatcgtctttagaaaccttagcgggttgcttcgtattaagagggtgatgctggaaactttgatggagattttgacgacgaggaattctaagtctaacgatgcgccggtcatcttcctatgggagattgcccctgttatttaa

SEQ ID NO: 35267 - DNA, 168 bp, Zea mays
  Peptide Sequence Number=SeqID_77046
atgggcaagacgggaagcggtggtgttggcagcccacgttatcatggggacgtattcttggctaagagggtgatgctggagactttgatggagattttaacgacgacgaattctaagtctaacggtgcgtcggtcatcttcctgtgggagattgcccctgttatttaa

SEQ ID NO: 35268 - DNA, 324 bp, Zea mays
  Peptide Sequence Number=SeqID_77047
atgacaaccgtccccatcgattccccgttcgcgtccaggcctcaccgccttggcatacaatgctccactgaccccggctgccgccgtgcagtgaccgcacttgtacccaccatagctagcatgggagacccagtctcaggtcgcatgagggataaagtccgcgcctggcttcactcagaatttacaactttggaggtgtatgatctacttgagttaaacaaggttaactttacttatgtaagacccttgggtggtatacttggtaaattgggtcaaactttatctaagtggggctctggtggttgttctttgttacttaagtaa

SEQ ID NO: 35269 - DNA, 594 bp, Zea mays
  Peptide Sequence Number=SeqID_77048
atgtatgatctacttgagttaaacaaggttaactttacttatgtaagacccttgggtggtatacttggtaaattgggtcaaactttatctaagtggcttggtactggtgtatgtttctctgtctcaaaaattggggatcagaaatggggctcttgtggttttttcttcgcggatcagtccctaggccactattcacatgggtcactgacgttacagaaaacccctcgggttcttcaaatcctaacccgaggtccttctcctaacgtaaacagtaaccgcggcagaagaaagggcgaaggggcttaccggcggcgagatggctccggtgaagtggtcgaggacgtagaggaggtctcggggatcacaacggtgtgcgggtcgccgtcggggatggccggagttggtcggtccacgtgcgcaggcggagatgctcgtcggcggcgaggagtccggcctgctcacggcgagatggttcaattggacgggtcagagaggttcacgggatgccagagaagatatgggtgcaaggaattgggcggagactcaccggttagctctgtccacgcgcggcggcgaaagaccgaagtccggtga

SEQ ID NO: 35270 - DNA, 414 bp, Zea mays
  Peptide Sequence Number=SeqID_77049
atgggtaaaagtaagaagggtagcggttcttctcctcgctctggcgacaaacgcaaacgtgagccgactcctccttcggaggacttcggcgactcggagtactcggaggaggagttctcctccgagtccgagggatccccggctcctgtctctcccccggcgtcgtctgacgatttagacgactcccaggggattgccgcagaggtctggacctacatccgggccgtcgagcgctccgggctcgaaggctcggatgagtcggagtactcctcggactcgtccgaggaggacagcggcggcgacggtggtgatggcggcgacgacgggggcgacggtgacggcggcggcggcgacaacagcaaggacaacgacggcggcagcaagggcgacccatggcgacggcagcaagggtag

SEQ ID NO: 35271 - DNA, 444 bp, Zea mays
  Peptide Sequence Number=SeqID_77050
atgggtaaaagtaagaagggtagcggttcttctcctcgctctggcgacaaacgcaaacgtgagccgactcctccttcggaggacttcggcgactcggagtactcggaggaggagttctcctccgagtccgagggatccccggctcctgtctctcccccggcgtcgtctgacgatttagacgactcccaggggattgccgcagaggtctggacctacatccgggccgtcgagcgctccgggctcgaaggctcggatgagtcggagtactcctcggactcgtccgaggaggacagcggcggcgacggtggtgatggcggcgacgacgggggcgacggtgacggcggcggcggcgacaacagcaaggacaacgacggcggcagcaagggcgaccatggcgacggcagcaagggtagcagcaaggacagcaacaagtccagtggctag

SEQ ID NO: 35272 - DNA, 240 bp, Zea mays
  Peptide Sequence Number=SeqID_77051
atggcgtcggctggctttggcgcgacgcggggcacgcgaggttccggcgcgggcgtgctctggcgcgcgcagaacgcgtcgaacacgtggaggtgttcatctgcccatgttcaaaagcttgctaagatcgcaaatgtgcgaatcttggcaaaaatccggcgcagacctcttcctgacacctatggctatctcttatatattaataagttacttaactttgtgtcaaaggtttggtcatga

SEQ ID NO: 35273 - DNA, 240 bp, Zea mays
  Peptide Sequence Number=SeqID_77052
atggcgtcggctggcctttggcgcgacgcggggcacgcgaggtcgggcgcgggcgtgctctggcgcgcgcagaacgcgtcgaacacgtggaggtgttcatctgcccatgttcaaaagcttgctaagatcgcaaatgtgcgaatcttggcaaaaatccggcgcagacctcttcctgacacctatggctatctcttatatattaataagttacttaactttgtgtcaaaggtttggtcatga

SEQ ID NO: 35274 - DNA, 2217 bp, Zea mays
  Peptide Sequence Number=SeqID_77053
atgccgtcctcttcttcttccgccgacaccacgccgccggcggccgcctcgtctgaggagtcgttgagtagcttgatggtggaggagttgcgcgccggcgactctgttgattttggtgtgtcacggatgacgtcagcccgcgttgaagatatgcagcggttgggctactttggcggcggagttgctcgtgctccggggacggaggaagtccccgagccggaggtggcagaagaggatgcagacgaaggggcccttcggtgcgtcgccggtcagagcagtgggcgtgatttagttgaagagttcgtggcgtacggggtctggcccttggcgcacggctgggcgttgggtgaagtgtgccctcgccagatgccttttcacggaggaagggtggtgcgaagtcctaccttcgcactgaatttgcgaaaccgtgacccggccgcctttgtgcgtgatgcggaggacttggcggtgcggctcgtgggacgttacgtgccgaggacggaaggccagcgcagctttgatatccgcgggtcaaatgaccgtttgaacagggtcttcgaattaaatcaattgccgtacgacggctatcccggtcaagacgaagcggaccgtcgtgtgatggacaaggatcgccaaggtgcggcgcgaaaacgccaggcgaccgtcaggctgcatgaagctaggccgaagaggcagcgaggggctgcgaaggctgcggcctccggtggaggcaagccgccgctggcggcgaaggcgggcgcctctgcacctagcaaggcgccggaggcaacggcgggcgctggaggctccaagtcaacgaaggtggtgccgccggccagcggagtggcggaggcctcgaaggcggcccgagcgttgccgttgtctggcaagcgcgttgccgacttcggcaccgatattactgtagacgactatcttggtgggtcggacgaggggcagcttgctatggttgcgcctggcgcggagaccgcgacggcggccatagtgccgagggcgaggggcgaggcccttggcaccggaggcgaggtgtcggccctcgcggtggttagggacgaggcgagcgcagcgacccgccggctgaagggagtgacggaggcgctgagtcaggcgacggaggcgctgagtcaggttgctgacttcgctagccgtactgcgtcgggggccctcacggcagctgtgtctgccgaagtcgagagacttcggacacaacatgctgacgctgtccgtgagaaatcggcctccgacagcaagtgccgtaagctgtcggacagggtggccgccctggagaaggaaaaagctgacctccggcgccaactggcggcggagaggagggaggcgaacgaggccatcgccaaggagcaggctgcgcaggcggaggccaaactggcgcgggcggagggcaatcttgccaaggagctcgccgaacatctgcaagagcggcttgccgccctggagagccgcgcgaagggggccgagaccgcgatgcgtgcggaggctgaacggacgcgcgctcagcttaaggatacatatcgcgagctgggcgcgcggaccggcgacttcgaggtgccggaccgagagcccgggcttcgttgtctgcaatgggtgcgggaggagctgcaggaactccccgctgttgtggggggctttatgtcgtacgcctccctggtcacctgcgagggggcgatgaacgcactctcccgcgaagggtgccggcacttcgaggtcttcgaccaggcagataaagactttgagcgagatgtctatacggtcgaagaccccgttgtgaaggaatccgccggggccctctatgaccgaatgtggggtccgcacggccgtgaggtggtcagggagtgggccgagatcgcgagggctcaggcggagcgcggcgagcgggtggacgacttcggggctctgaacagcgcgctgccagacccggagccgacccctgcggaggctgcgaccggggccgccctggagccaaccccggagaccgcagcgattgcgacggctgcccccacatctgctgcggccggcgaagacctgcccccaaaggtggccgaaggcgcccctgatgcccccgcagcagctgcgccgagcattgaagatcccgcagtggaggcgatggaaacaacggcggaagtggcggcggagccaacggcggaggctcccgcagcgtcagggccttcgcaggtggcgtag

SEQ ID NO: 35275 - DNA, 294 bp, Zea mays
  Peptide Sequence Number=SeqID_77054
atggacggccaagtcactccagcaaccatgtcctccagggaacctgtaaaaaattatgccacaagcaaggctgagtatactaatactcagctagacttacccggttacaatggatcaagcagtctcattagctgcgagaagcagacgattcgaatcgagtttttatccttgcaagtgaccgcacttttacccaccataaccggaatgagagaccacgtctcaggtcgcatgaggagggcaatctgcgggcaggatttagcagacattattctaaaggaagaaaaactaagttag

SEQ ID NO: 35276 - DNA, 432 bp, Zea mays
  Peptide Sequence Number=SeqID_77055
atggggaagcctgtcccatcactcctcatgctcctcctcagccgaggagggatcccactcgactgtccaacccggtggcaagatggacggccaagtcactccagcaaccatgtcctccagagaacctgtaaaaattatgccgcaagcaaggctgagtatactaatactcagctagacttacccggttacaatggatcaagcagtctcattagctgcgagaagcagacgattcgaatcgagttttatccttgcaagatcagggctcaccgccttggcgtacaatgcctcactgaccccgactgccgtcgtgcagtgaccgcacttgtacccaccataaccggaatgggagaccacgtctcaagtcgcgtgaggggcaaagtctgcgggcaggttcactcaggtattaggcttaccgatttaccatgtttctcg

SEQ ID NO: 35277 - DNA, 504 bp, Zea mays
  Peptide Sequence Number=SeqID_77056
atggaagactctctggccattaggacatcctactgctcagaggtggaagggttcccacatctgttgcgaagctgtgcgctccgcatgggaatccacaagaagccggaatacgtctggaaggagtatctcgagagcggaatggacaaatgctctatggcaatacttgctagaatgttgcccgaacagccctccgacaactatgccagaactacaacaagcaacaagaatacccccacctggaggaaaagacttcaggccctgtcagtaggagatcctattgaggatgatcccaccatcgtctacatggctggataccttcacacccttgataaccaatatgatgacctcaccctccactgcacccacctaacctcccgggtggaaagcctggagcaaaaagtcagggaacttttaagggaaaaggcgtcccttcaagagagcctcgcaatagcagaaggcgaggaaaccaatacccgtgaggcctaccgcaccctaaagatatga

SEQ ID NO: 35278 - DNA, 741 bp, Zea mays
  Peptide Sequence Number=SeqID_77057
atggaagactctctggccattaggacatcctactgctcagaggtggaagggttcccacatctgttgcgaagctgtgcgctccgcatgggaatccacaagaagccggaatacgtctggaaggagtatctcgagagcggaatggacaaatgctctatggcaatacttgctagaatgttgcccgaacagccctccgacaactatgccagaactacaacaagcaacaagaatacccccacctggaggaaaagacttcaggccctgtcagtaggagatcctattgaggatgatcccaccatcgtctacatggctggataccttcacacccttgataaccaatatgatgacctcaccctccactgcacccacctaacctcccgggtggaaagcctggagcaaaaagtcagggaactttcaagggaaaaggcgtccctccaagagagcctcgcaatagctgaaggcgaggaaaccaatacccgtgaggcctaccgcaccctaaagatggactatgacaagaaactgaagaagctcgcccctgcaagaaaaatccgcaagaagaccaaaagccaaggatgccagattgagcagaaggaagaagcccctccaaccctacgccctgccgggttaagaaactcgtccgacaccgaggagatgtccctggccagccttgatgaccttctcaaggaatttggggacactttagagaatgagttggggagtaccctagatagcactcgcgtgtaa

SEQ ID NO: 35279 - DNA, 414 bp, Zea mays
  Peptide Sequence Number=SeqID_77058
atgacctccgccgcctgcgctcgtaaccagagcagctctagccaccttcggcgccgacccgcacaccgacgtgaccgccgtgacctccccgacgtcaccgaccaccccaccggagctctactgccgccgattgcaacctcgctgacggagagtacattctcgtgccggagcaaggagttgctcaggagcagattgccctcctcacgcgacctgagacgtggtctcccttccggttatggtgggtacaagtgcggtcactgcacgacggcagccggggtcagtgaggcattgtacgccaaggcgataggttctctggaggacatggttgctggagtgacttcgccgtccatcttgccaccaggttggacagtcgagtgggatcctacctcggctgaggaggagcatgaggagtga

SEQ ID NO: 35280 - DNA, 438 bp, Zea mays
  Peptide Sequence Number=SeqID_77059
atgacctccgccgcctgcgctcgtaaccagagcagctctagccaccttcggcgccgacccgcacaccgacgtgaccgccgtgacctccccgacgtcaccgaccaccccaccggagctctactgccgccgattgcaacctcgctgacggagagtacattctcgtgccggagcaaggagttgctcaggagtccatggggatacgtcgtctccgagacagaaattggaataaggattaaggtgtgtgtgacggaacctcccaagtcattaggcccacctacagttgtccttgtccaacagacctcagcctaccatgtaggtgcccctggatcacttgacaagttcggtatctgcttttcttaccttcctaagagcgttttacccgtcttgcagacattacaaatcatcggagatacagaaaagcggaagcatttacaataa

SEQ ID NO: 35281 - DNA, 468 bp, Zea mays
  Peptide Sequence Number=SeqID_77060
atgccggagttgatcaaccgaggcctcggaccgggctggcgcccttggaagatggttggccgaggccccgggggcaaccggccgagccgcctgctcgggccggattcccggagaagtccctggcagcggttgcccgggcgtggtgatgacgtcgtccttcggagcggagatcctcggaccgtgtcgccgtccgaggctaggtcgggcctcgccgaaggtgtcgtcgatgccgagggtgctacagcccccttccagcgtcaagacccgagcctgcagggtcaaatatctggactttttgtcggcaacatggatgtttgtgcgagcgagagttgcttctcgcggaaggtgatgagtgagaaggtgatgagtgaggtatccgtatcccggaggcgtaggagtccctcggctcggtcagccttggctgcttacgtgtactccgtcgtttccaggacccgcttttcaaagtag

SEQ ID NO: 35282 - DNA, 327 bp, Zea mays
  Peptide Sequence Number=SeqID_77061
atggggtgcgccgggggtgcatccaatgggtgtagctcccgaccttcaaatggattttttaaggataatccattcgaaggtcagcattatgtcatcaaaatttcgctgcagaggtcagcatatattttgtctttagcagccgagtttgcaatctgtccatatcttgccaggtatttactgcgtgctctgcacggatgtgaccgttttgaaaaatatactgatacttcctgggcgtcccccccaatgggtgtgggcaagggacggcttgatgggtgggagtgcttattgaatgctttgcgactgttcagtgaccgcggttggaagtga

SEQ ID NO: 35283 - DNA, 531 bp, Zea mays
  Peptide Sequence Number=SeqID_77062
atggcggactgctactgcgtgggcgacgtactgctcctgcatgggtgggagtgcttattgaatgctttgcgactgttcagtgaccgcgattggaaggcacccaagcgcaagcgcgagccgactcctccgtcggatgatttcggtgactcggaatactcggaggaggagttctcctccgagtccgaggggtctccggctcccgtctctcccccggcgtcgtctgatgattcagacgactcccaggggattgccgcggaggtctggacgtacatccgggccgtcgagcgctctgggctcgagggctcggatgagtcggagttctcctcggaagaggaggactcggacggcgacgagggggaggatgacgacgacgacgacgacggcgacggcagtggcggtggcagcggcggcggcgaggtgagcaagagcggcaccaagggcggcagcagcgtgggcagcaccggaggcggcggcagcaaaggcggcaccaagggcggtggcggtggtagcagcagcaaggccagtggctaa

SEQ ID NO: 35284 - DNA, 282 bp, Zea mays
  Peptide Sequence Number=SeqID_77063
atgtctacggcccgggggcttgatccctttttaaaggcggctctccccactcgcattccaagcgtcacgggcaaagtctccaccgacgagctccagggttcgattcccaccctccgacgtgggggctgggtcccacatgtcatgcgagcggaccggaaacagaagaagccaaaccgctgcacgcgaagcagggaccgggaaaggggatattttgaaaaagaaccttctcagcgaaggaaacgagccccgagccctcctactgatcaggggttcgaaagctag

SEQ ID NO: 35285 - DNA, 1326 bp, Zea mays
  Peptide Sequence Number=SeqID_77064
atggcggaggtgaaacgacgcccgcttcgcctgccaaagggctgcctcgagtcgcggcactggttccgcagtcaagaagacacgacattggcgcaagtggcgactttgcccgtgacgcttggaatgcgagtggggagagccgcctttaaaaagggatcgatcctccgggcagtagacatgcctctgcactcccctcatgcattgcgcccttccaccttccgagcccccgaatggggagcacctgtgtcgccttcttcttgctgctgctggaggagcgcgaccccgcgggggttggcgctcttcagacatcgctcggcttcaaggattttcatcacgcagcccggctgcagtccctcaccaatggtcatccgtagggatgatcaccagccttgtggtggggagaagcaagtcgggctgcggcctctgccccgccctcagcttcaaggatgttcatcatctaggctggggaggggggcgcaccgagatggggcctgcctccgtgcgggtagcggcccgctccttccctcagtgatcgggggagaagggtgttcgccgcctatggcgctggcagcgttgcggaggaggcgtcctccagctacgcgggggaaggcgaactgctgctgccaggacagggtgcagttgtccgtcttccgcccgggcgacggtcgccggctgcaccggggggttgcacaacacgtcgtacgccgcgagggcggtactcgtgttctgggacggtcccgttctcgctcttgtggcgagggcgggagtgaggacctgccggtgcgctttagggcggccgccgctcgctggtgtggtgttggtgggcaggtggccgtcatcgtcggcgctaaggtggtggtcgccataggtgaggttgcctctgccgaagcggttgcttccgccgatgagaccgtcagtgccacctgcgctccggacctctggctctttggctttaatggctggttctcgtcccctgtgaggggacgtgaacgagggcccttcagcagcagcgtttgccctgggaccatcgctgcagctgtcttgccgcccgagacggaggtcgttgccgcgttgttggtgcagcggtcgccggcgagccacctggagtttgttgtcccgcaggccctctggtgtggaggttgttcatacccgcgggagtggaaccggagtcccaaccttcggctgctctgcgatgagctgaagccggaggcagcggtgtcggcgtggacagaggcggagtcggctcgaaaagaggcttcgtcggcccgggagcacgtggcttccctggccgaggaggtgcagcagcggcggctggagcttggctag

SEQ ID NO: 35286 - DNA, 324 bp, Zea mays
  Peptide Sequence Number=SeqID_77065
atggttgtcgccaacattgacgactctcgggttgttctggacaccgcatccgacgacgacgccatcacgtcgtctagctcatcgtctacccgaagcccaacctaccacgggcactacctcgctgatgagcccggggtacacttcgtttggcagcccaaccaagagtcatcggtactcgtcatgtcgcgcgcgttcgacgactactatatcgaggattgtggcgtcatcttagcgtcggaggtgacacagaggaggatagacaaccgtgaccagttcatcatcctcgccaccgtcagggtagcttttgtgccgacctgcctttaa

SEQ ID NO: 35287 - DNA, 375 bp, Zea mays
  Peptide Sequence Number=SeqID_77066
atggcgtcgtcgtcggatgcgatgcccagaacaacccgagagtcgccgacgttggcgacggccatgaggtccccctgcttgatgatcgacagcgcgatgcagccgctctggaccgtatccaagggggcggctgtgccagagcttgtcgtgcacagcggcgcatgcggtcacgtaggactactttcagaggtcgaactggtagtcgtcatgcttcttctcatcgtcgatgaacgacaccaacgtgagcgcctcctgctggtggtgtttgttcgaggtttccaagtagacgtgggttgtacgggaaaatgggaatttgaatgggctttgagtggaaggggaatagaaaagacgaaaatgagaatagcagaacaatga

SEQ ID NO: 35288 - DNA, 681 bp, Zea mays
  Peptide Sequence Number=SeqID_77067
atggatgcctgcgcacgcgtgtgtgctcctgaactgaacctggacacgtccgctttctccctgcttgaccgtgccctggtcatagaacataagccctacgatcgtagagcagatgtttttagctttgctattgttctatgggaactgctaacccacaaggaaccgattgaagaaagaacatccaccatttgcatcatcaagtatcatttaaggcatcattattgggcactcttatatgaccatgtcataagatcaccttacaacattaaaaatattgagaaaaaaaaatacagtttgtattcagtgctgatgggattgattttatcattaaatatatttcagaaccactttggggccaacattgtcgtaacaagagggcccctatcgtgtcatgatggaagctatcctccatattatgctgctaatataacatctacatatttttttactaaacacaaaggcatagcaagtcagatcgagattgagaatccaagcctggtgaaaactaagaatgtaaaggtcaaggacattgataaaggttggccattttttagactgcttattgctcttctcaagttcatggaaccatatcccagaggcgccttaagaatcggtcatcgcataagaatcggtcagctacagttacaagaagatatactccaatactccagcgagttctag

SEQ ID NO: 35289 - DNA, 582 bp, Zea mays
  Peptide Sequence Number=SeqID_77068
atgctcctctcctcctccggaggcgccggcgccggcgccgcctcttgcacgagcgacggcgggagggagctcgtggcggcgctcttggagagccccgggatccgccacgcggtcgaccggctgaaggtcgcgccggagaggcggatctcgacaggctcagtgatgatttgtgctgtgaaggaaccgattgaagaaagaacagccaccatttgcatcatcaagtatcatttaaggcgtcattattgggcactcttatatgatcatgtcataagatcaccttacaacactaaaaatattgagaaaaaagggcccctatcgtgtcgtgatggaagctatcctccatattatgctgctaatataacatctagatattttttttactgtaagaaccctcagtgtaggctccaagcgaaacacaaaggcatagcaagtcagatcgagattgagaatccaagcctggtgaaaactaagaatgtaaaggtcaaggacattgatgttcatggaaccatatcccagaggcgaacttcggttggtggagcacagttgggggaggtttcccaaaatggtggatctggcccatag

SEQ ID NO: 35290 - DNA, 822 bp, Zea mays
  Peptide Sequence Number=SeqID_77069
atggtcgatgctaaggagcgtaagaggaaaagggatagggaaagatatgcagcgatgtccattgaacaaaaaaacgagaagaataggaagcgtcgtgaagcacgtcaacgaaacaaggaacacaatgtgatgcccaatgtgtcaggaggtgaccaaaatgaacagcttaggttgtataatcagacaccaaggcggaaagagggaaagttagagtacataagaaaacgtagagcactgcaagctagcactttgaatcaggggtccattgccatggaggtcccaacatatacctctgaggttgtacaccctacagcatatgtatcggaacctgattcatcctctgataactcatgcgactgggttatccctgaatacaccagtacacctttcatgccagcttcaacacaaactgaggatgtcggttcacccgatatgtctactgagccactaagacgtaaacatcatgttctgcgtggtgaaagacaagctatcttagcccgtcaaaacaagaaatttgaagcaaacattgcacgtaacgtggctactttgactgaagatactatcagtgacgtcggacaaatggatgattcgacacaacccggttcaactatagagatcaacaacactgttgatgacgatgatgagggtgtcatattcggagaggataatgatgagaacgagggatatatattcgctgatgaggacactaacgaggacttcgagatagatggtactcaagatcaatctgttgtcactgatgtgcctgacccgtacgacaaggtctacagtaacatccctgaagaaacacatatgttgaagcac

SEQ ID NO: 35291 - DNA, 489 bp, Zea mays
  Peptide Sequence Number=SeqID_77070
atggagccagccgtattgaaccgtgaaagagttgcattggacaagaaaaacaggatgcctatgttgttcgacgactatagcgatgaagatttttatggggtacaacggaagtatagtattgtcgcacgagttgaagttaaattcccgattgaaccacgttatcgtgacaggcaacattacattttgtctgacatcaatagtgtctcgaatcaactgaccatacaacaatacacttcaaaccgttccatcacaacacccattattttgaacatcagatgggacataatgccggtcgcaaaccattcacagacatctctagcaatatcattagaggtgatcaaaatgaattgctcggaccgatggtcgatgctaaggagcgtaagaggaaaagggatagggaaagatatgcagcgatgtccattgaacaaaaaaacgagaagaataggaagcgtcgtgaagcacgtcaatgaaacaagggacacaatgtga

SEQ ID NO: 35292 - DNA, 1395 bp, Zea mays
  Peptide Sequence Number=SeqID_77071
atggccgccgcgacagagaagacggctgaggacatccgccgcgagctccaggagctccagcgccagcaccgcgaggtacaccttcttctttgtccggcgcatctcgaagcctcgagtctccgggccgtctgccctgacccccttgtcgtcccctcgcagatcaccgagcgcctgcgcgacccctgtggccttcgccgcggcacccccggccctggtcctggacctgggcccccccgcccgctccgtggcttcgtgagacccgttgatggctctgaaaataatgaagatgacacaaaggatgccgatggggaggggcaagaggcgggttcaggtgccactgaaggcagtgacaggaggactttcaacattggcgggttcagaagggacgggagcctgtggatgcagaggagggtggactataattcgctgccagagccagctccaagggagcttcccatgaatgaggacccgagtttggctgagcaaaaggttcgtgaagaaagtgaaaggctgcgacaacaggaacgtgagcaaattgcagagaagcgtaagtgtgatatgatgctccacgctcgtgtagctgctaaggcagaagaaaagagtatggagctgttgtacattcactggactgagcatcataaaaaggctgtccaatttcttaagacgtttattgccagcagttgtttaagtgagtatgcagtatatatatcgtacatgaatgctggatgtatggttatcagtggtgactcatacaccgtttatgcccattctaaaattatatgccatcaatttgcaatgttttgccctacagaggtggactacacaatcagcaaaaagaacatgacattccaaatatattgttgcccaaggactactgcagaattggaggcacatgtagctgatacatctcttgtgtctgctgatgcacctcgtgtgcttgctgatactgtactggatatatctggtggggagcgtgcttttattgaggcagatgaagcaaaggaactgcttagtccacttacgaaaccagggaattcatataaaagaatttgctttagcaacaggagctttggtattggtgctgctaatgttgctggtccaattcttgattcagttaagaatcagctcacagaggttgacatatcagattttgtggcaggaaggcctgaggatgaagcccttgatgtgatgcgcatattctccaaagcattagagggttctgtcctgagatatctgaacatctctgacaatgctttgggtgagaagggtgtcagggcattcagtgagctcctgaaatcacaggaatccctggaagaactatatgtgatgaatgatggcatatcagaggaagctgcgaaagctctatctgagcttattcctgcaactgaagcttaa

SEQ ID NO: 35293 - DNA, 1515 bp, Zea mays
  Peptide Sequence Number=SeqID_77072
atgatgttggaagttctgagaaaaggcccaaggactactgcagaattggaggcacctgtagctgatacatctcttgtgtctgctgatgcacctcgtgtgcttgctgatactgtactggatatatctggtggggagcgtgcttttattgaggcagatgaagcaaaggaactgcttagtccacttaccaaaccagggaattcatataaaagaatttgctttagcaacaggagctttggtattggtgctgctaatgttgctggtccaattcttgattcagttaagaaccagctcacagaggttgacatctcagattttgtggcaggaaggtctgaggatgaagcccttgatgtgatgcgcatattctccaaagcattagagggttctgtcctgagatatctgaacatctctgacaatgctttgggtgagaagggtgtcagggcattcagtgagctcctgaaatcacaggaatccctggaagaactatatgtgatgaatgatggcatatcagaggaagctgcgaaagctctatctgagcttattcctgcaactgagaagcttaaggttctccacttccacaacaacatgacgggagatgaagtcgaattaaataagcagttctcctgcacgctgccgctgacgaacaagacaaacaagcaggtcacgttcaagttcaagtaccacggtggaaccaatttcggacgcatttctggtggcccctacatcacaaccagctatgattacgatgcaccttcggacgagtatggtaacattaggcagcccaaatacgggcacctgaaagacctccacgacctgatcaggtccatggagaaaatccttgtccatgggaagtacaatgacacaagttatggcaagaatgccattgtgaccaagtacacgtatggtggttcttcagtttgcttcatcaacaaccagttcgtcgacagggatgtgaaggtgaccctcggcggcggaactcacctcgttccggcatggtccgtcagcatcttgcccgactgcaagactgttgcctacaacactgcaaagatcaagacgcagacatcggtgatggtgaagaaggccaactcggtggagaaggaactggaggccttgcgatggtcgtggatgcccgagaacctcaagcccttcatgacggaccaccgtgacagcttcagacagtcgcaactcttggagcagatcgcaacatccactgatcagagcgactacttgtggtacaggacaagccttgagcacaagggagagggaagttacacgctgtacgtgaacacaagtggccatgagatgtacgtttttgtaaacggaaggcttgttgggcaaaactactcggccgatggagcgttcgtcttccagctccagtctccggtgaagctccactccggaaagaactacgtttctctcctcagcggcacagtcggactcaagagcgcaaagacattggtcattgttgcggagtatcctgataagttcagagttgttgctttttctgctcgcttctag

SEQ ID NO: 35294 - DNA, 441 bp, Zea mays
  Peptide Sequence Number=SeqID_77073
atgggtggcaagagtaagaaaggtagcggttcttctcctcgctctggtgacaagcgcaaacgtgagccgactcctccttcggaggacttcggcgactcggagtactcggaggaggagttctcctccgagtccgagggatctccggctcccgtctctcccccggtgtcgtctgatgattcagacgactcccaggggattgtcgcggaggtctggacctacatccgggccatcgagcgctccgggctcgagggctcggatgagtcggagtactcctcgaacgaggaggactcctcggactcgtccgaggagggcagcagcggtgatggcggtgatgacgacgacgacagaggcgacggtggtggcggcggagacagcggcaggggcggtgacggcggcagcaatggcagcggcagcaagggcagcaacaaggccaatggctag

SEQ ID NO: 35295 - DNA, 792 bp, Zea mays
  Peptide Sequence Number=SeqID_77074
atggatcctaagggaaaggggatggtggtcaatgtcggtgttttgggtccgaccgcacacccggggttgcccctcaaggtgttatttaggagtaggacggtgttaccgactgtagctcaatggttcgtgccggatgcacgaggaacagtagacaatggtttacaggctcatgcttcggaggtcagcatttcgtattgtaggacttcgaacttcattgggtgcaccccaatgggtgcagcccctgagcttcgagtggattttttgcagacaatccactcgaagtgcctttgcttctccggttttttcacatctcttgctgttgtttactctcctcttcttccctccactgccaccaagggcaagagtaagaaaggtagcggttcttctcctcgctctggtgacaagcgcaaacgtgagccgactcctccttcggaggacttcggcgactcggagtactcggaggaggagttctcctccgagtccgagggatctccggctcccgtctctcccccggtgtcgtctgatgattcagacgactcccaggggattgtcgcggaggtctggacctacatccgggccatcgagcgctccgggctcgagggctcggatgagtcggagtactcctcgaacgaggaggactcctcggactcgtccgaggagggcagcagcggtgatggcggtgatgacgacgacgacagaggcgacggtggtggcggcggagacagcggcaggggcggtgacggcggcagcaatggcagcggcagcaagggcagcaacaaggccaatggctag

SEQ ID NO: 35296 - DNA, 1401 bp, Zea mays
  Peptide Sequence Number=SeqID_77075
atgtctcgtgaaattagaggcagtccagagatcttgtttgcaagagaagttgcaagagcatgcagaatggggaactttatttccttcttccgtcttgcaaggaaagctacatatttggaggcctgtttgatgcatgctcattttgcaaaggagtggttggaagcaaataaagactaccgagctatagtcgatggtgcgaatattgcactatatcaaccaaattttgcggagggcggtttcagtttgacccaggctcaggcaatcatgcttatagctgcagctgcggcagctgcggcagccaccaaaggcagtgctgccactgcttttaatcctccaatgagcacttctgtagcagctggacaagctcaggttgttgctgaccctagctcaataagcaagcttcaggctgatctccccattgccaggaggcactctctccagcgcttccttgagaaacgtcgtgacagggtcgtgagcaaagctccgtacagccccgccaagtcgttcgatggcatggagtcagcgggaatggagatgactgtggacggcaagcagggcgcaaggcccagtatcttgaaagattggggagccgcgaagtctgaagcgctcgccgaagaggccaaggtaaggtacgacaaggctgtcttcaaggtggttgatctggaagattacgccgctgaggatgaggaatacgaggataagcttaaggagagcatcacattgttcttcctagcaacttatggcgatggagagccaactgacaatgcggcgaggttttataaatggttctcagagggtaatgagagaggcgagtggttgaataatcttcggcttggggtgtttgacctcggaaatagacagtacgagcactttaacaaggtttcctgcattggagccaacgcgtccgcggcagcagcgagggagttgtcgctaacgctgtgctccaactccatcgcttcctcgaacagcacgctgaacgcgacggagctaagactggaggaagctaagactcttgcagaaaagctttgtgatggccctctttcaagtgctgcaaatttgtggatcctgagagcttctatggagataaattcgttggcgactgcttctggcagctctccattgaataaggagaacttgagctctctgtttgatctgtttggcacatgtcgacacagattgcttgctttacctcggccaagcctcaagttgatgcagtactgcatagagctagaggcgagccttgcatcgctcggagaccatggcgccctcacaaatgctcgatggctatatgattcagtggtcgacatgtatccccgggaaagggaagtgtggagtagctactacagcctagagctcaaggtgagaccacacatcactgccggcaaggaattcaacatctaa

SEQ ID NO: 35297 - DNA, 276 bp, Zea mays
  Peptide Sequence Number=SeqID_77076
atgtctcgtgaaattagaggcagtccagagatcttgtttgcaagagaagttgcaagagcatgcagaatggggaactttatttccttcttccgtcttgcaaggaaagctacatatttggaggcatgtttgatgcatgctcattttgcaaaggagtggttggaagcaaataaagactaccgagctatagtcgatggtgcgaatattgcactatatcaaccaaattttgcggagggcggtttcagtttgacccaggctctgaacaatagggacatctga

SEQ ID NO: 35298 - DNA, 378 bp, Zea mays
  Peptide Sequence Number=SeqID_77077
atggtgcatggactggttgactattcggataccatcaatgatgaaaatgttgaagcctcaaaaaggatgcgatcacctgcatcagagttcacacgcatggtcaagtcaccaccatcggataccagaggcaatatcaggtcatcatctgtagattttggcagcaactactcagtccagaatcttcatgcatatgctgatgtccagaaaagaacagggatctcttctttggatgctactgatgatgatcatttgaccccttcaactgaacttgagagggaggaacaagcaaaagccaagcggctggctcgtttccatgttgaattaagcaggccagtacaaaatactaatgattttgtgaaaacagttaaaagctttgct

SEQ ID NO: 35299 - DNA, 889 bp, Zea mays
  Peptide Sequence Number=SeqID_77078
gtctgatgcatccttttccaagttcagaaatcaaatacaatcacgcattggtggtgcatgttcaccatcacaacagatgtctcatctttcagactccaatgaactaaacacgttagctatttctccaccaaagccttctatccttagtgctaccagaagaacagggatctcttctttggatgctactgatgatgatcatttgaccccttcaactgaacttgagagggaggaacaagcaaaagccaagcggctggctcgtttccatgttgaattaagcaggccagtacaaaatactaatgattttgtgaaaacagttaaaagctctgcagataagtccaaacaagccacatcagtgggaagaactcctttgagaacaaatgatgacaccgatgacaatactttggttgacatggattccacagctttggctgcaatagttgggctttgccctgatatgtgcccagaacctgagagggcagagcgtgagagaaaaggagatcttgataggtatgaaagattggacggagacagaaacctaactactgagcttctcgctgttaaaaagataaggctccacataattgcgatgcatgaattatgtgaatacaacaaaggagaaggttttcccgagggttttgatgcacacctcaacattgagcagatgaataaaacatcagttgagctatttcaaatgtatgatgaccataggagagaaggtgttctcttctcaacagaaaaggagtttcggggttattatgcactgctcaaattagacaaacatcctggttacaaggttgaacctgctgagttatctctggatcttgctaagatgtctcgtgaaattagaggcagtccagagatcttgtttgcaagagaagttgcaaggtag

SEQ ID NO: 35300 - DNA, 1020 bp, Zea mays
  Peptide Sequence Number=SeqID_77079
atgacggtcattacatggggaataacacaaaccctagacgggtctgatgcatccttttccaagttcagaaatcaaatacaatcacgcattggtggtgcatgttcaccatcacaacagatgtctcatctttcagactccaatgaactaaacacgttagctatttctccaccaaagccttctatccttagtgctaccagaagaacagggatctcttctttggatgctactgatgatgatcatttgaccccttcaactgaacttgagagggaggaacaagcaaaagccaagcggctggctcgtttccatgttgaattaagcaggccagtacaaaatactaatgattttgtgaaaacagttaaaagctctgcagataagtccaaacaagccacatcagtgggaagaactcctttgagaacaaatgatgacaccgatgacaatactttggttgacatggattccacagctttggctgcaatagttgggctttgccctgatatgtgcccagaacctgagagggcagagcgtgagagaaaaggagatcttgataggtatgaaagattggacggagacagaaacctaactactgagcttctcgctgttaaaaagataaggctccacataattgcgatgcatgaattatgtgaatacaacaaaggagaaggtttttccgagggttttgatgcacacctcaacattgagcagatgaataaaacatcagttgagctatttcaaatgtatgatgaccataggagagaaggtgttctcttctcaacagaaaaggagtttcggggttattatgcactgctcaaattagacaaacatcctggttacaaggttgaacctgctgagttatctctggatcttgctaagatgtctcgtgaaattagaggcagtccagagatcttgtttgcaagagaagttgcaagagcatgcagaatggggaactttatttccttcttccgtcttgcaaggaaagctacatatttgcaggcctgtttgatgcatgctcattttgcaaag

SEQ ID NO: 35301 - DNA, 1089 bp, Zea mays
  Peptide Sequence Number=SeqID_77080
atggtcaagtcaccaccatcggataccagaggcaatatcaggtcatcatctgtagattttggcagcaactactcagtccagaatcttcatgcatatgctgatgtccagaagtctgatgcatccttttccaagttcagaaatcaaatacaatcacgcattggtggtgcatgttcaccatcacaacagatgtctcatctttcagactccaatgaactaaacacgttagctatttctccaccaaagccttctatccttagtgctaccagaagaacagggatctcttctttggatgctactgatgatgatcatttgaccccttcaactgaacttgagagggaggaacaagcaaaagccaagcggctggctcgtttccatgttgaattaagcaggccagtacaaaatactaatgattttgtgaaaacagttaaaagctctgcagataagtccaaacaagccacatcagtgggaagaactcctttgagaacaaatgatgacaccgatgacaatactttggttgacatggattccacagctttggctgcaatagttgggctttgccctgatatgtgcccagaacctgagagggcagagcgtgagagaaaaggagatcttgataggtatgaaagattggacggagacagaaacctaactactgagcttctcgctgttaaaaagataaggctccacataattgcgatgcatgaattatgtgaatacaacaaaggagaaggtttttccgagggttttgatgcacacctcaacattgagcagatgaataaaacatcagttgagctatttcaaatgtatgatgaccataggagagaaggtgttctcttctcaacagaaaaggagtttcggggttattatgcactgctcaaattagacaaacatcctggttacaaggttgaacctgctgagttatctctggatcttgctaagatgtctcgtgaaattagaggcagtccagagatcttgtttgcaagagaagttgcaagagcatgcagaatggggaactttatttccttcttccgtcttgcaaggaaagctacatatttgcaggcctgtttgatgcatgctcattttgcaaag

SEQ ID NO: 35302 - DNA, 924 bp, Zea mays
  Peptide Sequence Number=SeqID_77081
atggagagctacggccacaagcgcgcgtggaagaaggaaccgacgcgggggaagggcggcccgcagaacgcggcgtgcgagtaccgcggcgtgcggcagcggacgtggggcaagtgggtggccgagatccgagagcccaacaagcgcgcccgcctctggctcggctccttcgccaccgccgaggaggccgcgctcgcctacgacgaggccgcgcgcaggctctacgggaccgacgtcttcctcaacctgccgcacctccgcgcctcgggagtctccgccgccggcgccggcaacgcgcacgagaggcttaggtggctcccagctgcctccgccagaggcgccgccgtcccggcctacggcctgctcaacctcaacgcgcagcacaacgtgcacgtcatccaccagaggctgcaggagctcaagaacaacggctcgcccgccgatcatctccctgcagcggcctccacgtctccctgctcgaccgtcaccacccgcgcggctgcggccttgcctgcgcccatgtcctgcttccacgccctggagcaggcggtgaccacggtcgccacgaggacgacggtcgacgacgctgagccgtgcgagggcggcgcctgcccgtccggtgcggacaagccccagatcgacctcagcgagttcttgcagcagatcggcgtgctcaacaacaccgacgacgacggcatcaggactactgctaaagccagctttcgcggtgatgccgcggaggctggctgcttcggcggcaacggcgagttcgactgggacgcgctggcagcggacctcaacgacatcgcgggagcaggagtccatggcggcgtcaacggagggtttcagatggacgatctgcatgagcatgaggtcgagcagttcgggacctgcctgcccatccctgtctgggacgtgcagtag

SEQ ID NO: 35303 - DNA, 978 bp, Zea mays
  Peptide Sequence Number=SeqID_77082
atggagagctacggccacaagcgcgcgtggaagaaggaaccgacgcgggggaagggcggcccgcagaacgcggcgtgcgagtaccgcggcgtgcggcagcggacgtggggcaagtgggtggccgagatccgagagcccaacaagcgcgcccgcctctggctcggctccttcgccaccgccgaggaggccgcgctcgcctacgacgaggccgcgcgcaggctctacgggaccgacgtcttcctcaacctgccgcacctccgcgcctcgggagtctccgccgccggcgccggcaacgcgcacgagaggcttaggtggctcccagctgcctccgccagaggcgccgccgtcccggcctacggcctgctcaacctcaacgcgcagcacaacgtgcacgtcatccaccagaggctgcaggagctcaagaacaacggctcgcccgccgatcatctccctgcagcggcctccacgtctccctgctcgaccgtcaccacccgcgcggctgcggccttgcctgcgcccatgtcctgcttccacgccctggagcaggcggtgaccacggtcgccacgaggacgacggtcgacgacgctgagccgtgcgagggcggcgcctgcccgtccggtgcggacaagccccagatcgacctcagcgagttcttgcagcagatcggcgtgctcaacaacaccgacgacgacggcatcaggactactgctaaagccagctttcgcggtgatgccgcggaggctggctgcttcggcggcaacggcgagttcgactgggacgcgctggcagcggacctcaacgacatcgcgggagcaggagtccatggcggcgtcaacggagggtttcagatggacgatctgcatgagcatgaggtcgagcagttcgggacctgcctgcccatccctgtctgggacaaggacaagcctagcgaggtggtaagaatgtggtgtttgaatgcattaaaaataaatacttaa

SEQ ID NO: 35304 - DNA, 1359 bp, Zea mays
  Peptide Sequence Number=SeqID_77083
atgcagtgcactggccacagtttaatggaggacaactatgctctgaatttggttaaagaacaatggagggtattgtccaacaatctgctcaaggcagacaccgcgaatccgtcggtggctccggcagaagtcggcaccgttgcgggcccactgcccaacacggctggtctggaggcgctgaccggcgccatggacaagctggagaccgtcttgaggcccaaggagggtcagtccaatccgaccgggcataagcggggcactaccgataaagatataacaactaagataaagagagccatggatttatcggaggatttatcggcaaagataaagaaaacaaaggataatgtggctgggatattgaataagccacaagcggcagccaccagcaggcgtcaggagccctgcaggggcagtgctcatatttcaaagatattcaaggtcatttatcatctaaagggcacaaagtcccaacctctactttggaagatgtcggtcttcattgttgcctcctcggcgagatccacggccaggcaagcccatcctgcccacgctgctctccatgtaatagcggtcccagcagatctcctctcccccgcggtccactcccccaacgagctgctctccatggaacaccggggtcgcggtctccgactcagcaagatccatggctggcgtcctcctctgctgctgagcccagctctcgcctctctgatcgaggtacgctacctacgcctgatattgtttgtggttgaaaattcagcgattattaggctctgctcgattcggtgcttcgttgtgtccatggggggttttgagctgggcctctggaggcttttgcgcagcgaggatgtcggcgctgggactcagattcatggtgctcctaatgcacgtgttgttcgttggcgttgtcttcatcctcaatccgacctcgactggcgaatccatagggagccgtggatgatgtacgggaacatgactaaccagcacgaggcgttcctgaggaggaagctggaggaggagcaggcaactgagctacagcaagccatagagctggaggggcgccgcttcatggggctgcagctcctcgacctcaagagcaggggccaccaccatctcggttcaggcgcgcccatgcctatgcgacaagccaccgatggcaaaggcagcgacagcaacgggaacgacaacgcgtcccatttggaggatgccatcagcatcatccaagataagaggatgatgagcagccttgcaatgaatgctcctgctgctgatgctgaaggcgagcacgaggagcagcagggagagggcggtggtggctgtgataagaagatgcagtgtttgtcggatgcatcataa

SEQ ID NO: 35305 - DNA, 1232 bp, Zea mays
  Peptide Sequence Number=SeqID_77084
aagtcggcaccgttgcgggcccactgcccaacacggctggtctggaggcgctgaccggcgccatggacaagctggagaccgtcttgaggcccaaggagggtcagtccaatccgaccgggcataagcggggcactaccgataaagatataacaactaagataaagagagccatggatttatcggaggatttatcggcaaagataaagaaaacaaaggataatgtggctgggatattgaataagccacaagcggcagccaccagcaggcgtcaggagccctgcaggggcagtgctcatatttcaaagatattcaaggtcatttatcatctaaagggcacaaagtcccaacctctactttggaagatgtcggtcttcattgttgcctcctcggcgagatccacggccaggcaagcccatcctgcccacgctgctctccatgtaatagcggtcccagcagatctcctctcccccgcggtccactcccccaacgagctgctctccatggaacaccggggtcgcggtctccgactcagcaagatccatggctggcgtcctcctctgctgctgagcccagctctcgcctctctgatcgaggtacgctacctacgcctgatattgtttgtggttgaaaattcagcgattattaggctctgctcgattcggtgcttcgttgtgtccatggggggttttgagctgggcctctggaggcttttgcgcagcgaggatgtcggcgctgggactcagattcatggtgctcctaatgcacgtgttgttcgttggcgttgtcttcatcctcaatccgacctcgactggcgaatccatagggagccgtggatgatgtacgggaacatgactaaccagcacgaggcgttcctgaggaggaagctggaggaggagcaggcaactgagctacagcaagccatagagctggaggggcgccgcttcatggggctgcagctcctcgacctcaagagcaggggccaccaccatctcggttcaggcgcgcccatgcctatgcgacaagccaccgatggcaaaggcagcgacagcaacgggaacgacaacgcgtcccatttggaggatgccatcagcatcatccaagataagaggatgatgagcagccttgcaatgaatgctcctgctgctgatgctgaaggcgagcacgaggagcagcagggagagggcggtggtggctgtgataagaagatgcagtgtttgtcggatgcatcataa

SEQ ID NO: 35306 - DNA, 921 bp, Zea mays
  Peptide Sequence Number=SeqID_77085
atgaactatggcgtcatctcggcaccggaggtgacacataggaggaccgacagcaatgatcagttcgtcatcctccccaccgtcggcccgcacgcgtgccgcgacctgccgcaaaccccgcccgccgccccgaacccccgcaagccactatacgcccgcagcagcagcagtcgtgcacccccagcacccgccctccacccccgctgcgcgttgccccctatacgaagacgacgacgacaacccctccgctgccacgtcgaccacggctgggcgcgacccgaccgccagttcacggcagccggattcgacgatgccgtcctcctgtgggagagagacgatgagccgacgggggtggtgagggcgaggaggatggggccaagaggaggacagaccagattgccggacccgacgccgcttccccctacgcacatcgcgcctgctctcccgagcctgccccccgacgcaccgacgcgcaatcgagcggcccccaagaccgatttttcgtggctacagaggtgggcgccctacgacctcgacccctcccatcctactgcagctctggcccccatcccgtccccgaccaagtccatcgaccgcatcgtccaccgcctctgcatcctcgccctcgacgacgatgatccctcctcatcttcgacgagacacaaaccaaatgatttggctccaataatcgagccgcctagggtaatagtgcatccggtgcctccatttctccgcccacatgcatcaggtttcgttgccatttgcagcgactgtgctccagttcgaccgtttgggggaaaagatttgttttccttgctcatggactgtgcctttgtgtggtttgcgtctactgtgcggctaaaggcaaggaaacaggatctgtcacggaagatccatggtcaaatggtggtccttcagtga

SEQ ID NO: 35307 - DNA, 798 bp, Zea mays
  Peptide Sequence Number=SeqID_77086
atgtcgcgcgcgttcgacgactactatatcatgaactatggcgtcatctcggcaccggaggtgacacataggaggaccgacagcaatgatcagttcgtcatcctccccaccgtcggcccgcacgcgtgccgcgacctgccgcaaaccccgcccgccgccccgaacccccgcaagccactatacgcccgcagcagcagcagtcgtgcacccccagcacccgccctccacccccgctgcgcgttgccccctatacgaagacgacgacgacaacccctccgctgccacgtcgaccacggctgggcgcgacccgaccgccagttcacggcagccggattcgacgatgccgtcctcctgtgggagagagacgatgagccgacgggggtggtgagggcgaggaggatggggccaagaggaggacagaccagattgccggacccgacgccgcttccccctacgcacatcgcgcctgctctcccgagcctgccccccgacgcaccgacgcgcaatcgagcggcccccaagaccgatttttcgtggctacagaggtgggcgccctacgacctcgacccctcccatcctactgcagctctggcccccatcccgtccccgaccaagtccatcgaccgcatcgtccaccgcctctgcatcctcgccctcgacgacgatgatccctcctcatcttcgacgagacacaaaccaaatgcgactgtgctccagttcgaccgtttgggggaaaagatttgttttccttgctcatggactgtgcctttgtgtggtttgcgtctactgtgcggctaa

SEQ ID NO: 35308 - DNA, 906 bp, Zea mays
  misc_feature (872)..(872): n is a, c, g, or t
  Peptide Sequence Number=SeqID_77087
  unsure (1)..(906): unsure at all n locations
atgaggaaccaagaacgaatgcgaggagctttatcacttagtgaccaacttcggtcacctagacaaaccagagttcgtgggaatgggaataagagccactcacaagcggaaatagatccttatctcggcgctatcactattgatatcgaggttacacgtctcgatgccaatataaatgacgccaagttctcattcctctgcgttgagttggcgcttatgtggagaatcccctccaccgccatcagcgctcgcccgcgtagatcccgctctcagcgctcgcccgccatccgctctccatgcttagggtccgccatccgcgaggccggaggggaccctttcgtggctgtcggaggccacttccagatcccgtcatccgccgccatcaacgccctcctcatagatcccgtcatccgctgcgaatctccgttcagctccccctcgcgcttacgtcgtcgccgcttcgagttctggttcatgggcttcgtcaggtaccaggtgtccctgcacgaactggagaaggccatcgagcaggcgaacagtgacgtgtccaaccttccttggtacgacgacgacaaggccgtcgtcaccccatccgtcccctacgacccgctggcgctaaggaaggcgttcgagaaggccgtggtgaagcggctgatgacagacgtcccgttcggcgtcctgctctccggcgggctggactcgtcgctgctggctgccgtcgccgttcgccacctcgccgggacagaggccgccaggcgctggggcaccaagctccactccttctgcgtgggcctggaggggtcccctgacctcaaggcggccagggaggtggcggagtacctgggcaccctgcaccatgagttccacttcantcgttcaggacggcatcgaaaattggataactaa

SEQ ID NO: 35309 - DNA, 918 bp, Zea mays
  Peptide Sequence Number=SeqID_77088
atgaggaaccaagaacgaatgcgaggagctttatcacttagtgaccaacttcggtcacctagacaaaccagagttcgtgggaatgggaataagagccactcacaagcggaaatagatccttatctcggcgctatcactattgatatcgaggttacacgtctcgatgccaatataaatgacgccaagttctcattcctctgcgttgagttggcgcttatgtggagaatcccctccaccgccatcagcgctcgcccgcgtagatcccgctctcagcgctcgcccgccatccgctctccatgcttagggtccgccatccgcgaggccggaggggaccctttcgtggctgtcggaggccacttccagatcccgtcatccgccgccatcaacgccctcctcatagatcccgtcatccgctgcgaatctccgttcagctccccctcgcgcttacgtcgtcgccgcttcgagttctggttcatgggcttcgtcaggtaccaggtgtccctgcacgaactggagaaggccatcgagcaggcgaacagtgacgtgtccaaccttccttggtacgacgacgacaaggccgtcgtcaccccatccgtcccctacgacccgctggcgctaaggaaggcgttcgagaaggccgtggtgaagcggctgatgacagacgtcccgttcggcgtcctgctctccggcgggctggactcgtcgctgctggctgccgtcgccgttcgccacctcgccgggacagaggccgccaggcgctggggcaccaagctccactccttctgcgtgggcctggaggggtcccctgacctcaaggcggccagggaggtggcggagtacctgggcaccctgcaccatgagttccacttcatcgttcaggacggcatcgaaaattggataactaaggtggctatctga

SEQ ID NO: 35310 - DNA, 492 bp, Zea mays
  misc_feature (50)..(50): n is a, c, g, or t
  misc_feature (59)..(59): n is a, c, g, or t
  misc_feature (69)..(69): n is a, c, g, or t
  misc_feature (75)..(75): n is a, c, g, or t
  misc_feature (111)..(111): n is a, c, g, or t
  misc_feature (177)..(177): n is a, c, g, or t
  misc_feature (220)..(220): n is a, c, g, or t
  Peptide Sequence Number=SeqID_77089
  unsure (1)..(492): unsure at all n locations
atggatcagatagttcatcgccggaggacgatcccaaggccgctagatcnaaaggacgntcgcccaagnccaccnggatcggatgagttgatcgtcgaagaacgccagagnccacccacgcctcgcgtggctgacattgtcagagacgaccgcgcctcgcgcgaccaccagagcgancccgcgtccctcgtggccaccgccgtttccaccaggcctaggncgctcgaggaaaagactggctctttgaagcctgccacgacatatggcaagggaaaggggcctgctaaaattgaggatgccaagaatgccattgaggatgataggccactgggcgaaggtcattttggtcaggagtttggaggtcggcgatacaaggttcaccattcagccaggaaggttatgggtcctaaacaactgaacgaagttgtcggcttcgctgaacaacttggggtatccttcggtgtctacaatctttggggggggggggcgtga

SEQ ID NO: 35311 - DNA, 528 bp, Zea mays
  Peptide Sequence Number=SeqID_77090
atgacgcatgtgggcctggagtggtcacatggcatggcatatgacgactctagacacacagacgtggctaagagggaggtttctggattggggttgaccgacgagatcgctacaacaatcatgcaactagactcgttaaaaccagtttatgatatatacttacacggtatagatagttcatcgccggaggacgatcccaaggccgctagatcaaaggacgtcgcccaagccaccggatcggatgagttgatcgtcgaaagctacagtggtactagaggatctatagatccacacctcgcccctagctgtgatacaccctgggtggttgtagcgctcgaggaaaagactggctctttgaagcctgccacgacatatggcaagggaaaggggcctgctaaaattgaggatgccaagaatgccattgaggatgataggccactgggcgaaggtcattttggtcaggagttggaggtcggcgatacaaggttcaccattcagccaggaaggttatgggtcctaaacaaatga

SEQ ID NO: 35312 - DNA, 648 bp, Zea mays
  Peptide Sequence Number=SeqID_77091
atgcgggggaaggcgaactgctgctgcttagacagggtgcagctgtccatcctccacccgggcgacggtcgctggctgcaccagggggtcgcacaacacgtcgtacgtcgcgagggcggtactcgtgttctgggacggtcccgttctcgttcttgtggcgagagcgggagtgagcacctaccggtgcgctttggggcagccgccgctcgctggtgcggtgttggtgggcaggtggccgctgtcgtcggtgctgaggtggtggtcgccataggtgaggctgcctctgccgaagcggttgcttccgccgacgacaccgtcagtgccacctatgctctgggcctccggctctttggctttaatggctggttctcgtctcctgtgaggggacgtgaacgagggccttccagcggtagcgtttgccctagggccatcgctgctgctgtcttgccgtccgagacggaggtcgttgccgtgctgttggtgcagcggtcgccggcgagccacccagagtttgttgtcccgcaggccctctggtgtagaggttgttcatacccgcgggagtggaaccggagttccgtttgtaatggcaccctgagtatgggtgtttgttcattgtggctatcgaggcctgaacatcatggtatttga

SEQ ID NO: 35313 - DNA, 495 bp, Zea mays
  Peptide Sequence Number=SeqID_77092
atgatgaccaccagttcggtggtggggagaagcaagccgggctgcggcctctgccccgccctcagcttcaaggatcttcatcatccttgctgtggcggagggcgagttgagccggggttctaccttccgcatgggccggcgacctgcttcttcctctggcattcgggtgagaaaggcatcctccagctctacggaggagacgtcttccagccatgcgggggaaggcgaacaactgctgcttggacagggtgcagctgtccgtcctccacccgggcgacggtcgccggctgcaccagggggtcgcacaacacgtcgtacgccgcgagggtgaaccttcggccgctctgtgatgagctggagctggaggcagcggtgtcagcgtggacagaggcggagtcggctcaaaaagaggcttcgtcggcccgggagcacgtggcttccctggccaaggaggtgcggcggcggcggctggagcttggccaggtcgtccgctag

SEQ ID NO: 35314 - DNA, 567 bp, Zea mays
  misc_feature (79)..(79): n is a, c, g, or t
  Peptide Sequence Number=SeqID_77093
  unsure (1)..(567): unsure at all n locations
atggatagaggccttggtggaagtttactcgagttgttggggtccaatgtgcaaaagagatccagccggagtttttttnccggcggtcaaagctcccgcccgggtgcgagcccaatcattggcatcaccgccgggctcgcgcaccggtgctcgcccgtccgatcctccggaccacccgatcggacggctcgaccgctggaacaaggttttcaccaatccctcctacgtagagatggcaatgggtacccgctacccgaaactcggtggggttttgctctattagggtataggtttgggtcaatttctctacttatgggtttgttaatgggttcaaatggaaacccaacggtgggtatgggaaacccgtcgggtacccgaaacccgcatgggtatgagtttgggcaaaattttatattatttcttcgtgggtatgggtttgggcaagtaatacccagcaggtttttacccattgccatctctactcctacgagaacggggtgtcgtcgtccgcgcataagcagaggagatcagcagagaataccccacgcgcagggacgacaattttaa

SEQ ID NO: 35315 - DNA, 549 bp, Zea mays
  Peptide Sequence Number=SeqID_77094
atggactcacgcccggtggatgacgaaccatcgcagaaagggttccacaccataaactgtgtaaacctccgagcgatccacatggattgcaggggctcgaggtctacatctacccgagaggccgatggactcacgtccattgcgtggcgaaccatcacaggaaagggtccaccccttacactgcataaacccccgagcaatccacatggattacttaggggcttgggggctacatctaacagatgcgcttgcatgcacccaaaaagggaatcgctcaaggaaagcctcagctcaactctaatgagttacacaaaggctgagggctgctgtcgagtacctgagaacaggcgctacgccggcgaagaggtctctggttgcacggagaccagttcgcagccgcgccacatcgaccgccccggggtcgccacgtggccagggaaagggacgtgctctaggatacacgcggtggatctggacctactgcaaggaaagcgccgggcccccgtacgtggcgaccggacctccaagatgggtaccagacccttctga

SEQ ID NO: 35316 - DNA, 201 bp, Zea mays
  Peptide Sequence Number=SeqID_77095
atgaccctcggacagaaccaatgcaaaaacacaagtttccactacagactgtccggaggaaaagcaaagaccgtccgagacctcgcgcggaccgtccgggcctcaggcgcggaccgtccggtcgccgttgatcttcaagggcggaccgtccgcaccaggagggcggaccgtccgcgctcagcagaatggcccaacggctag

SEQ ID NO: 35317 - DNA, 360 bp, Zea mays
  Peptide Sequence Number=SeqID_77096
atgaccctcggacagaacctatgcaaaaacacaagtttccactacggactgtccggaggaaaagcaaagaccgtccgagccctcgcgcggaccgtccggcctcaggcgcggaccgtccggtcgccgttgatcttcaagggcggaccgtccgcaccaggagggcggaccgtccgcgctcagcagaatggcccaacggctaggaagtggttggtggctataaatacaaccccaaccacctccattcaagacactcaagcattccaaccttcaacattcaatacaagagctagcaatccatttcaagacacattcaaagcctccatctctccaagtttcacaattgagaaaagaaatcattag

SEQ ID NO: 35318 - DNA, 349 bp, Zea mays
  Peptide Sequence Number=SeqID_77097
atggcgcatgccgaggacgttgaggaccttggagctctagtcggcgtgacgcccgaggctgcggaggtcaacccggtgccgcccctggatgccggtgaaggctcctcggctgcacccgtgcccacggtggccggtgaagaccctgtgtcggcccctgcgccgacggccgaagatgctttgaaggtggtggctgagccggcagccgaagaccccgcggccgcggccggggccttcgcagctttggatgtggctgcggcggagactcctccgcgtgtgatgggtgctgaggatcatccgggtgcgagtgctgggcgtaggcggcgaagagcggtggcgaaatggagaatgg

SEQ ID NO: 35319 - DNA, 1950 bp, Zea mays
  misc_feature (723)..(723): n is a, c, g, or t
  misc_feature (740)..(740): n is a, c, g, or t
  misc_feature (744)..(744): n is a, c, g, or t
  misc_feature (755)..(755): n is a, c, g, or t
  misc_feature (1003)..(1003): n is a, c, g, or t
  misc_feature (1015)..(1015): n is a, c, g, or t
  misc_feature (1026)..(1026): n is a, c, g, or t
  misc_feature (1073)..(1073): n is a, c, g, or t
  misc_feature (1116)..(1116): n is a, c, g, or t
  misc_feature (1118)..(1118): n is a, c, g, or t
  misc_feature (1194)..(1194): n is a, c, g, or t
  Peptide Sequence Number=SeqID_77098
  unsure (1)..(1950): unsure at all n locations
atgggcgtgaccgaggaagagccttcgcaggtggctgcctcggccaccaagaagagaaaattaggtactgcagtggagggactgggggtctccgatagttttgctatggagttgatggggacgtgcgcagccctcgggggaaggatgtcttcgcccgagctccgggagtcttcggcgcggatgctggaggttaccgggggtcgatggcccaagaatgttccgatcccccgcgcggctggcgaagacttcgttacgtctcgcatggcttcgcagaagcgtcgggcggtcgtcaggatcgcagatcctaggcacgaggcgaagagggcgcagggaagtgcgaagagtgctgctgcctccagcagtagcaagccggtgccggctgcgaaaccggttgtacccggacccagcaaggcgtcggcgagcgcgaagactgccgcctctggcgggatcaagcctcccctgggcgaacccacgaaaggacgggagctgccttcgccggggagacgtgttgccgacttcggcacgaacatcagtgtcgaggactattttgttgccgttggcgccaaggacgtggcgagctctatgtcccagcggctgagggaggcgtcgcagcagctgtcgcagcagctaagtcaagcggccgacttcgccgaccgcgtggcgtcgggctggcggagaaagttgccgccatggaggccgagaagacagacctccggcgccagnctggcggaggagaggangggnaggcgaatcanggccatcgctgaagcgcagactgcgcgagcggaggccaaagtggcgcgggcggagagcagtctcaccagtcaacgcaccgaggagctggaggcaaggttcgacgccttgcgtagctgcgtggacaaagccgaggcctcgacgcgctcggaagttgagcggacgcacgcacagttcgtggacgcgtatcgcgagctgggtgcgcggactgctgacttcgaagtacccgaccgagaagcaggccttcgtnttcctcgaatgngttacaggagngagctgctggtgctcccaaccattgtggagggtttcatgtccttcgncctccctcgtcacctgcgagggggccatgaatgcattgtcccnancgagggctgcaggcactacgaggtcttcgaccaatcagatgagaactttgaacgtgaaatttacaaggtcgaaganccctgtggtgaagcaatggcgcatgccgaggacgttgaggaccttggagctctagtcggcgcgccgcccgaggctgcggaggtcaacccggtgccacccctggatgccggtgaaggctcctcggctgcacccgtgcccacggtggccggtgaagaccctgtgtcggcccctgcgccgacggccgaagatgctttgaaggtggtggctgagccggcagccgaagaccccacggccgcggccgggccttcgcagggttttgggcctgcgcacacaaccgctactgacaatgctaattttgtggtagcttcgaccgtggttgctgaaggcaattctgatgattctgtgtctaagttttttgagtctgatgattctaggagttcgattgtatggacagaagagtcttcggatgaggacttggattattttgcggcattggacgtggctgcggcggagacttctccgcgcgtgatgggtgctgaaggtcttccaggtgcgagtgctggacgtaggcggcgaagggcggtggcgaaacggagattgagtgagttgtcgcgaagtgataggcatcatcgtggtgagatggagggtggtcgtcttcatgtggacgggactggcaaacgggaattgttgtcctcgccgactggggcgagtgtaggtgagggggagctgcgaagtctttttgagggtgaggaattgaggataatgctgttcaactacagggagatgggtatcatcccgaaggttgagccaatgtaa

SEQ ID NO: 35320 - DNA, 438 bp, Zea mays
  Peptide Sequence Number=SeqID_77099
atggatccggccccgaacgttcgcctgctcgatggccttctccagttcgtgcagggacacctggtacctgacgaagcccatgaaccagaactcgaagcctgcacgtacttctgctccggccggtccttgttcccacccggcgtggctgtcttgaccctgcccagcgggatggagaccttgaacggcacccgcaccaccgtgccgcgcttgggaggtcagcgccagcgagcggttcacggcgacgacgcatttttttctcagacatttcttatattattggttcagtcattttacaaaatattaagtcattctagcgtccagacaatatttaaatcatatgagaatggctttggctcatctaaagaagtggcttcacctcgtgagtcagagccaaagccgtttttggagaagccagagccctgccaaaggggcccttaa

SEQ ID NO: 35321 - DNA, 501 bp, Zea mays
  Peptide Sequence Number=SeqID_77100
atggcgcaccggacagtccggtgcgccaacggtgtccctgcacgaactggagaaggccatcgagcaggcgaacgttcggggccggatccatcgactcccgttcgtatcatgatacagagtgacgtgtccaaccttccttggtatgacgacgacaacgacgacaaggtcatcgtcaccccctccgtcccctacgacccgctggcgctaaggaaggcgttcgagaaggccgtggtgaagcggctgatgaaagacgtcccgttcggcgtcctgctctccggcgggctggactcgtcgctggtggctgccgtcaccgttcgccacctcgccgggacagaggccgccaggcgctggggcaccaagctccactccttctgcgtgggtctggaggggtcccctgacctcaaggcggccagggaggtggcggagtacctgggcaccctgcaccatgagttccacttcaccgttcaggacggcatcgaaaattggataactaaggtgtag

SEQ ID NO: 35322 - DNA, 573 bp, Zea mays
  Peptide Sequence Number=SeqID_77101
atggaaggctcctttgtcattaggacatcctactgctcagaggtagaaggattccctcatcttttatggagttgcgcgcttcgcatggggatccgcaagaagccggagtacgtttggaaagaataccgcgagaatggaactgagaaatgctctatggcagtctacctgggagaaagccgaaactacccaaaccaccctcccttccaagccctgtcaggaagagatcctactgaagatgaccccaccatagtctatatggccggatacctccacactcttgacaaccactatgacgatcttttctcccactgcactcacttaaactcccgggtggaaagcttagagcaacaaatcaaggaacttaaagaggagaaggcgtccctccaagaaagtctcgaaatagcagaaggtgaagaggccaacactcgtgaagcctaccgaaccctgaagatggactacgataagaagttaaagaagctcgcccccactaagaagatccgaaagcgaaccaagagccaaggatgccagactgaacggaaaaagggaggccccaccagcactgcctccctctag

SEQ ID NO: 35323 - DNA, 1075 bp, Zea mays
  Peptide Sequence Number=SeqID_77102
ccaaattgctatagctcttaagctccgccactgcgccccaagttcagcatgcacccccccttcgcctattgtgcccagtagcctcaccggcgacttcaccgccgcgggcacccgccacatcgccatggaccggccaccccgagcgtccaccggccaaattgaccccacctccgtaatcccctacctccgctcatgccttgccacctttccgtcgtcgcggaaccgggccaccggcgaagaaccgccgtggaacttcaccggtggtcggttctccccgccgcgaaccgcctccccccgtcatttcccccctaacgccgttcccccctcctcgctggcacgtgggtccgcgcccacggtgccgtccctgcaccgtcccccgctgatggaaggctcctttgtcattaggacatcctactgctcagaggtagaaggattccctcatcttttatggagttgcgcgcttcgcatggggatccgcaagaagccggagtacgtttggaaagaataccgcgagaatggaactgagaaatgctctatggcagtctacctgggagaaagccgaaactacccaaaccaccctcccttccaagccctgtcaggaagagatcctactgaagatgaccccaccatagtctatatggccggatacctccacactcttgacaaccactatgacgatcttttctcccactgcactcacttaaactcccgggtggaaagcttagagcaacaaatcaaggaacttaaagaggagaaggcgtccctccaagaaagtctcgaaatagcagaaggtgaagaggccaacactcgtgaagcctaccgaaccctgaagatggactacgataagaagttaaagaagctcgcccccactaagaagatccgaaagcgaaccaagagccaaggatgccagactgaacggaaaaaggaagccccaccagcactgcctccctctaggatagaaaatttgtcagacattgaggatatgtccctagctagccttgacgaccttctcaaggaatctggggacaccttagaaagggagtttggaagcaccttagaaagcgctcacgcgtag

SEQ ID NO: 35324 - DNA, 459 bp, Zea mays
  misc_feature (424)..(424): n is a, c, g, or t
  Peptide Sequence Number=SeqID_77103
  unsure (1)..(459): unsure at all n locations
atgacaggcgacccctcgtcgcagcaaaatagccatggagcaaatgcacggccacggcgcagctgtgcgctgccgcttgggcgtgtgctgctcgcgctaaaggggcacgcgtggcatcaagtggccggctgggccgagcggggtgcctgggccacgttgcgctgggacatgctggggcagagatgctcgagatcgattgatataattcttgagggtcccttggacctatgggttaggacccacacacgctttcgctgcaccactttaatcttgttggctgatgttgatcgcattgtcttcattggggtgcaagataagcatcatggtaaagatcaagggatgacaagggttaaggtgataacagaccaagacaaccaaggatgtattttagacaaaacttgtgaggcatcaaagaaggggaagncaatcaatggtgaagtaggtgaggcattatcctaa

SEQ ID NO: 35325 - DNA, 441 bp, Zea mays
  Peptide Sequence Number=SeqID_77104
atgacaggcgacccctcgtcgcagcaaaatagccatggagcaaatgcacggccacggcgcagctgtgcgctgccgcttgggcgtgtgctgctcgcgctaaaggggcacgcgtggcatcaagtggccggctgggccgagcggggtgcctgggccacgttgcgctgggacatgctggggcagagatgctcgagatcgattgatataattcttgagggtcccttggacctatgggttaggacccacacacgctttcgctgcaccactttaatcttgttggctgatgttgatcgcattgtcttcattggggtgcaagataagcatcatggtaaagatcaagggatgacaagggttaaggtgataacagaccaagacaaccaaggatgtattttagacaaaacttgtgaggcatcaaagaaggggaagcaatcaatggtgaagtag

SEQ ID NO: 35326 - DNA, 345 bp, Zea mays
  Peptide Sequence Number=SeqID_77105
atgacgaacaccctcgacgctgagggcgggatcgagatcacagcccggcttgcctctccccatccaggagctggaggtcaccgtcttgggagaccaccagcggaggggtgcaaccgggctggaccgggaaagggggataccccgaaaaggatccttccccgtgaaggaaccaggcttcgagcctccctactgatcagaggttcgaaggctggcccctcgaagggttcgacaaccgcctcagatcgcgtgggccctacacccactactggtcagaggttcgaaggccggccccccgaagggttccacggccgcctcaggctactcgggctccgcgcccattactga

SEQ ID NO: 35327 - DNA, 168 bp, Zea mays
  Peptide Sequence Number=SeqID_77106
atgtgttatttaaatcctgctccaaattgcaaatgcaattctgatattggaaggtctcctgttcttcagctgaagatcatacttgttgtggagcctttgatcccttcagaggggccaaggattggagagcacattttcggttacaaggaatcagatgttgctggttag

SEQ ID NO: 35328 - DNA, 708 bp, Zea mays
  Peptide Sequence Number=SeqID_77107
atggcgtcaaaggtagcttttgatcacccagaacgattctccaaaaagttcgagttcagtgcagacaacattgagcccctggttcagacatgcatgacaactctatcctcaaagaggatacatcttcaatctttcaaatattatgatactgacaatgacgttaacaggtctcctgttcttcagctgaagatcatacttgctgtggagcctttgatcccttcagagggaccaaggattggagagcacattttcggttacacggacccaagtgtttggatcacattctcattttttaggagatccaaacatgaggcaaggaatcaaactacagaattttgtttcaattggggatatgaaatgcctcatgatgttttggcacaatggattgcagacagagcacagatctggaccgagtatgtttccaagagaccttctggagttgttgccatgattttgggcattgatgatgagaaaggaactccacaactctttacatgtgatcctgctgggtatttcttcggtcacaagattcagattgtagatcagctctgtctgtgtttgtcaccttggaacacagaatccctactactctccccccataaggtacatgtgcacaatttggtgattgagcaaagtctggcgagccgatcaactgaatttgaagctgttattcagaatggcgacaaaagttcgttacgtgctgtgtga

SEQ ID NO: 35329 - DNA, 708 bp, Zea mays
  Peptide Sequence Number=SeqID_77108
atgaagctccgtgccgcccgcgcgccgcctgcggtttctgatggtccttcactcctcttccgcgtgtcctttgcagattacgcgtggaacgctacgaagctggcgggcgtcacctccgtcggggtgcgtgggaccgactccgtatgcgtcgtcggccagcggagggcgaacacgcacgcgcccaaggacaaattgctggacatgaccagcgtttcgcgcctgttcccgatcaccgaccggctggggttgctcgccacggggatcgcagacagagcacagatctggacccagtatgtttccaagagaccttctggagttgttgccatgattctgggcattgatgatgagaaaggaactccacaactctttacatgtgatcctgctgggtattttttcggtcacaaggcagcaagtgctggccaaagagatacggaggctgtcaactttcttgagaagaaaatgaagaacaatccttcactaccatttcaggaaaccattcagatggcaatatcagcattgcagttcgccctgaaggctgacctcaaagcctcggaagtcgaggttggggttgtcaggacggatgatccaactttcagagtgctgacagaagctgaaatcgatgagcatctggaagccatcaacccagagccgcggcactctgaaatgctccccggtttattccgggataaactgacattggagaactga

SEQ ID NO: 35330 - DNA, 333 bp, Zea mays
  Peptide Sequence Number=SeqID_77109
atgaggcgcgccaccacctcagggttgcgctccccgcaggagaatcgtggtgccgcgcccgccacgtccggctacggccatagtcctctgctcctggcctccctgttgggtcgaactagagatgacaatgggtacccgaaacccgaaacccgatgggtttttaccccattaggattttggatcatgatatcattaatcattacgatacttattgattatgagaagataattatattggagatgaaacccgcgggtaacccatgggtacccgttaacccgatgggtacgggtttgggcaaaatctcaaacccgtcacgggtacgggttttttaa

SEQ ID NO: 35331 - DNA, 1392 bp, Zea mays
  Peptide Sequence Number=SeqID_77110
atggcgagagtcgcggagtgcgcgccacgcgcgctccgattttggatcatgatatcattaatcattatgatacttattgattatgagaagataattatattggagatgaaacccgcgggtaacccatgggtacccgttaacccgatgggtacgggtttgggcaaaatctcaaacccgtcacggggtggtgactctggctccaaaagaccaaagtttgagcaggatggagcaggagatattgttatggagccacacttaaccgaggataaacctgtgcggatagaccaagaatcatcgtcaacatctaatagggatgctgaggcaagcacatctactagcatgaaacctgttaaaactgaagaagcaggagcagatcttcttcccaaagagatgaatattatgacaattagcgacgataaagctgatggccataatgataaggaaggtgagggtgttacacttgatgggactggaacagagacagggcagataattgtgacaacaataggaggtcacaatgggaagccaaagcagaaggtctcatacatggcagaattggttgttggtactggttcgtttggtattgttttccaggcgaaatgcttggaaactgacgagacggtggcgataaaaaaggtgttacaagataagcgctacaagaatagagagctccagactatgcagttacatgaccacccgaatgtagttcagctgaagcatcacttcttttcaacaactcaaaagggagaagtttacctcaaccttgtacttgaatttgtatccgagacagtttatcgtgttgccaaatactacaaccggatgaaccagcgtgtacccataatatatgttaagttgtatgcatatcagatgtgccgtgcgcttgcttacatccatcgagttgtcggtgtgtgtcatcgtgatattaaacctcaaaatctactggtccctggtgagcctaacatatcgtacatttgctcgcggtattatagggctcctgaactaatatttggagctacggagtataccactgcgatcgatatctggtctgttggctgtgtagtggctgagcttctgattggtcagcctttgtttcctggtgaaagtggtgttgaccaactggtggaaataataaagctttttggtaagcgcatgccacccgaggctgtcgatctcgtgtcaaggctgctccagtactcaccgaacctgcgctgcactgctgtcgacgcctgtgcccatccgttcttcgatgagctgcgggaccccaaggcttgcctgccgaacggacggccaatgccaccgttgttcgacttcacagcagccgaactcgaagggctccccgccgagcttgtccaccggatcgttcctgaacacatgaggaaggaagtgaattag

SEQ ID NO: 35332 - DNA, 1156 bp, Zea mays
  Peptide Sequence Number=SeqID_77111
atggcggcagggctgcaggtgttcggacagccggcgtccaccgacgtcgcgagggtgctgacctgcctcttcgagaagaacctcgagttcgagctcatccgcaccgacaccttcaagaagtcccacaagctccccgagttcatcaagctaagggatcctactgggcaggtgactttcaagcacggtgacaaaacaatcgttggtaagaactttgataagaaacagctaccagaacgaacaaagagagagctaatactatataaaaggctgaaaaatgagatgaaatgcatggcagattccagggccatttgccggtacctgtgcacgcagttcccggacgacgggtacaagaagctgtacgggacggggtcgctggagcgggcgtccatagagcagtggctgcaggcggaggcccagagcttcgacgcgccgagctcggagctggcgttccagctggcgttcgcgccgcacctcaagaacgtgcggcccgacgaggcccgcgccgcggagaacgagaggaagctgcacggcatgctgggcgtctacgacgacatcctctccaagaacgagtacctcgccggcgacgacttcaccctggccgacctctcccacctgcccaactcccactacatcgtcaactcctccgacaggggcagaaagctcttcaccgccaggaagcacgtcgccaggtggtacgacaagatctccacccgcgactcgtggaggcaggtcatcaagatgcagagggagcaccccggcgcgttcgagcttcgtaccttgacggggttgtcgacttcgtcgtacgtccctgtggcctatccgtacaagcggcaaataacctctccggcggcgagacagttggagtcgacctctggcgaggatgcttcgaagcgcaacccactcccgtctgcgctcgtctccaacctacagtctgtgctcgctgcccgccgcccgtccgcggcagtggtcagcaccgccgccacaactagcgaggctgaggccttcgctcaggaagcagaagcgtccgatgcccccgcgggagatgggacgccggcgaggcccatcgtgctgctgacctgtgccgggggatctggtcggcgggtatcgcggcgctcgtcgacgccctcgttgccgccgaccgctgcgacgtccacat

SEQ ID NO: 35333 - DNA, 771 bp, Zea mays
  Peptide Sequence Number=SeqID_77112
atggcggcagggctgcaggtgttcggacagccggcgtccaccgacgtcgcgagggtgctgacctgcctcttcgagaagaacctcgagttcgagctcatccgcaccgacaccttcaagaagtcccacaagctccccgagttcatcaagctaagggatcctactgggcaggtgactttcaagcacggtgacaaaacaatcgttggtaagaactttgataagaaacagctaccagaacgaacaaagagagagctaatactatataaaaggctgaaaaatgagatgaaatgcatggcagattccagggccatttgccggtacctgtgcacgcagttcccggacgacgggtacaagaagctgtacgggacggggtcgctggagcgggcgtccatagagcagtggctgcaggcggaggcccagagcttcgacgcgccgagctcggagctggcgttccagctggcgttcgcgccgcacctcaagaacgtgcggcccgacgaggcccgcgccgcggagaacgagaggaagctgcacggcatgctgggcgtctacgacgacatcctctccaagaacgagtacctcgccggcgacgacttcaccctggccgacctctcccacctgcccaactcccactacatcgtcaactcctccgacaggggcagaaagctcttcaccgccaggaagcacgtcgccaggtggtacgacaagatctccacccgcgactcgtggaggcaggtcatcaagatgcagagggagcaccccggcgcgttcgagtga

SEQ ID NO: 35334 - DNA, 345 bp, Zea mays
  Peptide Sequence Number=SeqID_77113
atgtcgatccacaccgccctgctccgtgcgtcaccctccccacggaggcgaaggcgccctgcgccggagatcgcgggatggttccacgcggctcctaggctaccagctggccatacggatcttgccaagatcgcttcctcactcctcttccctgaaggcgacaacgactgtggaggaggcagcggggttatctcctatattgcagttatccagaaccgcgtcgcccctccattcatccttgacaacgctgcctgtgttgctttacgtgttcagggcttcagcaatccaggtgccaccagtgtgggcgcgacccatcatgagtcgatgctagcgagccagccatag

SEQ ID NO: 35335 - DNA, 345 bp, Zea mays
  Peptide Sequence Number=SeqID_77114
atgtcgatccacaccgccctgctctgtgcgtcaccctccccacggaggcgaaggcgccctgcgccggagatcgcgggatggttccacgcggctcctaggctaccagctggccatacggatcttgccaagatcgcttcctcactcctcttccctgaaggcgacaacgactgtggaggaggcagcggggttatctcctatattgcagttatccagaaccgcgtcgcccctccattcatccttgacaacgctgcctgtgttgctttacgtgttcagggcttcagcaatccaggtgccaccagtgtgggcgcgacccatcatgagtcgatgctggcgagccagccatag

SEQ ID NO: 35336 - DNA, 654 bp, Zea mays
  Peptide Sequence Number=SeqID_77115
atgccgctactgctccaccagccgctactgctcctgaacgctagtgccgaccaccatctcccatggcgcaggagctccccaatctcctcttgccagggcgccgtcgctgagctcgccctgccccagccatggatgtcgttgggccacccgtctcctatctcccctcgccctcatcctctggctgctgccccttcctattcctggtggctgagtcttcttccatggatgttggtcgtgctgccctccctggtgctcacctctgccccctgcgttggatggccggttgctcctgccctaggtttgtcaagcgctaactctgctccatctatccctgctcgaatcttgctgattggccctgcgcagattatcctcatgcccggccgcggtacaacagcaacagccatgaaaccccattgtgtcgcgccctcgacgtgttcgacggaatatcgcagcacgtgccgacccgatctgcagccctggttgcgaggacgtcaaaccccgctaccgtcgacgttgtgcctcacgcttcaccaatgcgatgaaatgtctgagcgaatagacgacatgcgacccgagtttgattctgccaggttgtttgatgtgtattttactcattgtgatttagttgatgatgtgtttgtatgtgcgaggtga

SEQ ID NO: 35337 - DNA, 1419 bp, Zea mays
  Peptide Sequence Number=SeqID_77116
atgccgctactgctccaccagccgctactgctcctgaacgctagtgccgaccaccatctcccatggcgcaggagctccccaatctcctcttgccagggcgccgtcgctgagctcgccctgccccagccatggatgtcgttgggccacccgtctcctatctcccctcgccctcatcctctggctgctgccccttcctattcctggtggctgagtcttcttccatggatgttggtcgtgctgccctccctggtgctcacctctgccccctgcgttggatggccggttgctcctgccctaggtttgtcaagcgctaactctgctccatctatccctgctcgaatcttgctgattggccctgcgcagattatcctcatgcccggccgcggtacaacagcaacagccatgaaaccccattgtgtcgcgccctcgacgtgttcgacggaatatcgcagcacgtgccgacccgatctgcagccctggttgcgaggacgtcaaaccccgctaccgtcgacgttgtgcctcacgcttcaccaatgcgatgaaatgtctgagcgaatagacgacatgcgacccgagtttgattctgccaggttgtttgatgtgtattttactcattgtgatttagttgatgatgtgtttacagttaagtgtttggagacgggtgagactgttgccataaagaaggttcttcaggataagcgttacaagaaccatgggattgtgattagttacttcattgcaaaaaaaattaggaacagtattaatgtgtgtacccattgcttgaagcttcatatcgatggagctcgcatcttccatgcgtctgcagcacttggagttcttgtagatagactcgtgaaagctgctgattcagttttggtatgcctatcgaaagggttaggcgcacccgtcggatctgtgattgttggttcaaaggcatccattgacaaggccagaattctccggaagaccctaggcggtggaatgagacacgtgggagttctttgtgctgctgctcatgttgccgttcgtgacactgtgggaaagcttgcggatgaccacaaaaaggctaaagctttggcagtttgggtattgaagcttttatgtcttgttgggttcattttcttagagggactgaagaaaatcgagcagattacagtggactcagcttcggtcgagaccaatatgttcaagctctacaaggtgaggtctgttctgtttggccagaaaggcatcccatacctgaatacctacgatggccgcaccatgcgctaccccgaccctctcatcaaggccaacgacaccatcaagatcgatctggagaccaacaagatcatggacttcatcaagttgtatttgccctttcatggacttcatcaagttatatacttagttaggctcaatgttagcacaaacagttga

SEQ ID NO: 35338 - DNA, 1419 bp, Zea mays
  Peptide Sequence Number=SeqID_77117
atgccgctactgctccaccagccgctactgctcctgaacgctagtgccgaccaccatctcccatggcgcaggagctccccaatctcctcttgccagggcgccgtcgctgagctcgccctgccccagccatggatgtcgttgggccacccgtctcctatctcccctcgccctcatcctctggctgctgccccttcctattcctggtggctgagtcttcttccatggatgttggtcgtgctgccctccctggtgctcacctctgccccctgcgttggatggccggttgctcctgccctaggtttgtcaagcgctaactctgctccatctatccctgctcgaatcttgctgattggccctgcgcagattatcctcatgcccggccgcggtacaacagcaacagccatgaaaccccattgtgtcgcgccctcgacgtgttcgacggaatatcgcagcacgtgccgacccgatctgcagccctggttgcgaggacgtcaaaccccgctaccgtcgacgttgtgcctcacgcttcaccaatgcgatgaaatgtctgagcgaatagacgacatgcgacccgagtttgattctgccaggttgtttgatgtgtattttactcattgtgatttagttgatgatgtgtttacagttaagtgtttggagacgggtgagactgttgccataaagaaggttcttcaggataagcgttacaagaaccatgggattgtgattagttacttcattgcaaaaaaaattaggaacagtattaatgtgtgtacccattgcttgaagcttcatatcgatggagctcgcatcttccatgcgtctgcagcacttggagttcttgtagatagactcgtgaaagctgctgattcagttttggtatgcctatcgaaagggttaggcgcacccgtcggatctgtgattgttggttcaaaggcatccattgacaaggccagaattctccggaagaccctaggcggtggaatgagacacgtgggagttctttgtgctgctgctcatgttgccgttcgtgacactgtgggaaagcttgcggatgaccacaaaaaggctaaagctttggcagtttgggtattgaagcttttatgtcttgttgggttcattttcttagagggactgaagaaaatcgagcagattacagtggactcagcttcggtcgagaccaatatgttcaagctctacaaggtgaggtctgttctgtttggccagaaaggcatcccatacctgaatacctacgatggccgcaccatgcgctaccccgaccctctcatcaaggccaacgacaccatcaagatcgatctagagaccaacaagatcatggacttcatcaagttgtatttgccctttcatggacttcatcaagttatatacttagttaggctcaatgttagcacaaacagttga

SEQ ID NO: 35339 - DNA, 1200 bp, Zea mays
  Peptide Sequence Number=SeqID_77118
atgcagaccggctccgagcagaagaagccaaaccgccgcgtgtggggcacgcaaccgcccagcggttacaagcgatcctccacctttgcccagaccaacgggcgagagaggcgggcagccatgcaggcggcatgcaaccacgccaagcacaagacccagcagcgccagcctgacgcgacggtcaatgcggccgaaagtgggccggcagtaatgacggtggcagacgcgcgggagcagcgggcacgtcgacaaccaagctcacgtcccatccgggcgcagcgagagagctccctctcacggtgtgaagacaacgcgcttgtgatccgttcctcgaacggctcgcacacgcgcaacggctgccccgccaaccactcgccctgttgcattaactccgcggctggacaggtggcgtatctggcagcagcaacgggcgacgcttcgccctcgccgaaacaaccgcaccaaaaaaggctccgagcctccttactgatcaagggttcgaaggctggcccccgaagggttcaacagccgcctcagatcgcgctggcccccgaagggttcacagtcgcctcagacgccgagcgagggatgaccagggctcaccggagacaccatgttcggtgcccatcgaggaggctcgggggctgctctcgcaaacccggctccggccgaaccgttgacagcgtcaacataccagcccgagaacttgggcctcgaccgtacacccgggctacggccagctcgcatgagggaacaaccagactagccgaagcattacgcaaggcattaagacctcgaaggagtgaaatcactcctccgaggcctcgggggctacacccggcgggtgcgctcgcgcgcacccaccggaaccaaatgcaaccgagaaaggctggtccccttgcaaaaaagtgcgacgaaagcctccaagcgagtgctgacactcccttcgaggctcgggggctactgtcggggaccataattaggggtaccctcaagacgcctaattctcagctgggctcggactcgggcaaagccccggaagacggcgaactccgctccgcccgacccagggctcggactcgggctaagccccggaagacggcgaactccgctccgcccgacccagggctcggactcgggctaagccccggaagacggcgaactccgctccgcccgacccaaggctcggactcgggctaa

SEQ ID NO: 35340 - DNA, 1376 bp, Zea mays
  Peptide Sequence Number=SeqID_77119
atgcagaccggctccgagcagaagaagccaaaccgccgcgtgtggggcacgcaaccgcccagcggttacaagcgatcctccacctttgcccagaccaacgggcgagagaggcgggcagccatgcaggcggcatgcaaccacgccaagcacaagacccagcagcgccagcctgacgcgacggtcaatgcggccgaaagtgggccggcagtaatgacggtggcagacgcgcgggagcagcgggcacgtcgacaaccaagctcacgtcccatccgggcgcagcgagagagctccctctcacggtgtgaagacaacgcgcttgtgatccgttcctcgaacggctcgcacacgcgcaacggctgccccgccaaccactcgccctgttgcattaactccgcggctggacaggtggcgtatctggcagcagcaacgggcgacgcttcgccctcgccgaaacaaccgcaccaaaaaaggctccgagcctccttactgatcaagggttcgaaggctggcccccgaagggttcaacagccgcctcagatcgcgctggcccccgaagggttcacagtcgcctcagacgccgagcgagggatgaccagggctcaccggagacaccatgttcggtgcccatcgaggaggctcgggggctgctctcgcaaacccggctccggccgaaccgttgacagcgtcaacataccagcccgagaacttgggcctcgaccgtacacccgggctacggccagctcgcatgagggaacaaccagactagccgaagcattacgcaaggcattaagacctcgaaggagtgaaatcactcctccgaggcctcgggggctacacccggcgggtgcgctcgcgcgcacccaccggaaccaaatgcaaccgagaaaggctggtccccttgcaaaaaagtgcgacgaaagcctccaagcgagtgctgacactcccttcgaggctcgggggctactgtcggggaccataattaggggtaccctcaagacgcctaattctcagctggtaacccccatcagcataaagctgcagaggcctgatgggggctcggactcggcctctgctgacgaactccgcctcgcccgacccaggggctcggactcggcctctgctgacgaactccgcctcgcccgacccagaggctcggactcggcctctgctgacgaactccgcctcgcccgacccgggggctcggactcggcctctgctgacgacctccgcctcgcccgacccaggggctcggactcggcttctgctgacgacctccgcctcgcccgacccaggggctcggactcggcctcagccatggaagacagactcgaccccggcttcggaggagcctccacgtcgcccaacctagggcacag

SEQ ID NO: 35341 - DNA, 804 bp, Zea mays
  Peptide Sequence Number=SeqID_77120
atggcggcgatgcccacacatgcccccctccgtcccctcgacgccgcgtcctcccatccccagtccccacctcctctgcgcttccacccctcgccagtcgcttcctcgtcacgagtcgttgtctccccttggctggccgggacgcggaaacggccgacgcaagcaaaccctagccgtcgagctcgtagggagtcatggagggatgaagagtctgttcaagaggagcagatcaggaaggccaagcccatgagcctcaactgctttgccgccaaccgcgacgagacccacactgcggagtccctctcctgtcgatattgggaagcatcaagcaggagctcaagcgttattactaattatgttggttatctcaacaaaggtcagataccaccaaagcacatctcgcttgtcaatttaactgttattctgaacatagaggggagcaaattcacgagacagaggctgctggtacacaccttctcattaatggtagaacatgcttactacagtttttggcttactacaggtgcccaaaagctgaacagagctgagcttgaagtcgcttgtgaagattttagcaacatcaacacttttcctacctataccgtgttcaagggcatattatcaggcggggtcgagatcggcattgtctccactgtcatatcgtcaagcaaagactggtccaggagcgcgaaacatgcttcaagaaaagataggggttacactgttcagtttgattacttcgattttgggactgcttgtgcgtcttctgtagtgtttattcttgttcgattacttacattctag

SEQ ID NO: 35342 - DNA, 3285 bp, Zea mays
  Peptide Sequence Number=SeqID_77121
ccgccgcctaccgtgctctcgatggtcaccaacgccctcacgcacgagggagaataccggatccgtagcactatggcgacgggtgcccaaaagctgaacagagctgagcttgaagtcgcctgtgaagattttagcaacatcaacacttttcctacatgtaccgtgttcaagggcatattatcaggcggggtcgagatcagcattgtctccactgtcatatcgtcgagcaaagactggtccaggagcgcagaaacatgcttcaagaaaaagacctgtacctatttgtgtaatgcatttgcatgtatatgtgcagcttatgtccataattcttcaagtctgcatatgactgcatcattcttcagccttctagactccttccacttctgccccctcggatacaaggacttcccagacttaggtaacacaacctcttctcttctttcaacatgttgtcatgttgtgcttgagttatggtacaactggagttgggtgaaagcgacatggagccttgaagtgatcttccctgatggcatcttcccggctgatggaaagtcagagatagaggggaaaaacaaatactttgagttgttccagttcaataagccgcacgccgctcccccagcagcgtcgacttccatccatgactgcccgcgcgcccggctccccctttccttgcgcgacgcgagatggatcggcgagattgcccacaaatcgcatccatggcagcttagttctcccaaatccgccgcgaatcgcatctgccaacgaggattggcgccgccatgtcgtagatctcccacgtcggtggccgactttgtcatgcctttcttcctcttcatcgtcggagtcgccttggcgctcgcgtacaagagagtcccggacaagttggacgcctcgagaaaggcattgctccgtgcgctgacgctgttttgtcttggtcttggtcttgttctacaaggtggattctttcatggtgttcgtagtctaagttttggggttgaccttcgagaaatacggctgatgggtgtactgcagagaattgcaatagcttatctattgaccgccctctgtgagatttggatcagaggagacgaagatgtagactatggatacgatttgctcaagcgatactgctaccagctagcgcaggtggtgggatggccacccgtgcagaactaccgaaagaacaccctcgtcgcgagctcctccaggagaaaggcaccggcggaggacgccgcgtccacagctcagaccatgtacgtgaaggtcagcatggacgacgcgccctacctcaagatggtggacatcaagatgtactccagctacgaggacctctccatggcgcttgagaagatgttcagctgcttcatcactggcgaaacatatcagaaaaccgatatagatttcttggaatcggaagcaagcgctttcagggatgatggttcaacagcttcaactgcaattttggtgggtgaccgtctgtatgttgcaaatgttggtgattctcgtgctgttattccaaaagctggcaaagctatggcactttcagaagatcacaaacctaataggattgatgagcggaagagaattgaaaatgcttgtgtattgtcatttgggctggctggtttcaacgtcggtttgtatagaccgctgacatggcctggcctgcacatagaccacgctggcttcaatgtgatctctgttcggccgatcgatggtcaccgacgactgggcgaccgccggcgccgacctacgccaggtgcccaagccttcgacgggaccatcgccgacgacgagcactcacgagctggatctgatctaattacagaaatgtcttcagtcgggagcggcagtggcaccagggctgcgaatggtgcagctgccatcagtgctgccgcgacggcagcaggctcggccgacgccagattccacccccaactactacagcagcaggacaggaagggcgggaaaagaattgttcctgcagcacgtacttctgatgggaatggatcaaatgctcgcggaaatggtctccagtctggtgccaattcaaaccaaaatatgcctatgaatttatctcttctggctccaccatcatcaccggcatccttctcaaactctgcacttccttcgactgctcaatcgccaaattgctttctgtctgtatccgcaaactctcctggtggcccaacgtctaatatgttcgccgttgggccatatgctaatgaacctcaacttgtctcaccacctgtcttctcaacttacacaactgagccatccacagcaccgttgaccccaccacctgaactagcccatgcaactacaccttcttctccagatgttccatatgctagatttctttcttcttctatggatatcaaaactgctagcaaggagcataacatgcctttcttatcaacaacctattctggtggttcaggactccaagcatcctacccactttaccctgaaagcccttgtagcagcctcatctcaccggcttcagtaactccgaggactggtctatcctcacctatacctgagcaagaggttcctcctgcccattggaagacctctaggtccgcgtgcgacacaccatatttcagggcttcgcccattcctgagcaagaaaccactgcacaatggaagacctctagatctgcttgtgacacaccgtatgccaggacctcaccaaccaatatttttggtctggattcaaataccccgagaaactatatgctagatagcaatttctttcggccagcggcatctgctcagttctacctggaccaggctcagcaggcatttccacataatggcgggagggttagcgtatccagggagaagcaagatgccgatgaaatcgaagcttaccgagcttcatttgggtttagtgccgatgaaattgtccaatctcaatcttatgttgggataccagatgcggttgacgagtcattcagtatatcaccatttggaaacaatgctcctgctactgagatctgcccattcagtgatctgcctagtgaggttcagaaggcggataaatcatgcacctacgttaaagatggcacgagcccaaagaaatcagcaaaccaactctcgattgattctccaaataaagttctgcgcttggacgtgttcaaagtaacaaaagggggtcatctgtctgaggacgagggtattgcgagagatgacgcagagattgagtacagaaggacaaggagtctgagggatgccaacggtgttttatcgcggcgtagcgcattggcaagacaactgcactaa

SEQ ID NO: 35343 - DNA, 108 bp, Zea mays
  Peptide Sequence Number=SeqID_77122
atggaactaaagtcatttataatgttgcttcatggggcaccactgctgttgggtagcataaagtttgagaccatttgtttattctatgctgatgagttcgactgctaa

SEQ ID NO: 35344 - DNA, 561 bp, Zea mays
  Peptide Sequence Number=SeqID_77123
atgggatgctccaaagcaatcatcccctttctgcgaaagcgtcttggatactcagctcataagctgctcagtgctgatttccctagcgaagatgccggaaaaagatggcagagtaaactgataggtgataagcctgaaaaggattttgaggtcgaattcgaggagtttggggtgaaggccgacgactcggagctcgactccgcagatgaggcaatgaccttcgccgccccaggagcgcactcgccagaggatacaactggctcttcccaatctccaaagctatccttgtttgtcaccccattcttggctacaatagcagttcctcttgaagaaaaaacttcaacgcgctacatggccctcgtggatctcgaggacctgcccctgatcaacttcaaaaagcgcttaggaagacgttttcagctgaaaagaaaagtaaaatccggaaggcatgggatggaactaaagtcatttataatgttgcttcatggggtgccactgctgttgggcagcataaagcttgagaccatttgtttagtctatgctgatgagttcgactgctaa

SEQ ID NO: 35345 - DNA, 627 bp, Zea mays
  Peptide Sequence Number=SeqID_77124
atgtcacgacccacgaaccgtggtggtgggtgcgtggttactgcctgccgagtgccgaatgacgatccggcccgatcgttacacacgagcacgacacgcgacgtgaaaacttatcggaccctccgcactccactgccggcgaacgcaacgtcggttgcgttcagggcttccaacccacatacgcagcgcgggccgtgctgcccgtgcaccgacgggtccaccaccggcagcagcatccaggggcagactgactggcagaggcacctagggatggcagcgggtcgggttgtgttcgggtctgataatacccgacccgatatcatacccgacccttatacaaatatccatacccaccaagtcaatcgggtacaaaattggacccgtacccgtacctaccgggtatccgtcgggtatcgggtatccggtggatatggtactgtaaaatataaatctgcatgcaaatcgcagcttgggacggtcgctggtcgcagccgcgcaggcgtagctcgaccgctcggggcagcgtcgcagcggggcagcgggctgaagcctgaagactggccgattgccatccctagaggcaccaggcaggcaggaccagctgccgttactgacccgtggtcgtag

SEQ ID NO: 35346 - DNA, 717 bp, Zea mays
  Peptide Sequence Number=SeqID_77125
atggcgcaccggacagtccggtgcacaccggacatgtccggtgcccctgccacgtcatcagtgccgttggaatctgaccgttggagttctgacttgtgggccacccttgatgtccggtggcgcaccggacagctcctgttcattgtccggtgcgccagtatgggcaaacctgacgtctgcgcgcgctgcggcgcatttaatgcctctgcagtgcgagagcccctggaaattcccgaaggtggcgagttcgagctggagtcccctggtgcaccggacactgtccggtggtgcaccggacactgtccggtggcacaccggacagtccggtgtagctcgaccgctcgtcgcagcttggggacggtcgctggtcgcagccgcgcaggcgtagctcgaccgctcggggcagcgtcgcagcggggcagcgggctgaagcctggggattggccgactggtggccgtcctgggcagcgggctgctgcctgctgggcgagggcgcggggctggggcctggggcctggccgccgcctgggagcctgggcgggggcgcgcggctgggggcctgggattgccgcagtgccgcgtgtcggcgtggccgcgtggggcgctgggtcctggcctccagggaaggctgggacgactgggagtggcggctggggtagtggggtgggcggccgggacagctgggaagggaagggagtagggaatttagggagttag

SEQ ID NO: 35347 - DNA, 315 bp, Zea mays
  Peptide Sequence Number=SeqID_77126
atggaggacgatctcttgccgctcccagatcccatcgtggtggccttgctgctcctagaccccatcgcgcgcgagggaggtgcggtgcagatgggtgatcccattgcggggctcggagtagggttgcgcaagaggaagaagatgtttaccagaatgacgttcgggcaatcacgtagacgctcccccaaaaacctaattgctgatcccccgtgcaaggtctcgaacgacaagggcttcggaggcacctgccctctcgcttctctgtgcgcgcagagttacgagatggaaatactcactcttgcggctagacagtga

SEQ ID NO: 35348 - DNA, 312 bp, Zea mays
  Peptide Sequence Number=SeqID_77127
atgtcgatcccccgtgcaaggtctcgaacggcaagggcttcggaggcacctgccctctcgcttctctgtgcgcgcagagtcatgagatgggaatactctcacttgcggctgggttgtgactctgaaaatagttctgttctcatgtaccaagtgtcaggggctctcctctacttaacctctcgtagagggaagctgaaggagaagggtcacatgctgcacgccaagagacgggcagctgaaggacaagagtctcgcatgcggcacgccaaaggacgagcaagagctgaaactcccgcggttagtgagtgctaa

SEQ ID NO: 35349 - DNA, 756 bp, Zea mays
  Peptide Sequence Number=SeqID_77128
atggcgaacatttcgtcgcccgtgacgaagctgctgaggctggccaagtacagggttgtcggacggagggaggttctggagtccggcgacatggcagtgctgttgcggaatgcgaaggccggggacaaggtgtcggctcgagcgctgctgcacctcatcctcgacggcgacgaaggggacgcctccaagaaagatgatatccagatgggcaagcgtgaggagactcgtgatgttgctagagtactttctggctataatgacatcattatggctagggtctttgctcaccaagatattttgtacttggcaaaatatgcatctctacctgtcataaatggtctcactgactataaccatccatgccagataatggctgatgcacttactatgcttgagcagattggtcgtattgaaaacaccaaggttgtctatgttggagatgggaacaacattgtgcactcatggctgctattggctgatgtgcttccttttcactttgtatgtgcttgtcccaagggatttgagcctgatgcacacacagtggagatggccaggggtgctggaatcagtaagattgaaataacaaacagtcccagggaagcagttaagggagcagacgttgtgtacacagatgtttgggccagtatgggacaaaaggaagaaattgattatagaaatcagaagtcccaggggattcacgagagaggagtggagatgactgatggcgccattgaggctcccaactcatggaaataa

SEQ ID NO: 35350 - DNA, 735 bp, Zea mays
  Peptide Sequence Number=SeqID_77129
atggcgaacatttcgtcgcccgtgacgaagctgctgaggctggccaagtacagggttgtcggacggagggaggttctggagtccggcgacatggcagtgctgttgcggaatgcgaaggccggggacaaggtgtcggctcgagcgctgctgcacctcatcctcgacggcgacgaaggggacgcctccaagaaagatgatatccagatgggcaagcgtgaggagactcgtgatgttgctagagtactttctggctataatgacatcattatggctagggtctttgctcaccaagatattttgtacttggcaaaatatgcatctctacctgtcataaatggtctcactgactataaccatccatgccagataatggctgatgcacttactatgcttgagcagattggtcgtattgaaaacaccaaggttgtctatgttggagatgggaacaacattgtgcactcatggctgctattggctgatgtgcttccttttcactttgtatgtgcttgtcccaagggatttgagcctgatgcacacacagtggagatggccaggggtgctggaatcagtaagattgaaataacaaacagtcccagggaagcagttaagggagcagacgttgtgtacacagatgtttgggccagtatgggacaaaaggaagaaattgattatagaaatcagaagtcccagggattcacggtggatgaaaccctgatggagattgctggcccatag

SEQ ID NO: 35351 - DNA, 1053 bp, Zea mays
  Peptide Sequence Number=SeqID_77130
atggtgggatcttactgcaaagctccctgtgatgctcttttcatccttgggaacaaaaacaatcctaaggatggaagtgaggaagcgacaaagttttgttgcttttgctccaaggtgatgaatcaacaagaagctcctacaggagttggagagtttctacgagattttggtgttccagtggtcctgtggcgactacttcaagaggtcggatataccgaagcacccaagtaccagtggtcacgcactgttcttagaggacaaccatggtatgaggtagtagtgcgtattccagaacgtgctagaaaaccatcttggccgtattggatgttccatgccgaaggaatgactccttgggagggtgctcaggtagctgccttagaggtactaacaaccatttgttaccagaaaagggaagaaatacaagccacatctatgaggttgttccctgcagttgccttaagtgacccgttggtgtatcatcaccaggcccgattaatggaaagcattcctattgggcaggattctgttgaatcggcatctgctcgagttttgatggccgtgctagaattgcaacttactcgggggcacagtcgtcaaaagtggcagcagttgtacactgggagctatgcagcatttaagatgatggaaaaggccaagaacagtgcttgtactcaagcacaagaacgacttgaggaaacaaaggttcaagcggaacatgttattggactagagcatcaggtgacagaacttcagatgcaacaccaagctgatcagaatcgcattaaggagcttgagcatcagctaactaatgctcattctaaattaaaaattttgagtaagcaacaagaagaaatttgtctgtatgttgttgctgttagagaagaccttaaggaaaccatgagcttcataagccatcaggatcaagcgatcaaagaattgaatcgtgctcatcccatggagtttcaagtagcacaacggcttgtcaaccatctgcagcaagcagtgcataggctcaatgttgccttttatcctactcctgcaccggcggactaa

SEQ ID NO: 35352 - DNA, 144 bp, Zea mays
  Peptide Sequence Number=SeqID_77131
atggtgggatcttactgcaaagctccctatgatgctcttttcatccttgggaacagaaacaatcctaaggatggaagtgaggaagcgacaaatttttgttgcttttgctccaaggtggtaccaagtgaggaaaaacaagactga

SEQ ID NO: 35353 - DNA, 144 bp, Zea mays
  Peptide Sequence Number=SeqID_77132
atggtgggatcttactgcaaagctccctgtgatgctcttttcatccttgggaacagaaacaatcctaaggatggaagtgaggaagcgacaaagttttgttgcttttgctccaaggtggtatctaatgaagaaaaacaagactga

SEQ ID NO: 35354 - DNA, 144 bp, Zea mays
  Peptide Sequence Number=SeqID_77133
atggtgggatcttactgcaaagctccctgtgatgctcttttcatccttgggaacagaaacaatcctaaggatggaagtgaggaagcgacaaagttttgttgcttttgctccaaggtggtatctaatgaagaaaaacaaggatga

SEQ ID NO: 35355 - DNA, 180 bp, Zea mays
  Peptide Sequence Number=SeqID_77134
atggtgggatcttactgcaaagctccctgtgatgctcttttcatccttgggaacaaaaacaatcctaaggatggaactaacgagccggacggtccgcacgtgcgcaggggtggcggagttcaccggcagcgcctggatctcactcccgagaaggaccccgtcggggaggagaggtcctag

SEQ ID NO: 35356 - DNA, 1167 bp, Zea mays
  Peptide Sequence Number=SeqID_77135
atggaaaacggagaagagagtgaagtgactgaagggaagacacaaccacctttggaatctcaggcagagacttggctctacttcgacatctgcgagtccgagcctgactcacctactaacaaaggcaagccccgaaaggatggcttctacctgcaagaatattttcatttggagcaatggtgggatcttactgcaaagctccctgtgatgctcttttcatcctcgggaacagaaacaatcctaaggatggaacatacccttgagagtcctttccttagtcgggtgaggaagcgacaaagttttgttgcttttgctccaaggtggtatctaatgaagaaaaacaagaatgaagatacgggaggacttggtcctccacataggatcgttttgtttgataattacttgggaggagtttttgcctcccttgatatgtgtactcagcactcgtttatagctctgatgaatcaacaagaagctcctacaggagttggagagtttctacaagattttggtgttccagtggtcctgtggcgactacttcaagaggtcggatataccgaagcacccaagtaccagtggtcacgcactgttcttagaggacaaccatggtatgaggtagtagtgcgtattacagaacgtgctagaaaaccatcttggccgtattggatgttccatgccgaaggaatgactccttgggagggtgctcaggtagctgccttagaggtactaacaaccatttgttaccagaaaagggaagaaatacaagccacatctatgaggttgttccctgcagttgccttaagtgacccgttggtgtatcatcaccaggcccgattaatggaaagcattcctattgggcaggattctgttgaatcggcatctgctcgagttttgatggtcgtgctagaattgcaacttactcgggggcacagtcgtcaaaagtggcagcagttgtacactgggagctatgcagcatttaagatgatggaaaaggccaagaacagtgcttgtactcaagcacaagaacgacttgaggaaacaaaggttcaagcggaacaggttattggactagagcatcaggtgatagaacttcagatacaacaccaagctgatcagaatcgcattaaggagcttgagcatcagctaactaatgctcattctaaataa

SEQ ID NO: 35357 - DNA, 393 bp, Zea mays
  Peptide Sequence Number=SeqID_77136
atgaggctgcgtcctcggagcgcggaccctacggaagatgaaaatgagacgcgtcgtaggataaatcacaccggcgcggcggaggttcgccgtacgtaccacgatgcgtggaggagacggaacgccggcggcgcgatgggttcgcggcggcggcgcgatggcttggcggctgcgggggagcgtcgcgtgggctacaaccctagggaagtgggcgcggcttcaaaccgaagccaagtgacgggcgcttcaggcgttaagtgcgcggacggcttccagcggaagcgcgtggtggagaagcggcgcgagaagcggcgcgtttggctccagcttctgcttctggcggccagaagccgccgggaagctgaaccaaacagccgcatgataagatgttga

SEQ ID NO: 35358 - DNA, 571 bp, Zea mays
  Peptide Sequence Number=SeqID_77137
ccgcgcccacttccctagggttgtagcccacgcgacgctcccccgcagccgccaagccatcgcgccgccgccgcgaacccatcgcgccgccggcgttccgtctcctccccgcatcgtgggttcgcgctccgagggacgcagcctcatccccgtcgcgaacgaagctctccccccgtcgtcgtcgttgcagcgcaaccaagctgactccatagccgacaaggcaattggaaggatgcaagagatttcggacaagatattttccgtagcgagggaaacaatccgtcctgggcgcggattgacctcatttgatgctaccaaactacgtgtagctttggaggagatagcttgcatgctggagcaagactctctggtgttgcaagagcatttggacatcgtgaacaactttaacatcccggttgacagcagctatgaaccttctaccttgtcgtcaccacccccctctgacgacgacctgactccacattgggactttgctgagcatttccaaaacttctggggagttgaatatgactccgatcagatgccttcgtttagtgacaacgatgtttaa

SEQ ID NO: 35359 - DNA, 423 bp, Zea mays
  Peptide Sequence Number=SeqID_77138
atgagcaatgttcggcgtatgatttgcaaaattctgtgctcgtgcattactgtggcaactaatgtcgtcttctactcctatgcgaaggtcgacctctacctcgtctgcaagcgtgtcgctgtcggcgatgtctatgctctccgcgtcccgaccactttgcagttcgccaacatctttatcaagtggcttccatcacagttttcttatgtaggttctgtcggtaccttaaaacaggggtacctcttgttacaaggtgaaggcgctgcgccggtggagaagtctctggttgtgcggagaacagttctccacgcgccacatcagccgccctggggtcaccacgtggtcaaggaaaaggacgtgctccaggatacacgcagtgggtccggacctactgcaaggaaagcaccggacccccgtacgtga

SEQ ID NO: 35360 - DNA, 360 bp, Zea mays
  Peptide Sequence Number=SeqID_77139
atggagtcgaacaccgagcggcgcgtgcacgagtcgcccggcggctgcaggcagaagacggacttctggaacagccgcatgatgctggcgggggtgtggcaatgtgtgctgctgagggctcgggtcttcacgctgaagggagtcgtagcaccctcggcatcgacgacgtctccagcaaagcccgacccagcctcgggcggcgacgcggcccagggactcctccgggaatccggcccgagcaggcggctcgaccggttacccctggggcctcggtcaaccggcttccaagggcgccagcccgacccgaggcctcgactgatcgacttcggcgtcggctccgctgacggacaacacgactag

SEQ ID NO: 35361 - DNA, 3506 bp, Zea mays
  Peptide Sequence Number=SeqID_77140
tcatggtgagcaaactgctcgcggatgcactgccttttttcgacgacggtcgcatcgatgaactcgatgtgtgggacgaggacgccacgagcgtcgacgcagatgactctgtctccgcctccatgggagatcgggaactgcgcttcgacgagttcaccttcaacgacaaatctgcgcagtatcacctctcgtccacccacgaggccctcttctccgacggcgccaaccccttcttcgacgaggcgtgctatgcactcacagtgttcgatcaaatgcccatcttttgcttcgatggagagcctattttcgacgaggtgcccaacgactccatcaccgagtacgaattgtcgttcatggaggttccccacttcgcgttacgctgcgagaagattcagcagcacgtcgacgttgctgctctccggggcgaggagcacctagtctccctcgagacaatgaagtcgaaggtcgaggcggggaacaccatggcggcgatggccgcggccgcctcgccactcccgtccctactcgctgtggggaatctgacgccgtcctccatcgcgcaaccgcatccgcaagctggggcggtggggtcgtccgagtcggagcttgcggcgccttcctccgtccacgacgactctgtcgcgctgatcgccgtctccggcagatgcgactacgcacgcgccaacgagatgaccagcgcccagatcgacgccatggcacaggacgagacagacgagattgccaacaccgtggagcagctgacgggcctgggcgtggagaaggtggtggcaactgcgctacccccgattggctgcacgccatggctatcgaggtccaacaactacggctcctgcagcaccctcgacaccctgtttcaggtggttgccgtgtacaaatttagggacccaaagacctccgaccaggagatgctcgagagcatctgcggcgtgctcatgcccttgaagctccaagctaaggtatccaggcccatggacatcatcatcaattcactctacaacaacaaggatatcttcgtgtgggagtccatatctaatgtttctgatgcgttggagaggattaggatcctttcccttactgataaggaggttctggttgaaggggacactgagaaacttgagattcagttggacaaagagaagaagatgctctccatgcaggataagagtattggtatgaccataattgctaatggcgttcaagtcagacctctgccatggccatctttctactattatgcagcttgggtgaggtggatgaaatcactggtcatggcgctctgctgggacttgtttggcgccggaacagagaccacattggtcacaactgaatgggccccgtcgcttctgctgaaccacccggaggccctgaagaaggcacaggcagagctcgacgcgttggtgggcagctcacatctgatcaccaccgatgacatgtgctacctcggctacctgcactgcatcatcaacgagaccctgcacatgtactcggccgccatgctgctcctgccgcacgagtcgatggtggactgcaaggtcgacggctacgacggtaccctctccaaggacgatggcctggtcgatggactcagaaaatgtgagcaatggaagtggcaggacatatttgcatcgaaagaaacaaaaacaagttcatggttccacgaattcattgggcgagcaaagaaaccagaaatgggatgccctccatttggctgtggttgtggttgggatgtcgtgccgtacaagcaaccatggccaccacccatgcaatttatgctacttggtgatgccaacacgatcgtacaactggtgaggcatattcttcgtttcccgccgtccaatccaatcttgcctaaactttcttcctcgtggagtttttgctgcttcacgctggccaaatctgcgcgcaaagccggcggcggtgctcggtcgcgtcgggccgtcggggtcgaggcggccgcggcgaaggtgctgccgcggctgcggatcctcgccgtcctcgccgtggtagcgtggaccttcttcctctactacgtgcatttcaccgtgatcagcagcagcacggtggaggtgggcaacggggacgaagacggcggtgcggccgacccgtgccgggggcggtacgtctacatgcacgacctgccgccccgtttcaacgccgacatcgtccgcgactgccgcaagaccgaggaccactggggcgacatgtgcggcttcgtgagcaacgccggcctcgggcgccccctcgccgccgacgacgacggcgtcatcacgggcgaggccgggtggtacggcacgcaccagttcgcgctggacgccatcttccacaaccggatgaagcagtacgagtgcctgaccaaccactccgccgtggcgtccgccgtgttcgtgccgttctacgcgggcttcgacttcgcccgctaccactggggctacgacaacgccacccgggacgcggcgtcggcggacctgatggagtggctcatggcgcggccccagtggcggcgcaagtggggccacgaccacttcctcgtcgccgggaggacggggtgggacttccggaggagcagcaacgtgaacccggactggggcaccgacctgctcgacatgccggccggccggaacatgacggtgctggtgctggagtccacgctcaagtacaccagcgacttctccgtgccgtacccgacctacttccaccccaggtcggacgccgacgtgctccggtggcaggaccgggtgcgcgggcggcgccggacgtggctcatggcgttcgtgggcgcgccgcggccggacgtcccgatgagcatccggatccgggaccacgtcatcgcgcagtgcagggcgtcgagcgcctgcgccatgctggggtgcgcccgcaccctcggcagcacgcagtgccacacccccgccagcatcatgcggctgttccagaagtccgtcttctgcctgcagccgccgggcgactcgtgcacgcgccgctcggtgttcgactccatggtggcgggctgcatcccggtgttcttccacacggggtcggcgtacgagcagtacccgtggcatctctcccgggacgacggtcacctcaggtactcggtcttcatcccggacgccgacgtgaggcggcgcaacgtgagcgtcgaggccgtgctccgggcgatccctccgcccacggtggagcggatgcgccaggaggtgatcaggctcatcccgactttgttgtacgccgaccccaggtccaagctggagactctgaaggacgcggtcgacgtcgctattgacgggatactcgacacgatggcggggaccaaggatactccgagccttttcgccgccattttctcaagctcgaaggggccattgtgggcgcggatcaggaacgatgaggacgacgacagcggcgggcgggtcaccgaggaccctccggaccttttcgcctccacggagtccagattcagattccggccggtgcaagccgatcatccatag

SEQ ID NO: 35362 - DNA, 309 bp, Zea mays
  Peptide Sequence Number=SeqID_77141
gaaacgtgcagtacacagcaagaacaaattcaaacatttcagaagcagcttgcagttgcgactgagaagttgaagttattcaattatgttctgggctcccacttgccatctcatgcttttgcaaacacaaggttgcagcaaagcccttgtgacctcaacagtatttacagtcattttaagcttttgcagcggtactacacaagtcctaatggtgcatacagtacaggttttaaaccactttctcatcaggtgtcttacttagctgcagttcagttctttcctgaatggaatgtttggactcggttctag

SEQ ID NO: 35363 - DNA, 1284 bp, Zea mays
  Peptide Sequence Number=SeqID_77142
atggatatagtggtggaggaaggaaataccgatgttggcaatactgttgaaccatcgtatgaggttgtggctagaagtggttgttcagcacaattgtcaactaatgacactaatgaacatgaattggagagcgaggatagtaaggtcagtgttggtaatgctgcaaaacaatcacacgatgttgtgggagtaggcattgactgtattttcaatcatgtaaaagtgtcaactgaagccgatcttgggacacaaccggatgtgatacacctgacatctttggatgttccaaatgaatcaagtcaaataagttctgagcagaacaaacaagatgctttggacacacttattagaatatcacaacataagaaaccaaagaaattgaatgtagctcgagttgtctctgaagattataagtgcaccccagaagatgttcagcttattgaatacattaaaacattaccggggaaacaagttgtggtggacatcgacagcgcatggttaaatagaaatgatatggaatgtctttttcatggtgacatccaagtgtctggcgaagccctcagtgcatatatacactgtattaggaatgaagagcatttacttcatagagaaggtggaaagagcttcctaggcagcttcgttgccaggcaaggatgtcatccccaggtgcccaaaatcggatgcctggagacgcccacagtgcctgtcaaagctgcctgggagcaaagaaaacaggtcaatcaaggttgtttcgagatgcctgccaacattgattgttctgaagatttattccaaagccatgaagatctgcagaaccaatcaagaacttctaacttggacaatgaacattttccaagggatgcatcaaaccacgctaatgttgaagcaactggacctccatatgatctctcaaatggtcacactgtcatcataatagaagagatgggcaccagagcatatcaggagcaagaaacgtgcaatacacagcaagaacagattcaaacatttcagaagcagcttgcagttgcgactgagaagttgaagtcattggcaaagttcatgttcaaggcgactggaaatgctgtcaacttggtgcaaatagttgggatgaaggttccgcatgtgcagcaggccttcacctgggactacggcctcgcttgcgtgctcatggtgctcaggacgctagggattgattgctgcgatgacattgccgatctcgagaggctctgccgcaccacgaggttctctctaggactggaactttacaattttaagtacaattag

SEQ ID NO: 35364 - DNA, 402 bp, Zea mays
  Peptide Sequence Number=SeqID_77143
atggtcattggatcccgggtggatggctcggattcaaaatcgcccagagtgagtcgcggccgccagatccagatcggacgacccgaaatcgccgtccgcaaattactacggtctaacccatctccaccacacaaattacatctaacggctgtggcgcttcccccaattcccatcggtctacggtggcgccgccagaggatcacggcggaccaccgccggagacgaccggtctccagctacaaggcccggtacctcgcctaccattgtgcagaacgtcacccggatcaaggcgagcatcgtgaaggtcaactcaccagtcgagagggcaccgacgaggccggtcgacggtgcagtgccgcccgcagccttcggcgagggattcggagtcgcgtctacggttga

SEQ ID NO: 35365 - DNA, 237 bp, Zea mays
  Peptide Sequence Number=SeqID_77144
atggtcattggatcctggatggatggctcggattcaaaatcgcccagaaacgtcacccggatcaaggcaagcatcgtgaaggccaactcaccagtcgagagggcaccgacgcggccggtcgacggtgcagtgccgcccgcagccttcggcgaggaattcggagtcacggaagaagcacaggacctcgcccacggtctctggcgcgaggaccccacacggcagcggaagagaggatag

SEQ ID NO: 35366 - DNA, 1062 bp, Zea mays
  Peptide Sequence Number=SeqID_77145
atgggattagggagcagcaaggccaccgcgatgggatatgggaggaggcaagcggtcctcctccatcttcgacgacgagctcgtacgttccccttcatcccctccgtacccttcccaccaccatcacccgaccaagcgggcctggtgctccccatcacgggaggttctgctctgccacctcctccccatattcccggacatggaccccctcgacagcgtcggccccccggcgacatccccaacccatatgcaacctcgctcttccccccggcgcgatgggatctgggagcagcaaggacaccacaatgggatctgagagcgacaaaaggtcctcctccatctttagtgacgatctcgtaccttccccttcctcccctccgtccccttcccaccaccatcaccccgccaagcgggcccactgctgctcgtcccactggagggaggttctactctgccaactcctccccctcttcctggacatgccccaccatcgacggagtcaggtggcgactcacgctctggcggtacaggccaccatgcaatgctcttgtcaggaataactctttgatgttgttgttaggagtcgggacggacgtcatcagatttgatctctcacccaggtttttctttattctaaatttagtcaaaaaatgtgttgttataactggctgggagtcaagttctctttcgcactctgcaatgagaacaaccttccacaccttctattttctggaacaagagaacaaccttggacttgagtgccagggaaattgtgagacgcacggtgcagcagtgccaggaactaaggatgcaggcacaggaaaggcagggcaatccagtggcgatcgacaggaggagaagttacccaagtgtgagcaggtcgactatggaagtgaagttgaaggcttcgcagatgatgagaaccctggcaagagggctgctttagttactttggtggaaatgaatactgcagcgacgaggatgagagagttcaagtgctcaccattgtcaataaggatgagcctgcagatgacattgtcgaccgtattaatcctgggatag

SEQ ID NO: 35367 - DNA, 570 bp, Zea mays
  Peptide Sequence Number=SeqID_77146
atgggatctgagagcgacaaaaggtcctcctccatcttaagtgacgatctagctcttgtcaggaataactctttgatgttgttgttaggagtcgggacggacgtcatcagatttgatctctcacccaggtttttctttattctaaatttagtcaaaaaatgtgttgttataactggctgggagtcaagttctctttcgcactctgcaatgagaacaaccttccacaccttctattttctggaacaagagaacaaccttggacttgagtgccagggaaattgtgagacgcacggtgcagcagtgccaggaactaaggatgcaggcacaggaaaggcagggcaatccagtggcgatcgacaggaggagaagttacccaagtgtgagcaggtcgactatggaagtgaagttgaaggcttcgcagatgatgagaaccctggcaagagggctgctttagttactttggtggaaatgaatactgcagcgacgaggatgagagagttcaagtgctcaccattgtcaataaggatgagcctgcagatgacattgtcgaccgtattaatcctgggatag

SEQ ID NO: 35368 - DNA, 120 bp, Zea mays
  Peptide Sequence Number=SeqID_77147
atggcaaagctggacgaggagtctgaggagctgcagcagaagttcctggcaaaggacatcgacttcccacacttgcttcctatagggcttgccaaacactttgcacgatttgttggatga

SEQ ID NO: 35369 - DNA, 323 bp, Zea mays
  Peptide Sequence Number=SeqID_77148
aggtcacctcgtcgttggagctcctgacgggtcgtccatggccgtcggcggctagattttggctctgtgctgaatgggagttgagcgggatagaggagtcgggcagatctgttcggtgggggattgaagaaagaaagaacgaactgttgccgtctgtaaccattgacaaagcgtcgatggcaaagctggacgaggagtctgaggagctgcagcagaagttcctggcaaaggacatcgacttcccacacttggtacagaagtacaagaagctccgcacggcttatcacaagcaggcgttgctccatctcgccggccagacataa

SEQ ID NO: 35370 - DNA, 252 bp, Zea mays
  Peptide Sequence Number=SeqID_77149
atggggattggttgtctacgggataaaaatttgaataaggattatggtgtggtacccagattgccctcctcacgcgacctgagacgtggtctcccattccggttatggtgggtacaagtgtggtcactgcacgacggcagtcggggttctctagaggacatggttgctggagtgacttggccgtacatcttgccatcgggttggactgtcgagtgggaccctgcctcggctgaggaggagcatgaggagtga

SEQ ID NO: 35371 - DNA, 252 bp, Zea mays
  Peptide Sequence Number=SeqID_77150
atggggattggttgtctacgggataaaaatttgaataaggatcatggtgtggtacccagattgccctcctcacgcgacctgagacgtggtctcccattccggttatggtgggtacaagtgcggtcactgcacaacggcagtcggggttctctggaggacatggttgctggagtgacttggccgtccatcttgccaccgggttggactgtcgagtgggaccctgcctcggctgaggaggagcatgaggagtga

SEQ ID NO: 35372 - DNA, 252 bp, Zea mays
  Peptide Sequence Number=SeqID_77151
atggggattggttgtctacgggataaaaatttgaataaggattatggtgtggtacccagattaccctcctcacgcgacctgagacgtggtctcccattccggttatggtgggtacaagtgcggtcactgcacgacggcagtcggggttctctggaggacatggttgctggagtgacttggccgtccatcttgccaccgggttggactgtcgagtgggaccctgcctcggctgaggaggagcatgaggagtga

SEQ ID NO: 35373 - DNA, 828 bp, Zea mays
  Peptide Sequence Number=SeqID_77152
atggctcgccccagcatcgggcgactactctgggccagcgacagcacccgacccctccacgtggacggttccagggccgccacgtggccagagaagatgatatactccaaggtatcaacagtgagtccggaccctcatgggaaagtgccagacccctgcggtgaccagcctgttccacaggcggcgtgcctgtccattccattggcagacggtatcaagaagtgtgcaagcttcttaataatcctcataggagccccacacatgggaagcccacgtgagaacaagctcctgatcagagcaataatgaaagtgaagtggagagctaggaagaacaaaatagtaatgaaagccactcgcccaaggccaactccgggcgggagacacagttcagattcaatcgaggccaaccttggagggagacgtggttccaattcactcaaggccaacctctacgggagacaccattccgattcgctcgaggctaacctccgcgggagacacggttccgattcgctcgaggccaacctctgtaggagacacgattctgattcgcccgaggccaacctctatgggagatgtcgttccgattcgcccgagagcacctccgactcgcccaagcgcagtcacgattcgcccgagcgtagtcacgactcgcccaagtgcatctctgactcgcccgagcgtagtcacgattcgcccaagcgcatctctgacttgcccaagggcgtctcaggtgactgtctggtgaggcccagattggcccaaacttggccaaacttcttcactccaatttggctcgacttgagaggttccctagcacttagatga

SEQ ID NO: 35374 - DNA, 381 bp, Zea mays
  Peptide Sequence Number=SeqID_77153
atggctcgccccagcctcgggcgactactctgggccagcgacagcacccgacccctccacgtggacggttcaggggccgccacgtggccagagaagaagatatactccaaggtatcaacagcggagaccagtccgttccgcaggcggcgtgcctgtccattccattggcagacggtacacccatactgccgcgtgcactacgcccatcattactcgtacgttaccaaggaagcagccgccgcgtgtcaatactatgcggactgcggacatcgaggcgcacaggagattgcacaggcgttagttactcctataatatattccttccgttatgttcctggacccacatgtcgggctcagcatccttgtatgtgcctcccttga

SEQ ID NO: 35375 - DNA, 1233 bp, Zea mays
  Peptide Sequence Number=SeqID_77154
atggccaggatatcgagtcaaaggcctttgaaatatccaacttcagcaggatgtgaggctcttttgagtggtgtaatgatctggattcttagatgtttctcagatgagtgtgtttgctgggttttagcaggagctaaggagctggaagccttgattgctaatgatggtaaacatgtggaaattcaggattcagtgcctatttgcttagcaaaatgtggcatacatactgtgctatctgttattgcagaagttcctgatatgttacgccggtgtgttagccgtgatgaggctgcattagtagtagcgcaaaaggttttcaaaagtttgtacgataatgcatcaaatagtgcttatgtctcctggcttctagcaaccttaattgcaatacgagatgtctgcaagcttgttgtcaaagagttaacaagttgggtaatatattcagatgaagagaagaagtttaacattgaaatcatttttggccttattcattccaagttgctgaatcttggggagtacaacgttcatttgacaaagctaattgatgggggaagaaatatatttatccatagaccaggttcaacggtagggaacgtgggtttgcagcttgcatggggaccaggttcacctgaatcgttgcaacaattgattgggatcgcaaggaataatgtgagcacccctactggttttgttgttattgggaaggaagaaaaggttctagctgcccaggtaaacaaagaggaaagcattgctaatgaaactacactaattgatccaaatcaggtggcagtcctgttttctgagtggtgtcagatatgtagtcatgtaaatgctagtgatgcaatatacagtcgttttgtcacacagttggagcaggatagtctgttgaatggagatgatatctctgaacgcttcttccatattctcacggaacttgctgttacacactctctagtctccgagcaaattgttgctcctggtggatcatctcagcaatcaccacagcaaccccatatttcatatttttccattgattcatatgcaaagctcgtggttatggttctcaagtttttcagtgttgatttcgttgtgaccatgcgtcataactgtttaaggttgtcttcagtggaacgtgtaaaacatgacatttgcactgtagatgacactgttgacactctttgcagagtgaagtttgaaataagggatgagttaggggagctgctggggatagcctaa

SEQ ID NO: 35376 - DNA, 687 bp, Zea mays
  Peptide Sequence Number=SeqID_77155
atgttgttgatgcaatatcgaaaaccaggttcaacggtagggaacgtgggtttgcagcttgcatggggaccaggttcacctgaatcgttgcaacaattgattgggatcgcaaggaataatgtgagcacccctactggttttgttgttattgggaaggaagaaaaggttctagctgcccaggtaaacaaagaggaaagcattgctaatgaaactacactaattgatccaaatcaggtggcagtcctgttttctgagtggtgtcagatatgtagtcatgtaaatgctagtgatgcaatatacagtcgttttgtcacacagttggagcaggatagtctgttgaatggagatgatatctctgaacgcttcttccatattctcacggaacttgctgttacacactctctagtctccgagcaaattgttgctcctggtggatcatctcagcaatcaccacagcaaccccatatttcatatttttccattgattcatatgcaaagctcgtggttatggttctcaagtttttcagtgttgatttcgttgtgaccatgcgtcataactgtttaaggttgtcttcagtggaacgtgtaaaacatgacatttgcactgtagatgacactgttgacactctttgcagagtgaagtttgaaataagggatgagttaggggagctgctggggatagcctaa

SEQ ID NO: 35377 - DNA, 288 bp, Zea mays
  Peptide Sequence Number=SeqID_77156
gcggagatgctcgtcggcggcgaggaatccggcgttctcacggcgcgattgtccaagcgaccgatgtccggcgagggtgaatccgcctctccggtgaggcaatgcctcggctcaagcttggagaagcttcacggcttcacggggaagcggtccaggtgctggggtgaggcggggggagttgtcgcgtcgctaaggtggcagtgtcacaaggtcgagtcccgaggggctgatttagggattttgaaaaattcaaatggcaaaactttcttactatactttgttggttaa

SEQ ID NO: 35378 - DNA, 411 bp, Zea mays
  Peptide Sequence Number=SeqID_77157
atgactcagcggattgttctacccacgtgcggcgatgagcgaccgaaatccggcgagggtgaatccgcctctccggtgaggcaatgcctcggctcaagcttggagaagcttcacggcttcacggggaagcggtccaggggctgggggtcaacagaaggggctggccacaacggtcgtgctcgggcagagatggcgggcggtggtgcttgctttccacggcgaactccggtgatctctggctcgggcggggctctggctgagctatcaccgctgccggagccgtacaatcccctggccgatccggagatgaaggaagcattggacgttatgagccttgcaaattctattatcgacgaagttgtcgacaaattatcaaacgaagctgtggaaaagatccttagagaagagtag

SEQ ID NO: 35379 - DNA, 213 bp, Zea mays
  Peptide Sequence Number=SeqID_77158
atgcagcaaacacgacaaggggagggggctggtgttgccgacggtgggtgcgctgcaaaggggaagtggggcggtggtggtgcgcatggaggcgggcacgcatgcagggggcacggcttgttccaggcttcaagggtaagcttcacggtatcttcttggggctctagccaaagtgaagaaaaactccactacccaatacatgcagaggactag

SEQ ID NO: 35380 - DNA, 291 bp, Zea mays
  Peptide Sequence Number=SeqID_77159
atggagcaggtgacacgaggcaacaaacatgacaaggggaggggggacagtgttgttggcggtgatggcggcggcgggtgcgctgcaaaggggaagtggggcggtggtggtgcgcatggaggcgggaacgcgtgtggggggcacggcttattccaggcttcaagggtaagcttcccggtatcttctcggcgcggtggatccctcgagaccgcttacaaacttgagtcgggtcaccaacaagatcttcacggtgatcaccgagctcccaatgccaccaagccgtctaggtga

SEQ ID NO: 35381 - DNA, 711 bp, Zea mays
  Peptide Sequence Number=SeqID_77160
atggctcgattcgaccagctggcagcgcgtctggtgtctgatgcggctgggatttttctggggttgggttcttgcaggacggagtacgaccgcggggttaacaccttctcgccggaggggcggctgttccaggtcgagtacgccatcgaggccatcaagttgggatccactgcgatcgggttgaaaacaaaggatggtgttgtccttgctgttgagaaacgtgtgacctcgccactgctggaaccaagcagtgtggaaaaaatcatggaaattgatgagcacataggctgtgccatgagtgggcttattgctgatgctagaacactagtcgagcatgctcgtgttgaaactcagaatcataggttctcatacggggagccaatgaccgtagaatcttcaacacaagctatttgtgacttagctctgcgctttggcgaaggtgacgaagagtcaatgtcacggccatttggagtctctcttctaattgctggacatgatgagaatggacctagcctgtactacaccgacccatctggtactttttggcaatgcaacgcgaaggcaattggatctggctctgaaggagctgatagctccttgcaggagcagtacaacaaggtgaccccaaacaacgtcgatattgccaaggttgctcccaagtaccacctctacacccctgccgaggtcgaagccgtgatcgcgaggctgtga

SEQ ID NO: 35382 - DNA, 777 bp, Zea mays
  Peptide Sequence Number=SeqID_77161
atggctcgattcgaccagctggcagcgcgtctggtgtctgatgcggctgggatttttctggggttgggttcttgcaggacggagtacgaccgcggggttaacaccttctcgccggaggggcggctgttccaggtcgagtacgccatcgaggccatcaagttgggatccactgcgatcgggttgaaaacaaaggatggtgttgtccttgctgttgagaaacgtgtgacctcgccactgctggaaccaagcagtgtggaaaaaatcatggaaattgatgagcacataggctgtgccatgagtgggcttattgctgatgctagaacactagtcgagcatgctcgtgttgaaactcagaatcataggttctcatacggggagccaatgaccgtagaatcttcaacacaagctatttgtgacttagctctgcgctttggcgaaggtgacgaagagtcaatgtcacggccatttggagtctctcttctaattgctggacatgatgagaatggacctagcctgtactacaccgacccatctggtactttttggcaatgcaacgcgaaggcaattggatctggctctgaaggagctgatagctccttgcaggagcagtacaacaaggagctggcccttgaggaggcggagaccatagccctttctattctgaagcaggttatggaggagaaggtgaccccaaacaacgtcgatattgccaaggttgctcccaagtaccacctctacacccctgccgaggtcgaagccgtgatcgcgaggctgtga

SEQ ID NO: 35383 - DNA, 378 bp, Zea mays
  Peptide Sequence Number=SeqID_77162
atggcctcagctaatgttggagcttcactgtcgggcgtaggagaccattcatcaaccagcttcatagagggaggaggcctgaaaaggtccagttcaccaccaagtgcttctcccgctactccagaaggtccggcttccatcccgacaggatccgcagagatgggcttcgctccgataccagctgtgatagaacctcccaagtcattaggcccacctacagttgtccttgtccaatggacctcagacaactctgtaggtgcccctgatcacttgacaagttcgataactatattctttacctttcccaagagagttttacccatcacgcagacattacaatacatcggaggtacgaaaatgcggaagcggttacaataa

SEQ ID NO: 35384 - DNA, 378 bp, Zea mays
  Peptide Sequence Number=SeqID_77163
atggcctcagctaatgttggagcttcactgtcgggcgtaggagaccattcatcaaccagcttcatagagggaggaggcctgaaaaggtccagttcaccaccaagtgcttctcccgctactccagaaggtccggcttccatcccgacaggatccgcagagatgggcttcgctccgataccagctgtgatagaacctcccaagtcattaggcccacctacagttgtccttgtccaatggacctcagacaactctgcaggtgcccctgatcacttgacaagttcgatatctatattctttacctttcccaagagagttttacccatcacgcagacattacaatacatcggaggtacgaaaatgcggaagcggttacaataa

SEQ ID NO: 35385 - DNA, 273 bp, Zea mays
  Peptide Sequence Number=SeqID_77164
atggcctcagctaatgttggaggtactgggggtggattaggggttgcttccctcccacgtgagcttcttatcgcttttggtagcttcattgtcgggcgtaggagatcattcatcaaccagcttcatagagggaggaggcctgaaaaggtccagttcgccaccaagtgcttctcccgctactccacaaggtccagcttccatcccgacagggatccgcagatccccgattggatcattgctaccactgctactgtcttcatgatgtggggctag

SEQ ID NO: 35386 - DNA, 1437 bp, Zea mays
  Peptide Sequence Number=SeqID_77165
atgcgcctttgcagtcagcggggcaagaacaaccgcgggagagtaggaggcgttgccgccgctggcggttttcatcttctcccacatgttgtttgtgtcatcttccttccaagtgtcctctttgagaagcaagatgacacaaacattgaacttgcattgtattttatggaattgttgttttttgttcttttgaaggggccggatgcatctatttctgttctggtggattcaatctatgcttcacagaccgcaggagatggttactgtggcaatctgtctgactatgaggataattcctatggagggagaagcacagggaacaagaaaaagagaaaaagatatggaggccaagcacagggaagtagaggcccattagatggtagctgtgatgaacccatgcctctcccacatccaatggttggatttaacttgccagaccagtggtcaagacgagtggacagatcgttgcctgcacaagctattggtccgccgtacttctactacgagaacgttgctcttgctccaaaaggtgtctggactaccatatcaagattcttgtatgatattcaaccagagtttgtggactcaaagtacttctgtgctgctgccaggaaaaggggttacatacacaacctgccacttgagaacaggtcacctctcctccccatacccccaaagacgatatcggaagcatttcctcggaccaagaggtggtggccttcatgggacccaagacgacagttcaattgcctccagacttgcgtgtctagtgcaaaattgttagagaggattcgcgtagccctcacaaacagttcagacccacctcctccaagagttcagaagtatgtgttggaggagtgtaggaaatggaacctggcatgggttggcttaaacaaggttgctcctctagagcctgacgagatggagtttctactcggctttccgaaggatcacacgagaggtatcagcaggacagagaggtatcgatctctaggaaattcatttcaggtcgatactgttgcttaccatctctcagttctgaaggatctgttcccacaaggcatgaatgtgctgtctttattctctggtattggaggagcagaggtggctctccacaggcttggcatacagatgaacacggttatttcagtggagaagtccgaggtcaaccggacgattctgaagagttggtgggatcagacgcagacgggtactctgattgagatcactgatgtgcagacactgtcatctgagaggatcgaggcgtatattagaagaattgggggcttcgatcttgtgattggtggaagtccctgtaacaacctcactgggagcaaccgtcaccacagagatggtttggagggcgagcattctgcattgttccatcattattttaggatcttacacgccgtcaagtccatcatggagcgtttgtag

SEQ ID NO: 35387 - DNA, 2154 bp, Zea mays
  Peptide Sequence Number=SeqID_77166
atggggtttcctgaagacgaggctgcactggctattaccagatgcgggccggatgcatctatttctgttctggtggattcaatctatgcttcacagaccgcaggagatggttactgtggcaatctgtctgactatgaggataattcctatggagggagaagcacagggaacaagaaaaagagaaaaagatatggaggccaagcacagggaagtagaggcccattagatggtagctgtgatgaacccatgcctctcccacatccaatggttggatttaacttgccagaccagtggtcaagacgagtggacagatcgttgcctgcacaagctattggtccgccgtacttctactacgagaacgttgctcttgctccaaaaggtgtctggactaccatatcaagattcttgtatgatattcaaccagagtttgtggactcaaagtacttctgtgctgctgccaggaaaaggggttacatacacaacctgccacttgagaacaggtcacctctcctccccatacccccaaagacgatatcggaagcatttcctcggaccaagaggtggtggccttcatgggacccaagacgacagttcaattgcctccagacttgcgtgtctagtgcaaaattgttagagaggattcgcgtagccctcacaaacagttcagacccacctcctccaagagttcagaagtatgtgttggaggagtgtaggaaatggaacctggcatgggttggcttaaacaaggttgctcctctagagcctgacgagatggagtttctactcggctttccgaaggatcacacgagaggtatcagcaggacagagaggtatcgatctctaggaaattcatttcaggtcgatactgttgcttaccatctctcagttctgaaggatctgttcccacaaggcatgaatgtgctgtctttattctctggtattggaggagcagaggtggctctccacaggcttggcatacagatgaacacggttatttcagtggagaagtccgaggtcaaccggacgattctgaagagttggtgggatcagacgcagacgggtactctgattgagatcactgatgtgcagacactgtcatctgagaggatcgaggcgtatattagaagaattgggggcttcgatcttgtgattggtggaagtccctgtaacaacctcactgggagcaaccgtcaccacagagatggtttggagggcgagcattctgcattgttccatcattattttaggatcttacacgccgtcaagtccatcatggagcgctctggaatcatcgtcgggatgtctgtgccagcatcagcccaggtgcctcacaccatacgatctgctgggagctgctgcttcaggtcgtcgcatcaactatctgcgcagaatctgggccgacatcgcaggtggcgggggaccggaaagaagaagatcctttccacccgtggcgtgcttgagtccagaaacggcgcacatcctggtggccttatgaagagaaggaaggtcgtggagcacatcatcctgctcagagccaagcccaacatctcagacgctgaagagaaagacatgctggactacctatacacatcgcagtaccagatgcgagggatactcgcggtctcgctaggccgcatcgaggaccccaacagcgacaacttcacgcacgctgtgttcatgcgtttccagcagaagcaagacatcgcggagttccagagtaacgcgtactactccaaagttgtcgacgagcacggctcggtttctgtagatttcgagtccgaggtggaagacgacattatacctctctttcgcaggggagaggattttaactacggcgtcgagtttatgctgctggtgtctttcttgaagactgcgtctagagaggcaacggaggacgcattagcgtctcttgacaagttgatcagccaatgcagcgcttctattgtgcaggcaacatgtggctgctgtttggatcgtccggataacgggtacagtcatgctgcagtaatccgtttcccatcatctgatgagttgaagctgttcagggagagcgaggagtacaaggatatgtgggcgtccaagttccgcccgatcgtggagagatccctgcacctgcacttcaccgttgaccccgtggggaaccagctgatgtag

SEQ ID NO: 35388 - DNA, 2325 bp, Zea mays
  Peptide Sequence Number=SeqID_77167
atgacgggtggcaaattccttcaaaagtttcgactctacgaaaccagatcgaaattttatcttattggaagagacaagagcaggattcactggagggtgctaaaaattgatcggttggagtccactgagctgggtgtcgatgaggatccaactatttacacggaaagttttgtaaagtttcttggtccttattacatggttataataaccagtagaaggaaaatcggcacaatatgcggccatgaaatttattccgtcggcaagagtgaaatgattgcaatttcaagtgttacagtctggcccaacgtggcttattctagggacgagaacagatataagcgccttctttgctcagttgacctttcgaaggatttcttcttcagctactcttacaacatcatgcgcagccttcagaagaacataacccagaagaatactgggcaggctgtttatgaaccaatgtgtgtatggaatgaatttctgacacgagcaattcggaatcatctcaagaatacatgttggactgttgccttagtccatggattttttaaacagtcgaagctctccgtatctgggaaggatttttggttgacccttatagctaggcgctcacgacactttgcgggaaccagattcttgaaacgtggcgttaatgaaaagggcagggtagcgaatgatgttgagactgagcagattgtttttgaagacacatctgatggaatcccaactcagatggcttctgctgtacagcatagaggatcgatacctcttgtctggtttcaggaaacttcaagacttaatattagaccagatattatattgaaacctgatgtggactacaaggcgactcgccttcattttgagaaccttgcacttagatatgggaatccaacccgtgagaagaagccccgtgaatctctgctccgtgcagaatttgcaaaggctatccattacattaacaagagcctgcctgatgacaagcgtctaaaatttttacacatggatctgagtaagctttctcgaaggaaaggcaccaatgtgcttgcactgttgaccaaggtggcatcagatgtgttggatctaactgaattcctccactgtgaaataagtacatcaacaaaacctgatgacacctcaagtggagaaagaactgctgccaaaccacatgatgacagaagtagcagtgatcaaactgaatgtgcagctaagttggcacctcttttattacagaagggtgtcctcaggacaaattgcatagactgcttagatcgcacaaatgttgcacaatttgcatatggtttagctgctttagggcgtcaacttcatgcattggggcttactgaagcacagaaaattgaattgcacgatcctctggctgatgatctgatggacttctatgaatggatgggtgatacattagctattcagtatggtggttctgctgctcacaacaagatcttctgcgagcaaaggggtcaatggaaggcagcaacccaatctcaggagttccttcggaccattcaacgctactataataacgcctacactgatcacgacaagcaggatgctataaacatgttcttaggtcatttccaacctcagcaagggaaacctgcactgtggaagctggactcagatcagcattacaacattgggaggcaagggactttaaaagaagagattggaagatcgttcataaagaggtcactatcagatggtaacatactgttggagaacaacttgcctgtaactagctgtaacaatgaaacaaacaacacagaattgcttccaatgcaacagctggatgatattagagaacctaccgactctgcgccagagatctccatatgtgaacctaacccgtgctccagtgtgaactacggcagagtgcctggaagacactctatttcagaagagcggcagagttatttgaaaagattaggttaccctgaattgcattcttcaaatttcctcgaccttgatttgttgtcgtcttctgggaattcctgtgacgaggaagtttttgagaggtcatcactgatcaattcacctatggatgtggtcagcgttgaatcatctacgtcgtacagtgaacaaggacacactgatgagggaagggatgacatggatctttcccgttcaagcagccaggtctcagacgttcgggactattctgaccggtttgcgcactgggtcgcggatggaggcatgctttggaaatggatgcgagcagatgacatggctagatgcagagatggtgggcgtggaaaaagtctcgcatcgattatggaagagataaaattgcaaaaatatcttaacctctga

SEQ ID NO: 35389 - DNA, 1095 bp, Zea mays
  Peptide Sequence Number=SeqID_77168
atgggcactcttcttgttatggatcagataggatacaatgttggtcgcacaccattcacagacatctcaaacaccatcattacaggtaatcaaaatgaatcgaactcgcttggaccaattgtcgatgctaaggaatgtaagaggcaaagggatagggaaagatatgctatgactgttgaagaaaagaatgagaaaaataggcagcgtcgtgaagcacgtcaacgaaataaaggactatcgatagagccactctcatccagagccttttgtaaatgggtgatatatgaagaagacgttaatacggaccaggcatgtgaggtggttagctttccagatgactgtagcaccattgatttcacaaatttgtcaacacaagacattgcaggtggagacgaacaagtaaatctggatgcatacgatgacaatgattggttgcataggaatgagacattccaggcaaacaacattgtcacaagtaaagaccttctgacaccaggttgtatgcatgaaactgttgataacatacctaagcatactatgaaaagggtcgcctactttagtgagcggtacaaaaacatgacccccgtcgagagggagtctagacgtgtacgccttaggttgtataataagacaccaagacggaaagatgctaacaaagagtgcagcagaaaacgtagagcactgcagggtgacactttgaatcaggagtccatcgccatggaggacccagtatatacccctgaggttgtacatcctacaacatatgaaattgaaccatatggatccttagttaccacttgcgactgggttatccctgaatttgtcgtgacacctttcctgccaacttcaacacagactaaggatgttggttcactcgatatgtctactgagccactaagacgtagacatcatgtgctatctgggacaagactagctaccttaggtcgtcgaaaccaagaatttgaagacggcattggaaggaatgtggctacagtgaccgaggatactatttgtgacgctatggaaggagacgattggacacagccccatccgactgcagagatccacaccaatggtaattacaaccaattttaa

SEQ ID NO: 35390 - DNA, 1116 bp, Zea mays
  Peptide Sequence Number=SeqID_77169
atgacccccgtcgagagggagtctagacgtgtacgccttaggttgtataataagacaccaagacggaaagatgctaacaaagagtgcagcagaaaacgtagagcactgcagggtgacactttgaatcaggagtccatcgccatggaggacccagtatatacccctgaggttgtacatcctacaacatatgaaattgaaccatatggatccttagttaccacttgcgactgggttatccctgaatttgtcgtgacacctttcctgccaacttcaacacagactaaggatgttggttcactcgatatgtctactgagccactaagacgtagacatcatgtgctatctgggacaagactagctaccttaggtcgtcgaaaccaagaatttgaagacggcattggaaggaatgtggctacagtgaccgaggatactatttgtgacgctatggaaggagacgattggacacagccccatccgactgcagagatccacaccaatggtgatgatgatgagggtgtcatattcgaagaggatgaggatgatgatgagaacgatggatacctattcggtgggcaatatgatgagaccgatgaggacatcgagattgatggtactcaaaatgaatctattgccactggtttgcctgacccgtatgacaaagtgtacagtaacatgcctgaagaaacacatatgctgaagtattttaatggccatttctctttcacttcactgtattgttgcctcgatagtatgacaactaatgtgagagattctggtatatacatgttccgggcacaatgcatgatgtaccacaatatcaagtcatttggtagggaaggtggggcggagcataaacaccttgagctttacttttacgatgatgatcccaatctcgagcatcggtatcgtaagtgccgtgaagaatgtcaacagaaagacaaagatgttattaaacaattagttggcatactccatggaaacccgtactctgagcaccttaggagcatgggccatgttgagaaccttgatgactatcgtatcacattgaatcttgaccagacgttgaaccagaagacatataacacgcctctcacttcagaggtcgctgctgtctag

SEQ ID NO: 35391 - DNA, 1002 bp, Zea mays
  Peptide Sequence Number=SeqID_77170
atgagagatgcgagcaaggcagatgatgatgtagatgagatcaagcagtacagagattcaaggtgggtgacccctctagaggccttatggaggatatacggctttgagcttagtcagaactctccacctgtgatgcagttgcagctccatcttccaaacatgcacatggtggcatttcacgagcgccaaatggtcgagcgagtcgtcaaccgtccaggtgctgataagtcaatgctcacagcatattttgaggcaaataggctacacgaggaggctcagggcatcctgtatcgtgacttccttgagtggaaacgagatacgggtggacaagtcggtagaatagtctctgctcatccgtacgagggggagcgctactatcttcgtgttctcctaaaccacgtgactggcgccacctcatatgtggatctaaggacaatagatggtgtcacgctactgacttttcgtgaggcagcagagagaaggggactgcttgagtcggacaacacactagatgactgtctcactgaacgtgcacttttccagatgccatcgacgctacgacggctttttgccacaatattggtgtactgtgagccaagcgatgtggctgtactatggcggaaacacctagatgctatgtcagaggactatcaacgtaggagtcagagcaaaactcatgttgaacagatggtattgattgacattaggaacatgctacagtcaatgggaaaggacataaagacattccctcttccacctatcatcgacacgtatggcgatgctataggtactgctagggaggtttatgaggaggaaagtatcgaactggcatcggcagatgtggttctcaaggactctcttaacgaggaacaaatggctgcctatgataagattatgtctaccgttaacaccgatcagggcggattgttctttgtggatggacctggtggcaccgggaagacttatctatacagagtgctgctcgcgacgctacgcaattag

SEQ ID NO: 35392 - DNA, 522 bp, Zea mays
  Peptide Sequence Number=SeqID_77171
atgagagatgcgagcaaggcagatgatgatgtagatgagatcaagcagtacagagattcaagatgccatcgtttctacgactggctttttgccacaatattggtgtactgtgagccaagcgatgtggctgtactatggcggaaacacctagatgctatgtcagaggactatcaacgtaggagtcagagcaaaactcatgttgaacagatggtattgattgacattaggaacatgctacagtcaatgggaaaggacataaagacattccctcttccacctatcatcgacacgtatggcgatgctataggtactgctagggaggtttatgaggaggaaagtatcgaactggcatcggcagatgtggttctcaaggactctcttaacgaggaacaaatggctgcctatgataagattatgtctaccgttaacaccgatcagggcggattgttctttgtggatggacctggtggcaccgggaagacttatctatacagagtgctgctcgcgacgctacgcaattag

SEQ ID NO: 35393 - DNA, 750 bp, Zea mays
  Peptide Sequence Number=SeqID_77172
atggaggtacggtacgtcgtcaacacaaaagggggggcgtcgcgtcgcgtcgcgccggtccgtgtgtgtccattcccgctcatgggtcgattctgtgcggtgcttggccagggcggcggcgcgatcccggtgacggagatggtcggcacgttcgcgctctcggtgggcgccgcggtggggatggagttctgggcgcggtgggcgcaccgggcgctgtggcacgcgtcgctgtggcacatgcacgagtcgcaccaccgggcccgcgacgacgggcccttcgagctcaacgacgtgttcgccatcgtcaacgccgtcccggccatgtccctcctcgcctacggcttcttcaaccggggcctcgtcccgggcctctgcttcggcgcggggctggggatcacgctcttcgggatggcctacatgttcgtgcacgacggcctcgtccaccgccgtttccccgtcggccccatcgagaacgtgccctacttccggcgtgtcgccgcagcccatcagatacatcacatggacaagttccagggcgtgccatacggcctgttcctggggcccaaggagctgaaggaggtgggagggaccgaggagttggagaaggagatcaagaggaggatcaggaggagggaggcgctagacgcccaccccaataaagacctgcttgatattgctattcacacagtgctttggctactgaatcccacctgtgttctagcgtttcccttttttttttatgtagcctag

SEQ ID NO: 35394 - DNA, 882 bp, Zea mays
  Peptide Sequence Number=SeqID_77173
atggccgtcgcgaggctggtgtccgccccgttccctctcgccccgctccgcgtccgggccccccgcccggccttgccccccggcgcgcacgcgggcccacggccgccggtcctggcgctcgcgcctcccgctgcctcggcggcgccccggcgcgccgtgcccgcgcgcgcggcgccggaggacggcggcagaggggacgcggcggcggctgcggcgcgcgcggcgcggaagcagtcggagcggcggacgtacctcgtggcggccgtcatgtccagcctcgggatcacgtccatggccgccgccgccgtctactaccgcttcgcatggcaaatggagggcggcggcgcgatcccggtgacggagatggtcggcacgttcgcgctctcggtgggcgccgcggtggggatggagttctgggcgcggtgggcgccccgggcgctgtggcacgcgtcgctgtggcacatgcacgagtcgcaccaccgggcccgcgacgacgggcccttcgagctcaacgacgtgttcgccatcgtcaacgccgtcccggccatgtccctcctcgcctacggcttcttcaaccggggcctcgtcccgggcctctgcttcggcgcggggctggggatcacgctcttcgggatggcctacatgttcgtgcacgacggcctcgtccaccgccgtttccccgtcggccccatcgagaacgtgccctacttccggcgtgtcgccgcagcccatcagatacatcacatggacaagttccagggcgtgccatacggcctgttcctggggcccaaggagctgaaggaggtgggagggaccgaggagctggagaaggagatcaagaggaggatcaggaggagggaggcgctagacgccacccaataa

SEQ ID NO: 35395 - DNA, 522 bp, Zea mays
  Peptide Sequence Number=SeqID_77174
atggaggtggttgtcgcgctgctggtgcagtggtcgctggcaagccacctagagtttgttatcccgcaggccttccggtcgggacaaccgctgagggtgctgccgacgtctgagtctaggtaccattgttaccccaaaatcacttatccgagcgtgagctacctttcacggaaggtgacgagtgagtcgaaaggcacgaaagtcgttttggcgaaaaactttttcgaggaaagttttggcacagagggggcttccccctctctagacccgaggcgaccgctcggaccggtacccttgcggaggttctggccgtggtcggcgggtctgtccgggctgcccgaggcatggcctcatagcagcgtgcccaggccgagggtatgttttgcccgctctgtgacttttcttttgtctccattcttcaccttgcgtctgaagaaagttgtcctgccatctgtagggttcgagacggctcttgacgaggccgtcaagaactgcaaggcgcttgccgaggcggctgagtag

SEQ ID NO: 35396 - DNA, 585 bp, Zea mays
  Peptide Sequence Number=SeqID_77175
atggggtgcacctatgttgccctctttttgctgctgttcgaggagtgcgaccccgtgggggttggcgctcttcagtcaccgctcggcttcaaggattttcatcatgcagcccgactgcagtccctcaccaatggtcatccgatgttcatcatccgggctggggaggggggcaccgagttggggcttgcctccgcgtgggctggcgacccgcttcttcctccagcattcgggggagaggggcatcctccagctgtgcggaggaggcgtcctccagccatacgggggaaggtgaactgctgctgcctggccagggtgcagctgtccgtcctccctcagggcgacggtcgcgccgtgcgcaggcggctgctgtcgccggtgctgaagcggcgaccgccactggagaggcttcccaccgcagtggtggttgcttccgccgacgagaccgtcggtgccacctgcgcttggggcctccggctctttggctttaatggctggttctcgtcccttccgcccgagacggaggtcattgtcgcgctgctggtgcagtggtcgctggcgagccacctggagtttgttatcccgtag

SEQ ID NO: 35397 - DNA, 222 bp, Zea mays
  Peptide Sequence Number=SeqID_77176
atgccggtttctctgatcgtgcagcaagcactaattggagacggttgtggagagggaagagtggaggaaatgacacatggggtccacctcaggaaccttactggaatactaccccacttaaaaagaatgagggtagaactcttgaaatcttggggatttgaactccttgaagtaccacataacaagggtgttacgggtccttctgctgctgttgctgcttga

SEQ ID NO: 35398 - DNA, 396 bp, Zea mays
  Peptide Sequence Number=SeqID_77177
atggcgcaccaggaggcggacgacgtcgaggctgcagcacggacgcactcaatcatggaggagagaggaagcgccgaccgaggatcgcgggaaagggagcagagcttgctggcctttcgggggctcaccgtatgggggatgcaggaccgcctaggagaagggtgttggatgagcagaagcgagtgcgttccctggagggttggcggggtagtgctacagggcctaaggcgagaggccaagcaacgtgggggagatgccggtttctctgatcgtgcagcaagcactaattggagacggttgtggagagggaagagtggaggaaatgacacatggggtccacctgtaagaatgagagagggaggggaaatgagagcgttggtcagggagattggctga

SEQ ID NO: 35399 - DNA, 567 bp, Zea mays
  Peptide Sequence Number=SeqID_77178
atgaccgaggaccctttaactggtcacatgcctcgtcatgggatccactttagtaagcatttctgcaaaacagagtctttgattattgagaagccttaccttgactcccttaaccagcatacccttgagagtcttttctttagtcggggttgtctgaggaatgatctatgggtcgcggatgcagccatccgctacttgcaagaccaactcgcgaaacgagatctaacgctcgattgggcggttaactctcgtccattcgcctgggcaaaggaagccaaagctcgagcccacgtggaagagcttagctcagccatggataacttgcaggtctattataatactctacatgaagaagttcatgtgttgtattcacaactgcacccgaacgtccctgcggatcctgtcgggatggaagccggaccttctcgtgtagcgggagaagcacttgatggtgaactggaccttttcaggccccctccctctatgaagttggttgacgaatggtcttctccgcccgacagtaaagctaccaaaagtgaaaagaagtggcttatcaagtgcctgtaa

SEQ ID NO: 35400 - DNA, 468 bp, Zea mays
  Peptide Sequence Number=SeqID_77179
atggcaaaggtgggtgggatgttttcaaaaataaaacttgatggtgaatctgtcaaaggccttgatagattcaacatcggaaaagatgtacctcttccaggcttgatgatcgaggaccctttaactggtcacatgcctcgtcatgggatccactttagtaagcatttctgcaaaacagagtctttgattattgaaaagccttaccttgactcccatataaccagcatacccttgagagtcttttctttagtcgggtatcttcgaactcaagtcggcatcacagtagaccagaataatacgaaggttgatacagcgccgaaggtgaacagtacccccgtactgttcacgctgattttggcattcacttttgcgtcacgcttgtactttcatctccttcaagttgaaggtacgcccttcataaccttcgtccaaaaaccattatatcctaaggggaataatgcttcgtag

SEQ ID NO: 35401 - DNA, 525 bp, Zea mays
  Peptide Sequence Number=SeqID_77180
atggccgaaaacgaagaggagattgaagtgaccgaagagaagacaccaccaccttcggattctcaggccgacaattgtttctacttcgatatctgcgggtccgagcaggcaagccccggttttactatgcttagtattgctctagaaaaacaaaaggatttgttttacaaaagatgtttggcaaaggtgggtgggatgttttcgaaaataaaacttgatggtgaatctgtcaaaggccttgatggattcaacatcggaaaagatgtacctctgccagagtctttgattattgaaaagccttaccttgactcccttaaccagcatacccttgagagtcttttctttagtcgggtgaggaagcgacaaatttttgttgcttctgctccaaggtggttcccaaggaagaaaaacaagagtgaagccgcgggaggacttggtcctccatatagaacttttgtgaaagaacttatcgggaggagtttttacctcccttggtattgtaataatattactctgcactcctag

SEQ ID NO: 35402 - DNA, 804 bp, Zea mays
  Peptide Sequence Number=SeqID_77181
atggagggagagacaagtagtgaggtagtgttgttggatgaagacgacgatttggatgcagtggtttgcgagtctcctgagttattagacgaacctgatgtcccgcaagtgcttattgatgatggttgctgctttgtattgacggatgaagacattcaacttgttggtgctgcttttcctaaggaaacagcaaggtatcctattcctccctttgatttttctgtcaagggtgttacatcaatctcatctgatgtccataagtatggattagcaccaaaaggcacaagcattgtcctgtacagaaatcatgaaattagaaagcatcagtttgttgctgttactgagtggaccggtggactttacgtttctcccactattgctggaagcaggccaggtggattgatagcgggagcttgggctgctatgatgtctctcggactgaacggtgacaaacttattctgaaattccatcatatgacaactgaagagcaaaagactttgaagggcacagagtcttcagctccttctgttcctcctgatggaggagtcagcaaggaacctaaaaaggggggagattacccaatgggtgaatttctatccgcttattggaaccactcatcaggttttacgatatgcatattccgtcttaattcttatacatgtttgtttatctctggcttcaggagggcaactggtccagcatgccgctcatccaagggcaactggactctagaagaggatgacatacttcgcaaagctgttgaaacctacaagggacaaaattggaaaaagatagtaagatga

SEQ ID NO: 35403 - DNA, 1518 bp, Zea mays
  Peptide Sequence Number=SeqID_77182
atggagggagagacaagtagtgaggtagtgttgttggatgaagacgacgatttggatgcagtggtttgcgagtctcctgagttattagacgaacctgatgtcccgcaagtgcttattgatgatggttgctgctttgtattgacggatgaagacattcaacttgttggtgctgcttttcctaaggaaacagcaaggtatcctattcctccctttgatttttctgtcaagggtgttacatcaatctcatctgatgtccataagtatggattagcaccaaaaggcacaagcattgtcctgtacagaaatcatgaaattagaaagcatcagtttgttgctgttactgagtggaccggtggactttacgtttctcccactattgctggaagcaggccaggtggattgatagcgggagcttgggctgctatgatgtctctcggactgaacggtgacaaacttattctgaaattccatcatatgacaactgaagagcaaaagactttgaagggcacagagtcttcagctccttctgttcctcctgatggaggagtcagcaaggaacctaaaaaggggggagattacccaatgggtgaatttctatccgcttattggaaccactcatcaggttttacgatatgcatattccgtcttaattcttatacatgtttgtttatctctggcttcaggagggcaactggtccagcatgccgctcatccaagggcaactggactctagaagaggatgacatacttcgcaaagctgttgaaacctacaagggacaaaattggaaaaagatagtccttgcagacccacgcagggttaagaacgtgggtacccacgttcttaaggttaagaacgagggtatcatcgaacttattgtgcagtccgcagacctcggcaggacacataagttcgacggccccgtcgaacttacttctataagttcgtccaaaaatcgccgtcggttatattcgtcggtaaacccacgttcttacgtttcctgtagtggcctcggcgtactccacgcactccatgtcgcattcgaacgcgtgtttgtacgtggggccgacggtgatgaccccgttggggcccgacatcttgagcttgaggtaggtgtagttggggacggccaagaacttcacgtaacatggccttcccagtaccgcgtggtaggttcctcggaacccgaccacctcgaacgtcagggtctcccttcggaagttggagggtgttccgaagcagacgagaagatcgagttgtccgaggggctagatgcgcttcccggggatgatcccatggaaaggcgcagcgcccgcccggaccgaggacagatcgatacgcagaagcccgagggtctcggcgtagatgatgttgaggctactgcctccgtccatgaggaccttggtgagcctgacgtcgccgatgacggggtcgacgatgagcgggtatttccccgggctcggcacatggtcggggtggtcggcttggtcgaaggtgatgggcttgtcggaccagtctag

SEQ ID NO: 35404 - DNA, 282 bp, Zea mays
  Peptide Sequence Number=SeqID_77183
atggaggacgctatgagtgagcagcaagaaaagtttcgtgaacagctgcggcaacaacaaatgacatttctccaacatcaatcagagtacatggttgcttacaacgcacaggcgcaacaagcaatgaacggatccggggtcatgggccacaacacgccaccaccggtgataccagcaccaggaggagcttatgctgggaatccaaacccgttacacgacttcgtcaacgagtttttcgcttctggaggtagtggtcacaactccaatgaccctgatatgtga

SEQ ID NO: 35405 - DNA, 258 bp, Zea mays
  Peptide Sequence Number=SeqID_77184
atggaggacgctatgagtgagcagcaagaaaagtttcgtgaacagctgcggcaacaacaaatgacatttctccaacatcaatcagagtacatggttgcttacaacgcacaggcgcaacaagcaatgaacggatccggggtcatgggccacaacacgccaccaccggtgataccagcaccaggaggagcttatgctgggaatccaaacccgttacacgacttcgtcaacgagtttttcgcttctggagactatttgtga

SEQ ID NO: 35406 - DNA, 399 bp, Zea mays
  Peptide Sequence Number=SeqID_77185
atgttgacacaaattgatcctccacatctagttggctacaactcaacaatcatcagagacgtcttcatcaagaatacaagtgacatgtctctgaaaattactctttggggaaatcaagcatcaaacttttctattagtgatgtttacaatcaaagcaacaaccagtctattgtcatactgctcgttggatttcttgctaaacgattcaaaggtcaaccatacctaagcggtactacaacaagttcatggtacttcaatcctggaattcctgaggcacagacctaccgcaacggccagaaggctacaaatgcactgttactatctcacgcattgtgcaaaaatagcaaatggtggtacccacctttgctccagatacaagctcagcttcattgctactga

SEQ ID NO: 35407 - DNA, 1119 bp, Zea mays
  Peptide Sequence Number=SeqID_77186
atgttgacacaaattgatcctccacatctagttggctacaactcaacaatcatcagagacgtcttcatcaagaatacaagtgacatgtctctgaaaattactctttggggaaatcaagcatcaaacttttctattagtgatgtttacaatcaaagcaacaaccagtctattgtcatactgctcgttggatttcttgctaaacgattcaaaggtcaaccatacctaagcggtactacaacaagttcatggtacttcaatcctggaattcctgaggcacagacctaccgcaacgggttgcaaaacaatgacctccaactaatacaacccacaacagccgaagaagaaatccagctttctcaacccccaaatttggaacacaagactgttgaagagctgctcaacatagatccggacatgtttcccccagaaggctacaaatgcactgttactatctcacgcattgtgcaaaatagcaaatggtggtacccaccttgctccaggtgccacaaatcttcatctcaaacttcaactggatatcactacacatcatgtggctgcacaaatattaactttagatacaagctcagcttcattgctactgatgggacatgtgaagaagagctcttttgttttgataacatagccagaaaaatagtaggaaaaccttgtgacaaccttgttatagcagttacaacttctcagggtcccacagcagccctagctactattatgtgtctgaaatttacccttgcagtttccatcaatatgtcagcctactcagtcacaaatagagtcttctttattatgtctattttaacaaatcatggaagacagaccttcataccatctaacatgcctagccatcctcaacaagagttgcatacacaagatgaaatacctagccttccgaccacacaagactctccagcaacatcaatggtgaaactatctacctgtagcaacgaaagaaacgagggtgatgaccaacgcataagtgaactcaacaatcaagaattatcgtcaccaccgaaaaggataaacatagccacactagcaaaggcataccagatcttacagaccccaaaaagaaaacctcctagatcgtcatcaacttcatga

SEQ ID NO: 35408 - DNA, 728 bp, Zea mays
  Peptide Sequence Number=SeqID_77187
gtaccgcagcccatgtctgtttctcgtgccaagcactcgcgtgctaccgaaaacgcccctcggcgacagacctctccggcgccgccacgcgtcgtgaagcgcgggggtatttctgtacatggacgtgttggtattaacccaagcccaatcgccacggcccgctccgccgcgcagcgatgcggagcagaagcaatggaggctcagcccccgttcccgccgccgatgccggccgcgccttcgccgtcgctcgcccggctcctcgccgccgcgttgcggggcggccgcgcgggtcgggagctccccgacctcgcggccgcgaccacgggcggcgccgggatagggacgctgctcatgagcaccacggcggcagcggtgaccaaggcgcgggagagcccgtacctgctggcgctggcggccaacccgaccttcgtgtcggggctgctggcgtgggccgcggctcaggccgccaaggcccttctcacctccgtcgtcgagcggcgctgggacctgcggatgctcttcagctccggcgggatgccgtcctcgcacaccgcgctctgcaccgcgctcactgcttccgtcgcgctctgccatggtgtcagcgacgcgctcttccctgtttgtctcggtttcactctgatagttatgtacgatgccacgggcgtcaggcgccacgccggaatgcaggccgagtctgaggaaaaccgttttgatactttgcccccagt

SEQ ID NO: 35409 - DNA, 996 bp, Zea mays
  Peptide Sequence Number=SeqID_77188
atggcaccaccacacatttctcaatctataattggcccactaaggcgtgctaccgaaaacgcccctcggcgacagacctctccggcgccgccacgcgtcgtgaagcgcgggggtatttctgtacatggacgtgttggtattaacccaagcccaatcgccacggcccgctccgccgcgcagcgatgcggagcagaagcaatggaggtgctcagctccagccgcttcgctagggcactcttactcccgacaattctctacccggtctccaggcacctcagcacgcccccgtgccgccgccacgccgtccataccctagcctcaggctcagcccccgttcccgccgccgatgccgccgcgccttcgccgtcgctcgcccggctcctcgccgccgcgttgcggggcggccgcgcgggtcgggagctccccgacctcgcggccgcgaccacgggcggcgccgggatagggacgctgctcatgagcaccacggcggcagcggtgaccaaggcgcgggagagcccgtacctgctggcgctggcggccaacccgaccttcgtgtcggggctgctggcgtgggccgcggctcaggccgccaaggcccttctcacctccgtcgtcgagcggcgctgggacctgcggatgctcttcagctccggcgggatgccgtcctcgcacaccgcgctctgcaccgcgctcactgcttccgtcgcgctctgccatggtgtcagcgacgcgctcttccctgtttgtctcggtttcactctgatagttatgtacgatgccacgggcgtcaggcgccacgccggaatgcaggccgagtctgaggaaaaccgttttgatactctgcagcaaagtgtaattctcataccactaaaatcagaaggcaacggctacgggcggcggaagatcgccggcggcgcctggatctcgctcccagaagggaccccgtcagggaggagagatcctaggagttgtctaggctcgggcaggccgacctag

SEQ ID NO: 35410 - DNA, 868 bp, Zea mays
  Peptide Sequence Number=SeqID_77189
gagtccaacatcaatctttagcatgtcaaatgatagagaggtgaaaatcctagagaagccaagactcagctcggtctggcacaccggactgtccggtggtgcacctgacagtgtccggtgcgccaggctgaactccggtgaacaggccgctctcgggagaagtctggcgacatctgagcaaatggaggaaggagttgaaacagactccaagcccaggatattcttaagacaggaacttcaattccgcttcaatctactcgaagggttcttcactccactgcgttctagtcttcgagtagaaggtgcctattttgctatcatgagtagtgatagtgacttatttgttgatgctcatgatctatggactaaacttaagttgaaattttttaagtccatatgcacttcctctactccttttattgctggtgatactaacttgtccaagggagaagaacaagaacgattgcaaccaaacgatgaatccacctcatcaacaggtttgtcttccactagtaacaaatgtcttattgctaacaataatggtggagacaaaagcgatgacgaggaagaatatgaggatgaggagtctacatcatcacaaggtacattttcctgttttgtttccactgataataatgacagggaaaacgagaccgatgatgtggaagaagaggagattcgccatttctacatccatctcaacaaagaggacaaagcactcttggttaagctgttgagaatgaacaaggaacaaggcgagacgcttctcaggctagaggagtctctcatcaaaaccaacaacagcctggagaagatgaccaaagaacatgagaagctaaagtactctcatgggaatttggtcccaatg

SEQ ID NO: 35411 - DNA, 399 bp, Zea mays
  Peptide Sequence Number=SeqID_77190
atggaggcaagaagagcttcgaggtaccaagtgcacaggagaaagtcaacgaggctgaggaacccaaagccaaggaaacagagaaaagaagaaaagaaaagagatgcaaaaggcttgactgtgtacaaccaagactcagctcagtctggcacaccggactgtccggtggtgcaccggacagtgcccggtggtgcaccagacagtgtccggtgcgccaggctgaactctagtgaacaggccgctctcgggagaagtctggcgacgtacagctataattcaccggactgtccggaaatctggcaccggacagtgtccggtggtgcaccggactgtccggtgcgccacccgactgagggcaaagattttgcccttcctggatttgcttccaacggctcctag

SEQ ID NO: 35412 - DNA, 1353 bp, Zea mays
  Peptide Sequence Number=SeqID_77191
atgagcagtgatagtgatctatttgttgatgctcatgatttatggaatagaattaaagaaaaatattctgtggcaaactgtgatgctcctactccctacattacttgtgatactaaccattcaaagggagaagaacaagaacgatggcacccaaacgatgaatccacctcgtcgacaggtttgttctccactaatgataaatgttttattgctaacaatgacggtggagacgaaagccatgatgaggaggaatatgaggatgatagcgaggatgaatcttcatcatcacaaggtacattttcctatattgcttccactgacattaatgacagggaaaatgagaccgatgatatggaagaagaggagattcgccgtttctacaaccatctcaacaaagcagacaaagctctcctggttaagttgttgagaaggaacaaggaacaaggcgagacgcttctcaggctagaggagactctcatcaaaaccaatgatagcctggagaagatgaccaaagaacatgaggagctaaaatactctcatgggaatttggtccaacgctcggaaacaactgatcaagccaaggatggaggcaagaagagcttcgaggtaccaagtgcacgggagaaggtcaaagtggctgaggaacccaaagccaagggtgaagaagaagacttgcaaagtcaaggatcaaggcaagctgacttgatgatttatgagtccaacatcaaagctcaaagcatgtctaatgctaaagaagtgaaagtcaagagaagccaaagctcagctcagtctggcacaccggactatccggtggtgcaccggacagtgaccggtggtgcaccggacagtgtccggtgcgccaggctgaactccgcggcggcggcggttccctcgggcgtgcgagcgccggtgatcctgggggccagcagcggtgtcgcccccgacgcaggcgaccaacggcggcgctccaccaggaacgagcgacagcgacgctcccgaggcgggcgcgcaagcggcgacggcgttctcgaagcggatggacggcggcagcgcaccctaggcccgatggcaacgccgtttgtcccgtccgtgtctgcgatggccaccgccgctgccgctccagcgtctatggcgccgtttcctgcgccaaaggccaacaacaccaggaaagcggtggtgcctgggatgattgggtacgagctgctcaagcgcttcaaggagtcagcggcgctcagggacatcctcgtcgtcattatgtcgtcggagaacgtgcccacccgcatcacccactgcctggaggagtttgacccgcgcctcaccgtaatttacgccctattcgtcgttacgaaataa

SEQ ID NO: 35413 - DNA, 351 bp, Zea mays
  Peptide Sequence Number=SeqID_77192
atgccggggaaggcgaactgttgctgcccagctaggatgcaacattccgtcctctgtcctcgctttcatggcgaggacgagagtgaggacctgccggtgcgctttggagcggcctgcgcttgctggtgcggtgttgaggtggtggcagccggagaaggcttctctgccgacgagattgccaactccgcctgcacccccagacctccgtcccctgacttgaatggctggttctcgtccttcgtgggcgagagcccttctaccgcagcatccgcccggaagccgttgctgcagctatttcgccgctcggggcggaggtttttgtcgctgctgccgaagcgggcggcgcactag

SEQ ID NO: 35414 - DNA, 855 bp, Zea mays
  Peptide Sequence Number=SeqID_77193
atgtcttcgcgctcccctcatgcatcgcgtctttccaccttccgagcccccagatggggggcgcccgcggttcttccgccttatcgtcgttgggggaacgcaacttcgcagaagttggtgccttttagccattgttcggcttcaaggattttcatcaggcagcccggctgcatcccctcgccggtggtcacccaagacggtgaccaccagtttgatggtggggagaagcaaaccgggctgcggcctctgcccctccctcagcttcaaggatcttcatcatccttgctggggcggagagcgaggcgagccggggctctacctcctgcacgggtcgaccggccacctcttcttccagcttctggtggtggaaaccatcctccagctctatggagggggcgtcctccaaccatgccggggaaggcgaactgttgctgcccagctaggatgcaacattccgtcctctgtcctcgctttcatggcgaggacgagagtgaggacctgccggtgcgctttggagcggcctgcgcttgctggtgcggtgttgaggtggtggcagccggagaaggcttctctgccgacgagattgccaactccgcctgcacccccagacctccgtcccctgacttgaatggctggttctcgtccttcgtgggcgagagcccttctaccgcagcatccgcccggaagccgttgctgcagctatttcgccgctcggggcggaggtttttgtcgctgctgccgaagcgggcggcggtgagccacgtggagccttgtcgccctgccggtcccccaatgtggggggttgttcgtacccgcgggggcggaaccggagttccgtttgtaatggcaccttga

SEQ ID NO: 35415 - DNA, 165 bp, Zea mays
  Peptide Sequence Number=SeqID_77194
atggaagatttgctggaacgattcctactgaatgctcttcgcttggacaagcatggccatatcatcggtacagagtacttgtctgacctagttgaaaaggagcatggggcacatcatgatcatggtatactcttcttcctgcaaggacagaaaagcatcaaatag

SEQ ID NO: 35416 - DNA, 1158 bp, Zea mays
  Peptide Sequence Number=SeqID_77195
atggcgaggataccgtctctgaagagcctcaatgcgtttccacatgcggaagagcacttgttgaagaagacttactctggcgctgttgtgacaatttttgggctacttataatgattacactgtttgtgcatgagctgcagttttatcttaccacctacacggtgcatcagatgtctgtagatctgaaacgaggagaaactctgccaatccatatcaatatgtcatttccttctttgccatgtgaagtattgagtgtggatgcaattgacatgtctgggaaacatgaagttgatttgcatacaaatatttggaagcttcgcttggataagtatggccatataatcggtacagagtacttgtctgacctagttgaaaaggggcatggggcacatcatgatcatgaccatgatcatgaccatcacgatgaacaaaagaagcatgaacaaaccttcaacgaagaagcagaaaaaatgatcaagagtgtgaaacaagcactcggaaatggtgaaggctgccgagtctatgggatgttggatgtgcagagagtggctggtaacttccatatctcagtgcatggtttgaacatttttgttgctgaaaagatttttgaagggtcaaaccatgtgaacgtcagtcatgttatccacgagctgtcatttggcccaaagtatccaggaattcataacccactggatgaaacttcaaggatacttcatgacacaagtggaaccttcaaatactatattaagtcgcagcgtcgtgatggtgcgaatgttgcggctggagtagagaccgttgtgtgctccaagaagacgatagcccctagatgccgaggtagccgaaggcgaggtggtcgcggtcggaagacgcgcaacaaaagcctgatcttcgggaggggtcgacgttcgagcgtcaacgatcggcagggcgacacagcaaaagggcaccggcaggccgacctttctacgtcttcgatcatccgggcctcaacgagccccgccagggaggccgacggcagcgcacgcgtctgcgccggtcatggtgtccgcgcccgtggcagaaaagacggggaatcggtggatccggccgggaaggccacgacagcgacgaatccagccatgaagacgacgatccggccaaagggatggcggatctag

SEQ ID NO: 35417 - DNA, 312 bp, Zea mays
  Peptide Sequence Number=SeqID_77196
atgtccggtgtgcaccggactgtccggtgtaacggcacggcaacggctacttcggcgctaacggtcacctgcagcgacattaaatgcgtgccagagcgcgcagaaggcaggcacgcgcgggacggcgcaccggacactctacagtacatgtctggtgcaccaccggacaccccgaagctaaagagcaaggtagagatgcaaactctcgtggataacgtcagtatttttaccgagagagtcgcgggccttctccacgcgcaagtggtgctccgcttccggctcctctcggacgctctccgccgtctccactaa

SEQ ID NO: 35418 - DNA, 309 bp, Zea mays
  Peptide Sequence Number=SeqID_77197
atgggccttctccacgcgcaagtggtgctccgcttccggctcctctcggacgctctccgccgtctccactatcgagcttctggccgaaacgctgcgggcctcgttccctccgagaacggctacaacggcttttctccctcagctctcgactatggcgcacagcgcggcgtacatggctccaacagggagctgcacgcgcgatgccgttgcggcagcgagtcttccgcgagtttggtgatcgatctgaccggcggggtccatatgacagcggcagtagctaagctggagcgcgggcccaagcggcagtga

SEQ ID NO: 35419 - DNA, 177 bp, Zea mays
  Peptide Sequence Number=SeqID_77198
atggatggagcttgctgccaagagccatgggagggagaggtccctgcgttcgaacagatgagaggagaggatggcatggggggggcgaagaagagggcaggggctgccatttatagagccaagctctggacatgtcagctagttgcagcaggtggcaggttctacaatttttattaa

SEQ ID NO: 35420 - DNA, 489 bp, Zea mays
  Peptide Sequence Number=SeqID_77199
atgcagtacaatgaatcaagcagtctcattagctgcgagaagcagacgattcgaatcgagtttttatccttgcaagtgaccgcacttgtacccaccataaccggaatgggagaccacgtctcaggtcgcgtgaggggatatgtctgcgggcaggttcaatcaggtttgagggctccatggccatggaaagggatcctcgctgctgccatgggagaaaagaagagagggatggctccacagcagcgcaccaaggagagcccgagcagagggggagagatggcgtgggggaagagaagggagagggcaagggctgccatttatagagccaagctctcgacatgtcagctagttgcagcaggtggcaggtgctacagtgacatctttgggcgacgtgttttggcagtttctgcttggaatcggatcttggttcctgcacaaaatatcttccttgatctatactctacaattgttgtacaagacttgaggtga

SEQ ID NO: 35421 - DNA, 156 bp, Zea mays
  Peptide Sequence Number=SeqID_77200
atggcggtgggtgcgctacaaaagggggcatgggtggcggtagtgcgctacaaagggggcgtggggtggtggggtagtgctttgattctcacgcttgttccaggcttcaagggtaagcttcccggtatcttcttgggtaaagtgcttttatcttga

SEQ ID NO: 35422 - DNA, 183 bp, Zea mays
  Peptide Sequence Number=SeqID_77201
atggcggtgggtgcgctgcaaatgggggcgtgggtggtggtagtgcgctgcaaagggggtgtgggtggcggtagtgcgcatggaggcgggcacgcgtgcgaggggcacggcttgttccaggcttcaagggtaagcttcccggtatcttcttgggtaaggtgcttttctcttgagatgggttaa

SEQ ID NO: 35423 - DNA, 113 bp, Zea mays
  Peptide Sequence Number=SeqID_77202
atggcggtggtgggtgcgctgcaaagggaggcttcaagggtaagcttcccggtatcttcttgggcaaggtgcttttctcttgagatgggtcaagatgagaatggaagcataag

SEQ ID NO: 35424 - DNA, 1119 bp, Zea mays
  Peptide Sequence Number=SeqID_77203
atgtctctaaaaattactctttggggaaatcaagcatcaaacttttctatcagtgatgtttacaatcaaagcagcaaccagcctattgtcatactgcttgttggatttcttgctaaacgattcaaaggtcaaccatacctaagtggtactacagcaagttcatggtacttcaatcctggaattcctgaggcgcagacctactacagcaggttgcaaaacaatgacctccaactaatacaacccacagcagccgaagaagaaatccaggtttctcaaccaccaaatttggaacacaagactgttgaagagctgctcgacatagatccagacatgtttcccccagaaggctacagatgcactgttactatctcacgcattgtgcaaaacagcaaatggtggtacccatcttgctccaggtgccacaaatcttcatctcaaacttcaactggatatcactgcacatcatgtggctgcacagatattaactttagatacaagctcagcttcattgctactgatgggacatgtgaagcagagttcttttgttttgatagcatagccagaaaaatagtaggaaaaccttgtgacaaccttgttacagcagttacaacttctcagggtcccccagcagccctagccgctattgtgtgtctgaaatttacccttgcagttgccatcaatatgtcagcctactcagtcacaaatagagtcttctctattctgtctattttaacaaatcatggaagacaatccttcataccatctaacatgcctagccatcctcaacaagagttgcatacacaagatgaaatacctagccttccgaccacacaagactctccagcaacatcaatggcaaaactatctacctgtagcaacaaaaaaaacgagcctattataaacatatcattccttcatgcatacaacttaatgaagtctattcaacaggcacgacgcattctaatatattcagatatgccgcatgacacagagggtgatgaccagcacataagtgaagtcaacaaccaagagttatcgtcaccaccgaaaaggataaaacatagccacactaacaaaggcgcaccagatcttacagacccaaaaaagaaaagctcctag

SEQ ID NO: 35425 - DNA, 992 bp, Zea mays
  Peptide Sequence Number=SeqID_77204
gtcaaccatacctaagtggtactacagcaagttcatggtacttcaatcctggaattcctgaggcgcagacctactacagcaggttgcaaaacaatgacctccaactaatacaacccacagcagccgaagaagaaatccaggtttctcaaccaccaaatttggaacacaagactgttgaagagctgctcgacatagatccagacatgtttcccccagaaggctacagatgcactgttactatctcacgcattgtgcaaaacagcaaatggtggtacccatcttgctccaggtgccacaaatcttcatctcaaacttcaactggatatcactgcacatcatgtggctgcacagatattaactttagatacaagctcagcttcattgctactgatgggacatgtgaagcagagttcttttgttttgatagcatagccagaaaaatagtaggaaaaccttgtgacaaccttgttacagcagttacaacttctcagggtcccccagcagccctagccgctattgtgtgtctgaaatttacccttgcagttgccatcaatatgtcagcctactcagtcacaaatagagtcttctctattctgtctattttaacaaatcatggaagacaatccttcataccatctaacatgcctagccatcctcaacaagagttgcatacacaagatgaaatacctagccttccgaccacacaagactctccagcaacatcaatggcaaaactatctacctgtagcaacaaaaaaaacgagcctattataaacatatcattccttcatgcatacaacttaatgaagtctattcaacaggcacgacgcattctaatatattcagatatgccgcatgacacagagggtgatgaccagcacataagtgaagtcaacaaccaagagttatcgtcaccaccgaaaaggataaaacatagccacactaacaaaggcgcaccagatcttacagacccaaaaaagaaaagctcctag

SEQ ID NO: 35426 - DNA, 666 bp, Zea mays
  Peptide Sequence Number=SeqID_77205
atggcgtcctccttcctgagcttccttgccgagaagctccacccttccgtggatgaagcctggtgccccttccagcttctccactacagtaggcacgtcgacgcctccctctgctcctactcgtccaaggcaccctgggacttctcgtccagagccttgcccctctcctacctcaagcaggatgaaggccaagtcacaccatcaaccaaatcaaggaggtacctgcaaaattgtgccacaagcaaggctgagtatactaatactcagctagacttacccggttacaatggatcaagcagtctcattagctgcgagaagcagacgattcgaatcgagtttttaaaccttgcaaggcctcaccgccttggcatacaatgctccactgaccccggccgccgccgtgaagtggccgcacttgtacccaccatatctagaatgggagacccagtctcaggtcgcgtgagggataaagtccgcgcccggcttcactcaggtatccgcacgttaatccttattccaattttgtctcatagacaacgcatccccatggatccgtgtccacagaccatcatcattctgttatcaaaatggatacaaccaattcctgacctcgcgcgagtgctagaaaaatcactcgacttctaccgagatcctgatttagcatag

SEQ ID NO: 35427 - DNA, 228 bp, Zea mays
  Peptide Sequence Number=SeqID_77206
atggacaaggacactgtaggtgggcctaatgacttgggaggttctgtcacaagtctcaggacaagtgagggacaacgcatccccatggatccgtgtccacagaccatcatcattctgttatcaaaatggatacaaccaattcctgacctcgcgcgagtgctagaaaaatcactcgacttctaccgagatcctgatttagcatggcagctactcgacctagcatactag

SEQ ID NO: 35428 - DNA, 570 bp, Zea mays
  Peptide Sequence Number=SeqID_77207
atgacgcggggcaatgcgagccacgcacgaaggcgaggtcacggcgattgtgacatcgctgctgttcatgacatagagcttcactcgggcatttcatcgaacacccatgaagcgccaacgttgcggggctgcgggggaaactcggctgcgaggagctgcgctatagagggttggacatgcttcagccgaagtggagggggtggtggtgtccattggactgggcaaaacagtgagccgacagagcacggagttgccacgactgctgctgggggaatgcccgtgtgctatggaggtcggctggtttccatgggaggtggagcgcagagctgctgcacagggaggaagggtgccgagctgctcgcctgccgggagcgagcgctagggggaagaagggcgctgggaggtggggtgcgcgcccttggagcaggggaacagggagctcggaacggctgcgcaggggagggacgctgtccatgggagggagccgccagcttggaggaatggagctcggcggccatggaggtcacagggggctcggcatgtgctgcgggagatagccggctggagtag

SEQ ID NO: 35429 - DNA, 495 bp, Zea mays
  Peptide Sequence Number=SeqID_77208
atgggggagaagaggaggcgacgccatgggcagcagggggagagcatcggctgggagcttttctacgccatgaacatggaggcaacgccagggaagatctcacgagcacccaccaccagagctgagggggaagaagggcgctgggaggtggggtgcgcgcccttggagcaggggagcagggagctcggcaatggcgcccatggcaacagcggctaccaaggccggccgtctgaaatggggaggcgagctcctagggcaggggctgggcggccgtggaagggagggagctcgcccacgccgtggaggagagctcggcggcatgggtgcctggaggaaagagctcgccgcaggcaaggctggcggccaaggagctcctgcgcgctggctgctgttgccgtggagcagggaggaagaaggctgctggcggctgaaggaaatggaggggtgggagtgcaaaattgcccaagtgcaagggaagagggtccgtatttatag

SEQ ID NO: 35430 - DNA, 363 bp, Zea mays
  Peptide Sequence Number=SeqID_77209
atgaacaagaacacaaaagacacaagatttatcctgaggttcggccacaccaccaagatgccctacttcctcgttgaggcgcccacaaagagccgagtctctttcaaccctaatcctccctttgccaaccacaaaggtcaagctcacacactaatctttgctcaaacgagcgggtcaaaggtcagaggggtcagagaccagttgaactgcccctcaggaccagttcagctggtcttgactagagagtttaggagagaaaaccccagctcaactgcccggaggcaagttcaactggtgtatggtcaaagaggttcacagttgaagttgagtttagctggagttgagaaagctcaactcagctga

SEQ ID NO: 35431 - DNA, 234 bp, Zea mays
  Peptide Sequence Number=SeqID_77210
atgaacaagaacacaagagacacaagatttatcccgaggttcggtcacaccaccaaggtgccctacttcctcgttgaggcgcccacaaagagctgggtctctttcaaccgtaatcctccctttgccgaccacaaaggtcaagagagaaaaccccagctcaactgcccggaggcaagttcagctggtgtatggtcaaagaggttcacagctgaagttgagtttagctggagttga

SEQ ID NO: 35432 - DNA, 708 bp, Zea mays
  Peptide Sequence Number=SeqID_77211
atgaccttggagcctcatcctttgcagccgggctggcattcgttggactccgagtctttcggatactcggctgaagacactatcgaggccattgccctccacgggctgacgaccttttgtggctttcaccccttggagctgtccacccatcccattggcttgttccccgctgaaaaggaggacgacccaatgtggaaggatcgagtggagcatgccaaggatgtgtgggccctttacccagggcagactgctcacctgacggtgcgatgcatgaatgccctgtaccgtctgcaagcggtgcgaggagaggcaatgtctcagctaatgggcttggtggaggctaccaagatcaccctggataacagggaggaccttgtggtagacctgtccactgagctggtggagaaagacctccaggtggaacagatggccacccagatccaagagcttgaggagcaaataggagccagggagaacaccatcgaggttctcgaggaccaactcctaaacactcagcagcaacttggggaagctaaccagcacctggatatgcaccatctggagattcaggacatggaggccgaaggggccgacgaggatgttgacatcgagggaggagaggagccgaagcctgcattcagcttggacactgctggctcagggagaccaccttcccccgagtctagtgttgcctcgtttgcccattag

SEQ ID NO: 35433 - DNA, 375 bp, Zea mays
  Peptide Sequence Number=SeqID_77212
atgtggaaggatcgagtggagcatgccaaggatgtgtgggctctttacccaggacagactgctcacctgacggtgcgatgcatgaatgccatgtaccgtctgcaagcaatgcgaggtgaggcaatgtcccagctgatgggcctggtggaggctaccaagatcacccttgataatagggaggaccttgtggtagacctgtccactgagctggtagagaaggacctccaggaaatccaagacatggaggccgaaggggccgaagaggatgttgacatcgagggaggagaggagtcggagcctgcttccagcttggacaccgctggctcagggagaccaccttcccccgagtctagtgttgcctcgtttgcccattag

SEQ ID NO: 35434 - DNA, 573 bp, Zea mays
  Peptide Sequence Number=SeqID_77213
atggcgcaatgctcagctctaaccatcctctttggtaaaccttacacttcacgtgagctcccacctttggtacgctacaggatatggttgatgatgacttcacccacccccatcaatggacgagacactcgtttcagttttgactacctttcccacgagggttttccctccatatatgtgggaggtgctctgctccgccggttaccctacaccccctctgtatactgtgcagctatacgaggagcatcgggtgccacgttgcaggtttggctaaccctggagtctcaccctctacagccgggatggcgttcccttgactctgagactgtcgggtttagggcggacgacaccactgagcccacagcgctaaaagccctgacaaccttctgcgaatatcatcccctagagatgatgatgcacccactgggactcttccccgccgagaagagggatgaccttatgtggtgcaatagagtgagccacgtgaaggacgtttgggccatgcatcccgaccaagttgggaggatcactgttcagtgtatgagcgcattgtatcgccgacaggccctgtag

SEQ ID NO: 35435 - DNA, 258 bp, Zea mays
  Peptide Sequence Number=SeqID_77214
atggccttcacactggcagcagagggcacagaccacgtcgagggtgttacataccccatgtggtgcaacagagtgagccacaagaaggacgtgcatcccgaccaagttgggaggatcactgttcagtgtatgagcgcactgtatcgccgacaggccctgcagagctacgccatagcacacctcactaatcttgctcaaactactaagatcactctcgacgatcgagaggacttcgtggtcgacttgtcttcagaatag

SEQ ID NO: 35436 - DNA, 1230 bp, Zea mays
  Peptide Sequence Number=SeqID_77215
atggagtgcgcatcaggtgctggaccgggtggtcgtggaggccgggcggcacggggtgcggctgatcctgagcctggcgaacagcctcagcctggtgaacaacctggaggcgcacggtggcaagacgcaagtcagcttgcttggaagcgacttgtagcactgggttctcgtgcaccaaaagcatattcaattattagtaaggttgcttgtgccattggcttggctgtgagtaggtctaatatagctccttaccttgtcacttttattgtgggagagctgcacacaaaagcaccagctcatagctttacctatactaagaaaactgttgagaaagcttttggtcaaaagctatcagacatttttgaagaggaccctgttgcatctggaagtgttgctcaagtgcatcgggctgttctacgatttaggtatcctaatcggcagacaaatcatgtaactgttgcagtaaaagtaaggcatcctggtgtaggggactcgataaaaagagatttcaatatcatcaatgccatagcaaagataactagatatatccccacgctgaattggttgcgcctagatgagagtgtacaacagtttgctgtcttcatgatgtctgaagttgaccttgcaagggaagctgctcatctgagccggtttatcttgaacttccgaaggtggaaggatgtatctttcccaagacctctctatccacttgttcatcctgctgttttagttgagacttacgagcatggggagagtgtttcacgctatgttgatgaccttgaaggacatgatcgaattaaaagtgctctggctcatattggtactcacgtgctcttgaaaatgctactgcaaactaagccgaacaacttcgtcccgttcatccggtcaggggagtggtctgatataggaggtcgcgattacatggaagatgcccatgtgtgcatctctgatctggcgaagaattttggctctaactcagcagatgatgcagtcatctccttctacggggattccggctctcatcaagtgactcctccccctcacgatgactttgcggacagatgtctcaattctagtggtggagctactgtggcggaactgcccgaattattccaacttaccgccttagaggctagaccacacttaattaggaataacacgtcaatccctcgaatcgagtccgacgaggccactaacaggatcaagtaccacatactcactcgatggtga

SEQ ID NO: 35437 - DNA, 270 bp, Zea mays
  Peptide Sequence Number=SeqID_77216
atggagagggtttgtgagaacacggtgtctgttgagctcaagcaaactaagccgaacaactttgtcccgttcatccggtcaggggagtggtctgatattggaggtcgcgattacatggaagatgcccatgtgtgcatctctgatctggcgaagaattttggctctaactcagcagatgatgaagtcatctccttctacggggaagaggaactgaaaaggggcgagctggaggctgacaaagacaaaatgatgagagattatagagcttaa

SEQ ID NO: 35438 - DNA, 663 bp, Zea mays
  Peptide Sequence Number=SeqID_77217
atggctgaaaggtaccaactcccacggagttgcgttcctccaacgacgaggcagaaagacggcggatatcccccatccgggggcttggaaggtggaaagacacgatgcataagggagcgcgaagacaggtcgccttccaaagggggtcaccctccttttaaaggcgactctccctacttgcgcccccaaccgtcgcgggctgagccttctccaacacactccaaggtcctcccctgcggcgcgggggctgggtcccgcacgtcatgcaagctggctcggagcagaagaagccaaaccgccgtgcgcgacggcgcctctggcaggagaagcgggcgacgcttcgccttcgccataatgaccgcgtcaaaaaagggaccgggaaaaggggataccccgaaaaggatccttccccgtgaaggaaccaggctccgagcctccctactgatcagaggttcgaaggctagcccctcggaagggttcgacagccgcctcagatcgcgtgggccctacacccactactggtcagaggttcgaaggccggcccctcggaagggttcaacggctgcctcaggctactcgggctccgcgcccattactgatcagtggttcgaaggctggcccccgaagggttcacagccgcctcagacgccgagcgagggatga

SEQ ID NO: 35439 - DNA, 762 bp, Zea mays
  Peptide Sequence Number=SeqID_77218
atgggggatatccgccgtctttctgcctcgtcgtggaggaaacgcaactccacgggagttggtacctttcagccattgttcggcttcaggatttcatcagaaagaggggatgctccccctcgccggcggtcacccaagatggtgaccaccagcccctgggtggggggaagcaagccgggctgcgatcttggtcccaccctcagcttcaaggatgttcatcatcctcgctggggtggaggccgggctgagctcgtgggtcaccctctcctgcggcgtttgagggagagggcgctcgccggccctgcgggcgggtcggacttcgacaacgcggggccagtcgacggcaggcgtcgtctgccccagcgcgccgggctcgccggcttggcgcctagtgccctctcctgccggaaggcggctgcagcgccgtgtgcacgggaggaccgcccaagatgtcgcgcgctgctagggcggcgttcgtgttctggggcggtcctgcctttgcaccggtacggtgcctccgcgaggaggtcggtgccatgctcgtccgggaggatccgagtggggatctgccagtgggctgacggcccccgtcgtcggtgccgaggtggaggcggctcgagaagtccccgtcgtcgacgggatcaccgccaccatctgcgcttcgggcctctggctctttgtacttgtcctcgcccctcgagcgtcggcgtgggcgagggcaaggttgcagcagcgttcgccctaaggccatcgccgctgtag

SEQ ID NO: 35440 - DNA, 528 bp, Zea mays
  Peptide Sequence Number=SeqID_77219
atggccccggacgagtacaacaccgtcaccgggtctgactgccgcaccagcagcaccaccgtcgccgcatattttcttggaatgaaaatctggaatgggttggcgcgagatggaacacaaggggaaaacgcggctcgtattatctcgcaccaggggtatgctcgtagtaggggttacaagcgttcgcgagagagagagagcctgttcgtttgctcgtccctccgcgcgaccctttcgcaggaaggccctggacctcccttttatagatgcaaggagagggtccaggctatgagctcttttctactagtggtgtacaatggggggtgtagcttaagcgctaacgtgtctggcagagaggtgcctgagccatgtgtacatgccaacgtggctgtcggagaggtgctagagccctatccttgcccgagtgactggcacaacagtcggagtggggtgagcgacgctgttttcctgtcagatcggttagtgaaaggacgaagtgactgcggtcacttcgaccttgccgactga

SEQ ID NO: 35441 - DNA, 903 bp, Zea mays
  Peptide Sequence Number=SeqID_77220
atgtctggcagagaggtgtctgagccctgtgtacatgccaacgtggctgtcggagaggtgctagagccctgcggtaatgatgtatcccctgtggtgcggtcggtccgagcccaaggtcgagcgaggcggagacttctcctgaggccgaggccgggatcgggcgaggacgtgattcctcccgaggccgaggctgaggccgagtcttggggtcgggcgaggcggagcttcctgccgcgcccgaggctgaacttgctgttggcggccttgcccgggtggctggcacagcagtcggagcggggcgcgcgtgtcaggataaggtgtcaggcgatcctcgcattgaatgcgcctgcgatacggtcggttggtgaggcgatttggccaaggttgcttctcgatgaagcctgcccgagctgggcctcgggcgagccgaggatggctcatatcaggtgcactgcacgtaagtcggtgatcccctttttgccttcccgcctggcggagcgtcccctgcgtcgcacagtgtcaggtcagtccagtcatctggagagactgcatcgtcgcctgcacgaggagcaggagtgccgacgccaggagcaggagcaggaccaggagcagcaggactcttcccccttgcctcagcaggaggtggagtctgagaggccgccttcccctgcacctcagccagagatgccccctgcaccaccccagggcattccggctgctggaggagaccctgacggagacggagatgatgacgacgccggtggcagttcgagccacggcacggagttctcggaggagctggagccggagggatggatcgctagacccatcactcgtgacgccgctcgcgggtgtcacttccacgacgctctcgataccctgctgtgtcgggccttcgactga

SEQ ID NO: 35442 - DNA, 219 bp, Zea mays
  Peptide Sequence Number=SeqID_77221
atggtggtcgacgagcagggagggctcgacgggcaggggaactggcgcgatcgtcgtgctgcgcggacggagctccggcggggctcaacgaacagtggggcggaaggaaaacagcgctgctcaccctgctccgactgctatgccagccacccgggcaaggctgacaacagcaagttcagcctcgggcgcaacaggaagcttcgcctcgcccgaccttag

SEQ ID NO: 35443 - DNA, 822 bp, Zea mays
  Peptide Sequence Number=SeqID_77222
atggaagttggcatccttccaccattattcgacttcaaggattttcatcacgcagcccggtcgcaacctctggctggtgcttcaaggatgttcatcatccgcgctggggaggagggcgagccgagtgggagcttcaccttccgcgtgggctggcgatccgcttcttcctccagcattcgggggagaagggcgttcgccggccttgcggaggaggcgaactctaggtacacggggccggccatttgtggcgccgtcagctaccgcgtgcctggctccccggcctgggtggctctggtgctgcctccggtgctgccccctgccgttggggcggagcgtggctgcccgtccacccacgggcgacggtcgcgccgcgcatgggttggccacatccacggcttctcccgcgccaccggtcgcaccgggaggtcgtacaagacgtcgtacgccgcgggggtggcggcgacgttcttggatggtcttgtcctcactcccgcagtgaggacgggagcgaagacctcttcgtgcgtgctagtgcagccgctgcccatcggtgcagaggtggtcgctgccaccagtagggctgatgtagtcgcctccgctggaggacgggggcgaggacctattcgcagtagcgctcaccctgaggtgatcgctgctgctggcgagccgctcggagcagaggtcgttgtcgctgctggtgcagaggtggtcgccgtcgttggtgggctgtccggagccagctccagcgcgactcttgctggatttagcctgggaagcccagttgtgtgtccgaaccccctagatggtggcttcaagtactaa

SEQ ID NO: 35444 - DNA, 684 bp, Zea mays
  Peptide Sequence Number=SeqID_77223
atgttcatcatccgcgctggggaggagggcgagccgagtgggagcttcaccttccgcgtgggctggcgatccgcttcttcctccagcattcgggggagaagggcgttcgccggccttgcggaggaggcgaactctaggtacacggggccggccatttgtggcgccgtcagctaccgcgtgcctggctccccggcctgggtggctctggtgctgcctccggtgctgccccctgccgttggggcggagcgtggctgcccgtccacccacgggcgacggtcgcgccgcgcatgggttggccacatccacggcttctcccgcgccaccggtcgcaccgggaggtcgtacaagacgtcgtacgccgcgggggtggcggcgacgttcttggatggtcttgtcctcactcccgcagtgaggacgggagcgaagacctcttcgtgcgtgctagtgcagccgctgcccatcggtgcagaggtggtcgctgccaccagtagggctgatgtagtcgcctccgctggaggacgggggcgaggacctattcgcagtagcgctcaccctgaggtgatcgctgctgctggcgagccgctcggagcagaggtcgttgtcgctgctggtgcagaggtggtcgccgtcgttggtgggctgtccggagccagctccagcgcgactcttgctggtgcagcgtag

SEQ ID NO: 35445 - DNA, 126 bp, Zea mays
  Peptide Sequence Number=SeqID_77224
atggcgaaggcgaagcgtcgcccgcttctcctgtcagaggcgccgcctgttggttgtctgaaccgcttcaccaagagtgagtcgccccgtgtaaaggtgacgagtgaggatccactttcgaagtag

SEQ ID NO: 35446 - DNA, 549 bp, Zea mays
  Peptide Sequence Number=SeqID_77225
atgggttcaagtcctatagctgaattattgtcggtttatagctctacaactttgttacagacggttggtttagtcactacacaaaaattggagaaaatcgaccctaaatatgggctgtcaggtgctctgatgggagctcacgatggtacagtgcccaacggatcagatcggacgcagcaaaagaatcccgccgtcgatcactcctccgccgcgattcgtgtcgccggcgtcgtgattcccgctcgggctaccgcacccacctacatcccaaatccccctctggcgagcgctaatttcggatttcccccaagttcgctcaagaacaccgtaacagccgcctctccgtggccagcgctcctcaggtgtgctgaccgaggaccctttaactggtcacatgcctcgtcatggcatacccttgagagtcttttccttagtcgggtgaggaagcaacaaatttttgttgcttttgctccaaggtggtatcaaatgaagaaaaacaagactgaagtgcgggaggacttggtcctccacataggatcttttgcttaa

SEQ ID NO: 35447 - DNA, 300 bp, Zea mays
  Peptide Sequence Number=SeqID_77226
atggccggtacggaccacgtttgggatgctctgcgagcgcgccgccgtcggggagttccttggagaagaaatagagttgtgaggatgtttttgcaaacggtcagcgacgtaaggcgtgctgaccgaggaccctttaactggtcacatgcctcgtcatggcatacccttgagagtcttttccttagtcgggtgaggaagcgacaaatttttgttgcttttgctccagggtggtatcaaatgaagaaaaacaagactgaagtgcgggaggacttggtcctccacataggatcttttgcttaa

SEQ ID NO: 35448 - DNA, 187 bp, Zea mays
  Peptide Sequence Number=SeqID_77227
gcgtgctgaccgaggaccctttaactggtcacatgcctcgtcatggcatacccttgagagtcttttccttagtcgggtgaggaagcgacaaatttttgttgcttttgctccaaggtggtatcaaatgaagaaaaacaagactgaagtgcgggaggacttggtcctccacataggatcttttgcttaa

SEQ ID NO: 35449 - DNA, 2162 bp, Zea mays
  Peptide Sequence Number=SeqID_77228
atcagaatgtatcaggccagcaaggcgctcatgctgtccgtcgttctccccgtgttgaaaacaaaagaaagcaattagataaaaatgaattaaaggaaaggaagaagagattaaggttgaaagtccctcctatacaagatgccgaaagtgatgatgaaaaagacacagagtttgttcctgctggcgatgggtctggtgatgacaatgttggtattgttggtggagatgaaaataagggtataactaagacacgagctattcgatgctcacctggaaagtttataaagcttgtgaattctctatctgatgaattgaaaagtgaagtggttgctaaggggtttggcggcctgcttaggttcaagccacatttattgtcgagaaagttgcttagctggctgatgcggaagctcaacccagaaacaatgaaattagagattggtggtgggaaagagattcaaatcaccgaacacagtgtttggtgtgttttggagttaccaaatgttggcagtgatccgcccaccatgtccgatgcagatgctcgtgccctgcgggacgagctgggggtgcaaatttgtgggaaatcttatagacgcatatctggcatcaatatatctgttatcactgatagattgcagaagaggactctcaatggtgagctgggcctgagagcctttttcatcgcagcatttcagtgtcttctattctccaatactgacactcggatcagaattgatgatgtgaagtacactcaggacatccagaatattggcaacaagaactggtgcaaagctgtagtagacaggctgagcatagctgctcggctttatagaaaggattttgctgagaaaggcattaacgcaccaatcagtggatgcgaaatctttgtagctatgctttatgtcgacaacctgcaacatggattagacacaagtcctttttcaatccctcgatgtgctttcttggactccaagatgattgatgctatagcaaatatggatctcaggggtgatgttcttcctgggaccactgagtttggacacctcaggttgagaagtatcactgacacgtgctacggcgtccccattggtgctctagcaatattacatgctccagtaccagcacctgccccagtagcagtccctaatccaacagcagcacctaacccagtagcagcagcatttgtcccagtagcaacaacagcacctactgggacatctgctgataaggctgtgaagtattcaacaatatcccgcgaccttatggcaaaagctcaccacgagtgctacactggcattcagaagcttatcgctgacgctatcgttgagaagcgagctgccaaagagcgcaggaggaaggtgaagaacgaccctagagcaggagcaggagcaggaactagttcaattgcaccggaggaccaatctagaggaggtgatggtgaagaaattatacggagtcccgttgcaattgaccctagagctggagcaggattaggaactacttcaaatgtaccggaagaccaacctggaggaggtgatagtgaagaaatacagttggattgcagtggtggagatcttgatgacagcttagattttacgagaaccccatcgtgtggtgatgacattgatctggaagagggaaatttgaatagaacacctcctgatttacgtgggtcaacccgaagtattgatgatatattggaaatgatctattccccagagcactttgcaagcattgatggcgagtcccctcccaatagccagccgactcgtgcaccacgaattgctgttcgcaagaggaaggcttcctcaaacccccctggcaatgatcaaccgcctgtgggaccacctgagacagaagaggagcctctgagcagggacactgggatgcagcatcctactgcccaggatcatataacttactcaaggaggagcgataggtccattcaagttgccaacacacagaaggcagaggctgagaagaaaaaggctgagattgagatgaagaatgctgaagctgaggaggctgagaagagaaaggctgaagccgaacaagctgataagaagaaggcagaagaagctgagaataagagaaaggctgaggccgaagtagctgagaagaagaaggaagtagaagctgagaataagagaaaggctgaggccgaa

SEQ ID NO: 35450 - DNA, 1351 bp, Zea mays
  Peptide Sequence Number=SeqID_77229
gagcgataggtccattcaagttgccaacacacagaaggcagaggctgagaagaaaaaggctgagattgagatgaagaatgctgaagctgaggaggctgagaagagaaaggctgaagccgaacaagctgataagaagaaggcagaagaagctgagaataagagaaaggctgaggccgaagtagctgagaagaagaaggaagtagaagctgagaataagagaaaggctgaggccgaagtagctgagatgaagagaaaggctgcagctgaagaagctgagaagaagaaggaagaagaagctgaggataagagaaaggctgaggctgaaaaagctgagattaagagaaaggctgaggccgaagaagctgagattaagagaaaggctgaggctgaagaagctgagattaagagaatggctgcagctgaagaagttgtgaagaagaaggctgatgccgagaagaaggttgatgcggaggagaaaaggatacaggttgcaatccaaaaacagctaaaggacaacatcaaagctttgaaaaagccggtgcccgctgccaagttaaagaagatgttccagttacaaatgtcaaaagaatatgctgagcagcgccaacagtacgaggacaggttgaacatgcttcgtcaggaggccaaagctgagattgatagtttggagaacagcattgatggccaggcaggacccagctcatcatttgatgatatacagttcccggcggagtctgatgatgatatcaacaatttgacccaaccaatccgactttctcaagacgaagtctcagtaggccaggctgatttcagtgagtttcaaaggatgatattcaagcgcctaggtgatagagtgctgaagaagcctagggagtacatatccccgttcaagatccctcgtaatcgacctgagatacccctggccaaggctgttgcacttaggcggaagatcgcatctgatcctgagctgaaaaggagaattttgttggagtttggccttcttgttggactaactggcgaggaaattttaacatctttttctaatgacacccttggcgagtcaggaatcatagactttttcgtgcactgcatgcgacatgatgatattgtgcacaaggaagaacggcacaaggctgtctttgccaaaatcccaatcatcgatgcagccttccagaaagtttccaacctcaagttacccagattcaagggtccgatatacagatgtgagctgttgcattacgagatcttccaccctttgaaccaagctgaaattcctggttcgcttgataagtttagaattggtggtcgtccgttgccaattgaatgggatagtagtcagtcgaacaattag

SEQ ID NO: 35451 - DNA, 1017 bp, Zea mays
  Peptide Sequence Number=SeqID_77230
atgacattgaaggctaacacctatggatttttgaccaagaaatggtctccaccagaaatccaagaatgtggtctatggcaaggaaacacatgtggggtgaggtgtatgagcctttggtcgatgatcaattgccacacaacccccatttttgtcaaaaatagccatgaacgaccattttcaataataccgaaggctaacacctacggatttttgaccaacaaatcgacccaaccagaaatccaagaatgtgaacaaaagcaaagaaacttagcaggaacgagggggaagagcagagcgccgacgagaaaaggcaacacaacccccatttttgtcgaaaatagccatgaacgaccattttcaatgacactgaaagctaacacctacgaatttttgaccaacaaatggtctccaccagaaatccaagaatgtgatctatggaaagaaaacatatgtggggtgaagtgtacgagcctctggtcgatgatcaatggccacacaacccccatttttgtcgaaaatagccatgaacgaccattttcaatgacactgaaggctaacacctatggatttttgaccaagaaatggtctccaccagaaatccaagaatgtgatctatggcaaggaaacatatgtggggtgaggtgtacgagcctctggtcgatgataaatggccacacaacccccatttttgatgaaaatagccatgaacgaccattttcaataataccgaaggctaacacctacggatttttgaccaagaaatggtctccaccagaaatccaagaatgtgatctatggcaaggaaacatatgtggggtgaggtgtatgagcctctggtcgatgatcaatggccacacaacccccatttttgtcgaaaatagccgtgaacgaccattttcaataataccgaaggccaacacctacggatttttgaccaagaaatggtctccaccagaaatccaagaatgtgatctatggcaaggaaacatatgtggggtgaggtgtacgagcctctga

SEQ ID NO: 35452 - DNA, 456 bp, Zea mays
  Peptide Sequence Number=SeqID_77231
atgcacaaagaggctgcacggctttatgggttttacgtcaggctcgacccgttggcttatgtcacgggccataagccacgcggcagcagcggggagcacagggcaaggcctggacacgtgccagcaccagacccctactcatgccagggtccttgtcctgggaccttgctaaggctcggaccttactcggagggggactggtgccctcccaagggacccagcgtgccttcttgggggctctggacttgtacgtataggggtccggtgtccttctgtggaggtccagacccaacgcgtcttcatgctgtagaagagggtacccctgatccagggtacccacaagatcactttgctctactgagagccatttgtctcatcaaacacaatgtcacagaacttttgactaatccagtggatttgttgaagactctatgtgcccttatgtttgagtcataa

SEQ ID NO: 35453 - DNA, 687 bp, Zea mays
  Peptide Sequence Number=SeqID_77232
atggcccaagggcacatttccctttcactcccccgcgactcgaggcaccccgcgcatggcccaacagtgacattaagagcaaaggtcacgggccagttagccgtgggaacgggcgtgacagtcggcgtagccataggcgggccggcagtaattgctccaacaggcgcacaggagcagcaggcagatcgccaattagactctggccccacctgcaggctcgcatcctcccctgaggcgggcccgggggccactgtcagtaccctcaatcaggggtaccctcttctacagcatgaagacgccgcacccgtgcaacacctcaaggccacatggagaatggcgcccaaccccaccatacgggcaggtccaagggtgccgcatggcaaggaaagaaggacaccggacccctatacgtacaagtccagggcccccaagaaggcacgctggatcccttgggagggccccagtccccctccgagtaaggtccgagtgttagcaaggtcccgggacgagaaggaccccggcatacaatctctgccatatcttttattccgatggcacctttgccatacttatgcttttggaatcctctgggattttaggcattcttgtggtattgatcgtcgagtccctaggctcatggccgagcccatgggtctttttgtattggttcttcctcatgaagcttaa

SEQ ID NO: 35454 - DNA, 399 bp, Zea mays
  Peptide Sequence Number=SeqID_77233
atgttggagaagttggccacgcatgatgtggaaactatcaccacgctcttcgctttggccgacaagtgcgccagggccgccgagggacgtgcatggcactcggcaccacagaccggggttgcccagacgggtggctcgggtgccatcgctcaggacggcaaaaagaaaaagaagaagaaccgcgaccacgagaagccgcattctaccgctctggtcgtcgcagctgcgactgggggccggaacgagcgtaacaagcgcccacggccgcagaggggtaacaacgtgtcacacccggttccagggggggcaatctcccacaggaagatgaccgacatattgttagacttagaattcatcgtcatcaatatctccatcaaagtctccagcatcaccctctga

SEQ ID NO: 35455 - DNA, 168 bp, Zea mays
  Peptide Sequence Number=SeqID_77234
atgggcaagagggggagctgtggtgttggcagcccacgttatcatggggatgtattcttggctaagagggtgatgctggagactttgatggagatattgacgacgatgaattctaagtctaacgatacaccggtcatcttcctgtgggagattgcccctgttatttaa

SEQ ID NO: 35456 - DNA, 168 bp, Zea mays
  Peptide Sequence Number=SeqID_77235
atgggcaagagggggagcggtggtgttggcagcccacgttatcatggggacgtattcttggctaagagggtgatgctggagactttgatggagatattgacgacgatgaattctaagtctaacgatacgctggtcatcttcctgtgggagattgcccctgttatttaa

SEQ ID NO: 35457 - DNA, 336 bp, Zea mays
  Peptide Sequence Number=SeqID_77236
atgaaggctcaagatcacaaaggcttaacagaattagctaaaaagttgaagagcacaactgaatttgtttcagttggctttctggggccaggtattgctttgctatgtctgaatgaagcaaagagtccaatcattgcttcagcctggcttacagttgctgttggattgaaatccttcggccactcaggtttcttagtaaatctacaggaaggcttgtacttcggacattcttttctttcttataaatacaaagatttacgactctattgcaagttagagtttttgataaactatggtattagcaactatagttctaaacctaaaaccatggtttag

SEQ ID NO: 35458 - DNA, 1458 bp, Zea mays
  Peptide Sequence Number=SeqID_77237
atgacgcctcccggccaactgctccccttgtcccggctgcctcccggcctctccagccgctgcccgcctcccgctcatgcccaagccagagtgtcgcttctgcatccatgggcccaccgcctccatggccgcttcatgccttctcctcatctgttccggtctccagcctgcccccctcgtgctccaacgcctccagggctttcggccgccgcaggaggcgaggctcaggcggctgcggtggcggagttcgtgacgtcggagagggtcaaggtggcggcgatgctggggctagccctcgcgctctgcaacgccgaccgcgtcgtcatgtccgtcgccatcgtccctctctcgcaggcgtacgggtggaccccgtcattcgccggcgtcgtgcagtcatcctttctttggggatatctgatgtcgccgataattggtggagcacttgttgattactacggtggaaaacgagtcatggcttacggtgtagcattatggtccttggctacgttcctgtctccatgggcagctggtcgatctatctggttgtttctctttaccagagtcctgctgggtattgcagaaggagtggcactcccaagcatgaacaacatggtgttgaggtggtttcctcgcacagagagatctagtgctgtgggtattgcaatggctggctttcagcttggcaataccattgggttacttctttccccaattatcatgtcacgaactggaatatttggaccttttgtgatatttggattatttggatttctctgggtgttggtgtggataccggctatatctggcacgccaggtgaacatgcacagatatcagcatatgaactgaagtatataaccaaaggccagaaattggtgaaaccacaaattggaagtgaaaaaacaaaaaagggttattttgttatcctttcatggatgccagtctatttcaaaactatatatcatgtcaatttgagagaagcagcttggttcagtgcactcccttgggtgatgatggcagttttaggctatgtggctggtgttgtatcggacatgcttattagaaatggtacagacattactttaacacggaagataatgcagtcaattggctttctggggccaggtattgctttgctctgtctgaatgcagcaaagagtccaatcattgcttcagcctggcttacagttgctgttggattgaaatccttcggccactcaggtttcttagtaaatctacaggagattgccccacaatatgctggagtcctacatggaatgtcaaatacagctgggacatttgctgccattctaggaactattggagcagggttttttgttgataggatgggttctttccgtggatttttgatattgacgtcgctcttatacttcagcagtgctcttttctgggacatctttgctactggagagcgtgttgattttgatggcactggctag

SEQ ID NO: 35459 - DNA, 291 bp, Zea mays
  Peptide Sequence Number=SeqID_77238
atggagaaaaagaagaaggcatgtagcaagcttgtggaggaccatatcatcaagcatataagtttctggatgagaagtcgtcacccaagttccgttgatgaagcaccagaagaccaatcaaggaaggaatccatgtgggagttcgcaagagaaagttatcggagcgttcgtgccgtctcgtggaggccagatctgcaagtctacgccaggcggtggagccagaagccagttccgcgagctctccttcccccttcgccggataagcacggcaagctcactggatccctttga

SEQ ID NO: 35460 - DNA, 349 bp, Zea mays
  Peptide Sequence Number=SeqID_77239
cgtcttccccgagcaagagcaaggtggtggcccatgtggattccgcaacgacgacccagattcctctgcatttggaatcccgcaagtagcaggggatactcaacctgagctccgccttttccccgaggcggatgcggatcttaaagggttcttctacgaaaacctatttggatcggaagacaagtgccctgatgatctgaaagatatatgtaaagatctcatacaaatatctgctggccagatctgcaagtctacgctaggtggtggagccagaagccagttccgtgagctctccttcccccttcgcctgataagcacgacaagctcactggatccctttgatgcataa

SEQ ID NO: 35461 - DNA, 1665 bp, Zea mays
  Peptide Sequence Number=SeqID_77240
atgctggtcatcctcattcaggccgctgcggcggagtgcgcgacaggtgaaggcagcagcgaggatgatggtgacgccgcgtggaaggcagccattgactccatcgtctccgttggattcagcgtcccttcgtccaacggcatggtgaaggcagcctctagcggcaacgacgaggtgaacaaccacgtggatctggaagagccgcgtgagaggaaactaaagggtcctggcttaagttgtatcagtattccagataatattaggatacactggccttatgtcactgtttctgaggctcctaaggatttccttcaaatcattgattttgacaaggatacaataatgaaggttcttaatcgagccattgaggttaaggcattgataaagtctggagacaagagcttccaaccgttcaaagggaaaacaatggtcatgatttttgccaagccatcaatgaggacccgtgtttcatttgagacaggattctttttacttgctacaacgcccaagaagattgaaaggggaaaatgcgcagtactcgatctacttatcctgcaagaagcaacttcaatgataagaacaagcttggggaaggcgggtttagtaccgtgtacaagttgtacagaagaacacaatattgatagaaatggtgtttatgcgaaggcattttcttacttgacaagtgacaatgacattcttgaaagagagcatatttcttacgaacaaggagattctattcaaggcacatcatttcttaaacaagggttcattatagatgatggacaagctgaagttgcccagtgcatggagtttcaagctgcacgtgatagcatgcaagaggttatggtgagaaattcagttgaagctaccacatccttgacaagtacacaacaagggagacacatgagaactggattattcaatgtgtcaactgtgacaccatttccccggcaattttgtgtgatatttgatagtacatttgttacttgctgtagaaatcaagagtttgatgctgccgccaaagagatcaccaaggcattaacaactgttggtatctctcatattattgacactactgcaatttctattgggaggagatatgggaggaccgatgagattggtgttccatttgttgtggcaatggattcaacaaacgtgacgatccgagagagggatgacaaggagcagatccgtgtggacatcaacgaggtggcgtccgtggatattttggacttggcaaaatatgcatctgtacctgtcataaatggtctcactgactataaccatccatgccagataatggctgatgcacttactatgcttgagcagattggtcgtattgaaaacactaaggttttctatgttggagatgggaacaacattgtgcactcatggctgttattggctgatgtgcttccttttcactttgtatgtgcttgtcccaagggatttgagcctgatgcacacacagtggagatggccaggggtgctggaatcagtaagattgaaataacaaaccgtcccagggaagcagttaagggagcagacattgtgtacacagatgtttgggccagtatgggacaaaaggaagaagttgattatagaaaacagaagttccagggattcacggtggatgaaaccctgatggagattgctggcccatag

SEQ ID NO: 35462 - DNA, 450 bp, Zea mays
  Peptide Sequence Number=SeqID_77241
atggcatggatctggatggtcctcgtagcggcagtcgtgctcctttgtcgtgttgtcctgtgtggccccgagcgtgcagttcatgcccctcacagcagcgataggagaagccggaacatgttgctgatcgtcccccaccctgacgacaagtccatgtcggtggacttacccaagcagaataggtggaagattataatgggaaattggtggactgcatggaaggccgctgcggcggagtgcgcgacaggtgaaggcagcagcgaggatgatggtgacgccgcgtggaaggcagccattgactccatcgtctccgttggattcagcgtcccttcgtccaacggcatggtgaaggcagcctctagcggcaacgacgaggtgaacaaccacgtggatctggaagagccgcgtgagaggaaactaaagggtcctggcttaagttgtatcaggtaa

SEQ ID NO: 35463 - DNA, 405 bp, Zea mays
  Peptide Sequence Number=SeqID_77242
atgccgacgctgactttcaaccactcggcgctgtctctaaaacgccgaccatgtgttcaatcgctcggcattgcttctaaaatgccgacgccgacattgaatcactcggcgctgcctctaaaacgccgaccacgtgttcaatcgcttggcattacttctaaaatgccgacgccgactttcaaccactcggcgctgtctctaaaacgccgaccatgtgttcaatcgctcggcattgcttctaaaatgccgacgccgacattgaatcactcggcgctgcctctaaaacgccgaccacgtgttcaatcgctcggcattgcttctaaaaatgccgacgccgactttcaaccactcggcgctgcctctaaaacgccgaccacatgttcaatcgcttggcattacttctaa

SEQ ID NO: 35464 - DNA, 573 bp, Zea mays
  Peptide Sequence Number=SeqID_77243
atgccgacgccgactttcaaccactcggcgctgcctctaaaacgccgaccacatgttcaatcgcttggcattacttctaaaatgccgacgccgactttcaaccactcggcgctgtctctaaaacgccgaccatgtgttcaatcgctcggcattgcttctaaaatgccgacgccgacattgaatcactcggcgctgcctctaaaacgccgaccacgtgttcaatcgctcggcattgcttctaaaatgccgacgccgactttcaaccactcggcgctgcctctaaaacgccgaccacatgttcaatcgcttggcattacttctaaaatgccgacgccgactttcaaccactcgacgctgtctctaaaacgccgaccatgtgttcaatcgctcggcattgcttctaaaatgccgacgccgacattgaaccactcggcgctgtctctgaacaccgaccatgtgttcaatcgcttggcattgcttctaaaatgccgacgccgacattcaatcactcggcgctgcctctacaacgccgaccacgtgttcacacgcccagcattacttctaaaatgctga

SEQ ID NO: 35465 - DNA, 618 bp, Zea mays
  Peptide Sequence Number=SeqID_77244
atgatgtacgagaagatcaagaagctagataaggagctggccaggtatgttcacaacaatattttctttagttttgctgtcgactctgactttgaagacatttcaaaggaccacaagctagattgccaaaatgggtctagcagaagcaccaaggtttcctccccagatgtgatcactaagccatatgcaaaccatggcaaatctgctgaggtagttgattcaaaatctgaagaggcacaactcgcagatagagagcaggcgacatatgcttctgcaaacaatgacttaaaaggaactaaggcttatcaagaagctgatgtttctggccttcacaatcttgcgatggcaatagttgattacagaggtcacaaggttgtagctcagagtataatacctggtattcttcaaggagacaagtctgattcccttctgtatggttctgttgataatggcaagaagatatcttggaacgaaacgttccattctaaggttgttgaggctgcaaagcagctccatttgaaggaacatgtggtattggatggttctggcaatcctgtaaaattagctgctacagtcgaatgcaagggtattgttgggagtgatgataggaaaagatga

SEQ ID NO: 35466 - DNA, 618 bp, Zea mays
  Peptide Sequence Number=SeqID_77245
atgatgtacgagaagatcaagaagctagataaggagctgaccaggtatgttcacaacaatattttctttagttttgctgtcgactctgactttgaagacatttcaaaggaccacaagctagattgccaaaatgggtctagcagaagcaccaaggtttcctccccagatgtgatcactaagccagatgcaaaccatggcaaatctgctgaggtagttgattcaaaatctgaagaggcacaactcgcagatagagagcaggcgacatatgcttctgcaaacaatgacttaaaaggaactaaggcttatcaagaagctgatgtttctggccttcacaatcttgcgatggcaatagttgattacagaggtcacatggttgtagctcagagtataatacctggtattcttcaaggagacaagtctgattcccttctgtatggttctgttgataatggcaagaagatatcttggaacgaaacgttccattctaaggttgttgaggctgcaaagcagctccatttgaaggaacatgtggtattggatggttctggcaatcctgtaaaattagctgctacagtcgaatgcaagggtattgttgggagtgatgacaggaaaagatga

SEQ ID NO: 35467 - DNA, 1374 bp, Zea mays
  Peptide Sequence Number=SeqID_77246
atgggcgctgccacgacgagcgggggggggggggggggctccgcagggcccaggagccgtcgctcgctgcccgagaccggatcgacaggtgcggttttctgccacgattttctgcaggtggaggagacaagggagctacggacggttgttgaggctgcaaagcagctccatttgaaggaacatgtggtattggatggttctggcaatcctgtaaaattagctgctacagtcgaatgcaagggtattgttgggagtgatgacagactggagagaagagggctggagcacccggatggttgccctctctgcgaccatgaacaggaaaccactcaacatcttctagcttcttgcatttctggcacatcattctttcaccttttgggttgggacacctctctcctggggaacatgtgtcgtcttttgcttattggtggaaagaggtcccgcttcctaccagttaaggcgacatcagatttgcagctagtacagtctgatctatataccttggttgatggcttcgttacacgtaattcagctagaacaaatccatcaaatccctcaattgaacttggtcctgagttcaagaaggttgggagcttccttggtcgcttcaagtccatacctagtattgttgagcttgacaacttgaaggtttccggtgatgtttggttcggttctggaattgtactgaaggagaaagtgaccatcactgcaaaacctggcgtcaagctagaaatcccagacggagcagtgatggagccaaacactaataattcagaaggatccctggctggtgctgctgtctgggatgtattccgcaggcaggatcttccaaagcttaatgactatctagctgttcatcgggaagaatgtgcagctagatgtcaagcagtgtcttctgttaaatatcctatttatgatcaaacagtgtaccttaacgattatcataagaagatgttgaaggatcaatatgtttgggtattgaagcttgtatgtcttgttgggtccattttcttagagggactgaagacaatcgagcagattacaatggactcagcttcggtcgagaccaatatgttcaagctctgcaaggtgaggtctgttcagtttggccaaaaaggcatcccctacctgaacacctacaatggccgcaccatccgctaccctgactcgctcatcaaggccaacgacaccatcaagatcgatctggagatcaacaagatcatggacttcatcaagtttgacgtcgacaacgtggtcatggtgactggcgggaggaacaccgggcgtgtaggagtcatcaagaacagggagaagcacaagggcaactttgagaccatccatgtgctgcttggagctttttgctatgtctag

SEQ ID NO: 35468 - DNA, 387 bp, Zea mays
  Peptide Sequence Number=SeqID_77247
atgaaaattttgagcaaatcacttttgggaagtctacaaagcaatgatgacctaatattatcagatgaagaaattcatggcagtagcaaacctactgctaattggccatctcatgctagacgtcataggaaaagggatcctgatgttattggtatatatgtagataacgatggagtcttcaaaaaggaggggtgtggtacccttaagggtatagcagcagccaccaagcgaatcaagaacggtgatcacaaacttaagattgaattttcatctaagcttggaggtcctgtaggaccaaacactcgcacttttgtggatgaaatcgtattgtttacaaagaaaaaggcaccactcactggagtgaaaaagtggagagctcaatgttag

SEQ ID NO: 35469 - DNA, 612 bp, Zea mays
  Peptide Sequence Number=SeqID_77248
atggggaggaagagggtaggggcgaggacccatggtgggcatcgcgttggagtttcccgacggggatcacggacggagacggggaagcgactacattctcgggaaggagaggcgactggtgcgctggagacgaatggggacggggtcacggatgttgcctcctctccgctcgtgatacacgggccgaaccggagggacgacaacgcggattcctcgatccccttccatggagagcggattcctcgatcccctaccatgcacgcgtgtcagaaggagacgaacctcgatagtgttggggaaggagagcgcgacgacgtggcccaggagaaacccggcgtcgacagcgagtcgtgcagccgccgcgtcgatgagagcatcgagggcggcgtgcatgagctccagcctgcccgtacgacaactgtgcggcgggccgggaaggtggccgccgcctccttgagcagcgccgtcagcgtggtggcctccatcgtcgccatggccatggggggaatcggggtgagcagagcggagatgggctgttgcgtggaggccttccatagatggagcgaggaggaggaggaggtggcagaatcggtggatgcgaacgcgcagtga

SEQ ID NO: 35470 - DNA, 381 bp, Zea mays
  Peptide Sequence Number=SeqID_77249
atgatcagcttgaattcgtatgaccgatcgaatttgaagaaggagacgaacctcgatagagttggggaaggagagcgcgacgacgtggcccaggagaaacccggcgtcgacagcgagtcgtgcagccgccgcgtcgatgagagcatcgagggcggcgtgcatgagctccagcctgcccgtacgacaactgtgcggcgggccgggaaggtggccgccgcctccttgagcagcgccgtcagcgtggtggcctccatcgtcgccatggccatggggggaatcggggtgagcagagcggagatgggctgttgcgtggaggccttccatagatggagcgaggaggaggaggaggtggcagaatcggtggatgcgaacgcgcagtga

SEQ ID NO: 35471 - DNA, 534 bp, Zea mays
  Peptide Sequence Number=SeqID_77250
atgcctttacaaactaggcccgtaacacaaaggcggccacgcggggcccgttacaatgggccagatcacacgtgggcctcagagcaggacgaggccgtgctacggggagacgtcaccgcaggccttcgtctggtgctgaatgaagcgaagggtgtccctgcccgttttgtctttgtcagaccagcgactgcggcgaagggcgacgagcgaagggttgaaatcgaattcgctgatggtagctcatttcacctgtcagcagaatttctcagagtatacagcccagcagctgatagcaaaatccgatcagtgggcggtgaaaaggttatatttggacgacgacatgttgggataatgtcagctgaatcagtaggaaactacggagtccggatactctttgatgacttgcacaagacagggatcttcacatgggattacttgcaccatctcggttcaaacaaattcagtctgatgagaaattacatcagaactttgagaaagcatggtcttagtcgcgatccccagagaaggaaatga

SEQ ID NO: 35472 - DNA, 2196 bp, Zea mays
  Peptide Sequence Number=SeqID_77251
atggcgggggcaacctcttcctcgtccgtgtctttgatcctcatcctcgtcgcgtcctcctcgccgcggcgcagccggggcagggtgggcattgctctgcgctcgtacggctacagcggcgccgagctgcggttgcattgggcgcgtcggggctcgtctcgggatggaccggcggtagtgcgcgccgcagcggttccggccgggggtgagggcgaggacgccgcggcggtagggaagagctcctcgtccaaggcggtcgccgtgcagggcagcgagtccaagactcaggctgtatattctacttcacctcccaaaactgcgacgtctgcgccgaagcaaaaccagagcgctgcaaagcaaaacggaacagttgggagcagcagtgcgagcaaatccccggcgcctgcggtatctgaatccaaagctgaaccatctgctcctgtcaccaagacagaaaccgatgccagtgcgaaggttgaagagctgaagccctcagtggatgatgctaaacccgtagaaagcataggcatccctgagccggtggatgctaaggtggacgccgctgcagctactgatgccgcggcgagtgctgctgatgacactgaagacaaggaacatggccctttggctgggcctaatgtgatgaatgtcgtcgtggtggcttctgaatgcgctcctttctgcaagacaggtggccttggagatgttgtgggtgctttgcccaaggctttggcgaggagaggacaccgtgttatggtcgtgataccaagatatggagagtatgcagaagcccgggatttaggtgtaaggagacgttacagggtggctggacaggattcagaagttacttattttcactcttacattgatggcgttgattttgtattcatagaagcccctcccttccggcaccggcacaatgatatttatggaggagaaagatcggatgttttgaagcgcataattttgttctgcaaggccgctgttgaggttccatggtacgctccatgtggtggtaccgtctatggtgatggcaatttagttttcattgctaatgattggcatacggcacttcttccggtctacctaaaagcctactaccgggacaatggtttgatgcagtatgctcgctcagtgcttgtgatacacaacattgctcatcagaagctggctaaaaagctgagcgtttggcagtccggagcagcttttggtggccagaagctgccagaagtcgaaacaaacagggccaaaatatggtggcatataaggaagggtcgtggccctgtagacgacttcgtcaactttgacttgcctgaacattacatcgatcacttcaaactgtacgacaatatcggtggcgagcactgcaacgtttttgccgcagggctgaagatggcagaccaggtggtgaccgtcagtaatggatacctatgggagctgaggacatcggaaggtgggtggggcctccacgacatcataaaccagaacgactggaagctgcagggcatcgtgaacggcatcgacatgagcgagtggaaccccgctgtggacgtgcacctccactccgacgaatacaccaactacacgttcgagacgctggacacgggcaagcggcagtgcaaggctgccctgcagcggcagctcggcctgcaggtccgcgacgacgtgccactaatcgggttcatcgggcggctggaccaccagaagggcgtggacatcatcgccgacgcgatccactggatcgcgggacaggacgtgcagcttgtgatgctgggcacggggcgccccgacctggaggacatgctgcggcggtgcgaggcggagcacagcgacaaggtgcgcgcgtgggtggggttctcggtgcccttggcgcaccgcatcacggcgggcgcggacgtcctgctgatgccgtcgcggttcgagccgtgcgggctgaaccagctctacgcgatggcgtacgggaccgtgcccgtggtgcacgccgtgggcgggctccgggacacggtggcgccgttcgacccgttcaacgacaccgggctggggtggacgttcgaccgcgcggaggcgaatcggatgatcgacgcgctctcgcactgcctcaacacgttccggaactacaaggagagctggcgcggcctggaggcgcgcggcatggcgcaggaccctcagctgggaccacgccgccgtgctgtatga

SEQ ID NO: 35473 - DNA, 2229 bp, Zea mays
  Peptide Sequence Number=SeqID_77252
atggcgggggcaacctcttcctcgtccgtgtctttgatcctcatcctcgtcgcgtcctcctcgccgcggcgcagccggggcagggtgggcattgctctgcgctcgtacggctacagcggcgccgagctgcggttgcattgggcgcgtcggggctcgtctcgggatggaccggcggtagtgcgcgccgcagcggttccggccgggggtgagggcgaggacgccgcggcggtagggaagagctcctcgtccaaggcggtcgccgtgcagggcagcgagtccaagactcaggctgtatattctacttcacctcccaaaactgcgacgtctgcgccgaagcaaaaccagagcgctgcaaagcaaaacggaacagttgggagcagcagtgcgagcaaatccccggcgcctgcggtatctgaatccaaagctgaaccatctgctcctgtcaccaagacagaaaccgatgccagtgcgaaggttgaagagctgaagccctcagtggatgatgctaaacccgtagaaagcataggcatccctgagccggtggatgctaaggtggacgccgctgcagctactgatgccgcggcgagtgctgctgatgacactgaagacaaggaacatggccctttggctgggcctaatgtgatgaatgtcgtcgtggtggcttctgaatgcgctcctttctgcaagacaggtggccttggagatgttgtgggtgctttgcccaaggctttggcgaggagaggacaccgtgttatggtcgtgataccaagatatggagagtatgcagaagcccgggatttaggtgtaaggagacgttacagggtggctggacaggattcagaagttacttattttcactcttacattgatggcgttgattttgtattcatagaagcccctcccttccggcaccggcacaatgatatttatggaggagaaagatcggatgttttgaagcgcataattttgttctgcaaggccgctgttgaggttccatggtacgctccatgtggtggtaccgtctatggtgatggcaatttagttttcattgctaatgattggcatacggcacttcttccggtctacctaaaagcctactaccgggacaatggtttgatgcagtatgctcgctcagtgcttgtgatacacaacattgctcatcagaagctggctaaaaagctgagcgtttggcagtccggagcagcttttggtggccagaagctgccagaagtcgaaacaaacagggccaaaatatggtggcatataaggaagggtcgtggccctgtagacgacttcgtcaactttgacttgcctgaacactacatcgatcacttcaaactgtacgacaatatcggtggcgagcactgcaacgtttttgccgcagggctgaagatggcagaccaggtggtgaccgtcagtaatggatacctatgggagctgaggacatcggaaggtgggtggggcctccacgacatcataaaccagaacgactggaagctgcagggcatcgtgaacggcatcgacatgagcgagtggaaccccgctgtggacgtgcacctccactccgacgaatacaccaactacacgttcgagacgctggacacgggcaagcggcagtgcaaggctgccctgcagcggcagctcggcctgcaggtccgcgacgacgtgccactaatcgggttcatcgggcggctggaccaccagaagggcgtggacatcatcgccgacgcgatccactggatcgcgggacaggacgtgcagcttgtgatgctgggcacggggcgccccgacctggaggacatgctgcggcggtgcgaggcggagcacagcgacaaggtgcgcgcgtgggtggggttctcggtgcccttggcgcaccgcatcacggcgggcgcggacgtcctgctgatgccgtcgcggttcgagccgtgcgggctgaaccagctctacgcgatggcgtacgggaccgtgcccgtggtgcacgccgtgggcgggctccgggacacggtggcgccgttcgacccgttcaacgacaccgggctggggtggacgttcgaccgcgcggaggcgaatcggatgatcgacgcgctctcgcactgcctcaacacgttccggaactacaaggagagctggcgcggcctggaggcgcgcggcatggcgcaggacctcagctgggaccacgccgccgtgctgtatgaggacgtgctcgtcaaggccaagtaccagtggtaa

SEQ ID NO: 35474 - DNA, 633 bp, Zea mays
  Peptide Sequence Number=SeqID_77253
atggccaggccacatgaggaaacaacaaggccgaccgaggcatcgcaaaaagaattaagacctcagaggagtcaaaacactcctctgaggcctcgggggctacacccggcggcctcggcctcgggagaagctctccgcctcgcccgaccccaggcctcggccttagccttggcctcgggagaaggtctccgcctcgcccgaccccaggcctcggcctcagccttggccttgggagaaggactccacctcgcccgaccccaggcctcggcctcagccttggcctcgggagaaggactccgcctcgcccgacctcagcctcgacctcaggagaagcctccgcctcgcccgtcctgggccttggaccgactgcgctataggggatacatcattaccctactcctagctagctgcctcaggctacaaaggaacaagaccggtgtcccatctaaggttactccggcaacagattattattatgtattctgtttacatgtttggtgtgatgttaatttctcctttatactatgcttgtttgtattgtggcgagtagacgagccagccactgaggatccctgtgttcagcaaatagaagttgctgagcaggagctcattgaaggcaagttgtgcccttga

SEQ ID NO: 35475 - DNA, 693 bp, Zea mays
  Peptide Sequence Number=SeqID_77254
atggcaaaacggttttcccgttcctcgaacgacttgcgcacgcgcaacagataccccggatcggaaaggggacatttcgaaggagcccttcgcagcaaaacaaacaggccccgagcccttctactgatcaggggttcgaaggttgcaccctgcggggttcggcaaccgccccagagcactcgggctccgagccctttactgatcaggggttcgaaggttgacccctcagagggatttgacagccgccccagaacatgcaaagtcagggatgaccctgggtacgtccgttacatggccaaggctcgggctacgctcccgaggtaccctaagacattttcgagaccagcgggaacggtttgtaatggaatcccaccgaagggaggcaccgagcccttggaccctatcgaatgggtccaggtccagcaaatcacctgcagggtaacatggcgcattcccccttcctccttgcggaaaggcgacaaaggggtgtacaataaaaagccgagacggtcctcgatcgtcctctcgctccgtgcagaggctcggaggctgctctcgcaccaggctacggccaaattgttgaccacgtcgacaaaccagcttaaaaactcggagcctgaccatgcacccgggctgcggccaggccacatgagggaacaacaaggccgaccgaggaatcacaaaaagaattaa

SEQ ID NO: 35476 - DNA, 645 bp, Zea mays
  Peptide Sequence Number=SeqID_77255
atggcgcgcaccaagaccacccaacgcaaagcaaccggacctcatggtgtacccccgcatcagctggctcctagacacgaggggagcaacagcggaagcaatgatccaattggggatctggaggccagggtggcgcgactcatgaaattgtggaaacgcgacacggccattgactgggccgtaaattcgcgctctttcgtctgggattgtgaggccaaggctctagcccgggtagcggaactaagtgcatcccttgaaaatctgcaagcgtattgtaacaccctgcatgaagaggtgcacatgttatatgaccggctgcatccaaatgtgccaccagaagttgcaacaatgggagctggaccatctggaacagttaatggaggacctgatggggagttggacctttttgaagcccctccttccatgaatgttctcccgatactagcagtggctatcgctgccttagtcaacactaccgctgacaacacgcgtttcttgtgtgaaactggcgggaaatcaatttcagcaaacatggaggcagaggtcgacctcaaggggtcacgagacaccacatatttagagttctctgaaacccgtccaccgctctttgttaaggcagaagaaccattggaagtagatgaatga

SEQ ID NO: 35477 - DNA, 825 bp, Zea mays
  Peptide Sequence Number=SeqID_77256
atggcgcgcaccaagaccacccaacgcaaagcaaccggacctcatggtgtacccccgcatcagctggctcctagacacgaggggagcaacagcggaagcaatgatccaattggggatctggaggccagggtggcgcgactcatgtcagagctacgccacgggagttgggagcgtgcgcgagatagccaccgcattgctgaactgtcagcgaaagttaatcgcttgcaacaggaaattgtggaacgcgacacggccattgactgggccgtaaattcgcgctctttcgtctgggattgtgaggccaaggctctagcccgggtagcggaactaagtgcatcccttgaaaatctgcaagcgtattgtaacaccctgcatgaagaggtgcacatgttatatgaccggctgcatccaaatgtgccaccagaagttgcaacaatgggagctggaccatctggaacagttaatggaggacctgatggggagttggacctttttgaagcccctccttccatgaatgttctcccgatactagcagtgatgccatcaagaactcgtgctcatgacggggcgggaacttcccgcggcggggaggaaacttcaaacccgccacatgtacctccttttttggttgaggctatcgctgccttagtcaacactaccgctgacaacacgcgtttcttgtgtgaactggcgggaaatcaatttcagcaacatggaggcagaggtcgacctcaagggtcacgagacaccacatatttagagttctctgaaacccgtccaccgctctttgttaaggcagaagaaccattggaagtagatgaatga

SEQ ID NO: 35478 - DNA, 453 bp, Zea mays
  Peptide Sequence Number=SeqID_77257
atgtcgcgtgcgttcgacgactactgtatcgaggattgtggcgtcatcttggcgccggaggtgacacagaggaggatcgacaacagtgaccagttcgtcatcctcgccaccgtcaggcctccagtactcctctcctcacgccacataccttacctcgacggtctcctctcaggctctcatgcgacacgagaggccaaagaaaccacccgaaccagctccacgatctctatgttctgccagctagaggtgtcatggatggagataaatgcggaggtccgagcacgcgcagatgagggagatgacatcagcgtgattcaatctgtgaagaggagggataataacgaggtggagctccgacaaggtgtagattgccgatgcccactccgacgaggtggagattgtcgacgcccacgccatcgaggtggagctgcgccgcgacacctacgccgatga

SEQ ID NO: 35479 - DNA, 420 bp, Zea mays
  Peptide Sequence Number=SeqID_77258
atggagataaatgcggaggtccgagcacgagcagatgagggagatgacatcagcgtgattcaatctgtgaagaggagggataataacgaggtggagattgtcgacgcccacgccatcgaggtggagctgcgccgcgacacctacgccgatgagaacgtagatgtcggcgataacgagggtgggattgcttcggaacgccgaccacctctcctatcctgctcctctcacctcccctcatcctctaccttgatggatatggatttaaattctcatctagcaatatctatcataacagcacatgagagttgtaggtgtattgaagctgttgcgctatcaacaattcttcttgtgactgttgcttcttaccaattcattgatatgagatttctctaccacttgaagcctgctagaatcaaatag

SEQ ID NO: 35480 - DNA, 435 bp, Zea mays
  Peptide Sequence Number=SeqID_77259
atggagtccaaatttaacacacttatctgcaggagtgacagcagcaaaagtcgatcaccagatgtgtttgcatcaccagtgtctcaggataaaactggaaacagtggagctattgtaaaatcaagcaatgagctagcaaaaactacacctgctggggagtaccttacgtctgcactaatggattttgatcctgaccagtttgagggatttgtagcaatagttgatggtgctaataagcttttgatgctgaaaagggttaagaacgtgggtacccacgttcttaacattaagaacgtgggtaccgtcgaacttaatgtgcagccctcgcagacccacgtagggttaagaacgtgggtacccacgttcttaatgttaagaacgtgggtaccgtcgaacttattatgtagtccgcgcagacgttcgcaggacacataa

SEQ ID NO: 35481 - DNA, 630 bp, Zea mays
  Peptide Sequence Number=SeqID_77260
atgctgacccagtgcgttggcctagttcctattggagatcagggaagtcatgttgacgagggtgatcagggggtaaatgccacacaattgctgcataacgaacctgtacttgttactgtaagtggtgatggcagtgttggaatgtgggacgttactttaggtcaaccttgtgtcagacatatcgttgcccatactcgacgtgctaatgcggttgttgtggcccttaatgacaaatacctctgcacaggaggaagcgaccagaaagttgcttgcctaagggagatccatgcttctatcctaaggaagcatttacatcgattggaacatcctggtgctgttgaaccggatgtggaatctgagaaagaagttgataataaactggaggatgagatgcacgaggatgaagatgataaacgatattcacctgagtctatacctcaacagacagataaccaatttcaagaggaagatggatccttttctccacatctaatgcatggcaacaaagatgaagatgcaattgatcctgaagaagacaaagctgagctgaaaagggataagaacgtgggtacccacgttcttaaagttaagaacgtgggtaccgtcgaacttaatgtgcagcccacgtag

SEQ ID NO: 35482 - DNA, 1008 bp, Zea mays
  Peptide Sequence Number=SeqID_77261
atggaatctctatttataggcttgtctcataacaagccaaaaaaatcggtggccaccgcaatagttcgagaagttttatctcatgactggttgctcctagactatatttgcacgcaaggtgatcttgccctcattgattttattaatgaaatcccttgtgaaccaagggtagaagtcgtgcttattgatgatgcctttgttgaaaggaagtggatggagtgtttatttcagccgaacgcatatttaggtgacgaggttatagactgttacataaatttgataaaagctcaaaagcatctaaagtgccgatctggaggtcgcgttcacatagaaaatgctttccagttcaatttcctgaagcaagatggtgatgttgaaattaaaacagaggagctatatccaattaaagacatgacacaaatatgtagcgctgaacgaagggtgttactttacctaggccatgacatggtgtttattccgataaacatccgagagacgcactggtatcttgccattatccatgcaagaaatatggagacacaagtgctcgattcacttggtacttcacaagaccgcaaagacctcactgactctattaaaggactgcaaagacaaattgatatgatatctcaacgtaaggagttaaaagaccacaggtggccagacctccaagttgcttcttggccgctcagagaaatagacatgggatatgcaaagcatacagatagctcttcatgtggtctctttcttttaaactatatcgaatactggacaggggatgaactgtctgacagttttacccaggatgacatgtcacactttaggaaaaaaatggctgctatattactatcttcagacctaaataagagaagggggtgtctgttaaacaaaaatgaaaaagaagttgactctggaagcccatctgatgttgagatattagaaaacccaacagattctaataagaggaaactactccacgtgcttgatgatagcgaagtagtgtattaa

SEQ ID NO: 35483 - DNA, 1107 bp, Zea mays
  Peptide Sequence Number=SeqID_77262
atgtcatattctaaaagaatagcctattctattagtaagattccaattcctcgaaatgaaaggaaacaaacggggcctaagaggaaactactccacgtgcttgatgatagcgaagtagtgtatgaagatgaggaaggtcctattactcaagcagacttgcaaaggtggtttgttgatgattgggataaaagagctcctgtaaaagtctctaccgatggttgcaccaatgactttttaatggttggtctttccacaaaggacatgccagtgaccaaagccgattcaatagatgttttatgtgattatatcatggcaatagaagacgatacgacactagagagaacatgggtgcgaagtttcaatccttttaagatagaaatatctgtcaaagacctgcaaaacatattaaagacaactcaagatatgattctaagatgttttgacatggttgttcggctgcttgccaataaagagtcacgtaggccgaaagaagaaatcataaataatagaaagcattatatggacatgcgtttttggagaatggttggttttggtaaacttccaaagtaccatcaggatcctacaacagaagagttagccaaaacactcgattgttggccatcaatgaattattatatcacgggttgtagatatgttctcatgccatggaaattcaatggatgttacgcccttttcgtaatagatcatgttaaaaagcatgtgacttttatcgattttacaccgactcaagattggtgtaaacacatgccatacaagaggttcgcggaagcgattatcatggcctcaaaaaaatataagattgcttacagcaagaaacattctggatgggcggaggatatctttaagtgggaacatacaattcagactggtgttccaattgacttaagagggtttaataccagctaccttgttctacaagctatggccatgtgggggaatgacagacgactgaaatttgttggggatgcaaagactcttcgaagaaactttgtgattgatcttttaagttatgaggacaatttgtgccgatatgccatccctgcaaacatacaacaaagacttgtcgatatcgctaaaaaggattag

SEQ ID NO: 35484 - DNA, 588 bp, Zea mays
  Peptide Sequence Number=SeqID_77263
atgggacaaagccctgagtacgaagtgtactttcgcaagacttacccgacaaaagcaagactaagcataggaaaaaccttttgtaaaacagggattcaaggaagttctggtagaaaaagaaaaagaaaagctgtgaacagtactgggccgaaagcagcccaagcggcccagcctgcacagaaacagggacgcgcccacgcccgcactgcaagctttgcaagaaaggccgtggcgggtttaaatattccactaagagtcctagctactattccctgtgtcgttgaccctttacacttaagccctccgcctttcttttctttacacgccgagatcctcgacggtgaaccgcacagggagccgagctccgacgagctagactggccggagggagaaaatactggtgcttccgagtggcagacaccgaatcggaccccgcccgcgcatttcccccaacataatttcaccaaaggctacttggtttgctctggccgtagtgatcgtggaccatgcggacagatgcacacgttcccggcgattggtgacggtctagttcaattgggtgggtcaatgagcatcacgggttcatga

SEQ ID NO: 35485 - DNA, 198 bp, Zea mays
  Peptide Sequence Number=SeqID_77264
atgggcttcgctccgataccagctatgacagaacctcccaagtcattaggcccacctacagttgtccttgtcccacggacttcagataaccctgcagaacagaagcaacaaaagtttgctgcttcttcacctaaaacaacatgggacaaagccctgagtacgaagtgtactttcacaagacttacccgacaaggttaa

SEQ ID NO: 35486 - DNA, 141 bp, Zea mays
  Peptide Sequence Number=SeqID_77265
atgggacaaagccctgagtacgaagtgtactttcacaagacttacccgacaagtctgcccgaggaaaagcctacccatgacgaggcatgtgaccagttaaagggtcctcggtcagcaggcctacatcgagaaggtccttaa

SEQ ID NO: 35487 - DNA, 603 bp, Zea mays
  Peptide Sequence Number=SeqID_77266
atggctgttcggctgcttgccaataaagagtcacgtaggccgaaagaagaaatcataaataatagaaagcattatatgggcatgcgtttttgggttcttatgccatggaaatttaatggatgtcacgcccttttcgtaatagatcatgttaaaaagcatgtgacttttatcgactttacaccgactcaagattggtgtaaacacgtgccatacaagaggtttaatactagctacctcgttctacaagctatggccatgtgggggaatgacagacgactgaaatttgttgggcgcaatctaaacagcttaggtgttgatggtagacttttcatcattggcttccaagggggcatagcagctgaagtgaacctgcaagctgtgcttgcacgccgtttgaccatacaagctgctggactgcgcaacaaaagccttgccaataaggcagagattgttagtgaggtggaaaagaacgtgtggcctgctgtcactgctggcaaagtgaagccggtgatttacaagacgtttccgttatgtgaagctgctgaggctcataggttgatggaagctaccacccacatcggcaagatactgctgctcccatga

SEQ ID NO: 35488 - DNA, 1236 bp, Zea mays
  Peptide Sequence Number=SeqID_77267
atggtgaaccggatgcaaactgaagttgggagatttggagggtgctattcaagtctatgtggaggagtgtggttttcaggttgcaacgaacagggaaatggatgtagttttgttgggaataaggatgatgctaatggagccattgagcggacacacctctcaatttatcccatgtctcgccctaggttgtttcgaggaggagccactgggttgtttggctcggatctgactcaatcagttacaagtatgcgagggggtgcaaaagaaggaagggagaggcgcttggttgacccggaccggacgacaggacaccgccagggggttcgctgcaacgcagcgacgacttccgcagcttctcaggccaaggtatttattccgataaacattcgagagatgcactggtatcttgtcgtgatccatgcaagaaatatggagatacaagtgctcgattcacttggtacttcacaagaccgtaaatacctcactaaccctattaaaggactgaaaatacaaattgatatgatatctcaacgtaaggagttaaaataccacaggtggccagacctccaagttgcttcttggccgctcggagaaatagacatgggatatgcaaagcagacatatagctcttcatgtggcctctttcttttgaactatatcgaatactggacaggggatgaactatctgacagttttacccaggatgacatgtcacactttaggaaaaaaatggctgctatattactaccttcagacctgaataagagaagggggtgtctgttatacaaaaatgaaaaagaagttgactctggaagcccatcagatgttgagatattagaaaacccaatagattctaataagaggaaactactccacgtgcttgatgatagcgaagtagtgtataaagatcaggaaggccctattactcaagcagacttgcaaaggtggtttgttgatgattgggataaaagagctcctgtaaaagtctctaccgatgggtgcaccaatgactttttaatggttggcctttccacaaaggacatgccagtgaccaaagccgattcaatagatgttttatgtgattatatcatggcaatagaagacgatacgacactagaatgttttgacatggctgttcggctgcttgccaataaagagtcgcgtagaccgaaagaagaaatcataaatgatataaaccattatatggacatgcgtttttgggatcctaatgactga

SEQ ID NO: 35489 - DNA, 1761 bp, Zea mays
  Peptide Sequence Number=SeqID_77268
atggaggtcgcgaggcaactatacggcagggtcaccggggaggcggtgtacgtggctgaaccggtgtcggcgcccgcgcggagggggtcgcctacgaagggatgcctcggtgcaatgcggctggtggcaggaccgcggcggaagggtgatcaagtggtctgccttggttttgacatgagaaacaatggctgctacccgaccatcgttctggtgcacgtctggggcattggccacttcgtaccaatgctcgaggtcggcaagcggctgctcgcacgcagtgcacggctcctcacgatcactgtgctcgaagcctccggcctcgccatccgcttccaccatctgccagcggtggaacccccaaccgaccactcgggcatcgaggagtacatatcccgctacgtgcagctgtactcgccccacgtcaaggcggtcgtcgccagcttgacgtgcccggtggccggcgtcgttgtcgacatcttctgcacggtgctatttgacgcggcataccagctcagcgtgccggcctacgtgtacctgatcaccagcgccgcgatgtgcgcgctcttgctgcgctccccggcgctcgacgaggaggtagtcatcgaggtcgagttcgagcaaatggaaggtgatgtggacgtgctagggctaccgccagtgccagcgtcctgcctgccgacagggctggataacaggaagatcccgacctaccgctggttcctgtacaacggcaggcgctacatggaagcaacaggcatcattgtcaacaccattgtcgaggtcgagccacgcgtcctcgcggccatcgccgacgggcggagtgcgtgcgctggctcgactcagcctctgggctccgtggtgttcttctgcttcggcggccaaggctgcttcacggcgccccaagcgcacgacctggaccacagcgggcatcgattcctgtgggtgctgcgcgggacgccggagcccggcacgaagatgccctcggacgggaacctcgcggagctgctttcgacggatttcttggcgaggacgaaggacagagggctcgtgtggcctaccaaggcgccgcagaaggagatactcgcccatgccgccgtgggaggcttcgtcacgcaatgtggctggaactcggtcctcgagagcctctggcattgcatgccgatggtgccatggccgcttgccgtcgagcagcactacatcgcgttcacgctggtggccgacatgggcatcgccgtggcgctgaacgtggaaaggaagaggaagaatttcgtggaggcaaccgagctggagcgagcggttaaagctctgatgtgcgacgatgagacagcgaggaaggttagggacaaggtcatggagatgaaactaggtcaaacctcgaacaaacactactgggaggaggcgctcgtgttgacgttggtcatcgacgacgagaagaagcttggcgactgccagtgcgacctctggaagcagtcctacgtggttgcatgcaccgctgtgtacgacaagctccggcgcagccaccgcttggacgtggtccggagtggctgcaccgcgccgtccatcgttaagcaggaggacctcgttgtcgtcgccaacgtcggcgcctctcgagttgttctaggcaccacatccgacgacgacgccatcacgctgtccagcgtcatctcggtgccggagatgacgcagaggaggaccgacaacaatgaccagttcatcgtcctcaccatcgtcggggtagcttttatgctggcatgcttttaa

SEQ ID NO: 35490 - DNA, 453 bp, Zea mays
  Peptide Sequence Number=SeqID_77269
atgcctatgttgaatgtctatttcgttgaaaggcagggcaccggaaagggggtggggcaagcgctccgacggcaagcagcggcgctgcagcgcgccctccatgcccgacaagaccgtctgcgagaagcactacgtccaggccaagaagcgctccgcgccttgctccgccgctcctcagcctcctccctcgcgcccgccttcccattctcctcctccgctgccgtcgctcgcctccgcgtcgtcgatgaggacccgcccatggcggccgcgaggcccctctacggcagggtcgccggggaggcggtgtacgtggttgaaccggtgtcggcgcccgcgcggagggggtcgcctacgaagggctgcctcggtgcaatgcggctggtggcaggaccgcggcggggctggtcggcagaggcccactatggtttcctggtggtggcgctgaagggataa

SEQ ID NO: 35491 - DNA, 807 bp, Zea mays
  Peptide Sequence Number=SeqID_77270
atggcaccccgcacgctctatgacgacggcggctctcagcccccttacggaagcaagaggacgtcagcaaggactcaacagccccgacagctgtccttccgccaggctccagcgctcctgcgacggccacgacaccacaggaactgggtgccaaaacctctccggctgccacgatggcataataggatcagatgtatctgcggtgcatacacattgaatacgtacttagttcacagtccaaaacgatgggatctcatgcggccacaaccacctcacccacgaactagtgctacgcgacacgcaagggcgcgagtagctgcgccaaggcttctcgagccgcgctggccgcgcgagggcgccgcgagccatgtcggggacgctcctaggcgagccaagggcacgcaggccgcgtcgcgcacgaggggagctcggccacgctgcgcaccaggggagaaccgtccggggaggccacggctgggctgtgcaagggtgcgcctggccaccgcgcaggcagaccacattggctggccgacgcgaagacgggccgcgagccgcgcgctggccgcgccgagccaccgtgctggctacgcaggctggccacaccaggccaccaggctggatggccgcggccgcgggccgggtggcaatggccgagcggggctcgccgttggccggcaagagctgcgtcgagccgtcgcgcgcatgctggccgcagaccgccacgccggctggccgcgccgggcctccagccgtgagatggtgcgtgggccgcagctgctgcgagctagcacgaggataggggcatga

SEQ ID NO: 35492 - DNA, 432 bp, Zea mays
  Peptide Sequence Number=SeqID_77271
atgtcggggacgctcctaggcgagccaagggcacgcaggccgcgtcgcgcacgaggggagctcggccacgctgcgcaccaggggagaaccgtccggggaggccacggctgggctgtgcaagggtgcgcctggccaccgcgcaggcagaccacattggctggccgacgcgaagacgggccgcgagccgcgcgctggccgcgccgagccaccgtgctggctacgcaggctggccacaccaggccaccaggctggatggccgcggccgcgggccgggtggcaatggccgagcggggctcgccgttggccggcaagagctgcgtcgagccgtcgcgcgcatgctggccgcagaccgccacgccggctggccgcgccgggcctccagccgtgagatggtgcgtgggccgcagctgctgcgagctagcacgaggatag

SEQ ID NO: 35493 - DNA, 825 bp, Zea mays
  Peptide Sequence Number=SeqID_77272
atggacaagatgggttatctgaagcttgagcttgggctatccataatgccgaaggaccatctggcagacaacttagcatataatagtcagaaggagcgttgccgccgccggtgggtgggtcccacccaccagcgcgcccctccccggctcatcttccccaaccgcccggccgcccctttggcgcccacgtcgcgcacgcggagccgccaaccccctagccctcttctctccccacctccacgctcatgcccctatcctcgtgctagctcgcagcagctgcggcccacgcaccatctcacggctggaggcccggcgcggccagccggcgtggcggtctgcggccagcatgcgcgcgacggctcgacgcagctcttgccggccaacggcgagccccgctcggccattgccacccggcccgcggccgcggccatccagcctggtggcctggtgtggccagcctgcgtagccagcacggtggctcggcgcggccagcgcgcggctcgcggcccgtcttcgcgtcggccagccaatgtggtctgcctgcgcggtggccaggcgcacccttgcacagcccagccgtggcctccccggacggttctcccctggtgcgcagcgtggccgagctcccctcgtgcgcgacgcggcctgcgtgcccttggctcgcctaggagcgtccccgacatggctcgcggcgccctcgcgcggccagcgcggctcgagaagccttggcgcagctactcgcgcccttgcgtgtcgcgtagcactagttcgtgggtgaggtggttgtggccgcatgagatcccatcgttttggactgtgaactaa

SEQ ID NO: 35494 - DNA, 1068 bp, Zea mays
  Peptide Sequence Number=SeqID_77273
atggctccagggaagaggtccacatggacctcacggaaacccgaagaacctgtgccaactgattacgagaaaataagggctatgaatatgatgaagaacaatcaattgtttcaacggctaggccttggacaactgaaatcactggtgactgctacagctacaaacaacaaagaagactgtcctcagcaatcagagagtttatatgatggtgaaaacactgacaattctaatgaagaggaatcccaatgtcgtaacgatggtcgtgccaacatatccaatgatggtgatcagatctcaacaaaagtaacaagtggaaataaaagaattgtggcacctgcgcaggagcgaacaattagagtcactaggcaaagaattgctgaaataaaccaagaaaatagccacaacctgtctgttcataaacaactcagttcatgtcctgctacaaaccatgattcgatcaaaactcttgttgttcctacacaacctagtgcaaataccaccatagacaataacccaacacataacatagataatgctatagagcctaattctctgatacaggaggagagtgataaccacactgcagttgaaggaacaatagatatcataccaaggagaaaaagtatgggcaaacaacttgaatcgttaagtagaggactaggaatgaagattccaatccaaattactgaagggagcaagaggccggagccacccattcaagctgctaagtttgcatcagaggggggaatcacattgcggcagcacattccaatatttcaccacttgaaggagtacaagaggaaagagaatgaacctacaataaaaaactatattggaaaagttactgctcaattcaccatggacaatgatagcaaggcagtggaagatgcttgtctagatatgctaaaggttggacaacgccaaatgaggtatagactaaaacaaaagtatttcaatgggatacctgctaatcaagtgaggactacatcgcctatttcaagcatgtctgatgaggactggagaaagttggtggagaagtggcttgcactgtactatcttattgcttga

SEQ ID NO: 35495 - DNA, 246 bp, Zea mays
  Peptide Sequence Number=SeqID_77274
atggctccagggaagaggtccacatggacctcacggaaacccgaagtattgtatgcctttaatttactttatgttacattaatagaacctgtgccaactgattacgagaaaataagggctatgaatatgatgaagaacaatcaattgtttcaacggctaggcctttggacaactgaaatcactagtgactgctacagctacaaacaacaaagaagactgtcctcagcaatcagagagtttatatga

SEQ ID NO: 35496 - DNA, 762 bp, Zea mays
  Peptide Sequence Number=SeqID_77275
gacgccaggccgagccaagctccgtgccccgcgcgtctgatgccgaccctacccctcgtctcgctcctctctgtccccagcgacgcgctgctggcggcggccgcgctggcgaggctggaggagaggccgtcaccgctacggcgggagtttggggacgccacgctcagggacaccgtggcgccgctgctggtcccttgttacgacctggccacggggcggccttcctcttctcccacgccgacgccgtggagagccacttccggctccgcgacggagaaagaattggctgttgtgaagatcaaccctgcggatgtcgaaattatcgctagtgagcttaagctggacaagaagatcgcgaagagaacgctctgtgagcacaagggtgatgccgtggctgcgcaaggtctggactctggaggcagagctgctattatgatgtttgacgttgcagatatgcatggacatcatggtgatggacgtcgtgctgctgctgttcaagtcatcttcccgcagtcccaaattgcccgagggaaggcgtcctctgtggctgaaactggcagcacagatcatgttccgtcgacgtcgtcaactgctgcagactcaagcacgcttgctgacaaggcaatagcaggtctgcctccagaccttctgaacaagctaacgattcgaagcggaaggctaagtcacaggaccctggctggaagttcggttggtggcctgatccgtctaagaaggagttcgtgcaatgtatcttttgcatga

SEQ ID NO: 35497 - DNA, 822 bp, Zea mays
  Peptide Sequence Number=SeqID_77276
atggactgtgtgacgatgaaacaagagcaaggacttggcaccaatggaccaaatgcaaaggacgccaggccgagccaagctccgtgccccgcgcgtctgatgccgaccctacccctcgtctcgctcctctctgtccccagcgacgcgctgctggcggcggccgcgctggcgaggctggaggagaggccgtcaccgctacggcgggagtttggggacgccacgctcagggacaccgtggcgccgctgctggtcccttgttacgacctggccacggggcggccttcctcttctcccacgccgacgccgtggagagccacttccggctccgcgacggagaaagaattggctgttgtgaagatcaaccctgcggatgtcgaaattatcgctagtgagcttaagctggacaagaagatcgcgaagagaacgctctgtgagcacaagggtgatgccgtggctgcgcaaggtctggactctggaggcagagctgctattatgatgtttgacgttgcagatatgcatggacatcatggtgatggacgtcgtgctgctgctgttcaagtcatcttcccgcagtcccaaattgcccgagggaaggcgtcctctgtggctgaaactggcagcacagatcatgttccgtcgacgtcgtcaactgctgcagactcaagcacgcttgctgacaaggcaatagcaggtctgcctccagaccttctgaacaagctaacgattcgaagcggaaggctaagtcacaggaccctggctggaagttcggttggtggcctgatccgtctaagaaggagttcgtgcaatgtatcttttgcatga

SEQ ID NO: 35498 - DNA, 684 bp, Zea mays
  Peptide Sequence Number=SeqID_77277
atggttaagaaaagtttagataagaatcagagtaagttttacactctgcagaggttgtaccctgtacccacaagtcatgttacccgtctgccaaggggtcatgaatcccatacacctctaccaaggaagcgaggcagggtaacactacgaggcctttacaaagttccactagcttccgaaaacccgctacagtttatgggaagagcacttgcaagaatcactcgtctgaccgccatcgcagcaaaatcaacccgagaacctcgctacatgcaactcccctactgcccttgcccctatcgggtaagtgataataaagaacattattgggtaatagaagtggtcaagggcacaacttgcctgacacttgagattccagactgcgcgacaaaaacagagaagtgcagggtctctgggcgtcgacgagaaattcggacaactccggctgcccagctcgcccagaagggtctcgaccacgtgcggactgccccggtggtggtcctggcacccaccgacgcccggccctcaacgtgtagaggtggcgccgacggcggtgatctttctgcccactctacacacggtcagctctctgcggtgaagtatttcgactctcaactggatgaggaagaggccacagaggttggcaacaaccccaatttatacgcggggcaaggagaccgggcctag

SEQ ID NO: 35499 - DNA, 318 bp, Zea mays
  Peptide Sequence Number=SeqID_77278
atggcgaggtgtatgggattcatgaccccttggcagatgggtaacatgacttgtgggtacagggtacaacctctgcagagtgtaaaactgcaatgctcagctttaaccattctctttgttaagccttacacttcatacgagctcccacctttgatggtcaatactaggaagggtggtggcattgatctacctcccaatcgacacactcggaggatatttaaacaaccacaaccacaacaagctgagatggatcctccaaatcccccatcaatcggagctgatcccgcagttgcagctcagatacggataatgcaatag

SEQ ID NO: 35500 - DNA, 234 bp, Zea mays
  Peptide Sequence Number=SeqID_77279
atggccggttcggccgcctccctgcccgcccgccgtgctcgcggttatgagcggccaagggagctccagagattagtgatacttgatcagagacattgtggtacaggtggttatgagactgttgattctggttatgactatgatgctggttgtcagcattgcaaccactgctcaggcgaagatgaagctgtggaaggagacttccaggagttccaagactacgacgagttctag

SEQ ID NO: 35501 - DNA, 519 bp, Zea mays
  Peptide Sequence Number=SeqID_77280
atggacgagacaacccacactctcagtgctgccagtgggacggcgggggtagtacctaaggttaagaccatcggctaccccaccgaacaaggaacagtactaggaaagtgcacgacgtgtagcatcctgtatggctgccttggtagtgcccctctcagaaatagagtagtgttccgagagagcctctacacccaggaggtcatcctccggacagcgcaccaggcaggtagccttccaacggtccgggtacctcctgtgactgtgctggtggactacacaatgggggcacctttggctagggccccggggtggggcgtctcacagactctacctcctgcggaggcgaggagtaagagtcctgttgctccctctcctgatgccgatgctcctgctccttgtgcagacgatgttgtagcctttctaggtggctcgactgatcggacaccatgcagcgaagtggacactccgcaaggtgagagcgcgggaaagggatcactgtcttacgagcagtgtgcttaa

SEQ ID NO: 35502 - DNA, 690 bp, Zea mays
  Peptide Sequence Number=SeqID_77281
atggtgggggaggtagtggctagggctcctcctcttgctggactcgctgttcctgttggttacgcctaccttgtcgacggggcaaccataggagtggtgatcacggggcggcgagagagagtggtccagctcagtgttgacggtactactcaacctacggttattctctccaatggacgagacaaccacactctcagtgctgccagtgggacggcgggggtagtacctaaggttaagaccatcggctaccccaccgaacaaggaacagtactaggaaagtgcacgacgtgtagcatcctgtatggctgccttggtagtgcccctctcagaaatagagtagtgttccgagagagcctctacacccaggaggtcatcctccggacagcgcaccaggcaggtagccttccaacggtccgggtacctcctgtgactgtgctggtggactacacaatgggggcacctttggctagggccccggggtggggcgtctcacagactctacctcctgcggaggcgaggagtaagagtcctgttgctccctctcctgatgccgatgctcctgctccttgtgcagacgatgttgtagcctttctaggtggctcgactgatcggacaccatgcagcgaagtggacactccgcaaggtgagagcgcgggaaagggatcactgtcttacgagcagtgtgcttaa

SEQ ID NO: 35503 - DNA, 231 bp, Zea mays
  Peptide Sequence Number=SeqID_77282
atgttcagattacaggtggcaacgaggttgatggttcttggttttgactctggtaatgctagtccactacaaccagacaggacacttgctgagtatgttgatgtgtactcacccttgctctacacaccaaaccccccatccccaggttgtcagcattgcaacccctgctcaggagaaggcgaagccgtggaaggagacttccaggagttccaagactacgacgagttctag

SEQ ID NO: 35504 - DNA, 279 bp, Zea mays
  Peptide Sequence Number=SeqID_77283
atggagagtcatgatctcagggcagaaagggaatcacggcttgtgggtaaagtgcacaacctctgcagagtgtttgaaactgatatatcagccgtgctcgtggtggcaacgaggttgatggttcttggttttgactctggtaatgctgctaacccccttaacaagagcattgatacacacttgatgaagatgttgccgactctgatcttgactgatttggaggagttggaggttgccaaaaggacaggtgcaagaggaaagaataacgagaaaaggtaa

SEQ ID NO: 35505 - DNA, 444 bp, Zea mays
  Peptide Sequence Number=SeqID_77284
atggcccccggcgaggccgtggagctaggagggtggcatagcaactccctggctgcagacaaggccccaggcgcaacccttgacgccctggacgtttgcgcaggagtgtgctgccgcgcagagtgcacagcagcagcaccaggcgcagggcggttagtggcccgaggtgtagaagacgcaacttcttcctccatgaggaacgaagtcgtggtgctcaacgatatggaccatggtgtcgagcaggaaaacaagcaaaaacctaatgccaagccccctacctggcgcgccaaatgtcggagaagaaattctccggccgggtggcagaacgcacccgccctaaatcctaagatcaggaggggcctaagcgttttgcctgctagatggattcgagatgaacacaagaacacacaagggtttagagtggttcaggccgccggagcgtaa

SEQ ID NO: 35506 - DNA, 609 bp, Zea mays
  Peptide Sequence Number=SeqID_77285
atgaacacaagaacacacaagggtttagagtggttcaggccaccggagcgtaataccctactccactctcaagggggcacgaacaaggatacggagccccaacatgtgggccctggggcaaaatggaaggaaataactaatgcatgtaacgcctgggcgatctccgagtgccatcatgtccgtagtccatacagtattgatatgtcgcggctgcttcctcgtaggccacgtggtagcatcgggtctccgcatgagtggggagcagaagcatatgcggtatggtctggacacgtgtcagctccggacccccgcctggccttgattaaggcctgggtattctttgtcccagaatcctgggaccctgctgtgagtggcccggaccccacacagaggggtccggtttgcgctcgtggaggtcctggaccttacccagaggtccgggtaccgacagtggcccccgggcccacctcaggggaggatacgagcctgcaggtggggtcaaagcttgattggcgattggtgcgccgcttccgtgcgtttgctgacgtaatcaccgccaacccgccttcggtcacgccaactgccatgtctgtccccgcggttgactga

SEQ ID NO: 35507 - DNA, 534 bp, Zea mays
  Peptide Sequence Number=SeqID_77286
atgctcgaaaggcgggagaagtcgctggccgagcatgagctcgaggcggaggagaaggagcggacgctggaggagcgggtccgtcggttccaggcggcgcaggcggcgcaggcaacatccggcccccaggcagtggaggcgatgaagaagacacttgaagatctccaggcggagcaacacgccggggtccagcgcatcgccgcatgtgccagcgaggcgagcacgacactggtgccgctaggggtgagtcccatcccagtgtcggagctaccgacgtccatctccgacgcgctcccggtgctggactccgccgccgatcgcctccaacgcctggaccagatccttggcgcccgcctggaggctaaaagcgtcaggctccgccgtgcgatgatcgagtacatcctgacgtgcgtccggagcaacgacccgaccatctccttggagccggtgatcgctggtccggtggccgatactaaagacgccgtccgggaggccgttcaagatgttgtggaactggtggccgaacgtttctag

SEQ ID NO: 35508 - DNA, 261 bp, Zea mays
  Peptide Sequence Number=SeqID_77287
atgtggctgttggaaggctgctgtcgcatggcgcactggacagtccggtgcaccaccggacactgtccggcgggagacgacctcaccgggcgggaggcggacctcgccaggcgggacaaggatctcgccttcaaggaggaaatggttgaaaggcgggagaagtcactggccgagcatgagctcgaggcggaggagaagcagcggacgctggaggagtgggtccgccggttccaggcgacgcaggcagcaccgggcccttag

SEQ ID NO: 35509 - DNA, 1044 bp, Zea mays
  Peptide Sequence Number=SeqID_77288
atggatcttcagctgagtataatcgattcggatcgccgtaccttcgcggttatgaagacttggtcattcttctacaaccatacccttgagagtcttttccttagtcggatgaatcaacaagaagcccctaccagagttggagagtttctacgagattttggtgttccagtggtcctgtggcgactacttcaagaggtcggatataccgaagcacccaagtaccagtggtcacgcactgttcttagaggacaaccatggtatgaggtagtagtgcgtattccagaacgtgctagaaaaccatcttggccgtattggatgttccatgccgaaggaaagactccttgggagggtgctcaggtagctgccttagaggtactaacaaccatttgttaccagaaaagggaagaaatacaagccacatctatgaggttgttccctgcagttgccttaagtgacccgttggtgtatcatcaccaggcccgattaatggaaagcattcctattgggcaggattctgttgaatcggcatctgctcgagttttgatggccgtgctagagttgcaacttactcgggggcacagtcgtcaaaagtggcagcagttgtacactgggagttatgcagcatttaagatgatggaaacggccaagaatagggcttgtacccaggcacaagaacgactggaggaaataaaggttcaagcagagcaggttattggactaaagcatcaggtaacagaacttcagacgcaacaccaagctgatcagaatcgcattaaggagcttgagcatcagctaactaatgctcattctaaatcaaaagttatgagtcagcaacaagaagaaattcacttgtatgctgttgctgttagagaagacctcaaggaaaccctaagcttcataagccagcaggatcagacgataaaagaattgaatcgtgctcatcccatggagtttcaagtagcacaacggcttgtcaaccatctgcagcaagcagtgcataggctcaatgttgccttttatcctactcctacatcggcggactaa

SEQ ID NO: 35510 - DNA, 309 bp, Zea mays
  Peptide Sequence Number=SeqID_77289
atggccggggatgcagcgttcgtgctggggcgttgggccatcatgccaggccaccgcctcgtgccatgcctggtgaagaccacagccaccaacgggcagggccaggggctgggcggtaggggaggctcgacacgtgcaactgtgatggccgtgttggccatgggaggagagagatgcttgagaccgattgatgtaattcttaaggatctcttggacctgtgggttaggacccacacacgctttcgttgcgcctctctgatcttgttggttgatgttgatcgcattgtcttcattggggttagtggctaa

SEQ ID NO: 35511 - DNA, 282 bp, Zea mays
  Peptide Sequence Number=SeqID_77290
atgaagacaatgcgattaacatcaaccaacaagatcagagtggcgcagcgaaagcgtgtgtgggtcctaacccacaggtccaagagatcctcaagaattgcatcaatccgtctcaagcatctgaaagtcaaagaagtcagtccacaagttaagcttgtagagtcaaaatcaactcaagaaagctgtgaacaaccgaggaaccaatcgtattttcttgctagcctcttcttgaatctcgagggcgagattcctgttaagggggttagatttgtaacaccctga

SEQ ID NO: 35512 - DNA, 1806 bp, Zea mays
  Peptide Sequence Number=SeqID_77291
atggttttcggtaatttggatgttgtgtctgccaatgatattgcggcatccctggcatcacgtctggaggttgatgaaggatccttggttattaggcagctctctgcttctttcctgttgatgctgctttctgatagattggtgcaacaattgtgtggaagatggtcagttgtgcatgctaattccttctcactttcttgcaaaagatggtcacgccttatgaattcctctggaagcactcttcctcagttgttagaggttgaactggatggcatccctgtacatgcctgggaagtacccaccgtggagagtttgctcagcccttttgcatggatagagagtgtgcatgaagatacattgcaactaagaaatctcagcagcttctgttgctctatttggtgtctggaccctgtcagcatacctcctgctagagatctttgggttgttgagcctctgcaactgggtatcagggaagagcctcatcgtcatttgcgctcccgttctccgccagcatacaggggtcagtgtagtggagcttcccttggtcgtgatcaaggcacaaatcattatgttcagggttcgtcctcctaccatggttttcgtgaagctagatgtggggatccttgtgttgtgcagaacgtgaaccttgagccaccccatggctcggtcatagttccgacatttgtgactgcccgcacctcatcatccattcatggacttcctgaagccggtttgcagaatgtgatcctggagctgccccctagttcggtcacagctccgacgcttgagtctggccaccccacaccctccactcaaggttttatcgaagacgatggtggtggattatgcgttgtgcagaacgtgatcctggagccaccccctggttcggtcatagttatgacgcttgtatctgctcacaccacaacctccactcagggtagtctcgaagttgatgatgatctcttatgcgttgagcagaacatgaaccttaagccaccccctagttcggtcactgttctaacgcttgagaatgctcagacctcgtctatttggctagattctagagctgaaggcaggaagaccctggctgaaaatcagttaaagtctacttcaatgttgcctgttgggacttatggtgatagggctgccttacaagttagtcacccatccaacatggtaactaaggtttattacagaagacggttgtgtgggaagcaggaaggttctctaatttcagagcagttgtctatgtcggagctagatggccgtatctgccccggcgtctcacagtcgagtgacagccctaggtgccaggaagaggtctgcggcggacttttgcaaagattcgcacgtatgcgacctctggcgacatttgaacactggaagaaacaaaccgccacgtgttcgacgccgtctgccgcgctagagcacgcccccgcgcgcgcccgcgccgcgcccaagccgagccagcgccctgccattcccagccccgtccagccctcggagaagactgtgcgcgtctccgtgaagctccccgagcgtggaatcgggctctgcttcaccggagaggccggcccaaggtcaccggacttcaaccgaccgccggcaaccgtggaccgaggccggagcacacgccaccgacgagctcacccgcctgctcacgtggaccgggcgattccggccgtccccgacgacgagccgtacctcgacgtgatcgccagaccctccccgagccaaccctacacttcgccggaactccctcgccgccgggacctcggcgcaaactgtttttccaggaaaacttaa

SEQ ID NO: 35513 - DNA, 1769 bp, Zea mays
  Peptide Sequence Number=SeqID_77292
atggttttcggtaatttggatgttgtgtctgccaatgatattgcggcatccctggcatcacgtctggaggttgatgaaggatccttggttattaggcagctctctgcttctttcctgttgatgctgctttctgatagattggtgcaacaattgtgtggaagatggtcagttgtgcatgctaattccttctcactttcttgcaaaagatggtcacgccttatgaattcctctggaagcactcttcctcagttgttagaggttgaactggatggcatccctgtacatgcctgggaagtacccaccgtggagagtttgctcagcccttttgcatggatagagagtgtgcatgaagatacattgcaactaagaaatctcagcagcttctgttgctctatttggtgtctggaccctgtcagcatacctcctgctagagatctttgggttgttgagcctctgcaactgggtatcagggaagagcctcatcgtcatttgcgctcccgttctccgccagcatacaggggtcagtgtagtggagcttcccttggtcgtgatcaaggcacaaatcattatgttcagggttcgtcctcctaccatggttttcgtgaagctagatgtggggatccttgtgttgtgcagaacgtgaaccttgagccaccccatggctcggtcatagttccgacatttgtgactgcccgcacctcatcatccattcatggacttcctgaagccggtttgcagaatgtgatcctggagctgccccctagttcggtcacagctccgacgcttgagtctggccaccccacaccctccactcaaggttttatcgaagacgatggtggtggattatgcgttgtgcagaacgtgatcctggagccaccccctggttcggtcatagttatgacgcttgtatctgctcacaccacaacctccactcagggtagtctcgaagttgatgatgatctcttatgcgttgagcagaacatgaaccttaagccaccccctagttcggtcactgttctaacgcttgagaatgctcagacctcgtctatttggctagattctagagctgaaggcaggaagaccctggctgaaaatcagttaaagtctacttcaatgttgcctgttgggacttatggtgatagggctgccttacaagttagtcacccatccaacatggtaactaaggtttattacagaagacggttgtgtgggaagcaggaaggttctctaatttcagagcagttgtctatgtcggagctagatggccgtatctgccccggcgtctcacagtcgagtgacagccctaggtgccaggaagaggtctgcggcggacttttgcaaagattcgcacgtatgcgacctctggcgacatttgaacactggaagaaacaaaccgccacgtgttcgacgccgtctgccgcgctagagcacgcccccgcgcgcgcccgcgccgcgcccaagccgagccagcgccctgccattcccagccccgtccagccctcggagaagactgtgcgcgtctccgtgaagctccccgagcgtggaatcgggctctgcttcaccggagaggccggcccaaggtcaccggacttcaaccgaccgccggcaaccgtggaccgaggccggagcacacgccaccgacgagctcacccgcctgctcacgtggaccgggcgattccggccgtccccgacgacgagccgtacctcgacgtgatcgccagaccctccccgagccaaccctacacttcgccggaactccctcgccgccg

SEQ ID NO: 35514 - DNA, 414 bp, Zea mays
  Peptide Sequence Number=SeqID_77293
atgcagatatcttacacattgcattcattagattgtaatcttgccgacggagagtacatgctcatccccgagcaaggacctgtccaagaggaggaccaggagcaggcttcagaggctgttattgaggatctccccgcagccccagcaattgaaggcaagccccgctatggtgggtacaagtgcggtcactgcacggcggcagccggggtcagtggagcattgtatgccaaggcggtgaggcctggacgcgaacggggaatcgatggggacggttgtcatgtgtggggtcagagtaccctgacatgccgtaccattcaggaaatggttgatggtgtgacttggcctaccaccctgccaccgggttggatggtcgagtgggatgttgctccggcaggagaggagcacgaggagtag

SEQ ID NO: 35515 - DNA, 180 bp, Zea mays
  Peptide Sequence Number=SeqID_77294
atgaggcctggacgcgaacggggaatcgatggggacggttgtcatgtgtggggtcagagtaccctgacatgccgtaccattcaggaaatggttgatggtgtgacttggcctaccaccctgccaccgggttggacggtcgagtgggatgttgctccggcaggagaggagcacgaggagtag

SEQ ID NO: 35516 - DNA, 189 bp, Zea mays
  Peptide Sequence Number=SeqID_77295
atggcagtcggggtcagtgaggcattgtacgccaaggcggtgagccctgatctgttgctagggaatcgatggggacggttgatgtacctccttgatttggttgatggtgtgacttggccttcatccctgccaccaggatggacggtcgagtgggtttttgcttccgcaggagaggaccaggaggagtag

SEQ ID NO: 35517 - DNA, 189 bp, Zea mays
  Peptide Sequence Number=SeqID_77296
atggtctcccattccggttatggtgggtacaagtgcggtcactgcacgacggcagtcggggtcagtgaggcattgtacgccaaggcggtgagccctgatctgttgccagggaatagatggggacggttgatgtacatcctagatttggttgatggtgtgacttggccttcatcccagccaccgggatag

SEQ ID NO: 35518 - DNA, 1125 bp, Zea mays
  Peptide Sequence Number=SeqID_77297
atggcccacactcttgatgaagttagatcttcagaagctcctaccgaagctagaccttcagaaactgcaccgataactctagagaaagagagtgttacccagaaatccaaatctcctgctcctgaagcacccgttaaagagctggaattcattgttcgacatgcttccggaaagcagctgtcagaagaccgctcctcctctctcctccctccatctccagcgctcggcccccaaccccaacgcccagctgagcccttccccagccgcgaactcccctgccttccatggccgcacgtctggcatccgctccctcagcacgcgcgcgcctgcgtcctgcgccgcggctccctcgagctccctgccatggccgccatctcccatggacgctgcgcactagccgcctgctctatcgtcgcgccccaagctccctctgcccgtctccatggcgcgccctccctgcgcagcttcctcgctgttcgctgtcggcgccctgtccatggccacgcccagctccttgctcctcccactcgcccggcctcgagcttctccctgcgcgcgcgaagctctctgctcaccggcgtttctccctgcttcctgatccacttagcgcttcctgctttttccctggtcgcccatggcgccaactctggtcatccctgccccctcgcagatcgccgctatgccactgtcaggctgccggacgcgcacccttgccatctgcctgctggagccccatcgcgtcgtcacggtctcgccggatttccgcctccgtgttgcgcccatggattcggctgtgtgtttcctcccaggtcggcctccacttcaagccgcgtccgcgacgtgcccgtcgaaccccagcaaaagcctgaaccagggtctcatcattgctttcgtgaagttcaagctggatatataattttggaagtagatttggtgctgaagccgaacccagcatccctcttattcttcgtcgtcaatccacaccgcgtccacgacgtgcctgtcgatcccgacgatctatctgccagttgcgcgccacttgtgatgagctccaaagtcctttgtcgtgctcgaccttggaagcctccaactcgtcaacatcccttgtgtcgtcgaaaaatctag

SEQ ID NO: 35519 - DNA, 1018 bp, Zea mays
  Peptide Sequence Number=SeqID_77298
atggagaccggagcgcttagcggaggcggaggccggagggaacgagggagaggggagctcgccggacgccgccgaatcgcccgcgggccgcggctgagcgagagcgagttaggccgctcctcctctctcctccctccatctccagcgctcggcccccaaccccaacgcccagctgagcccttccccagccgcgaactcccctgccttccatggccgcacgtctggcatccgctccctcagcacgcgcgcgcctgcgtcctgcgccgcggctccctcgagctccctgccatggccgccatctcccatggacgctgcgcactagccgcctgctctatcgtcgcgccccaagctccctctgcccgtctccatggcgcgccctccctgcgcagcttcctcgctgttcgctgtcggcgccctgtccatggccacgcccagctccttgctcctcccactcgcccggcctcgagcttctccctgcgcgcgcgaagctctctgctcaccggcgtttctccctgcttcctgatccacttagcgcttcctgctttttccctggtcgcccatggcgccaactctggtcatccctgccccctcgcagatcgccgctatgccactgtcaggctgccggacgcgcacccttgccatctgcctgctggagccccatcgcgtcgtcacggtctcgccggatttccgcctccgtgttgcgcccatggattcggctgtgtgtttcctcccaggtcggcctccacttcaagccgcgtccgcgacgtgcccgtcgaaccccagcaaaagcctgaaccagggtctcatcattgctttcgtgaagttcaagctggatatataattttggaagtagatttggtgctgaagccgaacccagcatccctcttattcttcgtcgtcaatccacaccgcgtccacgacgtgcctgtcgatcccgacgatctatctgccagttgcgcgccacttgtgatgagctccaaagtcctttgtcgtgctcgaccttggaagcctccaactc

SEQ ID NO: 35520 - DNA, 285 bp, Zea mays
  Peptide Sequence Number=SeqID_77299
atggaccccacccgtcagcagctctccccgcgaactgtgctgtcctcctcgacgccggtgactggtgatccagaatttggagtcgggggtgcacggttgacaccagaattcctcgccgtcgcagcacctccgccgagcgccgcagacagggcgggacaccactcgggttccgccgaggcagggtcccactcgatagtccaacccggtggcaagatggatgaccaagtcactccagcaaccatgtcctccagagaacctgtaaaattatgccacaagcaaggctga

SEQ ID NO: 35521 - DNA, 420 bp, Zea mays
  Peptide Sequence Number=SeqID_77300
atggcgccgtcgtggatcaaggacaaggcaacacaatcgttaattattatggaccttcgtcttccaaagcattatgtccacatggtgtgcgccgttttgaccgtctgtggctcggcgggcccgtttgccatacgcacctacttgcgcgtgatcagcgtatcgccgactgatgggaccgtcttgtcagccgcggtgtgtgcaatattgttcgccgagccccgtggagttgtcgtgcggaatttggagtcggggagtgcacggttgacaccaaaattcctcgccgtcgcagcacctccgccgagcgccgcggacagggtgggacaccactcgaattcagacgagcaagctactgaggacacaggtgttcagcaggtggagactactgagcaggagctcgttgaaggcaagttgtgcccttga

SEQ ID NO: 35522 - DNA, 960 bp, Zea mays
  Peptide Sequence Number=SeqID_77301
atggcggtggagcaggggcggtcgctggcggagacgcccacctggtccatggcaaccgtcaccacactcatggtcgctgcctgcttcctcgtcgagcgctccctctcgcgctttgccaagtggctgcgcaagaccaagcggaaggccatgctcgccgcgctcgagaagatccgcgaagagctgatgctgctcggagtcatctcgctgctgctcagccagacgacgcgcttcatatcggagatctgcgtgccgtcctcgctcttcaccagccgcttctacatctgctccgagagcgactaccaggacctgctgcgcaacacggacgccaaccagacgacgctcgacaagaacatgttcggtggccagcggctgcacgtctgtggcgtggtattggtaatccagatgtcctgctcccagcctattgagggccatgaaccttttgttttgtacgagggccttgagcagttgcaccggtttctcttcatccttggtatcactcatgtgttgtacagttttgtaacagtggttctgtccatgatcaagatctatagctggaggaagtgggaaaccttagcaggtccaattgctgctgaggaattgaaagctaggagaaccaaggtgatgagaaggcagtcaacctttgtttttaacaatgcttctcatccatggagcaaaaataaaatacttatttggatgctttgctttttgcgtcaattcaagggctccataataaggtcagactatttggcactgaggttgggctttgtcacatatcacaagctaccacattcatatgacttccataaatacatggtacggagcatggaagatgattacaatgggactattggtatcagtgaagcattcaagtatactggtctagaaatagtttcccatgagatccagtatggtggctgtgttgaggaaactggacctgcggggcatatcaagagctattaa

SEQ ID NO: 35523 - DNA, 681 bp, Zea mays
  Peptide Sequence Number=SeqID_77302
atgtgcaatggtcgccgccctctttgggattatgcagaggtcagagaaacaaatagctatatttttcaaagaaaagaaacaaaaagaacaggtgtaaacatctcatacatgctgattcaactgctggagctcaactcagttgtctacaaggccaaaaagctagagattctagatctaaaggtgctgctgggattgcatttcatgccccaatcaacaaccgggccagaaatttcaccagctgctgtccctgaattgatgtccaagccaacggaggcggttccaccagctggatcaatggttcgttcaggcactgaggtcatcagttcctgtggtggtcgccgttgtgctttgggtcatgttgtttgtatttatgtgttcgaatccctcaccttgtttgggttcactggacatgcctgcttgctgcgcttcatatcggagatctgcgtgccgtcctcgctcttcaccagccgcttctacatctgctccgagagcgactaccaggacctgctgcgcaacacggatgccaaccagacgacgctcgacaggaacatgttcggtggccagcggctgcatgtctgtggcgaggtattggtaacccagatgtcctgctcccagcctattgaggtcaatggaactgggagcggagcacactgttcactcatcgcttgggttggaacctaa

SEQ ID NO: 35524 - DNA, 309 bp, Zea mays
  Peptide Sequence Number=SeqID_77303
atggcgagagtagcgtgtaccctccgtggcaagaggctggacggtggtgtatccgtgctctcgcatacccttgagagtcttttccttagtcgggtgaggaagcgacaaacttttgttgcttttgctccaaggtggtaccaaacgaggaaaaacaagactgaagtgcgggaggactcggtcctccacttaggttcttttgcttatagcttatcgggaggagtttgtgcctcccatggtttgtataatattactactctgcactcacttttagctctggtctgtaataaaataactcaaccttgcttttga

SEQ ID NO: 35525 - DNA, 495 bp, Zea mays
  Peptide Sequence Number=SeqID_77304
atgacctggacaccacaccgactagccgtagtccatctcctctggctcaccgcccacgaacgtgaagaagaaatcgaagtaactgaagaggagacaccaccaccaccttcggaatctcaggccgggaatagtttctactttgatatctgtggatctgagcctgattcacctgtgaacgaaggcaagccccgtcttaagaaccccggtggcgggttgacatatgcaagggttaagtgctacatatgtcgtgtgattggagatcctcagctgagtataatcgattcggatcgccgtaccttcgtgcatacccttgagagtcttttccttagtcgggtgaggaagcgacaaatttttgttgcttttgctccaaggtggtaccaaatgaagaaaaacaagactgaagtgcgggaggacttggtcctccacttaggttctttgcttatagcttatcgggaggagtttgtgcctcccttggtttgtatgacgaatctctaa

SEQ ID NO: 35526 - DNA, 363 bp, Zea mays
  Peptide Sequence Number=SeqID_77305
atgacctggacaccacaccgactagccgtagtccatctcctctggctcaccgcccacgaacgtgaagaagaaatcgaagtaactgaagaggagacaccaccaccaccttcggaatctcaggccgggaatagtttctactttgatatctgtggatctgagcctgattcacctgtgaacgaaggcaagccccgtcttaagaaccccggtggcgggttgacatatgcaagggttaagtgctacatatgtcgtgtgattggagatcctcagctgagtataatcgattcggatcgccgtaccttcgtggttatgaagacttggtcacttccctgcaacctaaagtcaggatgtggacactatggataa

SEQ ID NO: 35527 - DNA, 747 bp, Zea mays
  Peptide Sequence Number=SeqID_77306
atggaccagctccccaagcgcccggccaactacgtgccgctgagccccgtggggttccttccccgcgccaatgccgtctacggcgaccgcacgtccgtcatctaccggggcgtccgcttcacctggcgccagacgtacgcgcgctgccgccgcctcgcgtccgcgctgctgtccctcggcgtcgtccgcaggggcgacgtcgtctccgtgctcgcgcccaacgtgcctgccatgtacgagatgcacttcgccgtgcccatggccggcgccgtcctcaacaccatcaacacgcgcctcgacgccgccgccgtcgccaccatcctgcgccactccggggccaagctcttcttcgtcgactacgactacgtgcgcctcgccagcgacgcgctccgcctcctcgacgccgccgacgtcccgctcgtcgccgtcatcgacgacatccactcgcccacgggggcccgcctcggggagctcgagtacgaggcgctgctcgcgcacggcgaccccgacgccgacctcccgccgctccaagacgagtgggacgccgtcacgctcagctacacgtccggcaccacgtccgcgcccaagggcgtcgtctacagccaccgcggcgcgtacctcagcaccaccagcctgctgctgcagtggggggtgcccgccgagcccgtctacctctggacgctccccatgttccactgcaacggctggaccttcacctggggcatggcggcgcgcggcggcgtcaac

SEQ ID NO: 35528 - DNA, 1737 bp, Zea mays
  Peptide Sequence Number=SeqID_77307
atggaccagctccccaagcgcccggccaactacgtgccgctgagccccgtggggttccttccccgcgccaatgccgtctacggcgaccgcacgtccgtcatctaccggggcgtccgcttcacctggcgccagacgtacgcgcgctgccgccgcctcgcgtccgcgctgctgtccctcggcgtcgtccgcaggggcgacgtcgtctccgtgctcgcgcccaacgtgcctgccatgtacgagatgcacttcgccgtgcccatggccggcgccgtcctcaacaccatcaacacgcgcctcgacgccgccgccgtcgccaccatcctgcgccactccggggccaagctcttcttcgtcgactacgactacgtgcgcctcgccagcgacgcgctccgcctcctcgacgccgccgacgtcccgctcgtcgccgtcatcgacgacatccactcgcccacgggggcccgcctcggggagctcgagtacgaggcgctgctcgcgcacggcgaccccgacgccgacctcccgccgctccaagacgagtgggacgccgtcacgctcagctacacgtccggcaccacgtccgcgcccaagggcgtcgtctacagccaccgcggcgcgtacctcagcaccaccagcctgctgctgcagtggggggtgcccgccgagcccgtctacctctggacgctccccatgttccactgcaacggctggaccttcacctggggcatggcggcgcgcggcggcgtcaacgtctgcatccgcgacgcgcgccccgccgacatctaccgagccatcgcgcgccaccgcgtcacccacatgtgctgcgcgcccgtcgtcttcagcatcctcctcgacggcgacggcgacagcgacggcgccgccaggcagctccaagcccccgtccacgtcctcaccggcggcgcgccgccgccggccgcgctgctcgagcgcgtcgagcggatcggcttcaacgtcacgcacgcctacggcctcacggaggccacgggccccgcgctcgcgtgcgagtggcgcgaccagtgggaccgcctcccgctcccggagcgcgcgcgcctcaaggcgcgccagggggtcagcgtcctgtccctcgccgacgccgacgtcaagaacgccgacaccatgctcagcgtgccgcgcgacggcaggaccgtcggggagatcgtcctccggggcagcagcgtcatgaagggctacctcaacaacccggaggccaacgagagcgccttcagggccggctggttcctcaccggcgacgtcggcgtcgtgcacccggacggctacatcgagatcaaggaccgctccaaggacgtcatcatcagcggcggggagaacatctgcagcaaggagctggaggaggtgctgttccgccacccggccgtggccgacgccgcggtcgtggccatgccgcacccgcgctggggcgagacgccctgcgctttcgtcgtgcccagggacaaggccgccgtgctcagcgagggcgacgtgctcgccttctgcagcaagcgcatggcgcgcttcatggttcccaagaaggtggaggtcgtcggagcactaccgaggaacgcgcttggaaaggttgagaaggtcaagctccgggaggcggcacgtaagctggcgcccaccgtagcagcggcgcagaagcccaaggcgaagacgacgacggtcggcggtcgccgcgacgggcagccggtggcgcacgtcatggcggtgtcaaggctatag

SEQ ID NO: 35529 - DNA, 603 bp, Zea mays
  Peptide Sequence Number=SeqID_77308
atgctcagcgtgccgcgcgacggcaggaccgtcggggagatcgtcctccggggcagcagcgtcatgaagggctacctcaacaacccggaggccaacgagagcgccttcagggccggctggttcctcaccggcgacgtcggcgtcgtgcacccggacggctacatcgagatcaaggaccgctccaaggacgtcatcatcagcggcggggagaacatctgcagcaaggagctggaggaggtgctgttccgccacccggccgtggccgacgccgcggtcgtggccatgccgcacccgcgctggggcgagacgccctgcgctttcgtcgtgcccagggacaaggccgccgtgctcagcgagggcgacgtgctcgccttctgcagcaagcgcatggcgcgcttcatggttcccaagaaggtggaggtcgtcggagcactaccgaggaacgcgcttggaaaggttgagaaggtcaagctccgggaggcggcacgtaagctggcgcccaccgtagcagcggcgcagaagcccaaggcgaagacgacgacggtcggcggtcgccgcgacgggcagccggtggcgcacgtcatggcggtgtcaaggctatag

SEQ ID NO: 35530 - DNA, 327 bp, Zea mays
  Peptide Sequence Number=SeqID_77309
atggcgacggagacgcggcggcagcccgagtcgacggtggcggacctcggcggctgcgcagagaacggcggtgagcgcgggcagagtgattcggggagggggaggggaaattggagcgcgtcccgggttgcggacgtcggggcggagctcaccgtggcagagggcacggcggggctccaacggcgacggagaaacgagctcgggcggcggcggtttaatggcggcggcgctctggcgtgtgcgcagcgtgggggaggtttgagaggggtctgcaggtgcgcaaatgagggagggggagagggcgtgcgaggctctgggctcaagtga

SEQ ID NO: 35531 - DNA, 456 bp, Zea mays
  Peptide Sequence Number=SeqID_77310
atggcgacggagacgcggcggcaggccgagtcgacggtggcggacctcggcggctgcgcagagaacggcggtgcgcaaatgagggagggggagagggcgtgcgaggctctgggctcaagtgaccgaggcgaggtggttgcgagctccacgcgcgacgtgggcgtggagtccgcggcacgcgaggaccggggcggcggttacgcgaagacggaggagctgacagctcgggcccacgagcagagagagaggaaagcgggcgcggacgcggggaaggcggtcgcgctgacgggcgggcccgccagggcagagagagaagggggggggggaaaggcgcgcgcgggggatgggcctgatgggccgaaaggccgagggggcgggggaagcgggccttcttttcctttttcttttattctggcatttgtttctcttctaacgaatcaagctgattcatcagac

SEQ ID NO: 35532 - DNA, 906 bp, Zea mays
  Peptide Sequence Number=SeqID_77311
atgggcttgacacaactaaaagggaaatgcattgcccaaccttctcaagataaccgtgatcacatggtgaagaagcttgagacgggaataaccgtggcatgcactacatcccttgaagaaaatgtcaaggatttaaggattgccatgaggagggaacaaaatatgaaattcaacacctcctccaaaagcctcaaccacgcctccacaaaaggtaacatccaaggcaacccaaaattgcaacttgtgctagaaaggaaaaagagacaaatacaaagggaggactctcaaatgaaaaaggaggacatcaagaacaacaccacctacttggatagtaagatctacaaaataatctatggtgtgattgtgtcaaagattcaacataaaaccaataaaaagaacaagacaagggtcaaaagaaaggagcaaaaaggaaaccgaagtgctccctggtcgggcgcaccggactgtccggtgtgccaccggacagtgtctggtgcaccaccggacagtgtccggtgcaccagggaagattgccttcaaactcttcgccttcgggtttctcaggcgcagcccactataattcaccggactgtccggtgtacaccggacagtgtccggtgctccaacggaacgcggcctcaggaactcggcagcctcgggatttcacgaagactgctccgctataattcaccggacatgtccggtgtgcaccggactgtccggtgcaacctcggagcaacggctacttcgcgccaacggtcgactctgacagtgaacagtgcacgcggcagaagtcagagcagaggatcagagaggcaccggactgtccggtgtgcaccggactgtccggtgccacatgaggacaaaagcctccaacggtcgaccagctccaaccccaacggatag

SEQ ID NO: 35533 - DNA, 189 bp, Zea mays
  Peptide Sequence Number=SeqID_77312
atgggacgacctcgtcacaggccttcgtccggcgacgcgtgggacgaaggcgtggctggcgaaggcatcgagcgaagggtggcgtcttcgccttcgccccaacatttgccctccgagggaccagttcgactaagtcatctggtgccgaaggcgtcgctagatggtggagattacgggcctgatttgtaa

SEQ ID NO: 35534 - DNA, 288 bp, Zea mays
  Peptide Sequence Number=SeqID_77313
atgcagggcctgttgcaatgggccggatcacacgtgggcctccatgttggacgaggccacgaggtgagacgacctcgtcacaggtcttcgtccggcgacgcgtgggacgaaggcgaggttggcgaaggcatagagcgaagggtggcgtcttcgccttcgccccaacatttgccctctgagggaccagttcgactaagtcatctggtgccgaagacgtcgctagatggtggagacgctgccctcgctcgaagttgtttcgcgggggtttttgacatgactgttgattga

SEQ ID NO: 35535 - DNA, 192 bp, Zea mays
  Peptide Sequence Number=SeqID_77314
atggcctgttgcaatgggccggatcaccacgtgggcctccatgttggacgaggccgcgaggtgagacgacctcgtcacaggtcttcgtccggcgacgcgtgggacgaagggcactgcgtcacattaggcaaattgtgcatgaatcgagtggggaaatgccctatggagggggctgacagccagcagttttga

SEQ ID NO: 35536 - DNA, 417 bp, Zea mays
  Peptide Sequence Number=SeqID_77315
atgacgttggttgctctcaaaccccctacggaagcaagcaaacgtcaacaggatccatgccgcaccgccagctatgcttctacatggctcaaggcacttctccaacagccacctaatgtagaagtccgagagtaccagaagtatatggttgaaaaggctctgtttaccaatacgttaatagctttgccaactggacttggcaaaacttttattgttgaggtagtgatgtacaactactttcgatggtttcccgaaggaaaaataatatttacctgtccttcacgtcctcttgttactcagcaaattgaggcatgtcacaatacagtgggaataccacaggtcgaagtctatttttggccatccaattattgcccgagtttgtttttggacatgcaactcaaaaactataaatcctag

SEQ ID NO: 35537 - DNA, 1083 bp, Zea mays
  Peptide Sequence Number=SeqID_77316
atgggggatgagaaccagccattaaagccaaagagccggaggtccgcagtgcagcagccacctgcgcacggcacgaccgtcgcccgggtggaggacggacagctacaccctgaccaggcagtagcagttcgccttcccccagatagctggaggacgtcacctccgcagggctggaggatgcccttctcccccgaatgctggaggaagaagcgggtcgctggcccaagcgggaggcaggacccaactcggcgcgccctccccccagcccgaatgatgaacatccttgaagctgagggcggggcagaggccgcagcccggcttgcttctccccaccacaaggctgggaccgggaaaggggatatcccaaaaaggatccttccgagcgaaggaaacgggccccgagcccccctactgatcaggggttcgaaggttgcgccctccggggttcggcaaccgccccagagcactcaggctctgagccctctactgatcaagggttcgaaggctggcccctcgaaagggttcaacagccgccccagagcacgcagagtcagggatgaccctgggtacgtccgttacatggccgaggctcgggctacgcttccgagggagctctgcctcgcccgacctcaggcctcggcctcagcctcggccttgggagaaggtctccgcctcgcccgaccccaggcctcggcctcagcctcggcctcgggaggagtcacatcctcgcccgacctcgacctcggcctcggcctcgggagaaggtctccgcctcgctcgacctgggcctcggaccgactacgctacaggggatacatcattaccctactcctagctagctacctcaggctacgaaggaacaagaccgatgtcccatctaaggttactccagtaacaagtaatgatggttccccgcgtgcacccatgacgtcggttgctctcaaaccccctacggaagcaagcaaacgtcagcaggatccatgccgcaccgccagctatgcttctacaggctcaaggcacttctctggcagccacgttagcgcacgtacagggctgaaggcgcttctccgccagccacgatag

SEQ ID NO: 35538 - DNA, 399 bp, Zea mays
  Peptide Sequence Number=SeqID_77317
atggcggggagcgtccgagaggagccagaagcggagcaccacttgcgcgtggagaaggcccgcgactctctacggagttactcgaccgagaaaggcatcgccaccctcgccttcaacaaaatatccctctttctgaaggtagaccacacatgtataatggcaaaggagattaagaagaaggtttgttctaacatagtcaattgcgttttagagtttacgcttggtgccatggatgttttgatgattaggaaccttggagaggaccaacaaggacttggaaaaggccaagatgtcaaggaggagaagctaggacgttcgcgacaagagggagccaagtccgactcaacttcgtctcgagctcggagtccacgactagtctgcactaaaacggacgcctag

SEQ ID NO: 35539 - DNA, 312 bp, Zea mays
  Peptide Sequence Number=SeqID_77318
atggcggggagcgtccgagaggagccagaagcggagcaccacttgcgtgtggagaaggtccgcgacgtttcgactaaaagctcgatagtggagacggcgatgagcgtccgagaggagccagaagcggagcaccacttacgtgtggagaaggcccgcgactctctacggagttactcgaccgagtttggcactgctgggaatgagccggcttcatacagtgtgcgcccgccactggagcctctagtggatccgcacgaaggtactggtacttccatacgggccacgccatccattgctttgctttcggaatga

SEQ ID NO: 35540 - DNA, 147 bp, Zea mays
  Peptide Sequence Number=SeqID_77319
atggcggggagcgtccgagaggagccagaagcggagcaccacttgcacgtggagaagacccgcgactctctacggagttactcgaccgaggtcaagaataggtaccgcaagatgaggagcatgaaggatgctacgatgagttcgtga

SEQ ID NO: 35541 - DNA, 1143 bp, Zea mays
  Peptide Sequence Number=SeqID_77320
atgtctggtggtgggttctttatcaggacagtagaatcaccaggagctgtgctgatgaatggtgctgtcaagcgaccggctcagcagtttctatcaccttcaagcaacaaggagaatgtgccaccagtgggagctttgagggctacaccaaagaggaggacccccttgcctgactggtacccgaagacaccactccgtgacatcacatcaatcgtcaagatcttcaatggtgtgttcctcaaagtcaacaaggcgactattaacatgctacgcagggttgagccatatgttgcatatgggtacccaaacttgaagagtgtcagggagttgatctacaagaggggctatggaaagctgaacaagcagaggatccctctgtccaacaaccaagtcatcgaggagggcttgggcaagcacaacatcatctgcgtcgaggatcttgttcacgagatcatgactgttggcccacacttcaaggaggcaaacaacttcctgtgcagggcggtgatgccgagcacgaagaagacgctggtgaaggagccccacaggtatgtggtttccatcgtcatcgcaatgtgtattgtcggcgcgttcgcgcaggccacggtgttgcagaacacaggagccttccagaactctgaaagaattggacggtcgcatcgacgccaggttccagcagaggagtttttgaagatcatccatttactcaacaacagcttccagcttgcaagactatacttgcgactcagacagtcattcttgtacttctgtttatggtggaaccagcacggcctaggcggtgacaacgtgttcggtagctgccgtcctctccataacgggctcgtcagcctcatgcactggtctgggaagggcaagccatgggaccgtctcgacgccgacaagccttgcgcactggaccacacctggaagctgaagcccggtgccgacggctccttcccggtggaccgggcggaggcgaccagcggcgagaagctcctctgtgacgtcatgaacgagaacaagatcaagctctacgccgcatacataatcgatggaaaggagctcctgaatgagaggacgagcaccgagaatcgatacctgaagaaggttgtcgtccaacggctgccccagtggaagagatga

SEQ ID NO: 35542 - DNA, 645 bp, Zea mays
  Peptide Sequence Number=SeqID_77321
atggtgtcgacgcatggcgatacagccaggccgagctctagccaggaagacctggcagtcaccatgaagaaatgcattagcaataggcctcaggatcatccatttactcaacaacagcttccagcttgcaagactatacttgcgactcaaacaaaccagcacggcctgggcggcgacaacgtgttcggtagctgccgccctctccataacgggttcgtcagcctcatgcactggtctgggaagggcaagccatgggaccgtctcgacgccggcaagccttgcgcactggaccacacctggaaggcgtacgacctctacactggcgagaatgattcatcatcagcatcagcttcatcgggcgtggtcttgctgtatcgctcgcaaggcaaggtgatgaactgcggtggcggcggaagttgtggcacttgcatcatcgagataatcgatggaaaggagctcctgaatgagaggatgagcaccgagaatcgatacctgaagaagaaaccagactcatggaggctagcttgccagactattataggcaacaaagagaactctggcaaggcaagcttcgttttgttccccacacatcctgcaatcaacacttcacttccatatgcattgaaaaagaaagttgttcagtga

SEQ ID NO: 35543 - DNA, 351 bp, Zea mays
  Peptide Sequence Number=SeqID_77322
atggccaccacaccggaggaattcttcatcaaggatctcatggagcagccaccattgtccccacctgtcttccttgaactcccccacaagcccaatgccagcaatgaggaccgacatcaagtccctaacaatgacatgacgctcccttacatctcacgcatgctcatggaggacgatgacgatgagcttggtgatcaccctgcgctactccaggtgcagcagtccttcgctaagatcctctcctcccctccccttgttggcactaacacaaacaacagcgaggggccgaatgatttcttgcatgaaggaaccagattggatcggatgataaaattagaattaggcaattag

SEQ ID NO: 35544 - DNA, 1112 bp, Zea mays
  Peptide Sequence Number=SeqID_77323
atgacgaaccccgcctctgctccatcgcggtcatctcatccctcttcctttttgtggccacaaccttcacggacacgacggaaacgcatcagattctctctccctccttgctcctgtcgtcccttaaaccgagtccagcaaggggcccgacgcggatgcgggaaaaagggtggaaccgcggtggagcccaccaaatggggagaagtatccgcgagctggttccagcggcaccccgagctgcgctccgaccgcgccccccaggtggcgcgacaatctcccacgctcgggcggaaggttccacggcgcggcgatgagggaggggcggcgagggagggtgtgtgcttcgtcggcggcgaaactcggccggagaggtgggcattgcaagcgaaacgggttgagatcggtttggaggtgggcggcatcatagccgccggcgcgcggcgtggaggaaggacgtcggagaagaggaccgccgcggcaccgcacaccgtcgtcgattggaggcaaccttctgcagcaacgtcgacaagattagcggcttcccccaacgaaagctattgtcctgcagcactaccattcatgagcatggccaccacaccggaggaattcttcatcaaggatctcatggagcagccaccattgtccccacctgtcttccttgaactcccccacaagcccaatgccagcaatgaggaccgacatcaagtccctaacaatgacatgacgctcccttacatctcacgcatgctcatggaggacgatgacaatgagcttggtgatcaccctgcgctactccaggtgcagcagtccttcgctaagatcctctcctcccctccccttgttggcactaacacaaacaacagcgaggggacgaatgatttcttgcatgaagacgtgttcatccagagcgttgtgaaccagtcttatggttcctccttcctgtcacggtttcgggagatactcttctactgcacggcgatgttcgacatgttggacgcaaccttgccgagggagagcgaatctcgactggtgttcgagaaacttgttctgggatgctacgtgttcaatggcatctcctgtgagggcagcgaccttgtgctgcgccctaagaa

SEQ ID NO: 35545 - DNA, 1182 bp, Zea mays
  Peptide Sequence Number=SeqID_77324
atgacgaaccccgcctctgctccatcgcggtcatctcatccctcttcctttttgtggccacaaccttcacggacacgacggaaacgcatcagattctctctccctccttgctcctgtcgtcccttaaaccgagtccagcaaggggcccgacgcggatgcgggaaaaagggtggaaccgcggtggagcccaccaaatggggagaagtatccgcgagctggttccagcggcaccccgagctgcgctccgaccgcgccccccaggtggcgcgacaatctcccacgctcgggcggaaggttccacggcgcggcgatgagggaggggcggcgagggagggtgtgtgcttcgtcggcggcgaaactcggccggagaggtgggcattgcaagcgaaacgggttgagatcggtttggaggtgggcggcatcatagccgccggcgcgcggcgtggaggaaggacgtcggagaagaggaccgccgcggcaccgcacaccgtcgtcgattggaggcaaccttctgcagcaacgtcgacaagattagcggcttcccccaacgaaagctattgtcctgcagcactaccattcatgagcatggccaccacaccggaggaattcttcatcaaggatctcatggagcagccaccattgtccccacctgtcttccttgaactcccccacaagcccaatgccagcaatgaggaccgacatcaagtccctaacaatgacatgacgctcccttacatctcacgcatgctcatggaggacgatgacaatgagcttggtgatcaccctgcgctactccaggtgcagcagtccttcgctaagatcctctcctcccctccccttgttggcactaacacaaacaacagcgaggggacgaatgatttcttgcatgaagacgtgttcatccagagcgttgtgaaccagtcttatggttcctccttcctgtcacggtttcgggagatactcttctactgcacggcgatgttcgacatgttggacgcaaccttgccgagggagagcgaatctcgactggtgttcgagaaacttgttctgggatgctacgtgttcaatggcatctcctgtgagggcagcgaccttgtgctgcgccctaagaagtatagacagtggcaggcaagaaacgaacgagcaggcctcttctggatggctacaaagacgaggtcatga

SEQ ID NO: 35546 - DNA, 408 bp, Zea mays
  Peptide Sequence Number=SeqID_77325
atgcccctgttccctaggtccgagctcgcccaactccctagccatgtctgctcgcccctctctgtctctctgcgagcagcagcatgccggagaagacctgtgtcctcgacgcgcgccaggtgtttgatgggagtggaggtcgtggagcatgtcaccgaggtgacagagaagttggctgcagatgcggccagttccatgccagagaacggatccctgcacaaggttgccgtggaggtggagtgcgttgctgaagcggtggataaggatgcacataaggttgaagcagtcaacgataaggacctgcctgccgcacatccccagcgccttattatgccacatgacagggcacaggccacagctagcttgtgctacactggtggagaagctagctaccaggttagaggttaa

SEQ ID NO: 35547 - DNA, 1035 bp, Zea mays
  Peptide Sequence Number=SeqID_77326
atggccaccctcgccttgccgccgaccaccaaggctgccggccaggacgccacccaggaaagcctagcagagaatcctgccaaggacgccgcagatccgggcagcatggagtccgagtgggttcttctcggaaaatcggacatcgtcccggccgatgtggccgccgccgccgccgcggggcaccaccacctcaacttctcgccgctgccgatgatccctatctgggtgcagatggttctcgggggcgtggtttacacggctgtgccgttctacaagagggtgctgaaggtcgaaggtgaaacgttggccaatgtagaaactgcagtggaggtcgtggagcatgtcgccgaggtgacggagaagttggctgcagatgcggccagttccctgccagagaacggatccctgcacaaggttgccgtggaggtggagtgcgttgctgaagcggtggataaggatgcacatgaggttgaagcagtcatcgataagcgcaaaattaccgcggccaggacgttcaccgtgggcgacggccagggctggatgagcggcatcgactacaccgactggaccagcggcaagacgttcgcagtcggagacaaactacccgccgcgcacggaagcagaccacgcagggcgcagcaggcaaaaacgacagcacccggcgtccggcaccggcaacaaggcaaggccaccgcgggccggcagcagccggcaggtgcagcggaccgcgcgtgtaggcgggcgcatcgcatgaggtgggcacggacgcggacacaggcacgtgctcccctgccccaccgcccactgcgccctcgacacctcaccatcggcatcagcggccaccgttcccccaccgccccagccggagcccacccccgttttctatttgccgccagctggtccagccctactctactcttactctactctaccgcgccggatagggagggcgggagcccaagctcaagatcgcgcaacaacggtgagctctacaccacagtaacactgcactactctcagtctactactcagtag

SEQ ID NO: 35548 - DNA, 732 bp, Zea mays
  Peptide Sequence Number=SeqID_77327
atggactacatggtgtttgaggttgctgaattggatggagcagcaatgatttgtcacactaacaacaaaatgaaagtttacatgggtattgtttggatgtttgctataagaaaaaagtggagaggacaaataaggtgtgtagtcagaagacggtggtcagtagagaagaaggtgaaggtttgggcgtcaaaacctgatggtacgttctggcgagaattaggggaggcatgtggtgtcatcacaaatggtgcatcgaggcaaagcaactttgtgaataatgtgtggtcgtcagatcaaaatgtcgggagttggtccattttacccatggctgagtggataagctctatgcatctagggagcattagctaccgggtttgggagatttgcaatctcgagaagcgggttgaggacaagctcaacgaactctgcttcttcaccgacattttgagtggcctctgtagcatggcacttggtgaggacgtggtgggcgatgatgacaaggaccatggcgatgactccacctccgaggtatcactttccaccgatgatctcagcgctgaggtagatgagctaactgctactttggctggtcaggacaagttgcttaggcttgctgctcgtgagaggaaagaatacaaatgcaagtatgagagcacacttagggagcatgaatctgctagagattctattgttgtgtacgacaagactgaatgtgatgagtgcactctttag

SEQ ID NO: 35549 - DNA, 126 bp, Zea mays
  Peptide Sequence Number=SeqID_77328
atggactacatggtgtttgaggttgctgaattggatggagcagcaataatttgtcacactaacagcaaaatgaaagtttacgtaggtattgttgtaaaccgtcgcaacgcacgggcaaccgactag

SEQ ID NO: 35550 - DNA, 168 bp, Zea mays
  Peptide Sequence Number=SeqID_77329
atggactacatggtgtttgaggttgttgaattggatggagcagcaatgatttatcacactaacagcaaaatgaaagtcaatcgttgtgaactctcttctaatcgctcacttcattggccgtgttgtaccaagacatatttgtatggagtaaacaataacatcagatag

SEQ ID NO: 35551 - DNA, 660 bp, Zea mays
  Peptide Sequence Number=SeqID_77330
atggctgaaatgtaccaactcccacggagttgcgttcctccaacgatgaggcgaaaagacggcggaccaatgggcgaaagaggcgggcagccatgcaggcggcatgcgaccgcgccaagtggacgcgcttctccgactcccgacacgccagcatggaggcccaggcccacgcatcacgcaaccggcgcgccggatgcagcatgcaagcaactgcaccgccacttgcgccacgaccgcgcctcctcgagtgcggaaccaataccgcgactcgaggcgacccagcgcacgacccagcagcgccagcctgacgcggcggtcaacgcggccaaaagtgggccagcagtaatgacgatggcaggcggacgggagcagcggtcacgtcatcagccaagctcacgtcccatccgggggcagcaagagaatcccctctcacggcgtgaagacaacgcgcccatgatccgttcctcgaacggctcgcgcacgcgcaacggctgccccgccaaccactcgccccgtcgcattaactccgcggcgagacaggcggcgcttccggtgggagcagtgggcgacgcttcgccttcgcccagggaccgggaaagggggataccccaaaaaggatccttccccgtgaaggaaccaggctccgagcctccctactga

SEQ ID NO: 35552 - DNA, 483 bp, Zea mays
  Peptide Sequence Number=SeqID_77331
atgacggtggcagacgggcgggagcaacggtcacgtcgtcagccaagctcacgtcccatccaggggcagcaagagaaccccctctcacggcgtgaagacaacgcgcccgtgatccgttcctcgaacggctcgcgcacgcgcaacggccgccccgccaaccgctcgccccgtcgcattaactccaggacaggcggcgcttctggcgggagcagtgggcgacgcttcgccttcgccgtaataactgcgacaaaaaagcagggaccgggaaagggggataccccgaaaaggatccttccccgtgaaggaaccaggctccgagcctccttactgatcagaggttcgaaggctggccccccgaagggttcaacagccgcctcagatcgcgtgggccctacacccactactggtcagaggttcgaaggccggccccccgaagggttccacggccgcctcaggctactcgggctccgcgcccattactga

SEQ ID NO: 35553 - DNA, 858 bp, Zea mays
  Peptide Sequence Number=SeqID_77332
atggctgaaaggtaccaactcccacggagttgcgttcctccaacgatgaggcgaaaagacggcgggacaggcggcacttccggcgggagcagtgggcgacgcttcgccttcgccgtaataactgcgacaaaaaagcagggaccgggaaagggggataccccgaaaaggatccttccccgtgaaggaaccaggctccgagcctccttactgatcagaggttcgaaggctggccccccgaagggttttcaacagccgcctcagatcgcgtgggccctacacccactactggtcagaggttcgaaggccggccccccgaagggttccacggccgcctcaggctactcgggctccgcgcccattactgatcaggggttcgaaggctggcccccgaaggaagacggcgaactccgctccgcccgacccagggcccggactcgggctcagccccagaagacgacgaactccgcttcgcccgaccccagggctcggactccgccctggcctctgccgaacgacctccgcctcgcccgacccaggggctcggactcggcctcggccatggaagacagactcgacctcggcttcggaggagcctccacgtcgcccaacctagggcgcaggccagccacgtcaacaggaagcgccatcatcaccctaccccgagctgactcgggccgcagagaacaagaccggctccgtcgctcctccgacggccacgacatcacaccagctgggtgccaaaatctctccggctgccacatcggcatggccctcttagagaaggttggccgcgcggggacgaggatgggacaggcgctctcttggggccgctcgcttccctctcccgcgtggacgctt

SEQ ID NO: 35554 - DNA, 909 bp, Zea mays
  Peptide Sequence Number=SeqID_77333
atggcgcttcctgttgacgtggcgggtctgtgccctaggcggggtgacgtgggggctcctccgaagccgaggttgagtctgtcttctgttgccgaggccgagtccgagccatggggtcgggcgaggcggaggtcgttcggccgaggccagggcggagtccgagccctggggtcgggcgaggcggagtttcgtcgtcttccgggtcttagcccgagtccgagccctggggtcgggcagagcggagttcgccgtcttccgggtcttagcccgagtccgagccctggggtcgtatcttcctccctaggccgtatctgccccggcgtctcacagttgagtgacagccctaggtgccaggaagagagcacgcccgagcacgccccgcgccgcgcccgagccaagccggtgccctggtccgcgtccgcggctataaaacgcccaggagccttggccgtacccctccgcacgcgctcaagcctcaccggagctcagttcgccgccccctcggagaagactgtgcacgtctccgtgaagctccccgagcgaggaatcgggctctgcttcaccggagaggccggcccaaggtcaccggacttcaaccgaccgccgacaaccgtagaccgagaccctccccgagccaaccctacacttcgccgggactccctcgccgccgagtacatcctcgtgccggagcaaggagctgctcaggaggtagccccagatccagcaccagagccagcaccagaggacctgcctgccactgctttggaaggcaagccccggaatccttttgagatgaatactagttctctggaggagatggttgctgggataacttggccgtccaccttaccaccgggttggactgttgagtgggaccctgcctcggctgaggaggagcatgaggagtga

SEQ ID NO: 35555 - DNA, 843 bp, Zea mays
  Peptide Sequence Number=SeqID_77334
atgggaaagaacaagaagggtggaagttcgtcgcaccactccgacaataagaggaagcgcgagccaagtccccccttggaggactttgaggtctccttggacgaggagaactcctctgactcgtccgaggaagagaccggtggtgacgacgatgacgagggcgacgacggcgacggtggtgacggtggcgatgacggcgacgacgacgacaagggcgacggaggcagcagcggcaagggcaacgacaacggcaagggcagcagcggcaacagcgaggccagtggcaaagcgccactgcttgtcttcgcgcctaacgccactaactatattagaaacaattaccaagtgataactggccgtatctgccccggcgtctcacagttgagtgacagccctaggtgccaggaagagagcacgcccgagcacgccccgcgccgcgcccgagccaagccggtgccctggtccgcgtccgcggctataaaacgcccaggagctttggccgtacccctccgcacgcgctcaagcctcaccggagctcagttcgccgccccctcggagaagactgtgcccgtctccgtgaagctccccgagcgaggaatcgggctctgcttcaccggagaggccggcccaaggtcaccggacttcaaccgaccgccggcaaccgtggaccgagaccctccccgagccaaccctacacttcgccggaactccctcgccgccgagtacatcctcgtgccggagcaaggagctgctcaggaggtagccccagatccagcaccagagccagcaccagaggacctgcctgccactgctttggaaggcaagccccggttttatgcataa

SEQ ID NO: 35556 - DNA, 546 bp, Zea mays
  Peptide Sequence Number=SeqID_77335
atggataagaggggaaagagagtgagcaaatgtgcaaagcatggatctccctccctaggccgtatctgccccggcgtctcacagttgagtgacagccctaggtgccaggaagagagcacgcccgagcacgccccgcgccgcgcccgagccaagccggtgccctggtccgcgtccgcggctataaaacgcccaggagctttggccgtacccctccgcacgcgctcaagcctcaccggagctcagttcgccgccccctcggagaagactgtgcccgtctccgtgaagctccccgagcgaggaatcgggctctgcttcaccggagaggccggcccaaggtcaccggacttcaaccgacccccggcaaccgtggaccgagaccctccccgagccaaccctacacttcgccggaactccctcgccgccgagtacatcctcgtgccggagcaaggagctgctcaggaggtagccccagatccagcaccagagccagcaccagaggacctgcctgccactgctttggaaggcaagccccggttttatgcataa

SEQ ID NO: 35557 - DNA, 894 bp, Zea mays
  Peptide Sequence Number=SeqID_77336
atgaacagtggctgtccggtggggcaccggactgtccgagactgggctgttggtttcgatggaggtgaagaggcgcactaccgcagacggtggcgtgctccttacgcggcgattcgccatctccgcacacggaggccgacgcccgaagagtatgactcatgggccagggcccccgtgtcagagactggctcgctgctttcagcggaggtgaagaggcgcattaccgcaggcggtggcgtgctcctctcgcggcggttcgccttctccgcacacggaggccgacgcccaaagagtatgactcgtgggcccaggtccccatgtcagaggctaggccgctgctttcgacgaagacgaagaggcgcactaccgcaggcggtggcgtgctcttcacgcggcggttcaccttctccgcgcatggaggccgacgcccgaagagtacgactcatgggcccgggcccacgtgccagaggctgggccactgctttcggtggagacgaagaggcacggcggttcgctcctttcatggcggttcgccttcatcgcacacggggaccgacacctaaggagcatgactcgtgggcccaagcccccgtgccagaggctggcgccctttcgccctcgagtgctctgcactctaatgccgccgtatctgccatggccttgctagatcctcccgagcgcctccagcccgaggtggcactcaacttggtgcgcaacctgctcggatggggtgtgtcggcgttctccagaaagatccgtgttggtgcctctcctcacagcaatctcgccgtcgaagagtttgtgttcttcgtctccaacctccccagcgggctggcgctgccgatttcgtctttcttcgtgctgctgctggaggagctcggcctccaatcttag

SEQ ID NO: 35558 - DNA, 612 bp, Zea mays
  Peptide Sequence Number=SeqID_77337
atggcgcaccagacactgtccgttgcaccaccggacagttcggtgtgccagactgagctggacttcggctcccagaggccttacgtctggctccgtccgctggcttacgtcacgggcagtaggtcacgtggcagcatcgggtctccgcctgagcggggagtgggagcgctcgtggcatggtctgtacacgtgtcagcaccggacccccgcctggccttgattaaggcctgggttttgaaccccgccaggaagtccgggttgtgcctccaggggtccggacccactgtcgccaccttggagtatatcgtctttcttggctatgtggcggccctggaaccgctgacgtggtggggtcagggtaccgacagtgacccccggacccgcctcagggaggatacgagcctgcaggaaccggcgcccatggaggatgactcgtgggcccgggccctcgtgtcagagactgggctgttggtttcggcggaggtgaagaggcgcactgctgcagacggtggcgtgctcctcacgcggcgcgtcctttcgctcttgagttatccgcgctcttctgccgccgtggccgctatagccttgctaaatcctcccgagcgtctctag

SEQ ID NO: 35559 - DNA, 639 bp, Zea mays
  Peptide Sequence Number=SeqID_77338
atgggtcagaggacacttgccttcaccaggttgctgctcaggaaggtcttcggcaacacactcaggaaccacgggttgctcgttgtctacgcaaagctcgggcaaggccgaaacaaggtcagtggctcgggagagggctcggtgtggaggccagataggtggggctcggggcagcgacacgccctggccaccagatctcggatcaacggtcttggtctaacgaaccgagcgaaccgttatccgagtgcatgggccaacggatcaaggatgaatggtcaggatttggtggaggggggttacggcttggcgaccggcgctgctccatccgcggtggtgaagtcgccggagacggggcaagcagcctccgagggggttctggggtcgccggtgagggctggaacgggtgaagaaaggtccgacgagctcactagcaggactccgaccgcaagaacaggatcggagatgggagaacaacgaaggggaggtgctttgggcgggtcgggcaactccggtgaggaatcccgaccacaggggggattcgggcgtgctaaggcgtggactggttctggcaggcttatggtgggctggacgaccggcagcgtggccacagatctccagcgagcacgggccgcgatgtag

SEQ ID NO: 35560 - DNA, 174 bp, Zea mays
  Peptide Sequence Number=SeqID_77339
atgcccttgcgcccgcccgcgggatctgatgtcggccattcgttcacgatcgtgcggctgagaaagcccgataccccgtcgcatgatgacgagcaacccgtggttcctgagtgtgttgccgaacaccttcctgagcagcaacctggtgaaggcaagtgtcctctgacctactaa

SEQ ID NO: 35561 - DNA, 144 bp, Zea mays
  Peptide Sequence Number=SeqID_77340
atggcccgcgttcgcgctctctccctctctctacccgacaacgagcagcccgtggttcctgagtgtgttgccgaagaccttcctgagcagcaacctggtgaaggcaagtatcctctgacctattatgtcctacttactttataa

SEQ ID NO: 35562 - DNA, 522 bp, Zea mays
  Peptide Sequence Number=SeqID_77341
atgcagattaaaagttctggaaccctgttggaacttgctctcctaagcgagttgatccaactgaggagcaaaagtggtgtgtctgagtgcccagcgtccattgttaaggacgcatgtgccctcaggcgcctaggttatccccggaatattcccataaagcaggcaggtgtggcgaaggccttcgagcgaagggtggcgtcttcgccttcgccccaacatttgccctccgagggaccagttcgactaagtcatctggtgccgaaggcgttgctagatggtggaaacgctgccctcgctcgaagtggttccgcgggggatatgcaacagttggtgtattttggcgacgggtcgggcgagtgccgggggcagaggagattcccgagcccgaggaagtttggggtccaagttcatcagttgacaccgaacgccatggtggcgttggcgaagtatgtctgggcaacaacctcgtatggcagtcagccttcggtggaggtcttcgccaagcactactgtttgcactag

SEQ ID NO: 35563 - DNA, 1212 bp, Zea mays
  Peptide Sequence Number=SeqID_77342
atgacatcgtatggcggtcagccttcggtggaggtcttcgccaagcattactgtctgcactggcagaagagaaaaattggacataagattgcgcaattcggatcgtgcactttcacgccgaagtccgggaagacttcgatggaagtcgtggagctggtcccctgtgcccgaaataagtggggcaactggtggaattactggttctatgtttcagaggccgaagtcaaagaccgcccagggctccctgcagccattatgtgctctcattattatgtggcgtacccgccatttgaagtagcagaggatgatgagaatgaagtggcccttcggatcgctgcccgtacgagtagtgggcgtgatctagttgaggagttcataggggtcttcgagttgaatcgtttaccatatggcggttatcccggggaagatgttgtcgaccgccgcgggaaaagatcagcggctgtggctgaagaagaccccgcgccggaggccgccccagccactaagaaaaggaagctaggtactgcggtgggggagttggaggtctccaatagatttgctatggagttgatggggacatgcgtggcccccggaggaaggatgtcttcgcctgagctccgggagtcttcggcgcggatgctggaggttaccgggggtcgatggcgcaagaacgttcctatcccccgcgcggctggcgaagacttctttacgtctcgcatggctcgtgacttgagagtgtttccttacagacggaatattgctgctgttgtgtcggcagtgatgaacaaggaccgtcgggatgctgcgcagaagcatcggccggtcgtcaggatggtcgaccccgtgcgcgaggcgaagagggcgcgaggaagcgcgaaggctgcggcctccggcagcggcaagctagtgccagcaaggcgtcgacaggcgagaaggctgcaactgctagcgaaaccaagcctctcccgggcgagatgtgttgcagggtcgggcgaggggcacttggttgttgtcccgccttcgctggcagtcacctcgccatcggcggtggtaaaggtgaagggggtcacgcaggacccttgggccgccttttgcgcgagcagcgagattctgacggccgctgccgctagggacgtggcgggcaccatgtcccagcggctgagggaagtgtctcagcagttgtcgcagcagctgacgcagcagctgaagcaa

SEQ ID NO: 35564 - DNA, 957 bp, Zea mays
  Peptide Sequence Number=SeqID_77343
atgtcccagcggctgaaggaagtgtctcagcagttgtcgcagcagctgacgcagcagttgaagcaagcggccgacttcgccgaccgtgttgagtcaggcgtcctgactgcggacgtcaccgccaaagtcgagaatctccgggcgcagcacgcggatgctgtccgggataagtcggctgcggagagcaagagccgcaggctggtggagaaggtggtcacactggaggccgagaagactgacctccgacgcaggctggcggaggagaggagggaggctaaccagaccgtcgatgaagcgcaggctgcgcaagcggaggctaaggtagcgctggcgaagggtagcctcgccagccaacacgccgaagaatgggaggcgaggttcaacgccctgcgtagtcgcgtggacaaggtcgagaccttggaggagctgctggtgctcccgactattgtgcagggcttcatgtcctacgcctccctcgtcacatgcgagggggcgatgaatgcgctgtcccgcgaggggtgcaaacactatgaggtcttcgaccagtcagatgagaactttgagcgcgaaatttttaaggtcgaagaccctgtggtaaaggattctgcgggggcactcttcgatcggatgtggggtcctcatggtcgggaggcggttagggagtggtctgaccgggcgagagagcagatggcgcgtgccgaggatgtcgaagactttggagacctgaacggcgcgcggcccgaggctaaggtcaacccggtgctgcccgaggctgaggtcgacccagcactgccctcggaagccggtgagggctcctccgccgcacctgtgcctactgcgtccggtgaaggctccttgccggcccctgcgccgatggtggaggaccccccgaaggctgtggaggagctggcagcagaggatcccatggcggcggccgggccttcgcaggtggcttag

SEQ ID NO: 35565 - DNA, 1191 bp, Zea mays
  Peptide Sequence Number=SeqID_77344
atgccctcatccaagaagcgtaacttggacgacagccctgggaaagttttgaagaaggtagtcactaagcggaggaaagcagtgcccccaccccgacagcagaagctgaacgtcagatgcaacccccaagatgtgttagtaagcatacagatattaaatgacagacagcaacaagcaattgcacgtaggggattttctagtattcttgatatgagactggacgcactcggcaacagatcacacttagcttggctgatggaaaagctcgaccccaatgacatgacaattcgagctggccctggaaaggagctgaaaataacaaaggatacggtgcacctaattttgggtttaccgaatgctgggggaggaactgcattgggcatcgatgaagctgttgttgccaacaatttgagagctgaacttgggctatcgaaagaagattttgggggttacagctctacaagatcgtttgaggaaaggttgttgttccctactgccagctggggaataacgaaccatgaggttcttttaaccgagcagatggatcgtttccaccagattgactggtgccagcttattttcaatgatttatgccaagctgccaagaagtggcataacaggagcgttacgaacgtttctacaaccatctatggatgttccatcgttgttcttttgtattatttggatcatttgcatgactcagcggcacccctgaacaaacgtggaacaccacgaatcaaatactttgataggaatattattcaagccctgacaagagctgacaagggcaagatacgcaaaggagaagaagcatttggacattgctcgcataagaccaggaccaacgcttttgatgttcctcgtcctgacccatctggacagcactcaattcacatcgaactcccgctcatcagggatttgatatcaagcaagcttaatcagcttccatcccgccaccgcatgggtttcatagagaagctgtcacattttgatgcggaggttggtaaggcgtgttcagttattaaacagactcttcagcagattgttgagaaacaattcaatctatctgatgtttttggcgagttaattgatgaggtcctccgtgccgaggtgggtgacaacgaagatgcttatgatgtgcagaaaaccacatcaaaatcagatgatattcttccccagacagctggttag

SEQ ID NO: 35566 - DNA, 1490 bp, Zea mays
  Peptide Sequence Number=SeqID_77345
atgaagaacgtagaccgacctccttccaatccaaaacggatcataatccagtctactcaggagtgcttcaacgttgacataccccgtgctccggcggggactgttagacccgaaacaagatgtaaatgtttacgatattcattttatattttttttcagcagaggcttaacatcagatgcaacccccaagatgtattagtaagcatacagatattaaatgacagacagcaacaagcaattgcacgtaggggattttctagtattcttgatatgagactggacgcactcagcagcagatcacacttagcttggctgatggaaaagctcgaccacaatgacatgacaattcgagctggccctggaaaggagctgaaaattacaaaggatacggtgcacctaattttggggttaccgaatgttgggggaggaactgcattgggcatcgatgaagctgttgctgccaacaatttaagagctgaacttggtctatcgaaagaagattttggggttacagctcttcaaggtcgtttgaggaaaggttctgacgatgatttaagcatcatatgctttttcttgatattgttcaataggttgttgttccctactgccagctggggaataacaaaccatgaggttcttttaaccgaggagatggatcgtttccaccagatggactggtgccagcttattttcaatgatttatgccaagctgccaagaagtggcatactaggagcgttacgaacgtttctacaaccatctatggatgttccatcgttattcttcactcaattcacatcgaactcccgctcatcagggatttgatatcaagcaagctgaatcagcttccatcccgccaccgcctgggtttcatagagaagctgtcacattttgatgcggaggttggtaaggcgtgttcagttattaaacagactcttcagcagattgttgagaaacaatacaatctatctgatgtttttggcgagttaattgatgaggtcctccgtgctgaggcgggtgacaacgaagatgcttatgatgtgcagaaaaccacttcaaaatcagatgatattcttccccagacagctgaaagttgccccgatgaagctgatattgatccactggttcatacaaatataacgaaacagaacaaaacacctacaacctcagtgggtaaacatggtgacggtggcaagaacatgccggccaatacaaacgtcactcctaaagcaacaccacatatggatcctgacgcgccgatatttgatgcgactccgcaaatcaagtctactggcggcatacaacaagcggcagaaacagacttgcctgacagtggtccatgctttgatcagactccatctgaacatgtttctgttgaaaccgatccagctacaaacactccacaggttggccaggcttctcttgattcggagatgcaaactgtgttagctctacgcgaatatttgtgtggtctgcaatctgacaccgacag

SEQ ID NO: 35567 - DNA, 582 bp, Zea mays
  Peptide Sequence Number=SeqID_77346
atggaggcgaggataatggcggagcgggcggcggctgatcagaggatggcggagatgttccagtacatgcagagccttggcgccgcacagggcatcgctccaccacctccattgttccctccagttgaccctgctctcttccacactcctgtttctgttgaaaccgatccagctacaaacactccacaggttggccaggcttctcttgattcggagatgcaaactgtgttagctctacgcgaatatttgtgtggtctgcaatctgacaccgacaggaccataatagattatggtgaatattcagcgacatgttctgacatatatgaatcttttgccgatgggaagtgtctcgacaatgtattcatgcagtgtttcatccaatgtgttattgatgatgcaaaaaatcagcagacttccatgagttcgaacaatttgattcttgatgttaatgttgggtcactactcaactttgaggaacaggaacgacacagtcgcaaccatcaaccttttgatgaatctgtactccagacacttctagacaattcattgcctgagacagatgaattggaccaatgcaaagcg

SEQ ID NO: 35568 - DNA, 471 bp, Zea mays
  Peptide Sequence Number=SeqID_77347
atggatctgacgagccgatatttgatgcggctccgcaatcaaggtcaagaagtcattcatattttagattccaacccatatggaccaacacttggtggaactacatggaaggactatcattttgcacatttgggctcaggtggcagaaagttaccatgggctaaggttattatgagcagattaaacaaagcaatacaacatgtacggcccagtacatgctttcccaagtttggtaacttcacaattgacttgtgcccaaattgtcctaacatggcagctggatccaataactgtgggttttatgtcatgggttacattctattttatcaatgcgacgaaggatctttgcggtcagacatagaagcaggcaacaccagtgagatacggtctcttgcgctgcattatatcagattccacccgaagaacaaagcattatcgctgctccaagacatccaaagattcaaggtctaa

SEQ ID NO: 35569 - DNA, 270 bp, Zea mays
  Peptide Sequence Number=SeqID_77348
atggagggagcggctggggagggaggagatggctgggcgagcagggagggcgcggccatgggagaggggcaccagccagggagcgtccatggaagaggtgaaagggaaaaggctggcgccggtcgttctgagccaccacaacgtgagacggcctccggcggtgacgattcttggggttcggagtccatgattattgggcggcggcggtcgttcccgagggaggcattgggtgtgtatggtgagaaggcgtcgcggatggaaacaaaatga

SEQ ID NO: 35570 - DNA, 339 bp, Zea mays
  Peptide Sequence Number=SeqID_77349
atggagatccagggcagccatgggaggggtagggacgacttctgcatggggagagatggagggagcggctggggagggaggagatggctgggcgagcagggagggcgcggcatgggagagggcaccgaccagggagcgtccatggatcaagaggtgaaagggaaaaggtgtggggaggaggctggcgccggtcgttctgagccaccacaacgtgagacggcctccagcggcgacgattcttggggttcagagtccatgattattgggcagcggctgtcattcccgagggaggcattgggtgtgtatggtgagaaggcgtcgcggatggaaacaaaatga

SEQ ID NO: 35571 - DNA, 372 bp, Zea mays
  Peptide Sequence Number=SeqID_77350
atggaaggggatcctgcaggggggagctctgccatggaaatccagggcggccatggtaggggtagggacgacttctgcgtggggagagatggagggagcggctggggagggaggagatggctgggcgagcagggagggcgcggcatgggagaggacaccggccaaggagcgtccatggatcaagaggtgaaagggaaaaggtgtggggaggaggctggcgccggtcgttctaagccaccacaacgtgagacggcctccagcggcgacgattcttggggttcggagtccatgattattgggcggcggctgtcgttcccgagggaggcattgggtgtgtatggtgagaaggcgtcgcggatggaaacaaaatga

SEQ ID NO: 35572 - DNA, 270 bp, Zea mays
  Peptide Sequence Number=SeqID_77351
atgaccaacttttggaaggactctaaggtcaagcctgggttgtacagacccgatcttcactaccaaggtgaatggccagggatacactacgtagcctttacaaagattcccttggtgcatagctgctcattcggtttcgccagtcgtacaaacgcagtgcacctccccaagctaagggcgtcccattctaccctcatggttgcactgttatcccgggtggtcactccacgaacaggtccttacagagaggtactcaggaaaaaggcctga

SEQ ID NO: 35573 - DNA, 291 bp, Zea mays
  Peptide Sequence Number=SeqID_77352
atgacgaagatacaacctaaaccagcaacacgactcgaccacggacacgacttgacctttgtggtcggtgaagggaggattagggttgaaagagacccggctctttgtgggtgcctcaacgaggaagtggggcaccttttgtggcaactttcaccctggccattcacctcggtagtgaagatcgggtctgtacaacccaggctcgaaagggatcatgactcatggtgctcaggagaaaatgcaggcaacatggaggactttgaggagttttcgggctacgacaatttctag

SEQ ID NO: 35574 - DNA, 159 bp, Zea mays
  Peptide Sequence Number=SeqID_77353
atggcgtgtcgtcgctctcgtgctcgctgcgcagccccatccacgacgccgttgaaacccgtgctagtggtcgacgccgcgcttcgcgccttgcctattcgatggaatgccgagccatgtgggcagcccatgcgcctagtcacgactcgttcaggttga

SEQ ID NO: 35575 - DNA, 195 bp, Zea mays
  Peptide Sequence Number=SeqID_77354
atggacgcccagaaattccagcagcgagcccccttcctcgctgttcgtcgtggtgcccgccggctgttcgacaaaatgcgcagcaagccgcgcgctgcagcagccctcccgttcgatctccactcccctcgtcgcgtgtcgtcgctctcgtgctcgctgcgcagccccatccgcgacgccgttagagtagattga

SEQ ID NO: 35576 - DNA, 708 bp, Zea mays
  Peptide Sequence Number=SeqID_77355
atggggctgcgcagcgagcacgagagcgacgacacgcgacgaggggagtggagatcgaacgggaggactgctgcagcgcgcggcttgctgcgcattttgtcgaacagccggcgggcaccacgacgaacagcgaggaagggggctcgctgttggtttttccatggaagaaaatggggcacgctggatagagagagctgggcgcagggaacagcaaggggcgtccatggagggggcagatccggccatggcatgctcctgctcgcagctctgcgcagaatcgcgaccacggggaagaagagcagaggagccgagctgctgggcgccggccatggagagaaaaacagcaggggagtgaagaagggcagagggcacgcagggaggtggaggcgccatgggaggggggcgagcagaggtgctgctcggccatgggaaagaggggagctcgcaggggggtcacttgcagggagatgtggcgtgcgcgaggaaatgccgagcgccgggagcagagggccggccatgggagagaggccagcgccctgggaggaagggagccgagctccctgcgcgttggggaagaaggccccctgctacgcgtgggggaagaaaccagggagaaaaatgttgtggcggctgaaggaaatggagggatgggagtgcaaaacagccaaggacaagggagagggatccgtatttatagagaaaccctag

SEQ ID NO: 35577 - DNA, 522 bp, Zea mays
  Peptide Sequence Number=SeqID_77356
atggaggaatggaactacgcagggaggggcgctggcttcctgcgcgacgtccatggcagggggatccggccatggcgtgctcctggcagggggcgagctcagccacggcaagcgcagggaaggggagggaacttggacgccatggacagggaagtggagaacaccatggctggggcgtgtggagcagggaggcgaggatctgggcgttcactggccgggcagggaagagcaggggaggcggacgccatggaagggggcgagcagagggagcccggggaaaatggcagccagggggagctcacagccatggaaaaaatcatagggcagagaggagctcgcccatgcccggggacaggcgccatggggaaactcgagcttgcagggaggggcaccacgatctgctgccgtgtgcgcgctggagcttggagaagggagatgccatggcggcaacagagggcatcggccaagccttgccgcactcctgcgcgcagctggtttccatgtgagaacgagcgctggtga

SEQ ID NO: 35578 - DNA, 288 bp, Zea mays
  Peptide Sequence Number=SeqID_77357
atggacgtcgcgcaggaagccagcgcccctccctgcgtagttccattcctccatggccgcgagcttttcccttgctgcgactacctcccaaggacagcgcgcagtggcctccccatggcagtgccccgtggacagcacgccgtcgacggccgccgtgcgttcgctgttttgcgcagccccgtccgcgacgccctagacgttgccgcggagccgcgcgtgatgcatgttttggtgaagcccctaaaccgtggacgcatgtgcaacccgaatccgagtttgacaggttga

SEQ ID NO: 35579 - DNA, 339 bp, Zea mays
  Peptide Sequence Number=SeqID_77358
atggccgcgagcttttcccttgctgcgactacctcccaaggacagcgtgcagtggcctccccatggccatggtctgcaacaagaagtcgcgcgctacatgttcgatgttttgcgcagcagccccgacgtcttcgcgcgctgtcggctcgctgttttgtggagccctgtggacaacacgccgtcgacgcccgccgtgtgttcgctgttttgcgtagcccatccgcgacgccatcgaaaaccatgctagccgtcgatgtcgcgcttcgcgccttgcccgttcgacgaaatgtcgagccatgtggacagcccatgcgtctagtcacgacccgttcaggttga

SEQ ID NO: 35580 - DNA, 456 bp, Zea mays
  Peptide Sequence Number=SeqID_77359
atgcaggggcactctgtccccacacacatcaaccgtccccatcgattccctggcaacagatcagggctcaccgccttggcgtacaatgccccactgaccccgactagccgtcgtgcagtggccgcacttgtacccaccataaccggaatgggagacctcgtctcaggtcgcgtgaggggtaaagtctgcgggcaggttcactcaggtactaggcttaccgatttaccatatttctcggttatgcataaaaccggggcttgccttccaaagcagtggcaggcaggtcctctggtgcaggctcgggtgctggatctggggctacctcctgagcagctccttgctccggcacgaggatgtactctccgtcagcaagattacagtctatcgaaatgcaatgaacatgtatgtcatgattatgcaagatttaagaacattaagctaaagaaactaagttaa

SEQ ID NO: 35581 - DNA, 588 bp, Zea mays
  Peptide Sequence Number=SeqID_77360
atggggaagcctgtcccatcactcctcatgctcctcctcagccgaggcagggtcccactcgacagtccaacccggtggcaaggtggacggccaagttattccagcaaccatttcctccagagaacctgtaaaaattatgccacaagcaaggctgagtatactaatactcagctagacttacccgggctcaccgccttggcgtacaatgccccactgaccccgactggccgtcgtgcagtgaccgcacttgtacccaccataaccggaatgggagaccacgtctcaggtcgcgtgaggggtaaagtctgcgggcaggttcactcaggtactaggcttaccgatttaccatatttctcggttatgcataaaaccggggcttgccttccaaagcagtggcaggcaggtcctctggtgcaggctcgggtgctggatctggggctacctcctgagcagctccttgctccggcacgaggatgtactctccgtcagcaagattacagtctatcgaaatgcaatgaacatgtatgtcatgattatgcaagatttaagaacattaagctaaagaaactaagtcaagaattaacttaa

SEQ ID NO: 35582 - DNA, 459 bp, Zea mays
  Peptide Sequence Number=SeqID_77361
atggggaagcctgtcccatcactcctcatgctcctcctcagccgaggcagggtcccactcaacagtccaacccggtggcaaggtggacgaccaagttatcccagcaaccatctcctccagagaacctgtaaaaattatgccacaagcaaggctgagtatactaatactcagctagacttacccggtcatggatcaagcagtctcattagctgcgagaagcagacgattcgaatcgagtttttaaaccttgcaaggttatgcataaaaccggggcttgccttccaaagcagtggcaggcaggtcctctggtgcaggctcgggtgctggatctggggctacctcctgagcagctccttgctccggcacgaggatgtactctccgtcagcaagattacagtctatcgaaatgcaatgaacatgtatgtcatgattatgcaagatttaagaacattaagctaa

SEQ ID NO: 35583 - DNA, 873 bp, Zea mays
  Peptide Sequence Number=SeqID_77362
atggcggggcggtccttgccctccagccggacacagtgcacgacggtgtacgccaccagctcaacggcctcggcctcgtgcgccatgggctccgatccgtcgcgagcgggtccagcacttctcgagctcccttccattgatgctgggcaccgcgtagtccaccacgctcacggggctcccaccctctgcctccttgaaaacccaaacgccaacagggatactcctctgtatttggagtgtgcacctgaaaacatattgtctcctacctcagcaccggtggatgaggaagtaaataacgaagttggcgagcgtattcttactaaagctaatatagatcaaactgtagaaggagtaagcgctgaagatattgatccagatagagtggagaggctggttctcgacaactggaaaccccaatttcattatgccaatacccttggtttcattgctcttaccttagttctgacgttccccaactactcacaacttgctacactgtcagctcccagacttcacattgcagcttgcttggttataatttatggttgggaaatgaataccacaagatctgaacattttgtagttgcgaagagaatctcaaataaacaacctatcgggcttaaatttattcatcaaatcctttttgggaggcttgaaaaggcaacaaatattatcactttgtatgatgtttccaatatctggcacattcgtttgttgctacaggttgttggttttgaagatgatttcttacaggactcagcttctttgattgcatctccaaatgagtcatctgccatgctggtaactattttatatccagactttgtagtcgttctacgtgagatggctcatctgaacttggttgcatcttag

SEQ ID NO: 35584 - DNA, 447 bp, Zea mays
  Peptide Sequence Number=SeqID_77363
atggcgcacgaggccgaggccgttgagctggtggcgtacaccgtcgtgcactgtgtccggctggagggcaaggaccgccccgccatggctgacatcgtggccaacctggagacggcgttagcactctgcgagggaagcgccaccggcggcggcgaccatgggaccgacgggttcagaaacatctcctccagcgccagcctctgtcatagggccatggcgtcgacaaccgccatgtctaagaccgccctccgcctggagagcgcgcaggtcgccttcagatacggagccctgctgcgggccgccggcccgacggccgcaggtacagggagtagcctcgaggtcggagacacccatggcgaggaggagcttgtccggtcgatctgcggggatgaatcgacgccgggtgtcctcgccaccggggtggaggcgcggtcgctagggttttga

SEQ ID NO: 35585 - DNA, 216 bp, Zea mays
  Peptide Sequence Number=SeqID_77364
atgtctgagaccgccctccgcctggagagcgcgcaggtcgccttcagatacggagccctgctgcgggccgccggcccgacggccgcaggtacaaggagtagcctcgaggtcggagacacccatggcgaggaggagcttgtccggtcgatctgcggggacgaatcgacgccgggtgtcctcgccaccggggtggaggtgcggtcgctagggttttga

SEQ ID NO: 35586 - DNA, 984 bp, Zea mays
  Peptide Sequence Number=SeqID_77365
atggctcgtagaagatcccacaagaacaagaagacacctccaaaggaaaataatgaggtaactcttgagatattactttctgaggaggatcaaagatgttttcgcttaaactacctagcttttgacatcttaagtaattctcttagcaatgaagattatcgtgccttcatatccaattataatgaatctattcatgatgcgcatgatatttggactagaattaaaatcaaatttgatgagtccaaacatgatagttcattttgtgcttctacttcttttggtatttgtgagactaaccctttgaaggaagaagaagaaaatgaacgatggagaccaaacgatgaatccacctctccaaaaggtttgtcttcccatttcgattcccacatatgttgtgtggctaatgaaaatgatagcggaagcacaaatgaggatgaggaggaagaaagaagcttcatgcaactctacgctcgcctaagccaagaagataaggcggtcatgctcaaacttctagaaagagcgagagagcaaagcgaagctcgtcaaagacttgaaaatgttctctccgtgaaaatgctatactttgatgagttgactaaagaacatgaggagctaaagtgctctcatgttgatttggtccaaagcaaatcttcctttgagctagaatttgcaggaacaaacgatgatacatatcaaaagctcaaagaagaaaatgagaggctaaagatgagcttgacacaactaaaagggaagtgcatacctcaaccttctcaagataaccgtaatcacatggtgaagaagcttgagacgggaacaaccgaggcatgcactaactcccttgaagaaaatgtcaaggacttgaggattgccaagaggaaggaacaaaagaagaaaatcaacacctcttccaaaagcctcaaccatgcctccataaaaggtaacatccaagatatagagagatattccaagttcctaaaagaataa

SEQ ID NO: 35587 - DNA, 255 bp, Zea mays
  Peptide Sequence Number=SeqID_77366
atggcgcctgaggccgggcctgactgcctgtcagcctcactgtgtctagtggcactgcagccgatgcggcgcaggcggcgctgtccttctgtcaggtcgctttgtgctgatgggggttaccagctgagaattaggagccttgagggtacccctaattatggtccccgacagattttcataagtaagctcaagagatatgtcattagtaacacaagcactagtttcccttttgtaatcatttttgacaaggaatga

SEQ ID NO: 35588 - DNA, 1179 bp, Zea mays
  Peptide Sequence Number=SeqID_77367
atggctcgtagaagatcccacaagaacaagaagacacctccaaaggaaaataatgaggtaactcttgagatattactttctgaggaggatcaaagatgttttcgcttaaactacctagcttttgacatcttaagtaattctcttagcaatgaagattatcgtgccttcatatccaattataatgaatctattcatgatgcgcatgatatttggactagaattaaaatcaaatttgatgagtccaaacatgatagttcattttgtgcttctacttcttttggtatttgtgagactaaccctttgaaggaagaagaagaaaatgaacgatggagaccaaacgatgaatccacctctccaaaaggtttgtcttcccatttcgattcccacatatgttgtgtggctaatgaaaatgatagcggaagcacaaatgaggatgaggaggaagaaagaagcttcatgcaactctacgctcgcctaagccaagaagataaggcggtcatgctcaaacttctagaaagagcgagagagcaaagcgaagctcgtcaaagacttgaaaatgttctctccgtgaaaatgctatactttgatgagttgactaaagaacatgaggagctaaagtgctctcatgttgatttggtccaaagcaaatcttcctttgagctagaatttgcaggaacaaacgatgatacatatcaaaagctcaaagaagaaaatgagaggctaaagatgagcttgacacaactaaaagggaagtgcatacctcaaccttctcaagataaccgtaatcacatggtgaagaagcttgagacgggaacaaccgaggcatgcactaactcccttgaagaaaatgtcaaggacttgaggattgccaagaggaaggaacaaaagaagaaaatcaacacctcttccaaaagcctcaaccatgcctccataaaaggtaacatccaaggcaacccaaaattgcaatttgtgctagaaagggaaactagtgcttgtgttactaatgacatatctcttgagcttacttatgaaaatctacaagagagtaagtgcatgattgaagtcacaagcctcaaaggttactcttcacccaaaggaagaaagaatagattccttattggaccaaagtcggctagatgtgcattcaatctcattctcataaatgcacttgtccattag

SEQ ID NO: 35589 - DNA, 279 bp, Zea mays
  Peptide Sequence Number=SeqID_77368
atgacgtacttctgtgcatggcaagaaattcagaaccagacggcctccgtgcgagccacaagattcaggaatatcattgtagattgttttttaattaggccagctatcacaatttttcgagtttgcatgtgcctgcaatgcattacggaggcatttggaggtagcatttatctttataccaggaaagatgttgtgcggtactacaagcagaacgccgataaaacatgggtcgacgtctcgctgaacaacctgcttcctggctcagccctcaattgctag

SEQ ID NO: 35590 - DNA, 306 bp, Zea mays
  Peptide Sequence Number=SeqID_77369
atgaggctcctcctcctcgtcaaccccacatggttcaactggatctgtccacgctcgtggctttctttgttgccttccattgatgtgaatgtttttgaattaggccaactatcccaatttttcgagtttgcatgggcctgcaatgcattacggaggcatttggaggtagcatttatctgtataccagatgtcgtgcggtactacaagcagaacgccgatgaaacatgggtcgacgtctcgctgaatagcctgcttccaggctcagtcctcaattgccagcgccagctgtcaggatgtctcatctag

SEQ ID NO: 35591 - DNA, 615 bp, Zea mays
  Peptide Sequence Number=SeqID_77370
atgcatatatcttacgcattgcattcattagattgtaatcttgccgacggagagtacgtgctcatccccgagcaaggacctgtccaagaggaggaccaggagcaggcttcagaggctgctattgaggatctccccgcagccccagcaattgaaggcaagccccgccggctcccgctccagctccgcttccaaggaggcaaggacctcgcctcctcacgcacaggtcagcgcggcgcgctgctgaccagggctgccgtcgcgaggctttacctcgtcgtgctcaacgtcgacacccacatgtgttgggcccgcgactactacaacaactacgcccagttctggcttgtttatgattgtggaactgcttgtgctcctgactattacatcgaggaagaggaattgaacgcctatgaaacatgggtcgacgtctcgctgaacaacctgcttccaggctcagtcctcaattgccagcgccagctgtcaggatgtctcatccaggaaaaacgtaatggctactcaaaggtggaacacgttgaggtggacgataggtcagtgcgcaacatctacaaactattgggggcaagcagcagttctgcagttgtacagaagcactga

SEQ ID NO: 35592 - DNA, 333 bp, Zea mays
  Peptide Sequence Number=SeqID_77371
atggacaagatttgcaggttcgggccgcttagaagcccacgaaagaatgaccttacgaattattgggcccttgggcctttcgtgaggccttttacttctttagtggacccaggggatatctatcccccacaagcccccgatctttgggttgatttagaggtaatcaactcaaagatccaaggtccaaaaaatgacttcctgctgtcttctctggctctgatcactcgttcgaccaaagtttggttttgtgcttgtgccttagaggtcggcattttggattgtaagactctggacttcattgggtgcaccggaggtgcacccaatggggtgtag

SEQ ID NO: 35593 - DNA, 504 bp, Zea mays
  Peptide Sequence Number=SeqID_77372
atgcacatatcttattcgttgcattcgatagactgtaatctcgctgataagtacatcctcgttccggagcaaggagttgctcaggaggtagccaggagccagcaccagagcctgtcatctaggatctgccttccccagctttggaagtcccacgtcttctttattggttgtctttccctaggcccacgaaagaatgaccttacgaattattgggcccttgggcttttcgtgaggccttttacttctttagtggacccaggggatatctatcccccacaagcccccgatctttgggttaatttagaggtaatcaactcaaagatccaaggtccagaaaatgacttcctgctgtcttctctagctctgatcactcgtccgaccaaagtttggttttgtgcttgtgccttagaggtcggcattttggattgtaagactttggacttcattgggtgcaccggaggtgcacccaatgggtgtagcccccgacctttgagtagattttag

SEQ ID NO: 35594 - DNA, 729 bp, Zea mays
  Peptide Sequence Number=SeqID_77373
atgtcaccattactgctagtcagatccgccagctctttggattccccgagtcgacgactcgtcttcacagcctctgctacggcacttctgaccctcctcgtcgccctcacggcggtgtggctctgggtacagctcacgtcgcggctctgttccgcccacccttctcagatgggtcacgacgttctccggcagattttactacagcagccaagtatctatatgagcttatcagacggactcttctgccgaggatgggatataggaaggctaccactcatatttagctttggctcctgtcggtgttttgggtccgaccgcacacccggggttgcccctcaaggcccacgaaagaatgaccttacgaattattgggcccttgggcttttcgtgaggccttttacttctttagtggacccaggggatatctatcccccacaagcccccgatctttgggttgatttagaggtaatcaactcaaagatccaaggtctagaaaatgacttcctgctgtcttctctggctctgatcactcgtccgaccaaagtttggttttgtgcttgtgccttagaggtcggcattttggattgtaagactccggacttcattgggtgcaccggaggtgcacccaatgggtgtagcccccgacctttgagtagattttgtaagataatctactcgaaggtcttcttccaaaggttatctccattcgcgctcctgcatctcggttga

SEQ ID NO: 35595 - DNA, 363 bp, Zea mays
  Peptide Sequence Number=SeqID_77374
atggggaagcctgtcccatcactcctcatgctcctcctcagccgaggcggggtcccactcgacagtccaccccggtggcaagatggacggccaagtcactccagcaaccatgtcctccaaggaacctgtaaaaattgttccacaagcaaggctgagtatactaatactcagctagacttacccgtgaccgcacttgtacccaccataaccggaatgggagaccacgtcttaggtcgcgtgaggggcaaagtctactgccaggttcaatcaggtttaggttttgctagggataggcatagggaatttgtattgcctcaatatatttcagtggacaagttaataaaggtttctagtgtagattga

SEQ ID NO: 35596 - DNA, 354 bp, Zea mays
  Peptide Sequence Number=SeqID_77375
atggggaagcctgtcccatcactcctcatgctcctcctcagccgaggcagggtcccactcgacagtccaacccggtggcaagatggacggccaagtcactcccgcaaccatgtcctccaaagaacctgtaaaattatgccacaaagcaagtacaatggatcaagcagtctcattagctgcgagaagcagacgattcgaatcgagtttttatccttgcaagtgaccgcacttgtacccaccataaccggaatgggagaccacgtctcaggtcgcgtgaggggatatgaccactgccaggttccctcaggttctaggcttaccgatttaccatatttctcggtatccgcacgttaa

SEQ ID NO: 35597 - DNA, 414 bp, Zea mays
  Peptide Sequence Number=SeqID_77376
atggggaagcgtgtcccatcactcctcatgctcctcctcagccgaggcagggtcccactcgacagtcccaaccccggtggcaagatggacggccaacagcatggatcaagcagtctcattagctgcgagaagcagacgattcgaatcgagtttttaaaccttgcaagtgaccgcacttgtacccaccataaccgtaatgggagaccacgtctcaggtcgcatgaggagggcaatctgcgggcaggttcactcaggttatgcataaaaccggggcttgccttccaaagctggggcaggcagatcctctggggcaggctcgggtgctggattcggggctacctcctgagcagctccttgctccggcacgaggacgtactctccgtcagcgaggttgcaatctatcgaatgccatga

SEQ ID NO: 35598 - DNA, 744 bp, Zea mays
  Peptide Sequence Number=SeqID_77377
atggtgatcaaggtagacagcgtcaatagccatgacacgttgctcgccgtcgtccaggtcatcgccgacctcaacctcgtcatctataaggcatacttctctgatggcagctcgttcatggacgtgttcaatgttaccgaccgtgaaggtaacatggttctcgacgcctaccatattacatccagaaggttaccgtgctgtttctcgcagacgttggaggcggatgactggtactacctagaggcacgcaacacggtgggcatcgtggcgttggaggactacacctccattgatctcacaggcacagacccgggcctgctattcgagtccttcttgcttactttcacattagttatgggagctctaatgttcatgttgatgtcactgagacaaggtacgacagagtccagtgatttgaaaaaaggtttggttaatgctattcaagacctatatgatgttgttcatcatgaagcgttttcagttgatatgagtggccacattgaagactgggatcaaattaatttagcaagggctgaaggtcacctcttcaataaactcaagtggccaaatgatcccaaattgaaagacttgatcaagagattgtattcacttctgacaattaaagaatcttctgcaactatccctaaaaatttagaagcaaggcgaagtcttcagttcttttacgacctcactgttcatggaaatgcctgttgcacggcctgtttcggaaatggtctcctttag

SEQ ID NO: 35599 - DNA, 558 bp, Zea mays
  Peptide Sequence Number=SeqID_77378
atgccacatcgagaaacaacaactgtgggccaggccagggagcacaatcccatggtgcggcgacttgcccatgtttgccatgctgccttgatgcatggcacatcaacaagaagagcaccagtttggaaggctaattccgaaggaattgagtctattcatgactttgctaatgcttctatggccactgcttatgaaaagaaatggccattgtatcttcgtaccaagaacactattttgaagaaatatgatggcaagttcaagtatcttcaatttcttgttttatcatatccaatcaaatttgtgcatgggcctccaatgactccatggtcatcgccgacctcaacctcgtcatctagaaggcatacttctcctctgatggcagctggttcatggacgacgttggaggcggatgactggtactacctggaggcacgcaacacggtgcgcatcgtggcattggaggactacacctccatcgatctcacaggcatagacccgggcctactattcgagggatttttaattgcatcaatagctactcaggagatgaggcactga

SEQ ID NO: 35600 - DNA, 213 bp, Zea mays
  Peptide Sequence Number=SeqID_77379
atgggtgtgtgggaacgcaagctcgtggacacggtgtccgccatcaccgtggtcaagcacatcctggtccggcatacccttgagagtgttttccttagtcaggtgaggaagcgacaaatttttgttgcttttgctccaaggtggtaccaaatgaagaaaaacaagactgaagtgcgaaaggacttggtcctccacataggatcttttgcttaa

SEQ ID NO: 35601 - DNA, 399 bp, Zea mays
  Peptide Sequence Number=SeqID_77380
atggatcctcagctgagtataatcgatttggatcgtcgtaccttcgcggttatgaagacttggtcacttttctacaaccatacccttgagagtcttttccttagtcgggtgaggaagcgacaaatttttgttgcttttgctccaaggtggtaccaaatgaggaaaaacaagactgaagtgcgggaggactcggtcctccacataggatcttttgtttataacttatcgggaggagtttgtgcctcccttggtttgtataatattactactctgcactcacttttagctctggacaactgtaggtgggcctatttacttgggaggttccgtcacacccttaaacactaccaaggtgaacaggcaggatttcactacgtagcctttacaaagattccttga

SEQ ID NO: 35602 - DNA, 219 bp, Zea mays
  Peptide Sequence Number=SeqID_77381
atggatcctcagctgagtataatcgattcggatcgccgtaccttcgcggttatgaagacttggtcacttttctacaaccatacccttgagagtcttttccttagtcgggtgaggaagcgacaaatttttgttgcttttgctccaaggtggtaccaaatgaggaaaaacaagactgaagtgcgggaggacttggtcctccacataggatcttttgcttaa

SEQ ID NO: 35603 - DNA, 219 bp, Zea mays
  Peptide Sequence Number=SeqID_77382
atggatcctcagctgagtataatcgatttggatcgccgtaccttcgcggttatgaagacttggtcacttttctacaaccatacccttgagagtcttttccttagtcgggtgaggaagccacaaatttttgttgcttttgctccaaggtggtaccaaatgaagaaaaacaagaatgaagtgcgggaggacttggtcctccacataggatcttttgcttaa

SEQ ID NO: 35604 - DNA, 219 bp, Zea mays
  Peptide Sequence Number=SeqID_77383
atggatcctcagctgagtataatcgattcggatcgccgtaccttcgcggttatgaagacttggtcacttttctacaaccataccattgagagtcttttccttagtcgggtgaggaagcgacaaatttttgttgcttttgctccaaggtggtaccaaatgaagaaaaacaagaatgaagtgcgggaggacttggtcctccacataggatcttttgcttaa

SEQ ID NO: 35605 - DNA, 1332 bp, Zea mays
  Peptide Sequence Number=SeqID_77384
atgcataagaaccccttttacaacaggttcgtcttcgtcaccataaacaaagttggaaacttcaagagcgagaaactttcgaaaacaggcatcgttcataatttttatgatacagatccattttacaaagacaacctcagcgagaagatcaaggaatactatggaattagaattttatgtgacggacgcgcacacaggacgggaactcatgagaccaaaaaattacacgataaaattaagcaagatgttggaggccttcatcttccgaaggtactcaaaaacacgactaacatattttccaagcataatatactcacagggaccttcggccttgggatagaggtgtacacgataggaaaggcgcggtctgggagaaggctcaaggggggcacgtacaaggatgttgagccccgacatgtgggcccaggagcaaaacgaagggaatacattatagaagtaactaatgcgagtacgcctgggcaatctcctggcgccatgatatccgtagtccacgcagtattgatatgcggcggctgcttcctcggtaacgcgcgagtgatgatgatgagcatagtgcacgcagcagtatgggcatactgcctgccagtggaatggacaggcacgtcgcctgcggaatggactagtcgccgccagcccgcggaatggacaggtctcattaaatgcggaggcggtacatcgcctgccagtggaatggacagggctcaattaatgccgaggcagcacatcgcctgccagtggactggacaggcgacgtgccttatccacaataaatgcagaggccgcgcagcccagaggccttacgtcaggccccgcccgttggcttacatcacgtgcaccatgccacgtggcagcatcggggctccgcctgagcggggagcagaagcgtatacggtaaggtccggacatgtgtcggctccggacccccgcctggccttgattaaggcctgggtattccctgtcctagaatcccgggaccctgctgtgagtggcccggaccccacacagaggggtccggaacccatcctaggggtccggtttgcgctcgcggaggtcctggatcttacccggaggtttggtctgtatatacaggggtctggcactatcccatgggggtccggactcactatcgataccttggagtataccatcttctctggccacgtggcggtcccggagccatccacgtggtggggtcgggtgctgttgctagcccagattagttgcccgaggctggggcgagccatggtctggtcccacgcacagcttctttaccacgcgactaaagatagccgcgtgggtacagggtactga

SEQ ID NO: 35606 - DNA, 654 bp, Zea mays
  Peptide Sequence Number=SeqID_77385
atggtctggtcccacgcacagcttctttaccacgcgattaaagatagccgcgtgggtactgcatcttcatatggtagtaaggggtacgtcagttttaagatgggttggcacgagatggaacacaagggggaaaacgtggctcatgttatcctgcgccagggggatgcgctcgtagtaggggttacaagcgttcgcgagggagagagagtgagcctgttcgtcagcccgttctcccgcgcgaccctcccacatgaaggctctggacctcccttttatagatgcaaggagagggtccagagactcctcctgaggccgaggtcggggtcgggcgaggacgcgattcctcccgaggtcgaggttgaggccgagccctggggtcggacgaggcagagcttcctgttgtgcgtgaggctgaacttggctgttgtcagcatcaccctggcgatcctcgcattgaatgcacctgcgatacggtcggttggtgaggcgatttggccaaggttgcttcacaacgaagcttgcccgagctgggcttcgggcgagtcgagggtgcgcccgttgcttgaggaggccctcgggcgaggcgtgaattcgtctgggactactgttcctgcccaaggctgggctcaggcgaggcgagatcgtgtcccttga

SEQ ID NO: 35607 - DNA, 681 bp, Zea mays
  Peptide Sequence Number=SeqID_77386
atgggtcctatgggtgtgctactaacacttcctagccgaagctgtgtacaggtccaagtcccagtcgaggctgcctcctgggggccgggtcaccaattctttcttaggtatactgatctagctactcatcatcagcagtatcctgctggaaatgttcggccaccaggtccacgacatcttgtacgccctctcggacggtgtcttcagtgtcggccaccggaccagcgatcaccggctccaaggagatggccgggttcttggctccggaagcacgtcgggatgtactcgatcaccgcccgacagagcctgccgccctcggcctccaagcgggcgccaagaatctggtccagacgtaggaggcggtcgacggtggagtccagcaccgggagcgcgtcggagatggacgtcggcagctgcgacaccgggatgggactcatccctagcggcaccagagccgtgctcgtctcgccgacccatgcggcgatgcgctggaccccagcgcgatgctccgcctggagatcttcaagtgttttcttcgtcgcctccaccacctggggcccagtgtcgcctgtgccgcctggaactggcggacccgctactccagcgtccgctccttctcctccgcctcgagctcatgctcggccagcaacttctcctgcctttcaagcatttcctccttga

SEQ ID NO: 35608 - DNA, 306 bp, Zea mays
  Peptide Sequence Number=SeqID_77387
atggaggcgagccagaaggagaagaggctggccaagaaggaggaggccttgaaccagagggaggaggtcgtcacagagctccaggccaaactgagtgccttcaacaaaatcctggaggagcaacgggtccagcagaccatggctgtggagagtctgcaaaggctgcagcgggaggcagacctcgccaggcaggagaaggaccttgccttcaaggaggaaatgcttgaaaggcgagaaaagttgttggccgagcatgagctcgaggcggaggagaaggagcggacgctggaggagcgggtccgctag

SEQ ID NO: 35609 - DNA, 534 bp, Zea mays
  Peptide Sequence Number=SeqID_77388
atggcgggcttcctccccctctgctcccaaggccgtgcctccctcgcctccggctgctgccgccgagacagcgccaccgggttcccacgttccagctgggggtccggcagcgccaacgccaagcggcaccgcagcggcggagggggtcccaattgccccgatggttgccgcagcatcaacgacggcgatgccgtcgagtacaccatcggcagcggtagaggaggctccaactgcgcccgcccccgccatcgaggtcgacgttgggggcgcgtccagctccatccctccgtccactccagaggagacagaggtgatttttgggcgacgtctccgtttgcctccgagcgatccgagcttgagcgggaccgcaaggactacaagaaggacctccagaaggtgtacgcttgggagctggaggtggcccagaatgagaagaggctggccaagaaggaggagcacttggaccagagggaggaggtcgtcacggagctccaggccaagctgagtgccttcaacaaaatcctggaggagtag

SEQ ID NO: 35610 - DNA, 762 bp, Zea mays
  Peptide Sequence Number=SeqID_77389
atggcgagctcgccggtgctcgccgtctcctccatccctgttgggactatgcttcgtcgccgaaggctgcgacctgtgcctataaatagtgaacagtattcctttactgttcacgcattctgcggaagagggatccgatcctccggaacttatagctccggaagaagggcaagaacccgacccctccaagataaacctcttgtgccaggaaagcttcgacgaaggcaagtccatccttcccttgatgcattatttacctatttctctctaccactgcctaagcctggaatatgggatgggaatcgaattgcatgggttatgaaggctggggagcaccgggaggataaggagggggaaagttttgtccggtttggacatggcggtggcccgactccttctggtataaccgttaagcaaaagatcgtgatcaagctgggcgtacccaacgccaagaaccggtctaaggccatgcagctggcatccaaatttgtcggggtgagcaaggtggggatcaccggcgacggcaaggaccggctggaggtggaaggagaaggcgtggacaccgtcctcctggtcaactacctgcgcaagaaggtctgccgcagcgctgacatcgttaaggtggaagtgaaggacaagaaggacgagaagaaaccggaagagccgccgtattattgctggcccaattactactactgtccgccgccgccgccgccgctgcccatggtcgagcgagccgacgacagttgccacgtcatgtga

SEQ ID NO: 35611 - DNA, 261 bp, Zea mays
  Peptide Sequence Number=SeqID_77390
atggcgccgtcccccgccgtcgccctgctgggccgcaagcacgcccgcgcgcgcgctcgcgcctgcggaagagggatccgatcctccggaacttatagctccggaagaagggcaagaacccgacccctccgagataaacctcttgtgccaggaaagcttcgacgaaggcaagtccatccttcccttgatgcattatttacctatttctctctaccactgcctaagcctggaatatgggatgggaatcgaattgcatggtga

SEQ ID NO: 35612 - DNA, 363 bp, Zea mays
  Peptide Sequence Number=SeqID_77391
atggcgagctcgccggtgctcaccgtcctctccatccccctccctcccccgagcgcctataaaagcacccgcccgagccccgtcttcaccacaccagctccggccatctccactgctttcccccgagcaaatcgagctagcgccgccgtgcctccctcgtcgctccgcggaagagggattcgatcctccggaacttatagctccggaagaagggcaagaacccgacccctccgagataaacctcttgtgccaggaaagcttcgacgaaggcaagtccatccttcccttgatgcattttttacctatttctctctaccactgcctaagcctggaatatgggatgggaatcgaattgcatggtga

SEQ ID NO: 35613 - DNA, 270 bp, Zea mays
  Peptide Sequence Number=SeqID_77392
atggtcaaagggccgttggggctggatttcgccgtcgcaacaccgaactactgggtgcacaagggcattgccttcatctgcgagatcaggacctccttgtgcggctcgccgacacatacgacacaagccattgtccgcctccagcccgacataggtagcagcggcgatgacacatccttccatctgcaacaacccatggaggccgacggcggtgcatctagggtatggaacaacggtcgcgtggatgcccctacccctcaaggcatgtga

SEQ ID NO: 35614 - DNA, 177 bp, Zea mays
  Peptide Sequence Number=SeqID_77393
atggtcaaagggccgttggggctggatttcgccgtcgcaacaccgaactactgggtgcacaagggcattgccttcatctgcgagatcaggttttcttccctctcctgttttgatctgtcatggttcaacgtggtagaagcggtagaactgagtgcttgcccgttcggtcagatttga

SEQ ID NO: 35615 - DNA, 270 bp, Zea mays
  Peptide Sequence Number=SeqID_77394
atggtcaaagggccgttggggctggatttcgccgtcgcaacaccgaactactgggtgcacaagggcattgccttcatctgcgagatcaggacctccttgtgcggctcgccgacacatacgacgcaagccattgtccgcctccagcccgacataggtagcagcggcgatgacacctccttccatctgcaacaacccatggaggccgacggcggtgcatctagggtatggaacaacggtcgcgtggatgcccctacccctcaaggcatgtga

SEQ ID NO: 35616 - DNA, 606 bp, Zea mays
  Peptide Sequence Number=SeqID_77395
atggccgcagatctcgcctaccatggcaagtccatgagcaccgacgcgaccggacttgcgacggcggtcggggtcgacgacgcagcggctacgtgcgcgtggatgagcgagggaggggcgctaaatgccggcggggattgggggagcggttgcatatccaccgccttgtgccaccgctccgcgacgaggtgcgggaggggagaggggcaagggcgagtggtggtggtcgctgcgtcgtcggcgacggaggctccggagccggggctcgagaggccccagggcgcgccggcctgcagcgggccgagcacgggcgacggcggggatggacgccaccgcgaacgcatgcgacgactcgggcgccgaggtgaagcagagatgtgcgtggacgccggaggcaggcaggagtgtgcctcgacgactcgggcgcgtggggcggaggcgtcttggctggatccgatgatggcggcgctgatggcgtggggaggagggtggggcgaggagagggaggcgtgcgtcgtggagaggatctccggcgtgcgtcgcggagaggagactggcagaaccgtgcaccatacgaatgtggacgtctacactactgtcttatag

SEQ ID NO: 35617 - DNA, 1959 bp, Zea mays
  Peptide Sequence Number=SeqID_77396
cttacgttctaagcctgggcatttatctgcttcccaacagagagtgcacgaggactttgttcacgtgtggcatccccacaatcaaaatgtgggagcaacaggttctggtctgtctggtgttgctactgtctcgagtactcttggtgtacttcgagcttacagtccaaattcgacatcagcatcctccagtaatttgtcaactgtccatatgggtggactaacatgtataactcagccgacgacagaactggggtctgaggatactgttattgcacaatttttgagtaatcctgcccaagttggaccaagcgagtctcctgtcctatttagtggaacagttggtgctgcatctacattttctccattggcatctaatgaccttcctgttagtgaaataagtgctatggtgccccctccatcaacatctgctgatcgtctgggacctgtattacttggttgtatacgagacgtcttgtggcacggccatttcttaagaggagaggtggggaaatggattgcgattattgctgttattctgcgcctattttttccgcgccacttcacagcggtcgcccccagtctgttcgcacacaccttcagggacgacctcgtcggtgtcttcatatgccttgcgatcggatgctacctgctccaagagcacatcagggcgtcagatggacttaggaacgccttcaggaagggcaatggcgtgtccaactccattggcatcctcctgctcttcatctaccctgtctggaccggggtgctgcgaatcctacgtccacattcgtatggtgcacggttctgccagtctcctctccacgacgcacgcctccctctcctcgccccaccctcctccccacgccatcagcgccgccatcatcggatccggccaagacgcctccgccccacgcgcccgagtcgtcgaggcacactcctgcccgcctccggcgtccacgcacatctccgcttcacctcggcgcccgagtcctcgcatgcgttcgcggtggcgtccatccccaccgtcgcccgtgctcggcccgctgcaggccggcgcgccctggggcctcccgagccccggctccggagcctccgtcgccgacgacgcagcgaccaccaccactcgcccttgcccctctcccctcccgcacctctaaatcagatcatcatcctcgcctcccccttccatccctcacctccttcgccatgccgcagccaccacctccggcggctggagcctgacctagatgcgatggacgacctcaatcccacgccgccagtggatttggagcgctggccctcaccgtcgcggagcggtggcacaaggcgccgttgcgtcgtcgaccccgaccgccgtcgcaagtccggtcgcgtcggtgctcatggacttgccatggtcaaagggccgttggggctggatttcgccgtcgcaacaccgaactactgggtgcacaagggcattgccttcatctgcgagatcaggacctccttgtgcggctcgccgacacatacgacgcaagccattgtccgcctccagcccgacataggtagcagcggcgatgacacctccttccatctgcaacaacccatggaggccgacggcggtgcatctaggcgctcgctgcgggtgcccgtggacaagcaatcgctcgggatggcggtggaggtggatgcgaggtgggagcccatgggggcgcaggagtactacgactactggcgggccatgtacaacgcccgcggaaacagtaagttatttttcaccatctacaattaccgtggagttgatattgaaggacgcccgattatggtgaatattcaaaaagataatggggtgcagatgaagattattggtactcatgtcgatgctacagaaattgtctacgatgaggactcctacaataaggggaaatacgacaacatcatcgcggcggtgaagagctactacatgtcgatgagcgg

SEQ ID NO: 35618 - DNA, 1521 bp, Zea mays
  Peptide Sequence Number=SeqID_77397
atggcggagtatatgctggtggtgcagagcaatcttaaccaatgtaataatgaagatatcccgctttctggaacaaaaattgagatggagtcttacgaacaagaatcatatgacagcagtaatgaagagtggtccacacttagcacaccacgaaaaacaaaattacaaggcaacgaaaaagtatcacttactgaatcagtacgttttgcaaagcggtgttctagaagagcgccagctagggagcagaataatgaacatactcagagtgagcagcttcatggttctgcaagtgagctagagagcaacttcatggttctcagtggcgatgcctcaaaatgtcattttggccctatagttactcagaagctgaaggaacattttgaaaaagatccatatccttgccatgcaacaaaagagggtctggcacaagagctaggactggcatttaatcagatcagtaagtggttctctgccacccgtcattattcaagagttattgttgccaagaaccaaaaatacccaggagaaaatactactgagaataacagtagcgcaatctttgatggtatacaagtaatagaacccaattttggtttgatagataaaccagatgcagatacaaatgacatgatttctgaaaagttgatggtacaaattaatcttaacgaaggcattgaagaggatatcccaccaagccaatatactaccaggtgtgaagagaaattaactatgactcaagctgccatctcaagggaagctggacctccaggttatgatcctggagaaaactgtcttcaggtcagttcaatgattactagctgtgagcagagtgtgataatggctcctagcgctatcgcaagaggagttggtccaccaggatatacgcctggagaacaccagggcaatggggctccatggaatacaagctatgagcgaagaccgtttacgagtcctgtgactagctcaagagaagtcagacctccaggatatgggcctgaagaaaaccaaggcagtggcatttcctgtaatacaagcagagagcaaatattgtttatgagccctacaaccatctcgagagaacttggtccaccaggatatttgcccagagaaaaccagcgcagtgacacttcatggaatacaagctgtgagtcgggactatttatgagtcttgcgaccacctcaatagaacatgaaatagcgcagtcattttcacaacaaaggaaaaaaagagagggcggtggtcctacatatcatgaaacttttgcttatgctcaagggccgtttgctcgtgtacctgaagcttacgttctaagcctgggcatttatctgcttcccaacagagagtgtacaaggactttgttcacgtgtggcatccccacaatcaaaatgtgggagcaacaggttctggtctgtctggtgttgctactgtctcgagtactcttggtgtacttcgagcttacagtccaaattcgacatcagcatcctccagtaatttgtcaactgtacatatgggtggactaa

SEQ ID NO: 35619 - DNA, 459 bp, Zea mays
  Peptide Sequence Number=SeqID_77398
atgatccggtgcttccgtaatcccaaaggggagttgacatttgcatcaaatcctttgggttttcaatgcaagggttccttcctggaactgggtggaccccctacaagaactgggacagggatacttgactgcaccttctcaacatatatgaactgttcgagttgtagtttgtttgacaagatgagttcgttgtcctccttggacaatgaaacatatgttgagtgtgaagaatctgaaactctgatgaagaaaccatggtctagccaaagttctgaaccagtgattgcagggactatgctaataacttggagaagtatggaccggtattctccacatactttcacatctgagttaatatttttaagaacctttaatagtattcctggagtaagagatgccattatctttgagccagcttattcttttcctctgaaagaaacagaaagtaatgggagttaa

SEQ ID NO: 35620 - DNA, 309 bp, Zea mays
  Peptide Sequence Number=SeqID_77399
atggatgctcaaaatgatgtgactcaagaatggcttgatagggtgaagatagcaaggaaagggcttcgaggaactaagcgaaggcaggttcaaccggggtccagggcaagttcaaccggggtccagagaggttcaaccggtgtccaggaaaagttcagccggggtattttccccagacctcactggtcaaaaccggttgaaccggtcctaggggaggttcaaccggtgtcagggtcacctgaccggtctgacctcctgactggcagactgactgccagtctgactcccaggcggttgaaccggccctag

SEQ ID NO: 35621 - DNA, 459 bp, Zea mays
  Peptide Sequence Number=SeqID_77400
atgaacaagaacacaagatacacaagatttatcccgaggttcgatcacaccaccaaggtgccctacttcctcgttgaggcacccacaaagagtcgggtctctttcaaccctaatcctccctttgacgaccacaaaggtcaagctcacacactaatatttgctcaaacgagcggagatttgaaaagggagaggcaagaattgtgtgagagagagtgggaggtgttcttcaagttagaaatggagtttgggtcgtgctcttctgtggggagagaggtagaagaccggttcaaccgcctggggcaggctgacagtcagtctaccaatcagattggcagactgcaggtcagactgcaaaaacaggtcctgacaccggttgaactgcccctagggccggttcaaccgcctgggggtcagactggcaatcagtctgccagtcaggaggtcagaccggtcaggtga

SEQ ID NO: 35622 - DNA, 255 bp, Zea mays
  Peptide Sequence Number=SeqID_77401
atgaacaagaacacaagagacacaagatttatcccgaggttcggtcacaccaccaaggtgccctacttcctcattgaggcgcccacaaagagccaggtctctttcaactctaatcgtcccttcaccgaccacaaagatttgaaatgggagaggcaagagatgtgtgagagagagtgggaggtgttcttcaagttagaaatggagtttgggtcgtgctattcttgtggggagagaggtaggagtgagtatatatag

SEQ ID NO: 35623 - DNA, 279 bp, Zea mays
  Peptide Sequence Number=SeqID_77402
atggacagcgcggtgcagctgctctggaccgcgtccaagtggtggcttcgcgggagcttgtcgtacacagcggcgcatgcgaccacaagtctgataagcgacgccaacctagacatgagccgtacggggaatgggaatgggaatgagctctgtggtgcgggaggagggaatgaaatgggaatgatagacatgggaatgggaacggttgcagaacgggaatggcagaacacgagaatggccgactactcttgcagccttaatagtagtagagatttttaa

SEQ ID NO: 35624 - DNA, 543 bp, Zea mays
  Peptide Sequence Number=SeqID_77403
atgtcgcgcgcgttcgacgactactatatcgaggattgtggcatcatcttagcgtcagaggtgacgcagaggaggatcgacaacagtgatcagttagtcatcctcgccaccgtcaggagagcaaggatcccgcaaaagttcctcggcctagtaaccgccttccactctcagaattcgtcggcgtggtcctcggcagctcacttcctcctgctggtggtgatggtgaggcgctcgaggctgcggaacgtcgtgttgtcccgcgaggcggagcctcccctcccggccgcgttccgggccacgggggagcgcggggacgacctgctgttctcggcgcctcccgagtggtggagcctctgcgcgggggacgggcgcccgctgccgccactgctgccggagacccaccggcggttctggtcactgcagtcccccgaagaggtcggccgggtggacggagctgcgggcattttcgacgagctccctccccgggacaagatgcgcgttttctctgatgagtcggcaacctggtgcgtgccagataagtaa

SEQ ID NO: 35625 - DNA, 1641 bp, Zea mays
  Peptide Sequence Number=SeqID_77404
atggagcatgtgatcggagggaagtataagcttgggaggaagattgggagcggatccttcggagagctatatctcggtgttaatatacagaatggagaggaagtgggaataaaattgggtggaaacggtatcccacacctcaagtggtatggtgttgagggggagtacaatgttatggtgatcgatcttcttggcccaagcttggaagatttgtttaattcctgcaacaggaaattttctatgaaaacggtgcttatgcttgctgatcaactgataaaccgagtggaatacatgcattccaagggatttattcatcgtgacatcaagccagacaacttccttataggcttaggtcggaaagctaatcaggtctatatcattgattatgggcttgctaagaaatacaaggaccttcagactcataaacacatcccatacagggagaacaaaaatctgactggaacagcacgttatgctagtgtgaatactcatcttggaatagaacaaagcaggagagatgatctggagtctgttggctatcttctgctatattttttaagaggaagcctcccatggcagggccttaaagctggcactaagaaacaaaagtatgataaaattagtgaaaagaaaatgcttacctcggcagagattctgtgcaaatcttacccgccggagttcgtctcatatttccactattgtcgctccctgcgatttgaagacaggccagattactcttcaatgaagaagctctttcgtgatgtatttatacgggaaggataccaatttgattacgtatttgactggactgcactcaagtaccctcaaatgggctccaacaacaagcttgttcaacaaccaagtgcaagaatggctggagttggaccatcagttgagagaacagacaaagcttccatgggacaagagatccgggataggttcactggtgctgttgaggcattcgccagaagaaatccaggctctgggcgccctgcagatcattccagtcattccaggcacaaaagctttgcagattcctttggaacgtccaacgaagcagttgccgactcatcagagaaaacgcgcatcttgtcccggggagggagctcgtcgaaaatgcccgcagctccgtccacccggccgacctcttcgggggactgcagtgaccagaaccgccggtgggtctccggcagcagtggcggcagcgggcgcccgtcccccgcgcagaggctccaccactcgggaggcgccgagaacagcaggtcgtccccgcgctcccccgtggcccggaacgcggccgggaggggaggctccgcctcgcgggacaacacgacgttccgcagcctcgagcgcctcaccatcaccaccagcaggaggaatgtccagaacaacccgagagtcgtcgatgttggcgacaaccatgaggcctccctgcttaacgatggacagtgcggtgcagctgctctggaccgcgtccaagtggtggcttcgcgggagcttgtcgtacacagcggcgcatgcgaccacgtaggactgcttttagaggtcgaactgacagtcgctaagcttcttctcgtcatcgatgagcgacgccaacgtgggtgcctcctgctcatagtgtttgttcggggtttcaagtaa

SEQ ID NO: 35626 - DNA, 993 bp, Zea mays
  Peptide Sequence Number=SeqID_77405
atgtgcgggcgtcgccgtcgtcggctttgtactcggctcatgtgctgccctcacgccactcgacgccactcaacttcgcaggcactccccgtgatccctttggaaccccgcaaaaaccaccgtgccgtctcgctgtctgtctgtcgagcactcgagctgcggacctgcggtggcctccagcctttctctccgtttccacccacggcatcatcctttcaagatttggttggtcgtcgaactattatatacttccgccaccaacctctggacggactgaattccgaagcaacagcctttttacaagaccgctccaggtgtatccgtgcgttgctacggagtcaacatgtaccggcgacaaacaaacatgttaagaaaacttggtccaaaacctctataaaagcccctccagccatcttcatcaagcaacagcctgaagaacaattaaatttacctgaagccgagtctttgatggtatctattggagtggtgataatcgaccagcaagcaccagcagttgttcttcctctcgccgctctcccacaagtcgttccccggcgccggcccacccctggtctggcagcatctgggcgcgcacggggctgcgcggggcgccggcgcgcagctccactgtgccacggggactgcggcgggctcggcggcgcggtgcccgcgacgctggcgtgggtgaacctccaccacgacaacgaccagaccacgtacggcgtgagcgtggtggacgacttcaacgtgggcctgtccgtgaccccgcacgagggccgcgacaactgccccgtcctcgcatgccacaagaacctcactgagacctgccccggcgagctgcagctgcgctcctcgaccggcagcatccttgcgtgcaagagcggctgcgaggccttccgcatcgacgagctatgctgccgcaacatgtacaacagcccgcgcacctgccgcgcctccaagtactcggagttcttcaagcacgagtgcccgtag

SEQ ID NO: 35627 - DNA, 450 bp, Zea mays
  Peptide Sequence Number=SeqID_77406
atgtgcgggcgtcgccgtcgtcggctttgtactcggctcatgtgctgccctcacgccactcgacgccactcaacttcgcaggcactccccgtgatccctttggaaccccgcaaaaaccaccgtgccgtctcgctgtctgtctgtcgagcactcgagctgcggacctgcggtggcctccagcctttctctccgtttccacccacggcatcatcctttcaagatttggttggtcgtcgaactattatatacttccgccaccaacctctggacggactgaattccgaagcaacagcctttttacaagaccgctccaggtgtatccgtgcgttgctacggagtcaacatgtaccggcgacaaacaaacatgttaagaaaacttggtccaaaacctctataaaagcccctccagccatcttcatcaagcaacagcctggtaattttcatgactga

SEQ ID NO: 35628 - DNA, 468 bp, Zea mays
  Peptide Sequence Number=SeqID_77407
atgtgcgggcgtcgccgtcgtcggctttgtactcggctcatgtgctgccctcacgccactcgacgccactcaacttcgcaggcactccccgtgatccctttggaaccccgcaaaaaccaccgtgccgtctcgctgtctgtctgtcgagcactcgagctgcggacctgcggtggcctccagcctttctctccgtttccacccacggcatcatcctttcaaggtgaaacgatttcgggtgcaatccgacacaaacgaacaaggcctaaaggatcctcatggacacggttgcaagtgccacttgtagaaatctcagtctgccggatgaactcgttccatacccatactgcgtggcgccaacgagatttggggctttgtcattggaaggacatgggagatgattacgggcctgatgcttggaagtttgtccacaagggggtttctgtaatgaccatgctcataaccgtatag

SEQ ID NO: 35629 - DNA, 543 bp, Zea mays
  Peptide Sequence Number=SeqID_77408
atgccccggcccccggttgcctccacactgccactcaccacctctcctcggacgtcgccacgccctggttgcctccgcgctaccaccttcgccgccccagctctagcccgtgcccctcgccgatccccatcgacaccggccagggtcaactctctatcacctccctacgtagaccagggaaaaggaggggcacttggcgatgaggttgtcgccggcgaggatgaacccggggatggagaggaagcccttctcgaggaagacagaaacggtgtacgggcccgtgacaggaagttcgtagggcgcgaaggcggcgcgggcatggtccggagcgggcgagggcgtggatggatcgctggttgtcggcggctgggcaagcccggagggggcaaggacgcggacgcatcaccggtgcccggcggctgggcgagttcagagggggcgaggacgcagacggatctgagcgaggatggaggtggtggccggcggctgggcaaggacgcagacgctagggttcggccgccgcgagagttacgggagagatga

SEQ ID NO: 35630 - DNA, 435 bp, Zea mays
  Peptide Sequence Number=SeqID_77409
atggacagcgcggtgcagctgctctggaccgcgtccaagcggcggcttcgcgggagcttgtcgtacacagcggcgcatgcgaccacccctgggctctctctaactaatggaagccccgaccagccgccgacaaccagcgatccatccacgccctcgcccgctccggaccatgcccgcgccgccttcgcgccctacgaacttcctgtcacgggcccgtacaccgtttctgtcttcctcgagaagggcttcctctccatccccgggttcatcctcgccggcgacaacctcatcgccaagtgcccctcctggttctggtgcattctttactcatatcgccctgctcttgtgatttttattcctaaatacgtcttttatgctaatttgaatgtgttattatgctcaattaccagatctcgtgtacgctccgcattataa

SEQ ID NO: 35631 - DNA, 624 bp, Zea mays
  Peptide Sequence Number=SeqID_77410
atggacttgaattttcaactgttcgagacagcgactctctttataactgtactagtggtggcattcatgctacaggaaggcacatcaaactattttaaaggtcttatgctcatcttatgctacctcatagttgctgcaagcttttttgtccatgtcgaccctgatgcaaatccgtctgcgtcctcgccccctctgaactcgcccagccgccgggcaccggtgatgcgtccgcgtccttgccccctccgggcttgcccagccgccgggcaccgacgacccgttcgcaccctcgccccctccggacttgcccagccgccgacaaccagcgatccatccacgccctcgcccgctccggaccacgcccgcgccgcctccgcgccctacgaacttcccgtcacgggcacgtacaccgtttctgtcttcctcgagaagggcttcctctccatccccgggttcatcctcgccggcgacaacctcatcgccaagtgcccctccttgttctggtgcattctttactcatatcgccctgctcttgtgttttttattcctaaatacgtcttttatgctaatttgaatgtgttattatgctcaattaccagatctcgtgtacgctccgcattataa

SEQ ID NO: 35632 - DNA, 648 bp, Zea mays
  Peptide Sequence Number=SeqID_77411
atggataatgcccgagacgcacgtgagacggggcactgccaggtgagcggcgtgccgcgtgccgccgcgtgcgaggtgccagctccggatctgaaacgccgagcaatctttcgtcgtttcgagtctcatccagagcttctcggtgagtgcgacaattgggccggagaactgggaaagcctcgaggagacatggatgggttgcccagagagctgtgcctcaagatcttccacctcctggatcaccagtccctcgcctcttctccccaagtttgcaggaaatggagggcgttgacctcggatgatgaactgtggcgcaagctgttcaacgacaggtggggagcggacgctgcagcgttctacgcgccggagggctccaagtcttggaaggacgtcttcgccgtgcaggaccggtgcgaccgatacggactgggtgtcaggatcatcagggaagggaaggactactacctgatctaccagggcgagatccagaggtacttgggctcccgccaggacacggatggcgactgcggcgaggacgcgccacggcgggacgctggagacgagcatcggcagatatccgaccggatcctgttcttcctcggggatctggagaaagcctgcgccgacgccaaacgtgttaaggcctga

SEQ ID NO: 35633 - DNA, 540 bp, Zea mays
  Peptide Sequence Number=SeqID_77412
atgaagataaatagtgaccagactgactcgaaggcgctcccacgggtgacatggcggttccctctcgacgacacctccaggttctggtccacggcggcggcgtctgcgcgggacggggcgaacgacaacaagcgtctcccgacggcgcctccacctatctgggaaagcctcgaggagacatggatgggttgcccagagagttgtgcctcaagatcttccacctcctggatcaccagtccctcgcctcttctccccaagctgttcaatgacaggtggggagcggacgccgcagcgttctacgcgccggagggatccaagtcttggaaggacgtcttcgccgtgcaggaccggtgcgaccgatacggactgggtgtcaggatcatcagggaagggaagaactactacctgatctaccagggcgagatccagaggtacttggacaaagaactgaagaatttgttgttagagcatataaaggcggcaaaaagaaggctgctcacaaatcaacttcccccatcttccagcgttatctttatgtga

SEQ ID NO: 35634 - DNA, 1056 bp, Zea mays
  Peptide Sequence Number=SeqID_77413
atggccgcgcgcgcaccgctcatcatgccgcgcgccgcctccagcaccggtccgctcccggctgcgtcgacgaccgtggccaggcaccagtccgcgcagtgtctccgcgcgaggggggctgtcggcggcctcttcttcgaccagaggccagagagcttgatacagaggagtagttggtacgacacgcagatagagtgcgtagcgatctctcgttttgggcagttacgcataccaattaactgcgacggtgctggtcctggctcatcagtttgcaggaaatggagggcgttgacctcagatgatgaactgtggcgcaagttgttcaacgacaggtggggagcggacgccgcagcgttctacgcgccggagggatccaagtcttggaaggacgtcttcgccgtgcaggaccggtgcgaccgatacagactgggtgtcaggatcatcagggaagggaagaactactacctgatctaccagggcgagatccagaggtacttggacaaccagaaatttgccatgacctcgttcctgaccaagaaaaactgtcaagcacaggtatcagaggctgatatgaatgcaatgtggaaacatcctgatgtgtataaggagtggataaaatctggtgagagacgtggaaatgtacgattctcccatgatgcaaagaacaggccttacctttctcgcgtcgaggtgaaggatatgattgccttatcatgtgtatatgatggtggtgatgaggagaaggaaatggatgcagccagagaaataggttggagaaggaaatttactaagagaggacgtgtaataagaccaggaattattagaatgaatggaaaatgtcctcttacacctttggaggttgggttaatgcttcgtggaatgggttccagcaataagactgcaatctttttggcatctggaaagatttacaaagcagagaagaacatggcttctcttcttgaaatgcttcctctcctacagacaaaagagacactggcatcagaagaggaacttgctccattcaaggtggacggcattgaagcggcacttgcttaa

SEQ ID NO: 35635 - DNA, 765 bp, Zea mays
  Peptide Sequence Number=SeqID_77414
atgacgacgcggagcaacgcgggccgcgcacgaaggcgaggtcacggcgactgtgacatcgctgctgttcatgacatagagcttcactcggacatttcatcgaacacccacgaagcgccaacattgcggggctgcgggggaaactcggttgcgaggagctgcgctgccgggagagggagccgagcagcgacgtcgtgccatgaggagggaatagcagagccgctgctgggggaaatgcctgtgtgctatggaggccggctggtttccaggggagatgtagggcgcagggaaacagggggcgtcggcatggagcttggggacgtgctggaggttggagggtgcgcacgtgagagaagcaacaagcggccaaggccatgggcgagctcctgccatgaagaagaaggggcgctgggcggcctggaagctcctgctccctgctgcagccgctcgccaggaggagcagggagggcgccgctgacctctgctggtcgtggagcaaggagcagggagccggcagccaccacggctgggatgtggagcagaggacgcgcgcgcgtgctggagccggcccaaggaagggggaggagacgccatggatggacagggagggagctccctgcgtgcttcgtggggaagaagaagtggctggcggctgtgggaagtgtaggggtgggaatgcaaaaatggctaagggcaagggagagggctcctatttataggcatatggtagggttagggtttttcttagtgggcctattgggctga

SEQ ID NO: 35636 - DNA, 348 bp, Zea mays
  Peptide Sequence Number=SeqID_77415
atgggagaaaggagctgtgggcgtcgagcagcggaggggaggacgccgttggaggagctcagtttggagccgctcgccaggaggagcagggagggcgccgctgaccactgctggtcgtggagcaaggagcagggagccggcggccaccacggctgggatgtggagcagaggacgcgcgcgctcaggaggaggacagggagcaccgacattgagggagctcggcgaccaagggaggctgctggcgaccctggagctcccgcgctggctgctgttgccgtgggaggactcctgcgcgaggtagaagaagacaggggaaatcggctggagaagagagaagatttcgactaa

SEQ ID NO: 35637 - DNA, 459 bp, Zea mays
  Peptide Sequence Number=SeqID_77416
atgggagaaaggagctgtgggcgtcgagcagcggaggggaggacgccgttggaggagctcggtttggagccgctcgccaggaggagcagggagggcgccgctgaccactgctggtcgtggagcaaggagcagggagccggcggccaccacgactgggatgtggagcagaggacgcgcgcgctcaggaggaggacagggagcaccggcgttgagggagctcggcgaccaagggaggctgctggcgaccctggagctcccgcgctggctgctgttgccgtgggaggactcctgcgcgaggtagaagaagacaggggaaatcggctggagaagagagaaggtgagtggcggctgaaaattttcaggggtgggagtgcaaaattgctaagggcaagggagagggctcctatttataggcatatggtagggttagggtttttcttagtgggcctattgggctga

SEQ ID NO: 35638 - DNA, 294 bp, Zea mays
  Peptide Sequence Number=SeqID_77417
atgctaggtactggttacaaaatagtactaaaacctgcacttctggctcatgctgaggagaacaaaaggatctgtctctcaaatcttgaaaacttaaatgatctacagaagcagctgcaaggaaatgcgaagctgtgttatgcagaagtaggaacttttttaggttctggaaggtcaaggatggacttccacgaactgatcgagatcccacacggcgaccgacggcggtaccacgacgacgtatctgtcattgtaatatccttggagggcaggatctggaggtcatgcgtgtaa

SEQ ID NO: 35639 - DNA, 369 bp, Zea mays
  Peptide Sequence Number=SeqID_77418
atggtgaatgtgaaggatgtggatagaatgcgtagagagatgcaggctattgaagatgacattgccaacgccgagaaggggaaagcagcactggaggataaggtctgggaagttgaagctaagctggttaccaagcttgaggagcttgagaggcatgctgatcagtgcaaccaggccctcaaaaagttgaaacctactgttgcttttcagtacatgatagattcaaaaggatcttctcctgctgagatgctagggatggacttccacgaactgatcgagatcccacacgacaaccgacggcggtaccacgacgacgtatctgtcattgtaatatcctttgagggcaggatctggaggtcatgcgtgtaa

SEQ ID NO: 35640 - DNA, 141 bp, Zea mays
  Peptide Sequence Number=SeqID_77419
atggtgaatgtgaaggatgtggatagaatgcgtagagagatgcaggctattgaagatgacattgccaacgccgagaaggggaaagcagcactggaggataagaaattgactataggtacacctaagaacaaccaatgctaa

SEQ ID NO: 35641 - DNA, 462 bp, Zea mays
  Peptide Sequence Number=SeqID_77420
atggacaatgaaagggaacaatcgttgggggatttggagaaagagttggaggcaaaagtgtcggacacccagtgcgctgctgctgaaattcaggatctattgaaacaagtggatgctcagccggtgaatgtgaaggatgtggatagaatgcgtagggagatgcaggctattgaagatgacattgccaacaccgagaaggggaaagcagcactggaggataagttctgggaagttgaagctaagctggttaccaagcttgaggagcttgagaggcatgctcatcagttcaaccaggccctcaaacagttgaaacctactgttgcttttcagtacatgatagattcaaaaggatcttctcctgctgagatgctagctatgttgtgcagtagtgggaacttttttaggttctggaaggtcagggtaaatgaatattcttgtggtgtagacacactcaacatttga

SEQ ID NO: 35642 - DNA, 105 bp, Zea mays
  Peptide Sequence Number=SeqID_77421
atgcaggactcaggtgggagacttcaaaagcatgtactgctgaagcgtgacaatggagatgtcgaagagatgctacaatatgcaaacatggttctgaaaaggaag

SEQ ID NO: 35643 - DNA, 1467 bp, Zea mays
  Peptide Sequence Number=SeqID_77422
atggtgcggcccattctacagcccatcctacggcgcctgccttctacaccccacgctacggcgcctgccgcctccactccagcgacggcgcgagcaggatgcccacgacctcgacctcctcctcacaaccacgaccacggcctcaaccgctccgccagctccgccatttacgcacacgacttcaacctcgtcaggctcaggctccgcgacggccgccacctcgcctactgcgagagcggcgtgccccgggaccaagccaggttcgccgtcgtcttctcccacggattcaccggctcccaagaggacagcgtcagcgcctcccaggtaccgaccgatccaagcaccaccaccgccttgtctacctccccttcccttcccatctgctgccggacccgtacgccggccttcgcttcactcgcccgccaggtggaggtgccaaacgctatcccatccgtgtgtcgtcatgtgctgggtgaaagcttcttctcgaaggaacagcagccgccaccacgcccggatgaggtcgcctcgtccctcgcgctgcgcgctagccgcaactcggaggacgagcggaggcggcgcaagatcagctcgctgcggcggaaggccatccacgccttcaagaagcgagggaggcgccacatcgacttcggcttcctgccggcggccatctccatcgaggacgtccgcgacgccgatgaggagcgcgccatcgcctcctttcgggaccgcctcgccgcgcacagcctcctacaagccgggaaacctaaacggtgctgcagatgccttgtccagaagggaggaacttgcttcgaggtagatggcttgctgttgtttaaagggaagattttcattcctgatgcttcggaattatgggctactcttttggcagacgctcatgacagtggccatgaggtgccttctgaggtttggagtgatatttctatggactttgttgagggatttccggaagtgggtgactggagataccacggagccgtcaccgccgtgaaggaccagtggcagtgcggcagctgctgggccttctcggcagtgggcgcggactcaggtgggagacttcaaaagcatgtactgctgaagcgtgacaatggagatgtcaaagagttggaggcaaaagtgtcggacacccagtgtgctgctgctgaaattcaggatctattgaaacaagtggatgctcagccggtgaatgtgaaggatgtggatagaatgcgtagggagatgcaggctattgaagatgacattgccaacaccgagaaggggaaagcagcactggaggataagttctgggaagttgaagctaagctggttaccaagcttgaggagcttgagaggcatgctcatcagttcaaccaggccctcaaacagtacgaacatgccgcagcatctcctatattttctaaattttatttctccaatttattagaaattgcctataggtacacctaa

SEQ ID NO: 35644 - DNA, 211 bp, Zea mays
  Peptide Sequence Number=SeqID_77423
ggttagtgaggcattgtacgccaaggcggtgagccctgatctgttgacggggaatcgatggggacggttgatgtgtgtggagacggagtgcctcgccacgtcacgttctctggaggacatggttgctggagtgacttggccatccatcttgccaccgggttggggagtcgagtgggaccctacctcggctgaggaggagggtgaggactga

SEQ ID NO: 35645 - DNA, 252 bp, Zea mays
  Peptide Sequence Number=SeqID_77424
atggggggtacaagtgcggtcactgcacgacggccagtcggggtcagtgaggcattgtacgccaaggcggtgagccctgatctgctgacggggaatcaatggggacggttgatgtgtgtggggacggagtgcccctacatgtcgtgttctctggaggaaatggttgctggagtgacttggccgtccatcttgccaccgggttggactgtcgagtgggaccctgcctcggctgaggaggagcatgaggagtga

SEQ ID NO: 35646 - DNA, 264 bp, Zea mays
  Peptide Sequence Number=SeqID_77425
atgtacgccaaggcggtgagccctgatctgttgccagggaatcgatggggacggttgatgtgtgtggagacggagtgcccctacatgtcgtctagtgcttttggcaaccgaaccccacagccaaacagctgcatgtctagaggtagaggagtagactcctcacaccgggacatggttgctggagtgacttggccgtccatcttgccaccgggttggacagtcgagtgggatcctgcctcggctgaggaggaacatgaggagtga

SEQ ID NO: 35647 - DNA, 327 bp, Zea mays
  Peptide Sequence Number=SeqID_77426
actgcaacctcgctgacgggagagtacgtcctcatgccggagcaaggtgttgctcaggaggtagccccagatccaacaccagagcctacaccagaggatctgcctgccactgctttggaaggcaagccccggaatcctgttgagatgaatactactagtgcttttggcaacccaaccccacagccaaacagctgcatgtctagaggtagaggagtagactcctcacaccgggacatggttgctggagtgacttggccgtccatcttgccaccgggttggactgtcgagtgggaccccgcctcggctgaggaggagcatgaggagtga

SEQ ID NO: 35648 - DNA, 294 bp, Zea mays
  Peptide Sequence Number=SeqID_77427
atgccggagcaaggtgttgctcaggaggtagccccagatccaacaccagagcctacaccagaggatctgcctgccactgctttggaaggcaagccccggaatcctgttgagatgaatactactagtgcttttggcaacccaaccccacagccaaacagctgcatgtctagaggtagaggagtagactcctcacaccgggacatggttgctggagtgacttggccgtccatcttgccaccgggttggactgtcgagtgggaccccgcctcggctgaggaggagcatgaggagtga

SEQ ID NO: 35649 - DNA, 306 bp, Zea mays
  Peptide Sequence Number=SeqID_77428
atgacggagagtacgttctcgtgccagagcaaggagctgctcaggagacatatccccttacgcgacctgagacgtggtctcccattccggttatggtgggtacaagtgcggtcactgcgcgacggcagtcgggctagtgcttttggcaaccaaaccccactgccaaacagctgcatgtctagaggtagaggagtagactcctcacatcgggacatggttgctggagtgacttggccgtccatcttgccaccgggttggactgtcgagtgggaccccgcctcggctgaggaggagcatgaggagtga

SEQ ID NO: 35650 - DNA, 1194 bp, Zea mays
  Peptide Sequence Number=SeqID_77429
atgtcattcgggcaaaggcaaagcgcaaggcaaataaacttagttgtttctcatccaaataccagtggagacaaagatgtgacttcagataacaaatctcagcatggatcttcagaattacctcctagagctgaattgattggaccaacttcttttgcacctcttatttatgcagcgatttatgttgttgaaaacagtaattggcagtaccatgtcctcgtgatcatagctgatgggcaggtgactgccgcgaatataattgatggaagattaagtccacaggaacaagcaactatacaagcaattgttgatgctagatcaacggttagatcaacggctatctgcctcggtgacaccacgcggacggtccgcccttggtcccggacggtccgcgccagctatataattccttttgctcaacttgtcaccttcgggctgaaccaggtcttcacctgcggactgtccgcaaattatagccggacggtgtttgtacaacacagtgaaaggtcattccatacctcagatgtaacaagcaagaataaccagtgggagatgtactcagaaacggtcccaaagtatcgtgatactaaagtcaggacaaaggaacccctggagcaatataaccaaaccaaggacgatactgactacttatggtacaccacaagctttcgcttggagtcggatgatttgccctttagaaatgacatccggcctgtgcttcaggtcaaaagtagtgcacacgcaatgatgggatttgctaatgatgctttcgtaggatgtgcacgcagaaacaagcaggtgaagggtttcatgtttgaaaaaccggttgatctgaaagtaggtgtgaaccatgtcgtattgctgtcatcaactatgggaatgaaggatagtggtggtgaacttgctgaagtaaagggcggcattcaggagtgcctaatccaaggtctcaacactgggacgttggatttacaagtcaatggctggggccataaagctgcactagaaggtgagtacaaggagatctactcagaaaaggtttgggcaaagttcagtggaaaccggccgagaacgaccgggcagccacttggtataagttttggttgcaaccctcaccctcggtgtcactatgttcactgccatgctagagttactttgatgagccagatggagatgatcccgttgtacttgacatga

SEQ ID NO: 35651 - DNA, 522 bp, Zea mays
  Peptide Sequence Number=SeqID_77430
atggaggtggcgcgcaccttccatccccgcggcgcgcaccgcttcctgtgggcttcctgtgggcagcagatccatagacctcaagcctgcaaattggtggtttcttggttcttatcagtggagctggctttggaatttgcatgcaccgttctgagctgcgttgctgctcctggaaaggtgctggtgccttcattcgggcaaaggcaaagcgcaaggcaaataaacttagttgtttctcatccaaataccagtggagacaaagatgtgacttcagataacaaatctcagcatggatcttcagaattacctcctagagctgaattgattggaccaacttcttttgcacctcttatttatgcagcgatttatgttgttgaaaacagtaattggcagtaccatgtcctcgtgatcatagctgatgggcaggtgactgccgcgaatataattgatggaagattaagtccacaggaacaagcaactatacaagcaattgttgatgctaggttcaagagacatttctag

SEQ ID NO: 35652 - DNA, 225 bp, Zea mays
  Peptide Sequence Number=SeqID_77431
atggcgtcgttcgctgtgtccggcgcgaggctcggggtcgtgcggcctggcggctcggcgcgatctggcggggagcggaggagtgcggtggacttgccgtcgttgctcttcaggaggaaggacgccttctctccctgcaaattggtggtttcttggatcttatcagtggagctggctttggaatttgcaggcaccgttctgagctgcgctggtgctcctggaaag

SEQ ID NO: 35653 - DNA, 261 bp, Zea mays
  Peptide Sequence Number=SeqID_77432
atggaaaggcggcagattgcgggggctgcgggtggagaaatcgcggcgggcgggcgtttttgggcgcagggttgtggcggcggatttggcgcggcggattgcgggggctgcgcgtggagaaatcacggcgtgctcgcggggggcacaacagggcctgtggacgcctacgctaagaacattttctatattacaaagtcgatacaaaacggcaaaggtcacggtatccacgtcggcaagaatttctggacggcacgattttga

SEQ ID NO: 35654 - DNA, 369 bp, Zea mays
  Peptide Sequence Number=SeqID_77433
atggcgctcccgctctcgcccccacagccaccacaggagcctccgccggctcctcccctcctcgatccggggcggcgatttggcgcagtggcgcggggttggcgcagtggcgcggccgatttggcgcagtgtcgcggacctaatcgagcgtccatccgcgcgtccaaggaggatttggcgcaggggcaggcgttgcgggcgcagggacgtggcggcggatttggatgggttcacgggatggcgaagagatggggtcgtgggattggggacggttgtgccgcgcatgaagatgagggttgggtgaaggcaggccacacggtgggctgcacgctgggacagtgggctacacgatgggacgatgggccttag

SEQ ID NO: 35655 - DNA, 1032 bp, Zea mays
  Peptide Sequence Number=SeqID_77434
atgatgatgattttgggattccgcctccgcctcctgtgcctccacgctcacatgatcatgagactgggagttccagtgctgttcctgctgcccctcctacggttgaccctgctctggctgcgatccttcaggctcttacacagcagcaggctcttttggcatccttgtaggctcgactggcatccgagcaggctcgacagctccgtcagcgctcagccaccagtgccaccagctcttgctgttaccactgctgctgtggcggtgtctgtgacctcttcagctccgatagctcctgcagcgcagcctcagtccgagtcagtaccagctccagcttctacgatagatcctggatctgagactgactctgaccctcagctagccccccgcaatccgccgcgccaaatccgccgccacaaccctgcgcccaaaaacgcccgcccgccgcgatttctccacccgcagcccccgcaatctgccgcctttccatccgcggccgcaatcatttccatccgcgaccgcaatccaccgcgccaaatccgccgccacacccctgcgcccgcaacgcccgcccctgcgccaaatcctccttggacgcgccccgacggctggcgcaacccctgctcgtgccacgacttgcgtagaatggaaggtccgtggagcaactcctccttgattgagcggagaatggaaggtcaccgtacgacattggtcgagaggaggaggttgaggatggatgcccgcaacgccacgcccgcccctgcgccaatggaaggtctgttgtcaaatcccgcagatggaaggtggcggatggaggtggcgcgcaccttccatccccgcggcgcgcaccgcttcctgtgggcttcctgtgggcagcagatccatagacctcaagtggagctggctttggaatttgcatgcaccgttctgagctgcgttgctgctcctggaaaggtgctggtgcctgtaggtggcagtgatgacttgctttcctccgcagagcctatcgtggacactcaacctgaagaactatag

SEQ ID NO: 35656 - DNA, 1149 bp, Zea mays
  Peptide Sequence Number=SeqID_77435
atggccccgtcgaacttaaccgtaagaacgtgggtgccgtcgaacttatgggaaaaaattcgacggcccccgtcgaacttaaaaacccacgttcttaaccttaagttcgacggtacccacgttcttaatgttaagttcgacggtacccacgttcttaaccttaagaacgtgggggccgtcgaacttacttctttaagttcgtccaaaaatcgccgtcggctatattcgtcggtaaacccacgttcttatgtttcttgtagtgaatggtcatccaggatggtgaccatcagcttcgtggtggggaaacgcaggccgggctgcggccctcctcctgccctcagcttcaaggatgttcatcatccgtgctggggaggagggtgggccgagctggggctctacctcccgtacgggccggcgagccgcttcttcctccagcattcgagggagaagggcatcctccagccctgcggaggtgacgtcctacagccatgcggggggaaggcgaactggtgctgcctagtcagggtgcagctgtccgtcctccacccgggcgacggtcgtgccatgcgcgggtggccgctatcaccggccctacggagggggcggacttcgacaacgtgggtccggtcggccgcaagcgtcggcgccacctacggccggacctctggctctttggcttgtcctcgcccctcgtgtgggggatgggggcgagggccctttcgcagcagcgtttgcactgaggtcgtcgctgctgctgtcttgccactcgagacggaggtcgctgtcgcgctgctggtgcagcggtcgccggccaaagaagtgcagcagcgacagctggagctcggccaggtcgtccgcgagcaggacgaaccccagagccgagctgccgaggccgtgagccgggccgaggtcctcgggggactgctggctgaggcttcggagtggctagccggggcgtctgcttgggccggaacccttgtggagaacttggccacgagggccccagtgcggagctggcgtcctcctttggggtggagacccttccgcccgtgccgccgtctggggcggagccggattccaccgaggatggaaacaacgccgagggagccgctcctccgatgtctgaacctgcaggaacagtttgtctga

SEQ ID NO: 35657 - DNA, 1131 bp, Zea mays
  Peptide Sequence Number=SeqID_77436
atggagcaagaaattttgaagttcattcatgaccctagtcgtacagagtatgaattcaatggccttccaacttcgtatctgcgtcttgctgcacatcgcctggcgcaacattacttcttgcagtccattgacataccagacaacagtttgcctgatggaactggttcacgtatcatccttcgtaagacaacattcgactgccgactgcctgctgtccgccttgcagatattccagttaatctaccacaagaagacatctctatggcaagagtagctattaagcagagacctcaaaagaatttccatggcatgaacagctcaaatcccaatgcaaccacatctgaaaacaaagaggagatggattctcggtcggtattcgttggaaattggccagtggttgactatgcatgcactccagaagaagtgcagcagcactttaattcttgtggaactgttaatagagtgacaatcctgactgacaagtttgggcaaccaaaaggttttgcttatgtggaatttgttgaagttgaagctgttcaggaagctattaagttgaatgaatcagaattgcatggtcgccagctcaaggtggcaccgaagaggactaacgttcctgggatgaagcaaccccgcggtcgagtcctcacagaccaacgcaggacacataagttcgacggctacgtggccccgtcgaacttaactgtaagaacgtgggtgccgtcgaacttatgggaaaaaattcgacggcccccgtcgaacttaaaaacccacgttcttaaccttaagttcaacggtacccacgttcttaatgttaagttcgacggtacccacgttcttaaccttaagaacgtgggggccgtcgaacttacttctttaagttcgtccaaaaatcgtcgtcggctatattcgtgggtaaacccacgttcttatgtggaggtgggcttcaacaagatggtccgctttgtccctcatgtggcttataatgagatggagaaggcgagccagttccatcagggtctgaagccttttatcaggcatgctctaggagcctttccgttggtgtacttccgtaccacagtggagcaggcactgggtgtggagatgcaacaccagtataccatggagtcgtag

SEQ ID NO: 35658 - DNA, 456 bp, Zea mays
  Peptide Sequence Number=SeqID_77437
atggcctacgattgctggtcctgcgacttgctatgtgctgcttcatcaccagatctgtacaggataaacctagagcagggacgattccttgcttctctttcctccgaatcaccagcaataaatgcggttacacgaagtaagatccatgggcttgttgcttgcggtggtgaggatggtgcagttgagtgttttgatatgaggaaaaaaacttctgttggcagaattaatattccagctgttagttctgaagattattctcaggaggtcacgtctttgcaatttgatgaagatcaaggatactttatggcagtggggaccagtacaggaaagacagtggggtcctggggtggaccttacatggtgtttggccaggccatcctatttgttttcaatacccaacatagaaatggggagtttggtcttaaagacagcttttttgggcagtcaaataactga

SEQ ID NO: 35659 - DNA, 552 bp, Zea mays
  Peptide Sequence Number=SeqID_77438
atggcctacgattgctggtcctgcgacttgctatgtgctgcttcatcaccagatctgtacaggataaacctagagcagggacgattccttgcttctctttcctccgaatcaccagcaataaatgcggttacacgaagtaagatccatgggcttgttgcttgcggtggtgaggatggtgcggttgagtgttttgatatgaggaaaaaaacttctgttggcagaattaatattccaactgttagttctgaagattattctcaggaggtcacgtctttgcaatttgatgaagatcaaggatactttatggcagtggggaccagtacaggaaagatatcaatatatgatttacgcatgtcttctcctctgagagataaggatcacatgtatggtagcccaatattaaatatcaaatggcaccagacacttaattctactgaacctaaactgatcactgctgataagcacatagtgagaatctgggatcctaatacattaccacacatgctgccatctgaaaatgcattttcagctgctgtatctgctctagagtga

SEQ ID NO: 35660 - DNA, 297 bp, Zea mays
  Peptide Sequence Number=SeqID_77439
atgaacgtatgtgagctcactcttgctgtctcacacaccccacagttaccacacatgctgccatctgaaaaggcattttcagctgctgtatctgctcttcgcatctacaacaaagacgtgatagtagtttatgatggaaaggggctgtttagtgctgctcgtgtttggtgggttaagaacgtgggtacccacgttcttaacgttaagttcgtgggtaccgtcgaacttaatgcgcagcccacgcagacccacggaggccaaataagttcgacagccacgtggccccgtcgaacttaa

SEQ ID NO: 35661 - DNA, 138 bp, Zea mays
  Peptide Sequence Number=SeqID_77440
atggaggaagacagcgggtccgccgccgtgattagcgccattgggagggttgaggaaggacctaggcgtaacactgatgataacctcgccatggtcccgctcttcattgaggacagcattgtagtcgccaccgtttga

SEQ ID NO: 35662 - DNA, 582 bp, Zea mays
  Peptide Sequence Number=SeqID_77441
atggcgcagtggtggcggcgcgcgaggtggaggagccgtggcggaggcgcggcgagcgcagtggctggcggcggcgcggtggaggagtgcgcgcggcacgtgcagtggacgagaaagaagagagtcgtgtgggcggtgattggtgagggaatgcagccgggctgcatgatgaaaatccttgaagccgagcgatggctgaagggcgccagcccccacgaggccgcgctcctccaacggcaacaagagcaaggcagcacaagtgcaccccatctgggggctcgcaaggaggaagggcgcgggttctcaccccacgacgcgaaggctgggtcccacgcgccatgcgcgctgatccggaacgcgctgatttctgttaagggggggatggagaaagacagcgggtccgccgccatgattagcgccattgggagggttgaggaaggacctaggcgtaacaccgatgatgtccgctgctcaatcgggggaaaatggatgatcgggtggtttgggaattgctcacccgcgcagaacctcgccatggtcccacacttcatcgaggacagcactgcagtcgccaccatttga

SEQ ID NO: 35663 - DNA, 744 bp, Zea mays
  Peptide Sequence Number=SeqID_77442
gaagcaaaggcgtacgctcaagagaatggtctcttcttcatggaaacttctgccaaaacagctaccaatgtgaacgacgtgttctatgagattgcgaagaaactgcttcaatggcagcaggttcagaacccacaaggcgggatggttctcaaccagagaccacctgagaggatgcattgtgaccccgactcggagggagaggccgtccgactcaccttcccctccgcacagcctcggtctggtcggcagtctcggaggccgcccgacccaccatgcccttgcctctccttcccctccacgcatccgcatagccacggtgtggccggccgtttcggaggccgtccgagccgccatgcacccgcatggtgtccccgcccgcgctccagcgacccagccgcggatggagaggggaaggcgactcaggttccacgtccctgccctcaatcacgcgatttccccactgtgaacatcgcccaatcgctcctcgttgtcggtatcgtgcacctccacaccctcatcgactctgcgattcccctccaacgtcactgccctccagtcgcagcgatgcgggcgggtgggcgtcggggactgtgtagacaagaggtgctcgctagccgagctgagctgagctgtgttgactgggaccagaagaaacgaagcgccctcgtcgctggggcgctcgctaacacgcccgcggccatgcggggcagaacagtgcagtgcagcgggcagggatatttatga

SEQ ID NO: 35664 - DNA, 1392 bp, Zea mays
  Peptide Sequence Number=SeqID_77443
atgaagaagattgaagataacaacactctggtcttcattgtcgacctcaaggcagacaagaagatcaaggctgctgtcaagaagatgtatgacattcaggccaagaaggtcaacaccctgatcaggcctgatggaaagaagaaggcttacgtgaagcttccatgtaagcacccttcggatttcccctccctcccttctatgtctctttcaccagctggatccaaccgtccattccacactcccctggcccctcaccctcgctggtgtctaggcatgggcgtcgcctatgagacgactaagagtggtgtcggcgtcgcctccatgggcgtcatgcgcctcaagcttgtcatgaagtccatcgtcctcatcgtcatggccagagtcctcggcatctatgacctcatcatcgccgccatcatctctgccgggatcaaccccaaggccaagcccaagccctacttcttagacggctacgcacacctctccttcgaactcgcatgcagccttgctggcctcgttgccggcatggccatcagcatcgtcagagacaccagagtcagcacggtgaagcatgtcgtcgatgcacaacagtctggcacgggcgagaaagacgctccgttcgttgtggatggcatcgagatggccaatattgaatggaatggaggctcggatactatggatgaaattcttgttaggatacaacaactggaagaagcagtagtaaagcgtgagcgagctatggcgtacacgttcaaccatcagtggagagcaaggtctgccacaagtctaggaaacttcagctatgaagtcggtaagggtggctggggctggagctggatggaccgctggatcgtagcacgcccatgggagtcgcgatccatggtccaccctgagaacccgaagaaagcacaggcgaagaaagagaacaccacaaacccattagctctcaagctacaaggctccattaccctaagcaacaatatcaatgaccggaaaaccctgaaaaagaagccattgccttcagcttctcttactgatcagaagaagccatcaccgtcgccttcttccgatcagaagaaaccagtaccgaaggagcagagagcaaaggcagctggcactcctccaaaaccaaaggccaaatatatgaaggggagtcaagagaaaaagccacaaccacaacagagagtgtctcctccgctgagccaagaagcaaaggcgtacgctcaagagaatggtctcttcttcatggaaacttctgccaaaatagctaccaatgtgaacgacgtgttctatgagattgcgaagaaactgcttcaagggcagcaggttcagaacccacaaggcgggatggttctcaaccagagaccacctgagaggatgtctgttaaatag

SEQ ID NO: 35665 - DNA, 891 bp, Zea mays
  Peptide Sequence Number=SeqID_77444
atgggcagggcggcaaaggccgcgaagaagcaggcgaagagggagagccagacaaggtggacgggtgggcatcacagcgaggcgggcggcgggcagtttgcggctgggtttggcgagatcctcggcggcgtttggttgccgggcggcggggaatcgcggctggcgcccgcgactcgcgggatagggcgggcgggcgggcgggtgacgggaaactcggcggcggttgtttgcagcggcgggatgctggcgtgcgcgacgtgcacgactcgtcatcgcttggcgtccgcctcagcccgccgccaggagagccggctcggtcggttcgtcgaagatcccggatctgctctgtcacgaggtctttcggcgggtgttgtctcgcgaggtgtagcgagccaaggtctggtcgcctgttcaggagagtttcgagaagctgaaatggctcctaaagctgctcctgccaagaagggtgatgccaagacccaggccttgaaggttgccaaggctgtgaagtctgggtcagtaaagaagaccaagaagatccgcacgtccgtgacatttcaccgccccaagaccctgaagaaggctagggaccccaagtacccaagaatcagcactaccggaaggaacaagcttgatcagtaccaaattctcaagtatcccctcaccacagaatcggcgatgaagaagattgaagataacaacactcttgtcttcattgtcgacctcaaggcagacaagaagaagatcaaggctgctgtcaagaagatgtatgacattcaggccaagaaggtcaacaccctgatcaggcctgatggaaagaagaaggcttacgtgaagcttatgcctgactatgatgctcttgatgtggccaacaaaatcggcatcatctaa

SEQ ID NO: 35666 - DNA, 246 bp, Zea mays
  Peptide Sequence Number=SeqID_77445
atggccgaaaacggagaagagagtgaagtgattgaagagaagacaccaccacctttggaatctcaggcagggacttggctctacttcgacaactgcgagtccaagcctgactcacctactaacaaaggcaagccccgctcaggggttatcctgaggaaggatggcttctacctgcaagaatattttcatttggagcaatggtgggatcttactgcaaagttccctgtgatgctcttttcatcctaa

SEQ ID NO: 35667 - DNA, 381 bp, Zea mays
  Peptide Sequence Number=SeqID_77446
atggtgggatcttactgcaaagttccctgtgatgctcttttcatcctaaggaacggaaacaatcctaaggatggaagtgtgctgaccgtggaccctttaactggtcacatgcctcgtcatggatctggtcttaagaaccccggtggcgggttgacatatgcaagggttaagtgctacatatgtcgtgtgattggagatcctcagctgagtataatcgattcggatcgccgtaccttcgcgcatacccttgagagtcttttccttagtcgggtgaggaagcgacaaatttttgttgcttttgctccaaggtggtaccaaatgaggaaaaacaagactgaagtgcgggaggacttggtcctccacataggatcttttgcttag

SEQ ID NO: 35668 - DNA, 609 bp, Zea mays
  Peptide Sequence Number=SeqID_77447
atggtgggatcttactgcaaagttccctgtgatgctcttttcatcctaaggaacagaaacaatcctaaggatggaagcgtgctgatcgaggaccctttaactggtcacatgcctcgtcatggtttatgtaatcgcttccgcatttctatatctccgatgttctgtaatgtctgcaagacgggtgaaacgttcctggaaaggaatgatctatgggtcgcggatgcaaccatccgctacttgcaagaccaactcgcgaaacgagatctagcgctcgattgggcggttaactctcgtccattcgcctgggctaaggaagccaaagctcgagcccgcgtggaggagcttagctcagccatgaataacttgcaggactgttataatacactacatgaagatgttcatgtattgtattcacaactgcacccgaacgtccctgcggatcttgtcgggacagaagccggaccttctagagtagcaggagaagcacttgatggtgcactggaccttttcaggccccctccctctatgaagttggttgacgaatggtcttctacgcccgacagtaaagctaccaaaagtgaaaagaagtggcttatcaggtgcccgtaa

SEQ ID NO: 35669 - DNA, 321 bp, Zea mays
  Peptide Sequence Number=SeqID_77448
atggcacagtggttatcccgtggttcggccaagaccaacgcttgcctactccacgttgtggcgtcccaacggacgagggttgcaatcaacccctctcaagcggtgctactggattgccctctcaggatatctattgtgaatagaggatgggttcctcgtggatggcatgataaaaaagttaaggatctccagatcctggatgaagcttcagagtccccagaagctgttaagccatacgaaaaaggttcgtggtggaagttttggtctaacaagcctaaatcgtctcctgaggtgatgtttgttccctatctttttgcatag

SEQ ID NO: 35670 - DNA, 429 bp, Zea mays
  Peptide Sequence Number=SeqID_77449
atggcgatggcgatagggtccatggcggcttggcggcttgaccatcgaatcattgcacagagatattatacagtgctgacgaaggatctgttatcaattgggttcgaccaaggatggccttcattcctgctgtcgatggattcgactagctcaatgagaaaaagtcttgtcctcgcgtgtgttcctactgaattagctgactacgtctttggtgaaaagtcaatttttagttggtcgctctcaacgataggatacactactgttcagttagccataggttgtttcactacaggtgagtgcccgtgcgttgcaacggaaacatataataccgttgaaggaagggagcagaggggagagtgtatcggctggacagggaagaagagcacggatctggggatgacgatagcggcagcgacgtgcaagggatag

SEQ ID NO: 35671 - DNA, 627 bp, Zea mays
  Peptide Sequence Number=SeqID_77450
atgcgggttccagcggcgcagaggggcggcgaggacagcgcctggtcggcgcggcacaggggtggcggagacggcgcctgggcggcgcggctccctggcggcgtagagggcggggtcgctaccagcggcggccgcgcgatattatacagtgctgacgaaggatctgttatcaattgggttcgaccaaggatggccttcattcctgctgtcgatcacaatgattgccaagtggctagaaaggagtctcaacaaaacacaataccacaagagatcaatcacagagatgacacaatggtttatcccgtggttcggccaagaccaacgcttgcctactccacgttgtggcgtcccaacggacgagggttgcaatcaacccctctcaagcggtccaaagacccacttgaataccacggtgttttgcttgctttttctcaatcccgtttgcgaggaatctccacaacttggagcctctcgcccttacaattgaagttcacaaagaagcacagagcaagggggaatgagcaacgcacacaagacttcaaaagatcagagcaacaacacgcacacaaggcgcaacaagagctcgcaacacaactcaaagagttcgcaactcaacaagagctctag

SEQ ID NO: 35672 - DNA, 183 bp, Zea mays
  Peptide Sequence Number=SeqID_77451
atgggtaaaaccctaagtacgcaagtactcagcaagacttacccgactaaagaaaagactctcaagggtatgctggtttcaaaaagggattcaagtctgcccgaggcaaagcttacccatgatgaggcatgtgaccagttaaaaggtcctcgatcagcaagcctacatcgacaaggtccttaa

SEQ ID NO: 35673 - DNA, 153 bp, Zea mays
  Peptide Sequence Number=SeqID_77452
atgggtaaaaccctaagtacgcaagtactcagtaagacttacccgactaaagaaaagaatctcaagggtatgctggtttcaaaaagggattcaaggatgcaaagagaattggaccaaggcaatgaggatgcaacacctcagaagaagacataa

SEQ ID NO: 35674 - DNA, 273 bp, Zea mays
  Peptide Sequence Number=SeqID_77453
atggacaagatttacaggttcaggccgcttagaagcccacgaaagaatgaccttacgaattattgggcccttgggcctttcgtgaggccttttacttctttagtggacccaggggatatctatcccccacaagcccccgatctttgggttgatttagagttttgtgcctgtgccttagaaatcggcattttgggttataagattctggacttccttgggtgcaccgaaggtgcacccaatgggtgtagcccccgacctttgagtagattttag

SEQ ID NO: 35675 - DNA, 279 bp, Zea mays
  Peptide Sequence Number=SeqID_77454
atgggcttctccgataccagctgtgacggaacctcccaaggcccacgaaagaatgaccttacgaattattgggcccttgggcctttcgtgaggccttttacttctttagtggacccaggggatatctatcccccacaagcccccgatctttgggttgatttagagttttgtgcctgtgccttagaaatcggcattttggattataagattctggacttccttgggtgcaccgaaggtgcacccaatgggtgtagcccccgacctttgagtagattttag

SEQ ID NO: 35676 - DNA, 2889 bp, Zea mays
  Peptide Sequence Number=SeqID_77455
atggaggacgaggatgttgaaaatctattagaataccatggttttgggttgaggcagtatgaagaactgtacttagtcaaagaaggaccttttcttaacagtgaaagtgatttcccatctggctgttcacagcttgtgcattctaaaaaatcgcagagggtcgttgatgatgtttcttctgggccagattgtgctccaactagcaaagaaaagactgtctttccatatactagtcaaccagttgctggcaaaagagatctatttctaccacagaatgctcctgcgattcctcctgatggcagaatggatttggatccttcatttcctgggcctatttcaatcactcctgacagacagattagcccattgttttcagatcctttctctccaagagctgccagcaaactattcagttcaacacatccaaagcctctctccccaactgatggtagaaaagacaggttttcatctgtccttactgctgtttctccacgtactggcaagagggacatactgtcaaaaacaccaaaagtagcttcaccaaaagctgaaggcaagaccaaattggttaatggccttatagctgaagaccaggatagtggtgttgctgagatccctcagaaggtagagatgcaaacagacatactgtggtcacaagctaacacgcaaaacgccaatgctctggcagaaccaattatttcacatcctcttgcagatagcatgtctttaaattactccagtatgtatggagcggaagatgacttcagggcacatgtttctggcatcggtgcagatatggatgagggaactccaccagatcatgaatgtctggttattggagctggattgcctattagctcccctttgtcctatcatgaggaatatgaggatcatagtattagtaacggcacaaatgatgattggttaccaattgttatgcccgcaaagaaactaatttctgatgaaaacctgaaagcaatactgaggaaatggaggcagcatgctgctgacaagcgattacttagggagcagaagaatgctcttgctgttgcagcattgtgttctctatcacttggcccaccagttcataaaagtacaacggtgtctaagctagcagttgaagaactagatattggccacgcctttaaagaaagacaagcaagaaagcaaaggtcttggtcacggctaaatgtttcggagttgtctggtcccattctaaatgaaaataaccctgatgctagatgcctctgctggaagttgcttgtacttgttccaaccggtatggaatcccagaccaacagttttgtctcaaaatggttacttagaaagctcatgggttatggaatcggagatattggattggttgtttcttcagcaggcctatcaatttggacagagtggatcagttttccaaatgcatgttgtttgtctgttgttagggccagcgatcaacaagttattgataatgatattgctaacagtacaagctgtatagtatttgtagtgtctgaaagcatttcatgggaaatgcagaaggaacggtttaacagtcttttagcctgcataccagatgaatccaatcttcctcttctgattttcagtggcgatacatataacgaaggatacgagtatgcgtcaaagtacatcatcaacaggcttggcctcaatggtcttaacagaggaaagatcggttcgtctttggttatttttcttgttgaaaactacacagaagaccatgccaatggtttctttgatgatgacaaactgcgtgagggcctgaagtggctggtaagtagtttgccagtgcagcctgatgtcactcttgtgaagacccatgaattgcttctggaatacttgaatccacaacttgagctgcttaacacccatgttgcacctggagctggtcctggcgattgcatttcagtattcaacaatgctgtcaatcaacttgcagaagagattttggctgcagcaaacgcaaaccgtagccaatggccagctcccgagattgatcttctggagagaacaagcaatgagaggatatatgcagaaatgttcttgcctagcattggatggtcttcgccatcaaggatccagccactgcttgcagccattaatagctgcaagattccagagttcagttacgatctatcttggctaaaccatggttctcacatgggcaagcagatccaggatcagaagaagttacttgaggagtgcttggcgagatacttgaccgaatcagcccggctgttagatgaaagccaggtggtcaccgaagtgaatgttatggtgcagaattgtgttggccttgaactccgggattcgtcttactatctcgctcccagatgggtggcgatcttccgtcgtatttacaactggaggctagcaaagctctctaccggaaagttctccgaagcttatgttctgactcagcacctgtatcaggctcctgcagcagctggctcaaatggtaccacacaagggcttactgctaacaccgccagcagcgatgctgtggatcacatcatgatgcctgctgtttcaaccggcatcacactagacgaaatcattgagatcagttgtgacctcgatgctgttgatgcgcagcccgtaactctggcaccacgactgcctgtgcatgttcatgaagaacctcaggcacttgctgacaacaacggcgtgcatggagttgatgaaatgtacataccaagaagagtagagttgggagaggtgatgcccatcgagacagacgacaagctttcccagctaagagtagagttgggcgaggtgatgcccatcgagacggacgacaagctttcccggctactggagcagtgcaccaagctgcaggacaggatcgatgagacactttccatatacttttga

SEQ ID NO: 35677 - DNA, 1788 bp, Zea mays
  Peptide Sequence Number=SeqID_77456
atggaggacgaggatgttgaaaatctattagaataccatggttttgggttgaggcagtatgaagaactgtacttagtcaaagaaggaccttttcttaacagtgaaagtgatttcccatctggctgttcacagcttgtgcattctaaaaaatcgcagagggtcgttgatgatgtttcttctgggccagattgtgctccaactagcaaagaaaagactgtctttccatatactagtcaaccagttgctggcaaaagagatctatttctaccacagaatgctcctgcgattcctcctgatggcagaatggatttggatccttcatttcctgggcctatttcaatcactcctgacagacagattagcccattgttttcagatcctttctctccaagagctgccagcaaactattcagttcaacacatccaaagcctctctccccaactgatggtagaaaagacaggttttcatctgtccttactgctgtttctccacgtactggcaagagggacatactgtcaaaaacaccaaaagtagcttcaccaaaagctgaaggcaagaccaaattggttaatggccttatagctgaagaccaggatagtggtgttgctgagatccctcagaaggtagagatgcaaacagacatactgtggtcacaagctaacacgcaaaacgccaatgctctggcagaaccaattatttcacatcctcttgcagatagcatgtctttaaattactccagtatgtatggagcggaagatgacttcagggcacatgtttctggcatcggtgcagatatggatgagggaactccaccagatcatgaatgtctggttattggagctggattgcctattagctcccctttgtcctatcatgaggaatatgaggatcatagtattagtaacggcacaaatgatgattggttaccaattgttatgcccgcaaagaaactaatttctgatgaaaacctgaaagcaatactgaggaaatggaggcagcatgctgctgacaagcgattacttagggagcagaagaatgctcttgctgttgcagcattgtgttctctatcacttggcccaccagttcataaaagtacaacggtgtctaagctagcagttgaagaactagatattggccacgcctttaaagaaagacaagcaagaaagcaaaggtcttggtcacggctaaatgtttcggagttgtctggtcccattctaaatgaaaataaccctgatgctagatgcctctgctggaagttgcttgtacttgttccaaccggtatggaatcccagaccaacagttttgtctcaaaatggttacttagaaagctcatgggttatggaatcggagatattggattggttgtttcttcagcaggcctatcaatttggacagagtggatcagttttccaaatgcatgttgtttgtctgttgttagggccagcgatcaacaagttattgataatgatattgctaacagtacaagctgtatagtatttgtagtgtctgaaagcatttcatgggaaatgcagaaggaacggtttaacagtcttttagcctgcataccagatgaatccaatcttcctcttctgattttcagtggcgatacatataacgaaggatacgagtatgcgtcaaagtacatcatcaacaggcttggcctcaatggtcttaacagaggaaagatcggttcgtctttggttatttttcttgttgaaaactacacagaagaccatgccaatggtttctttgatgatgacaaactgcgtgagggcctgaagtggctg

SEQ ID NO: 35678 - DNA, 1830 bp, Zea mays
  Peptide Sequence Number=SeqID_77457
atggtcaagtcaccaccatcggataccagaggcaatatcaggtcatcatctgtagattttggcagcaacaactcagtccagaatcttcatgcatatgctgatgtccagaagtctgatgcatccttttccaagttcagaaatcaaatacaatcacgcattggtggtgcatgttcaccatcacaacagatgtctcatctttcagactccaatgaactaaacacgttagctatttctccaccaaagccttctatccttagtgctaccagaagaacagggatctcttctttggatgctactgatgatgatcatttgaccccttcaactgaacttgagagggaggaacaagcaaaagccaagcggctggctcgtttccacgttgaattaagcaggccagtacaaaatactaatgattttgtgaaaacagttaaaagctctgcagataagtccaaacaagccacatcagtgggaagaactcctttgagaacaaatgatgacaccgatgacaatactttggttgacatggattccacagctttggctgcaatagttgggctttgccctgatatgtgcccagaacctgagagggcagagcgtgagagaaaaggagatcttgataggtatgaaagattggacggagacagaaacctaactactgagcttctcgctgttaaaaagaaactaattctgaactgggaacttgtgaaatccttatatgccttcattttctctttcaaggacgaggatgttgaaaatctattagaataccatggttttgggttgaggcagtatgaagaactgtacttagtcaaagaaggaccttttcttaacagtgaaagtgatttcccatctggctgttcacatcttgtgcattctaaaaaatcgcagagggtcgttgatgatgtttcttctgggccagattgtgctccaactagcaaagaaaagactgtctttccatatactggtcaaccagttgctggcaaaagagatctatttctaccacagaatgctcctgcgattcctcctgatggcagaatggatttggatccatcatttcctgggcctatttcaatcactcctgacagacagattagcccattgttttcagatcctttctctccaagagctgccagtaaactattcagttcaacacatccaaagcctctctccccaactgatggtagaaaagacaggttttcatctgtccttactgctgtttctccacgtactggcaagagggacatactgtcaaaaacaccaaaagtagcttcaccaaaagctgaaggcaagaccaaattggttaatgaccttatagctgaagaccaggatagtggtgttgctgagatccctcagaaggtagagatgcaaacagacatactgtggtcacaagctaacacgcaaaacgccaatgctctggcagaaccaattatttcacatcctcttgcagatagcatgtctttaaattactccagtatgtatggagcggaagatgacttcagggcacatgtttctggcatcggtgcagatatggatgagggaactccaccagatcatgaatgtctggttattggagctggattgcctattagctcccctttgtcctatcatgaggaatatgaggatcatagtattagtaacggcacaaatgatgattggttaccaattgttatgcccgcaaagaaactaatttctgatgaaaacctgaaagcaatactgaggaaatggaggcagcatgctgctgacaagcgattacttagggagcagaagaatgctcttgctgttgcagcattgtgttctctatcacttggcccaccagttcataaaagtacaacg

SEQ ID NO: 35679 - DNA, 348 bp, Zea mays
  Peptide Sequence Number=SeqID_77458
atgtggtggggtcgggagccactcacctcaggggaggatgcgagcctgcaggtgggaccagagtttgattggcggttggaccgctgctcctacgcgcctgttgctgcaattactgtcggcccgcctatggccatgccaacttctatgcctattcccacggctaactggcccgtgaccatcgtacttaatgtcactgttgggccatgcgcgggggtgcctcgagtcgctgcactggttctgaaaattttaccttttcagactcccgtgacggtcccgaaaagacgtggcattggcgcaagcggcggtgcggttttttcgcactcggtaaccggcgcgccggttgcatga

SEQ ID NO: 35680 - DNA, 327 bp, Zea mays
  Peptide Sequence Number=SeqID_77459
atggccataggcgggccggcagtaattgcagcaacagacgcgcggaagcagcggtccaaccgccaatcagactctggtcccacctgcaggctcgcatcctcccctgaggcgggaccgagggccattgtcggtatcctaaatcaggggtaccctctcctacagcataaaggcatcacacccatgcgacgactcctggccgcgcggaggaccgcgcctaactccaccggatgggcgagccaaagggcgccacgtggcgaggaaaggcaccatgcctcaaaaaagaaaaaaacgggtaccgacccgaatatccgggtatttaccgggtag

SEQ ID NO: 35681 - DNA, 1031 bp, Zea mays
  Peptide Sequence Number=SeqID_77460
atggcgacctccggcttgatggtgggggaaagcgagccgggctgcggcctctgcccctccctcagcctcaaggattttcatcaccaaggctggggaggggagagtgccgagttgggcgtgcccggtcttcagccgcgagtggcttcggggccgctcgcggcgccggcgtccgccacggcagctggaagaggttcttccgccggcgcggcggccgggaccggccacgggctgacctccaacttctcggccttctgcccgtccttgcctcacaagttttggcatgggcgggggcctcctagcagcggcatcgaccctgaggtcagtgctgccgctgttcggccccccggagcagaagtcgtcgttgtcgccgctgccggagcaggtgacggcgcgccgttcgtcggccttccgttgctccgcaggccttccccctcggagtggggtcgttcgtgcctgcggagggggaaccggagttccgttcgtaatggcacttcgaatgccagtgttttttgttcattgcggctgtcggggcctgaacatgaatccctcggcccgttcggccttgttgtctggggctcctctagcttagttaaagagacccctcggctgcccttcggtggaccgaggccagggccgacgccaaagtcgatcagtcgaggcctcgggtcgggctggcgcccttggaagccggttgaccgaggccccaggggtaaccggtcgagccgcctgctcgggccggattcccggaggagtccctggaccgcgtcaccgcccgaggctgggtcgggctttgctgaagacgtcgtcgacgccgagggtgctacggctcccttcagcgtgaagacccgagcctgcaggatcagatcatcttgtagcgtgtgctttctgcggccgccgaggccagaaaaacacacccttgccgcgcttgcgaagctgcgtcttttttcctcttgtttcgagcatctggactctgtcggtaacagggatgtttgtgtgagcgagagtagcttttcgtggaagggacgagtgag

SEQ ID NO: 35682 - DNA, 651 bp, Zea mays
  Peptide Sequence Number=SeqID_77461
atggcgacctccggcttgatggtgggggaaagcgagccgggctgcggcctccgcccctccctcagcctcaaggattttcatcaccaaggctggggaggggagagtgccgagttgggcgtgcccggtcttcagccgcgagtggcttcggggccgctcgcggcgccggcgtccgccacggcagctggaagaggttcttccgccggcgcggcggccgggaccggccacgggctgacctccaacttctcggccttctgcccgtccttgcctcacaagttttggcatgggcgggggcctcctggcagcggcatcgaccctgaggtcagtgctgccgctgttcggccccccggagcagaagtcgtcgttgtcgccgctgccggagcaggtgacggcgcgccgttcgtcggccttccgttgctccgcaggccttccccctcggagtggggtcgttcgtgcctgcggagggggaaccggagttccgttcgtaatggcactttgaatgccagtgttttttgttcattgcggctgtcggggcctgaacatgaatccctcggcccgttcggccttgttgtctggggctcctctagcttagttaaagagacccctcggccgcccttcggtggaccgaggccaggggtagcgatatcagtatga

SEQ ID NO: 35683 - DNA, 651 bp, Zea mays
  Peptide Sequence Number=SeqID_77462
atggcgacctccggcttgatggtgggggaaagcgagccgggctgcggcctctgcccctccctcagcctcaaggattttcatcaccaaggctggggaggggagagtgccgagttgggcgtgcccggtcttcagccgcgagtggcttcggggccgctcgcggcgccggcgtccgccacggcagctggaagaggttcttccgccggcgcggcggccgggaccggccacgggctgacctccaacttctcggccttctgcccgtccttgcctcacaagttttggcatgggcgggggcctcctagcagcggcatcgaccctgaggtcagtgctgccgctgttcggccccccggagcagaagtcgtcgttgtcgccgctgccggagcaggtgacggcgcgccgttcgtcggccttccgttgctccgcaggccttccccctcggagtggggtcgttcgtgcctgcggagggggaaccggagttccgttcgtaatggcacttcgaatgccagtgttttttgttcattgcggctgtcggggcctgaacatgaatccctcggcccgttcggccttgttgtctggggctcctctagcttagttaaagagacccctcggctgcccttcggtggaccgaggccaggggtagcgatatcagtatga

SEQ ID NO: 35684 - DNA, 261 bp, Zea mays
  Peptide Sequence Number=SeqID_77463
atgggaagtcttatgttgggtgctggtcgtggtcgacaggaacgggggcatctggcaagctcttatagttccggctcaatcagattggatacgggcatagttcccaaagctttaccctgtagtttggactataagttggttacgaagtcgcagatgaagattatgatgctgaactccatggatgctagtctagtgatacccccggtcatcttcctgtggatggatgtccatgttcgttgtactttgatgaataaaggttaa

SEQ ID NO: 35685 - DNA, 369 bp, Zea mays
  Peptide Sequence Number=SeqID_77464
atggagagtggaattaaagggaagaaaacagcttcattaaacttcattacgacgcgggaagaagaacggtcgcagcagggcgtcgaggcgctgggggcgaggaagccgggcgcaggctctcggcactgcctggtgcggttgctcggtgagcggggtagcacaggcagcgcgcgctcgggcgtcgatcaggtgcctagcggcgtagcggcgcttgcgggctggtgcggctacgcggagaagctgcaggggcgtgggtcgcgtcttggcgatgaagatatgatgctgaactccatggatgctagtctagtgatacccccggtcatcttcctgtggatggatgtccatgttcgtttgtactttgatgaataa

SEQ ID NO: 35686 - DNA, 588 bp, Zea mays
  Peptide Sequence Number=SeqID_77465
atgggaagtcttatgttgggtgctggtcgtggtcgacaggaacgggggcatctggcaagctcttatagttccggctcaatcagattggatacgggcatagttcccaaagctttaccctgtagtttggactataagttggttacgaagtcgcagatgaagattatgatgctgaactccatggatgctagtctagtgatacccccggtcatcttcctgtggatggatgtccatgttcgttgtactttgatgaataaagtgtggtggttgggggtatttatagccccaaccaccaaaagtggtcgttggggaaggctgctgtcgaagggcgcaccggacagtccgcgttgtcagtcgaccgttgaactcgaccgttgcgctggtgaccgttgctccacttggcacactggacagtccggtgctacaccggatagtccggtgaattatagcggagtggctccccagaaacccgaagctgagcagttcaaagtggatctccctggtgcaccagacactgtccggtggcacaccggacagtccggtgcgccagaccagggcaacgttcggctgtcttttgctcctttcttttaa

SEQ ID NO: 35687 - DNA, 1395 bp, Zea mays
  Peptide Sequence Number=SeqID_77466
atgggcgagaacgacggagctgacaggcgggcccgagctgccagggagagggagcggcgcgagagggagggcgtcgagtcgctgactggtggggccgagctgctatgtgaggtgctcctatcatttcaagtgtatgcacatgatgagaagcgccagaggacaactggcggggtcagggaggccggctccccggcccagggctcgcagaggcgcgtcagtcctccaccagcgccaccatcagtcccgccaccaccaccgccaccatcatctagcttgccaccgccacaggggcagcaacatcaacaacagcaacagcagcaggggcagcggacgtctcgcttccaaggtggttggaaggtccagggccctaaggcctcttctccctctatctccaaagtcgctcccattggtgagtccggctcccagcagcaggtgtctgctggccttgatgccggcgacctgcctctgccttccactgctgaggcggcaccatcgggcccccaggttccggctggcactgccgaggcagtgccgtcggccccccaggctccagctaggagtccagtagcggtagcaccgccaacggctactgcagacccaacggcggcgacgatgccgtcgaatataccttcgacaacgacggaagccgcggggggcgtgcccaattccatcccacagcccattctggaggagccggaggtcattcttgggcggtggctccagaccggcatcgggccagaaacgacgccgccgaccctccctcgggtgctgtcccgcgctcatcaggctctccggaagactgaggcggcgatccttcaggagtgggaggcacttgagattgagcaccagcgccttggcgattggcgcacccagccggaggagcgtacaaaggccgcgtcctgccaatttgcttcggagcggtccgagcttgagcaggggcgtgaggacctcaaggaggacctggagaaggtgctcgagcgggagcggaaggcgacccgggaggagaagaggctggtcaagaggaaagagcacttggaccagcgggatgcggtcatcacagaatttcatgagaagttgaaagcctataatgcgatgctggagaagcagcgggatgagcagaccgcgactgaggcggcactgcagaagctgcagcaggagcttgatgacatggctagcaacatctctctcgccaaggaaaacctcaaggagaaggatgcctccctggaggagcgtgcgatggatctcatccgacaggagaaggacctcacctggagggaggagatgtgggaaaggcgggacaagttgctggccgagcacgagctcgaggcggaggagaaggagaagaaactggaggagaaagagcggacactggaggagcgggtccgccagttctag

SEQ ID NO: 35688 - DNA, 333 bp, Zea mays
  Peptide Sequence Number=SeqID_77467
atggacactggctgcttcgacactgggatggggctcacccccagcggcaccagagccaagctcgcctcgtcggcccatgcggcgatacgctggaccccgatgcgatgctccgcccagagatcttctagcgtcttcttcattgtctctgccgcctgggaacctagagccgcctgcgccgtctgggctacctgcgctgcctacaccgcctggaaccggcggacccgctcctccagtgtccactcttcctcctccactttcttctccttctcctctgcctcgagctcgtgctcggccagcaacttgtcccgcctttcccacatctcctccctctag

SEQ ID NO: 35689 - DNA, 417 bp, Zea mays
  Peptide Sequence Number=SeqID_77468
atgaagaagacgctagaagatctccgggcggagcatcgcatcgaggtccagcatatcgccgcatgggccgacgaggcgagctcggctctggtgccgctgggggtgagccccatcccagtgtcgaagcagccggtgtccatctccaacgcgctcccagtgctggattctgctgctgaccgcctccgacgcctagatcagatccttggcgcccgtctgaaggctgagggcagcaggctctgccaggcggtaatagagtacatcctgacgtgcttccggagccacaacccgaccatctccttggggtcagtgatcgccggtccggtggccgataccgaagacgccgcctgggggagcgtacaagacgttgtagatgtggtggccaagcgcttccagcgggatcccgctgatgatgagtag

SEQ ID NO: 35690 - DNA, 751 bp, Zea mays
  Peptide Sequence Number=SeqID_77469
ctctggccacgatggccgtgagcagcgcggcaagaccgacgcgttcccggcgaccagaggctactccgagcaaattaagggtttggcaggcatcacaacgatcaacaaaaacaccccaacctggaagaaaagactccaggctctgtcaggaggagatcccatagaagatgatcccactatcgtctacatggccggatacctccacaccctcaacaaccactacgatgagctctcctcccgttgtacccacctcaactcccgagtggaaagcctagagcaacaagtcaaagagcttacgcaagagaaggcatctctccaggagagtctcagcatagtggaaggcgaggaggccaacacccgtgaggcctatcggaccttgaagacagactttgacaagaagctgaaggcactcgcccccaaaaagaagatccagaagaagaccactagccaaggatgccagacagagaagaagaataagaaggcccctctagccctacctccccgcagaatcgattactggtccgacgaagaagatgtatccctagccagcctcgatgatcttctcaaggcatttggggacaccttagacaaggaactcgctagcacctcgaagaacgccctcgtatggcttcggataaaaccacgcctaccgcctcagggattggagcaggtttcccccaaagagctgaaggggaagtcgttagagaggaaagtgaaacccacctccccgcacctccacctctacccttag

SEQ ID NO: 35691 - DNA, 345 bp, Zea mays
  Peptide Sequence Number=SeqID_77470
atggccgtgagcagcgcggtaagaccgacgcgttcccggcgaccagaggctactccgtgcaaattaagggtttggcaggcatcacaacgatgtgagagtgcgcaaacgagaaagcaggggacgggggctgaccggaatcgggctggcgacggtgagctcggtttcacggtggcggaagtcggatttggggcgaattcaaaattcgcgagttctaacgaaggactgccagcgattaacggtggctgggaggatgatgatgttatgcagttaggggagggctcaatttatagaaggcttcgacggcggcgctcaatttggatgaagttgtgcagcggccggagataa

SEQ ID NO: 35692 - DNA, 369 bp, Zea mays
  Peptide Sequence Number=SeqID_77471
atgcctcataatatctgcaaagaagggctacgctccgataccagctgcgacagaacctcccaaaagcagcaaaagtctgctacttcctcacctaaaaacaacgaagggataaaccctgagtatggaatactcagcaagtcttacccgactaaagaaaagactctcaagggtatgctggttatatgggagtcaagcaaagctaagcatcaaaaagcttttgtaaaacaggtgattaaggaaggtaatccaattcaaggaaggagctctggccacggtggccgtgagcagcgcggcaagaccgacgcgttcccggcgaccagaggctactccgtgcaaattaagggtttggcaggcatcacaacgatgtga

SEQ ID NO: 35693 - DNA, 471 bp, Zea mays
  Peptide Sequence Number=SeqID_77472
atgacaatcgtccccatcgattccccgttcgcgtccaggcctcaccgccttggcatacaatgctccactgaccccgactgccgtcgtgcagtggccgcacttgtacccaccatatctagaatgggagaccaagtctcaggtcgcatgagggataaagtccgcgcccggcttcactcagtgaacaaatactttttggaaatcttgggaaacagtctacaactttggtatcatcatctcaatatgattagactcttagcaaggtcgaattgtgctaacacagcagctctgtccagatttggacagattcagacttgcgacttcaaaaattcacaactacaggttcagacatccaaacaaattgatcctagactttctggaaagatcaccagaaagagtgatccaagactttttggaaagcttagcaaaagcactaaatacttttataatcaccaagaattgattctatgctga

SEQ ID NO: 35694 - DNA, 294 bp, Zea mays
  Peptide Sequence Number=SeqID_77473
atggaggccaagtcacaccatcaaccaaatcaaggaggtacctgcaaaaattatgccacaagcaaggctgagtatactaatactcagctagacttacccggtctgtccaggttggacagattcagacttgcgacttcaaaaattcactactacaggttaagacatccaaacaaattgatcctagactttctggaaagagattggacagattcagttaatgaatttgcgaaaaacacaacttctaaacgatcagacttatggctgtcaaattttaacacaagtaagaaaacataa

SEQ ID NO: 35695 - DNA, 345 bp, Zea mays
  Peptide Sequence Number=SeqID_77474
atgaaggccaagtcacaccatcaaccaatcatcctaaggagtgcctgcaaaaattgtgccacaagcaaggctgagtatactaatactcagctagacttacccgtgaccgcacttgtacccaccataaccggaatgggagaccacgtctcaggtcgcgtgaggggtaaagtcttcgggcaggttcactcagatctgtccagatttggacagattcagatttgcaacttcaaaaattcacaactaaagattcagacatccaaacaaattgatcctagactttctggaaagatcaccaaaaagagtgatccaagactttttggaaagctcagcaaaagcactacataa

SEQ ID NO: 35696 - DNA, 465 bp, Zea mays
  Peptide Sequence Number=SeqID_77475
atggccggccaagcgagcagaaaaccgcggcgccggaggagcaaggcgaacagggagatttgggctgggaaaaaatggaggctgggcgggctccgcaggggcaaacatgccgaacagagggccaagccgagctggggcagacagccatgggaggtcaggggcgagcgccaggcgagtgcagggagcttcgacgactgggcgcgcaggggaaagaaccagggacacagggaggatgctggagcgcgcgtgggaggagccgttcggctggacgcagtccgagcagccgaacgcctgggagggagaagatctaggcgcgcgcagggaagcttcgggctggccagcgcgcgtgagataggaagcaagggcgcgcggcacgcaggagaactgagtagggaggagcacacgcagatggcggggccgagcttgagggagatccggccaggcgcggccggcgctgggaactag

SEQ ID NO: 35697 - DNA, 381 bp, Zea mays
  Peptide Sequence Number=SeqID_77476
atggagactgggcgggctttgcaggggcaaacacgccgatcagaggaccaagccgagctggggcagacagccatgggaggtcaggggcgagtgccaggcgagtgcagggagcttcgacggctgggcgcgcagggaaaagaaccagagagcttggaccaggaagtggcgctggtcacaaatggaggggatccagtgagggggcgcttgcagggagcagtgaagcgctgtctgccatggaggccggcgttgagggagttcggccgatattttggatcgggatttttagcgatggttaaagtgtcaacgtataatacgtatagactgaagaacaaattggatcagaacctcacgcacgatttttctgaggcaatgcgcgattaa

SEQ ID NO: 35698 - DNA, 738 bp, Zea mays
  Peptide Sequence Number=SeqID_77477
atggaggctgggtgggttctacaggggcaaacacgccgaacagagggccaagccgagctggggcagacagccatgggaggtcaggggcgagcgccaggcgagtgcagggagcttcgacggctgggcgcgcaggggaaagaaccagggagcttggaccaggaagtggcgctggtcacaaatggaggggatccaaggaactggtgctgggcagcacgtggagggaacttcggcgcggagaaaactggacgccggagagagtaccgcgcagggagatggagctcaacttggagaaaggaggaacgtgcagtgaggccgctcggctgggcgttgggcatgggcgcggccgagcaggaagctccggcgagcagagcccaggggagggaaccacagcggctagcgcttgagagagatggagggaggagagagcgagctgtagggagaggcgaccacgcgcagaggcacacggccagggagatccggccaacggtgccatgggagcagctcgaactggggcagaggagcagggaggagatagaggaagggcaccgtgaggagtgggcggactggagccgggaggcacgcggccatggctggaaggacgaaatggagggaaggcgccggaggatacgagagaagctgagctcgcgtacaggaataagaagaagccagcaaagaaatatcaacagaggagcggcgcaacaagataagaacgacggctgtgatcttcaccggcggtga

SEQ ID NO: 35699 - DNA, 378 bp, Zea mays
  Peptide Sequence Number=SeqID_77478
atggattcgaagacaaagttcagtgatgtcaagggagttgacgaagctaaagctgaacttgaggaaattgttcactacctacgagatcctaagttctcttgcttgcgatcgttccgagttggctctcaaagtaacccacaattgattgagcaactcttagcaagaagaactctcttatgcactccgatttcatttattctcgttctaactctaacctcagaacatgccaagcaagaggtgcccaccgtggaaaggcccgagtctttgggaaagaagtttgaaggcaagacttcgtcaaaagaggtcaagatatccgatgacaagcacaaagaggacaagaaagaatccaccggctccatcaagtcacacaaaaagtag

SEQ ID NO: 35700 - DNA, 324 bp, Zea mays
  Peptide Sequence Number=SeqID_77479
atggattcgaagacaaagttcagtgatgtcaagggagttgacgaagctaaagctgaacttgaggaaattgttcactacctacgagatcctaaggatgcacttgaagaaatcttatatcagtttgaggaaaaactccaagttgaaagagaggaagctgctaggaagcaggaagagttgcaagcacaactacaagctcaacaggccgcagttcaagaaaaccaaagtttgttgcgccaggcccaagaggaagtgaaggggatgcataccaagtttgaagagaccaatgcactgctacgagctgtcctgaaacttcaggaagattaa

SEQ ID NO: 35701 - DNA, 321 bp, Zea mays
  Peptide Sequence Number=SeqID_77480
gcggcgctgtccttctgtcagactggccagtggagcagtggagtgacggcggtcacttcggctctgccgggggcgcgtgtcaggatagaggtgtcaggccacctttgcgttaaatgcccccgcaatttggtcagtcggtgcggcgatttagtcaaggttgcttctgagcgaagccaaggcctcgggcaagccggtgatgtgtccgccataaaaagggggcctcgggcgagacggaagtctctcgagctttatgctgatgggggttaccagctgagaattaggcgtcttgagggtacccctaattatggtccccgacagtag

SEQ ID NO: 35702 - DNA, 315 bp, Zea mays
  Peptide Sequence Number=SeqID_77481
atggtgtctccggtgagctgcaagcgggtaatccgagtggacgtccgtgccccgttcgttgggggtcggctaggggcccagaggcacgcccaaaagtacctgcggcaactggcgcgccggttgctcgacgcgtgggcctgggttcccaagctggcgtgtcagaagtcggagaagcgcgtccgtctggcgcggttgcatgccgcctgcatggctgcccgccccttctgcccgttggacccagcctccgagtcgcaggggagggccttggagcgtgttggagaagactcagcccgcggcgcctgggggcacacgtag

SEQ ID NO: 35703 - DNA, 1438 bp, Zea mays
  Peptide Sequence Number=SeqID_77482
cccgagtctgagccctggagttgggcggagcggagttcgccgtcttccgggtctagcccgaatccgagccctggggtcgggcggagcggagttcgccgtggcgcctttgtcaagacctgactaccggtcagactcacttctgtcgagtggcgctgcagtcgaaagtggccgcagggcggcgctgtccctctgtcagactgtcaaggttgcttctgagcgaagccaaggcctcgggcgagccggtgatgtgtccgccataaaaagggggcttcgggcgagacggaagtctctcgagctttatgctgatgggggttaccagctgagaattaggcgtcttgaggcccccgagcctccgcacagggcgagaggacgatcagggacagactcgactttttacatacgcccctacgtcgcctttccgcaaggaggagggggggagtgcgccatgttaccctcgatgggcaccgaacatggtgtctccggtgagctgcaagcgggatgggacgtgagcctggctgacgacgtgaccgctgcgcccgtccgcctgccaccgctattactgccggcccccgagtcgcaggggagggccttggagcgtgttggagaagactcagcctgtggcgcctggggcgtcgtgtcttcccatcttccaagcccccggatggggggtatccgccgcctttccacctcctcgttggaggaacgcaactccgtgggagttggtacctctcagccatcgttcggcttcaaggatttttcatcacgcagccccggccgcaccccttcaccggcggtcacccgagatggcgacctccggcttgatggtgggggaaagcgagccgggctacggtctccgcccctccctcagcctcaaggattttcatcaccaaggctggggaggggagagtgccgagttggggtcgacccctgcgtgggcggtggcccgctccttcactcagtgatggggggaggagcgggtattgcccgtggcgcccggcagctgcagcatgcctggtcttcagccgcgagtggcttcggggccgctcgcggcgccggcgtccgccacggcagctggaagagcggcgtcgacccagaggtcagtgctgtcgctgttcgcccccccccccccccggagcacaagtcgaagttgtcgctgctgccggagcaggtgacggcgcgccgttcgtcggccttccgttgctccgcaggcctacccccttggaggggggttgttcgtacctgcggaggtgggaaccggagttccgttggtagtggcatctcgaatgccggtgttcttcgttcattgtggctgtcggggcctgaacatgagtccctcggcccgttcggccttgttgtctggggctcctctagcttagttaaagagacccctcggccgcccttcggtggaccgaggccaggggtagcgatatcagtatga

SEQ ID NO: 35704 - DNA, 534 bp, Zea mays
  Peptide Sequence Number=SeqID_77483
atggcaaagaaaggccaatatgtgaaaagtcaaggtttggttgacatgaacaaacctcctgaaatgatatctagcaatatgaagtttaaggaaattcaatttcagaaacttcagagattgctagatgggtgccatcctgattttgataatgatcatctgtgttctgtaaataatcatgacctgcttcttgaaatgagtactccaagtgctgaccttcatctacttcctgagacaggagtggaaaacataaggacacctaaaagtcttcacgctgaacttaagcgtgaactgtcaaagctaaatacggtgttaaagctaccagataatgtactctttctggccaaccagttcattgaatatcttttacataatcatttagttgtgcgggagccacggagcatactgcatgcgttcaacatagccttgtgttggcgtgctgcttcttttctgaaatacactgagttggatcatcgagaatcagttgcccttgcttcagatggattgaattatgaatgcaatgaggctccatcatag

SEQ ID NO: 35705 - DNA, 657 bp, Zea mays
  Peptide Sequence Number=SeqID_77484
atggcaaagaaaggccaatatgtgaaaagtcaagaaactggcactactctagaccgagctagtgttgaacagctgaagatgtcatcccccatccttcctcttccaaaacttcatacacaggaaaagaaaaggaaaaaaaaatactatttaaagcaaggtttggttgacatgaacaaacctcctgaaatgatatctggcaatatgaagtttaaggaaattcaatttcagaaacttcagagattgctagatgggtgccatcctgattttgataatgatcatctatgttctgtaaataatcatgacctgcttcttgaaatgagtactccaagtgctgaccttcatctacttcctgagataggagtggaaaacataaggacacctaaaagtcttcacgctgaacttaagcgtgaactgtcaaagctaaatacggtgttaaagctaccagataatgtactctttctggccaaccagttcattgaatatcttttacataatcatttagttgtgcgggagccacggagcatactgcatgcgtttaacatagccttgtgttggcgtgctgcttcttttctgaaatacactgagttggatcatcgagaatcagttgcccttgcttcagatggattgaattatgaatgcaatgaggctccatcatag

SEQ ID NO: 35706 - DNA, 501 bp, Zea mays
  Peptide Sequence Number=SeqID_77485
atggcaaagaaaggccaatatgtgaaaagtcaaggtttggttgacatgaacaaacctcctgaaatgatatctggcaatatgaagtttaaggaaattcaatttcagaaacttcagagattgctagatgggtgccatcctgattttgataatgatcatctgtgttttgtaaataatcatgacctgcttcttgaaatgagtactccaagtgctgaccttcatctacttcctgagacaggagtggaaaacataaggacacctaaaagtcttcacgctgaacttaagcgtgaactgtcaaagctaaatacggtgttaaagctacaagataatgtactctttctggccaaccagttcattgaatatcttttacataatcatttagttgtgcgggagccacggagcatactgcatgcgttcaacatagccttgtgttggcgtgctgcttcttttctgaaatacactgagttggatcatcgagaatcagttgcccttgcttcagattga

SEQ ID NO: 35707 - DNA, 402 bp, Zea mays
  Peptide Sequence Number=SeqID_77486
gatgacccaaaatctagggtgctgctcgctttaagggctgtgataaagtgtatcgaagagtataagcttcagaaggagtattcacttggacctatccaaaagtgtgtttctgagctaaatcccaaggatgagaaaaggccatcaactgagagggaggagataagaaacatgattgagcacgatggttctgccaaagggattgtcttcagccagttcacgtcattcttggatttgattcagttttccttgggagggagcactaggtttgtgataaaggacacggttgaagagcgcatactgcaactgcaacagaagaagcagctggtgtttaaaggcaccatgggggactcgccggatgccatgtcgaagcttacagaggcggacctcaagtttatgttctag

SEQ ID NO: 35708 - DNA, 1188 bp, Zea mays
  Peptide Sequence Number=SeqID_77487
atggcgcgcctccgccccgaaccaatcgaccgcgagaagacctgtcctggctctgctgctcagggttttcacgaggtggcgccttgccagtcctcggccccgactacgatagtggcacaggaagctaacaaacctccggacagttggtttgatctcaaagtaaacacacatgtctatgtaactggtttgcctgatgatgtcacggtggaggagattgtggaggtattttccaagtgcgaaataataaaggaggacccagagactaaaaagccacgagtgaagatttatactgatagagaaaccggcaggaagaagggtgatgccttggtgacatatttcaaggagccttctgtagctttagcggttctattgttggatgggacaccattctgtcctggtggtaagactcatatgtctgtaagtccagccaaatttgagcagaaaggtgatgttttcgtttcaaagaaaactgacaagcaaaagaaaaggaagataaagaaggttgaggacaaaatgcttggatggggtgggcatgacgataagaagctgatgattcctgctacagtaattttaaggcacatgttcactcctgttgagctgagagctgatgaagagcttctttttgagcttgaggctgatgttagagaggaatgcatcaagtttggtctggtggataatgtcaaggtttgtgaaaatcatccacaaggtgtcatattggtaagattcaaagacaggaaagatggtgccaaatgcatagagaagatgagcggcagatggcgcttcgactgtacctcacaactgacttttgcattgtgggatgatgaccacaatgttatcaatgctgatgatgacccaaaatctagggtgctgctcgctttaagggctgtgataaagtgtatcgaagagtataagcttcagaaggagtattcacttggacctatccaaaagtgtgtttctgagctaaatcccaaggatgagaaaaggccatcaactgaggttcggcataattatgcaaagaagcctcgaggttatggcatttggatcaaatggcgagatggagatccacaaccacaagcacacagggaggagataagaaacatgattgagcacgatggttctgccaaagggattgtcttcagccagttcacgtcattcttggatttgattcagttttccttgggagggtaa

SEQ ID NO: 35709 - DNA, 495 bp, Zea mays
  Peptide Sequence Number=SeqID_77488
atggcgcgcctccgccccgaaccaatcgaccgcgagaagacctgtcctggctctgctgctcagggttttcacgaggtggcgccttgccagtcctcggccccgactacgatagtggcacaggaagctaacaaacctccggacagttggtttgatctcaaagtaaacacacatgtctatgtaactggtttgcctgatgatgtcacggtggaggagattgtggaggtattttccaagtgcgaaataataaaggaggacccagagactaaaaagccacgagtgaagatttatactgatagagaaaccggcaggaagaagggtgatgccttggtgacatatttcaaggagccttctgtagctttagcggttctattgttggatgggacaccattctgtcctggtggtaagactcatatgtctgtggggcatgacgataagaagctgatgattcctgctacagtaattttaaggcacatgttcactcctgttgagctgaga

SEQ ID NO: 35710 - DNA, 483 bp, Zea mays
  Peptide Sequence Number=SeqID_77489
atggagttttggggcaagaaagaatctggcaaattgctgggtggtcgggacatcgatcttttcagtcttgattcttcactgaaaaagtcatatgcagatcctgccgaggatgggcttctgcatactgcctgtggaacaccaaactatgtagcgcatgaggtgctcgctgataaaggctatgatggtatggctgcagatgtatggtcctatggcataatcttgtttgttcttatggctggatacttaccctttgatgatgccaatctgatgagactgtacaaactgatctgccatgcaactttttcttacccaccatggttttcttctggagcaaggaagtttattaagcgcattctcgatcctaaccctgataccggctggaaatctggtgctgtaactactttaggccaaggtggtagcgacttgattgctacaaccattggtaaagccttgggaccgagagaaatttatgtctatgtttag

SEQ ID NO: 35711 - DNA, 414 bp, Zea mays
  Peptide Sequence Number=SeqID_77490
atgggacaccggtcttgttctctgcggcccgagtcgactcggggtagggtgatgatggtgcttcctgtcgacgtggctggcctgtgccctaggttgggcgacgtggaggctcctccgaagccggggtcgagtctgtcttccatggccgaggccgagtccgagcccctgggtcgggcgaggcggaagtcgtcggcagaggccagggcggtgtccgagccctggggtcggatgaagcggggttcgtcgtcttctggggctgagctcgagtccgagccctgggtatggaaagatgttgatggtgtacttacttgtgatccaaatatctactcacatgcaaagactgttctatacttaacatttgaagaggccacggaacttgcttattttggtgctcaggacttgaaccgtgtatag

SEQ ID NO: 35712 - DNA, 894 bp, Zea mays
  Peptide Sequence Number=SeqID_77491
atgtcgactgcagagcaggaaatccccagtacatccatatacatcccccattcttctacattatgcaatgattatgacgcatttgatattggtttcattacaactgatgaatttggtaatgcggatatcttagaagcaacctatcctgctgttgcgaagagacttcatggggactggatacaggatccagcgatacctgttgttactgggttccttgggaagggctggaaatctggtgctgtaactactttaggccgaggtggtagtgacttgactgctacaaccattggtaaagccttgggactgagagaaattcaggtatggaaagatgttgatggtgtacttacttgtgatccaaatatctacccacatgcaaagactgttccatacttaacatttgaagaggccacagaacttgcttattttggtgctcaggttttgcatccacaatcgatgagacctgctagagaaggtgatattccagttagggttaagaattcatacaaccctaaagctccaggcacccttattaccagacaaagagacatggataaggttgtactaactagcatagtgctcaagtcaaatgtcactatgttggacattgtgagcactcggatgcttggtcagtatggttttctggcaagggaacttgaccatgtagttgaagagcttgagaaaatagcaattgttcgtctacttcagcagagggcgataatttcacttatcggaaatgtggagcaatcgtctctcatactagaaaagacgggacgtgtgctgaggaaaagtggggttaatgttcagatgatctcgcaaggagcgtcaaagaactgtttgcagacaccacagtctgagctgcgagcaccgattgtcaacaagatggcaagcctgtga

SEQ ID NO: 35713 - DNA, 1038 bp, Zea mays
  Peptide Sequence Number=SeqID_77492
atggcggcctactgcccctccactaggcacaagcccctagggaccctaatgcaaaaaagttcaaaaatatttataattagttatttgcagtggaaaacaaggataacaatagatggagtcgagaagttcctgcaaatgcagcaagtgctagttctgatgagatatgcatatacgaacatcattgctatcactgaccatttcagagacaagctcggacaaggtggctacggttctatatacaagggagtgctacagcgaggtgaagttcatgttgctgtcaagatgttgggctactcaaactgtaatggagaaacgttcattagtgaggtggccaccatttgcaagatccaccatgtcaatgttgtgcgcctcattgggttttgctccgagaacaatatcagggcacttatctatgagttcatgccccgtgggtctctcgataagtacatcttctcatcggagaagagtttctcatgggacaaactcaatgagatcgctctgggcattgctagaggtctcaactgcctgcatcaggggtgtgatatgcagattgttcactttgatatcaagccacacaacatccttcttaacagcaactttgttccaaaagttgctgattttgggtttgccaaactgttcccaagagacgatagtttcatgccactaagtgctacgccaggaacgagctttgtgatgctactattggagatgacgggcgagcaaaggaacacagatcctcatgcaggaagctccagtcaagcatactacccatccttggtgtatagccagctgagccaaggagatgcgaatgggatcagtgaaggagttgatatgcacaagttagagaacaagctatgtatcattgggctttggtgcatacagatgaagccacaagatcgaccgacgatgagagaggtcatagagatgcttgaagctagtgtcgatggcatccaaatgcctccaaggccattcttttgtgatgatgagggtgatagttcttactctgcaatctctaaacttgatataatagaagagtag

SEQ ID NO: 35714 - DNA, 330 bp, Zea mays
  Peptide Sequence Number=SeqID_77493
atgacgggcgagcaaaggaacgtagatcctcatgcaggaagctccagtcaagcatactacccatccttggtgtatagccagctgagccaaggagatgcgaatgggatcagtgaaggtgttgatatgcataagttagagaagaagctatgtatcattgggctttggtgcatacagatgaagccacaagatcgaccgacgatgagagaggtcatagagatgcttgaagctagtgtcgatggcatccaaatgcctccaaggccattcttttgtgatgatgagggtgatagttcttactctgcaatctctaaacttgatataatagaagagtag

SEQ ID NO: 35715 - DNA, 321 bp, Zea mays
  Peptide Sequence Number=SeqID_77494
atgacgggcgagcaaaggaacgtagatcctcatgcaggaagctccagtcaagcatactacccatccttggtgtatagccagctgagccaaggagatgcgaatgggatcagtgaaggtgttgatatgcataagttagagaagaagctatgtatcattgggctttggtgcatacagatgaagccacaagatcgaccgacgatgagagaggtcatagagatgcttgaagctagtgtcgatggcatccaaatgcctccaaggccattcttttgtgatgatgagggtgatagttcttactctgcaatctctaaacttgatatatag

SEQ ID NO: 35716 - DNA, 297 bp, Zea mays
  Peptide Sequence Number=SeqID_77495
atggcgctgttgctcacgcacgcgaaatccgcggaggggaaggacccgacagcgcggtcccgcgtgtcagcgatggagcgaaggaggcggccgcgcgagcaagtagcgggtgaggctgaccgatgggcccaacttgtcggtcacctgagctcgatgcacgcggaggcgcaagcgcggctgacgggaggggcccgtgtatatgcagatgcaattgtggacattactccaccaaccatcacactcaatcaaagatccaaatcagacaagtatcataagaacaagcactcaagcgtataa

SEQ ID NO: 35717 - DNA, 243 bp, Zea mays
  Peptide Sequence Number=SeqID_77496
atggctgttagccagttggggccggaagatccgaggagaagtggttgcggtcacagcggcgtcatcttcgcggttcggttgaaggagaagaagacccgccctgacctgcgggacccaccaggaagtgacaccgggtcaggtgtatatgcagatgcaattgtggacattactccacaaaccatcatactcaatcaaagatccaaatcagacaagtatcataagaacaagcactcaagcgtataa

SEQ ID NO: 35718 - DNA, 273 bp, Zea mays
  Peptide Sequence Number=SeqID_77497
atggtgccctccagctaccttagggttattcccctagaaatattcccattaaagcgggggttacaagactgtaattacaaggggtgccctttacagcggttatcagcgaagacttcgagcgaggggtggcgcctttgccttcgccccaacagtcaccatcaatatgctggtgtatatgcagatgcaattgtggacattactccacaaaccatcacactcaatcaaagatccaaatcagacaagtatcataagaacaagcactcaagcgtataa

SEQ ID NO: 35719 - DNA, 846 bp, Zea mays
  Peptide Sequence Number=SeqID_77498
atggacagagaaggcagtgcgcacccacggaacgagcagaggcgagcgtgtagcgtcagatgggtgagcgactggagcagggtgcgactgaggaatgggcagaggccaagctggggcaccgcagcgccggagaggacgcgcagaaagaatccacggcgagggagctcggggaaaccgcggcgcgtgcgcagggacgagcagggcatagagagcaggacgccgagcgctagtcaccggagcagggagctgggcgaactccatgggcgagcaggagtcgagctcgcaggggaagaggctaggggaagccgagcggtcgagctgagctacggcggccatggcgacaagcgaacagaggggaggggcgctggggaagagagcggcgttgggggccgggcggccgagctcggctgggagttggggctgggcgctggagaagtggaaaggctgggcgcgcaggaagctgaagcttgcagggaatccggcgctgggagcttcgagcagagaatccacatccgaccaggcgccggggagaagaggagcagaggctgggcgagtcaccagggagaggcgaccgcgccatgggggctcggtagggagcagggcaggggcactcgtctaagagcagaagatggacaccgcgatgggatttttatccagggtggccgagcggatgggaacgaggcaacgacggcagacaccaagccggaggaagacctcacaatacccactaacgaagctcaagccgtgacctctatacggccgattgaggagactaaaaggatcaacctaggattcaccgatgagcgcaagactgccatcatcagttccagccttgacgacaaatag

SEQ ID NO: 35720 - DNA, 546 bp, Zea mays
  Peptide Sequence Number=SeqID_77499
atggagttcgcccagctccctgctccggtgactagcgctcggcgtcctgctctctatgccctgctcgtccctgcgcacgcgccgcggtttcccccgagctccctcgccgtggattctttctgcgcgtcctctccggcgctgcggtgccccagcttggcctctgcccattcctcagccgcaccctgctccagtcgctcacccatcggacgctacacgctcgcctctgctcgttccgtgggtgcgcactgccttctatgtccatggtgcgccctcacctctacttctctgctggccggcgtttttccagccgtggatctccttgtgtgccgcgtccggctccctgacgtgccgcggtgcccgtcgccctgcgcgcgctctgtttcctcgcgcggcttcgtgctcgcttggccgttgtcttggatgtgcaggagtagtgtaggtgcttgcagtcggtggatcctcgatatcgagctgggattagagaagacagtactgttccgtgcgtcgcttatccgatgctcgacggaatgtccaactgggaggtga

SEQ ID NO: 35721 - DNA, 963 bp, Zea mays
  Peptide Sequence Number=SeqID_77500
atggcagcacggttcaggcaaggccgcgcaaacactgaacgaggaaaacgacggctcgccgacacacgaagctatcacctcccagttggacattccgtcgagcatcggataagcgacgcacggaacagtactgtcttctctaatcccagcccgatatcgaggatcccccaactgcaagcacctacactactcctgcgcatccaagacaacggccaggcgagcacgaagccgcgcgaggaaacagagcgcgcgcagggcgatgggcaccgcggcacgtcagggagccggacgcggcacacaaggagatccacggctggaaaaacgccggccagcagagaagtagagggtgcggctgaggaatgggcagaggccaagctggggcaccgcagcgccggagaggacgcgcagaaagaatccacggcgagggagctcgggggaaaccgcggcgcggagctgggcgaactccatgggcgagcaggagtcgagctcgcaggggaagaggctaggggaagccgagcggtcgagctgagctacggcggacatggcgacaagcgaacagaggggaggggcgctggggaagagagcggcgttgggggccgggcggccgagctcggctgggagttggggctgggcgctggagaagtggagaggctgggcgcgcaggaagctgaagcttgcagggaatccggcgctgggagcttcgagcagaggatccacatccgaccaggcgccggggagaagaggagcagaggcactcggctaagagcagaagatggacaccgcgatgggatttttattcagggtggccgagcggatgggaacgaggcaacggcgttctggtcgggctacgagtttggtactatggacttgtcggaggacacgaccgtcggtgctctggaggactttgaggatgacttcgacatagccaccgaaaccatggtcgacatctttccactggaggat

SEQ ID NO: 35722 - DNA, 921 bp, Zea mays
  Peptide Sequence Number=SeqID_77501
atggaaaagcttgaccataatgacatgacaattcgagccggcccagggaaggagctcaaaattacaaaggatacggtgcactttattttggggttaccaaatgctggtggagggacgacattgggcattgatgaagctgttgctgccaacaatttaagggctgaacttggtttattgaaagaagattttggggttgcagctcttcaagatcgtctgaggaaagggtctgacaatgatctaagcatcagatccttcttcctgatactgttcaataggttgttgttccctactgccagctggggaataaccaaccatgaggttcttttaactgaggagatggatcgtttccaccagatggactggtgccagcttattttcaatgatttatgccaagctgccaagaagtggcatactaggagcgttacaaacgtttctacaaccatttatggatgttccatcgtcattcttctgtattatttggatcatctgcatgactcagctgcacctcagaataaacgtggaacaccacacatcaagtattttgataggaatattattcaagcactgacaagagccaacaagggcaagatacgccaaggacaagaaccatttggacattgttcgcatacaattcacatcgaactcccgctcatcagagatttgatatcaagcaagctgaatcagcttccatcccgccaccgcctgggtttcatagagaagttgtcacattatgatacggaggttggtaaggcgtgttcagttattaaacagactcttcagcagattgttgagaaacaatacaatctatctaatgtttttggcgagttaattgatgaggtcctccgtgctgagtcgggggacaatgaagatggttatgatgtgcagaaaacaactacaaaatcagatgatattcttccctag

SEQ ID NO: 35723 - DNA, 342 bp, Zea mays
  Peptide Sequence Number=SeqID_77502
atgacaaacacttttgatgtaccgcgtcctgacccatctggacaacacaccatttacatcgaactcccgctcatcagggatttgatatcaagcaagctgaatcagcttccatcccgccaccgcctgggattcatagagaagttgtcacattatgatacggaggttggcaaggcttgttcagttattaaacagactcttcagcagattgttgagaaacaatacaatctatctaatgtttttggtgagttaattgatgaggtcctccgtgctgagtcgggggacaatgaagatggttatgatgtgcagaaaacaactaaaaaatcagatgatattcttccctag

SEQ ID NO: 35724 - DNA, 693 bp, Zea mays
  Peptide Sequence Number=SeqID_77503
atgtacctcgtcctgacccatctggacagcacacaattcacattgaactcccgccaccgcctgggtttcatagagaagttgtcacattatgatacggaggttggtaaggcgtgttcagttattaaacagactcttcagcagattgttgagaaacaatacaatatatctgatatttttggtgagttaattgatgaggtcctccgtgctgagtcgggggacaatgaagatggttatgatgtgcagaaaacaactacaaaatcagatgatattcttccccaggcggcagaaggatgtacctgtccggccccccaaactatacccgatatgtctactctagcatcccagcaggatacgcagttgacagacactcagggtaaaaatggtgacggtggcaagaacatgccgaccaacacaaacgtcactcctaaagcaacaccacatacggaatcttccgcgtcgatatttgatgcgacgccgcaaataaaggttcctgtcgaaaccgatccagctacaaacactcctcaggttgaacgggtttcacttgattcggagatgcaaactgtgttagctctacgcgaatatttgtgtggtacacaatctgacaccagcagtcactactcaactttgaggaacaggaacgacacagtcggaaccctcaaccttttgatgaatctgtactgcacacacttttag

SEQ ID NO: 35725 - DNA, 393 bp, Zea mays
  Peptide Sequence Number=SeqID_77504
atgtcagcagtgtcttcatcccaacgaacgcgcgagctctgcggcgccaaatcaggccgggctgaattcggcgccgggtttgttgctcaaccggtattcctcgtgcctgggtataaagatcaggatgtctcccctggccattgctatctaaactcgaccaccgccgtgaggaaccgggcttgcaggaaggtgcgggcggatccatcactgggatgtcgtctgcgttcggattcgggagggctcagtgggatctggggcttcacgagttcgccgtggattcgtccaggaccgcgacgggaggatccggagccgagggtcaccgcgtccttgcctcccgttgccaaatcaatggccagtgttccaatcagggtgcacacggtcatcggggcatga

SEQ ID NO: 35726 - DNA, 543 bp, Zea mays
  Peptide Sequence Number=SeqID_77505
atgtcagcagtgtcttcatcccaacgaacgcgcgagctctgcggcgccaaatcaggccgggctgaattcggcgccgggtttgttgctcaaccggaaggtgcgggcggatccatcactgggatgtcgtctgcgttcggattcgggagggctcagtgggatctggggcttcacgagttcgccgtggattcgtccaggaccgcgacgggaggatccggagccgagggtcaccgcgtccttgcctcccgttgccaaatcaatggccagtgttccaatcagggtgcacacggtcatcggggcatgacgactatgcgctgggtgaagccgccaccggagtacctggagccgcaaacgccgtgcgccctcgtcaccaacctgggacgcttgcggagccttggggaaatcgttgggactctacaatcgaacaccaggggtctggagcacctggctccggtgggtgcgctgctgggctggaaacgcgccgccgcctggctacggcatgaggaagaaagcgcctgggacgttagatcctatatggacggctga

SEQ ID NO: 35727 - DNA, 528 bp, Zea mays
  Peptide Sequence Number=SeqID_77506
atgtcagcagtgtcttcatcccaacgaacgcgcgagctctgcggcgccaaatcaggctgggctgaattcggcgccgggtttgttgctcaaccggaaggtgcgggcggatccatcactgggatgtcgtctgcgttcggattcgggagggctcagtgggatctggggcttcacgagttcgccgtggattcgtccaggaccgcgacgggaggatccggagccgagggtcaccgcgtccttgcctcccgttgccaaatcaatggccagtgttccaatcagggtgcacacggtcatcggggcatgacgactatgcgctgggtgaagccgccaccggagtacctggagccgcaaacgccgtgcgccctcgtcaccaacctgggacgcttgcggagccttggggaaatcgttggggagtgccaaccaaaaggggagccgtacgccggtggtgctccgtcgtttcaaagccgccaccaccgattggagatttcgccgttgattctacctctgctcgggggaataaaaggccactaa

SEQ ID NO: 35728 - DNA, 600 bp, Zea mays
  Peptide Sequence Number=SeqID_77507
atggcattgctacgtaccgtcggcggcggcgggcggtctgcttcacacgagccagaacgacggcgagcaaaaggagcagcggaggaagaggagcagcaagacggcgggcggctagggttttacggagcgcggaaggcaaagttcaaacagcgccgacccccgcccccttttataggcagggcgcggctcttcgggaaatccgcaatccgacaggccgcgacgcttcgggaaacccgcaatccaacagtacgccgtccatcaacggtcacatcaaaacccccgcggaaccacttcgagcgagggcagcgtctccgccatctagcgacgtcttcggcaccaggtgactttgtcgaactggtccctcggagggcaaatgttggggcgaaggcaaagacgccacccttcgctcgaggccttcgtcgtagccactggtctgacagagacaaaacgggcagggacacccttcgcaggactcggcactttgacaaaggcctgcggcgacgtcttcccgcggcgcggcctcattcagtcccaaggcccacgtgtgatctggcccattgtaacgggccccgcgtggccgcctctgtattacgggcctaa

SEQ ID NO: 35729 - DNA, 519 bp, Zea mays
  Peptide Sequence Number=SeqID_77508
atggcattgctacgtaccgtcggcggcggcgggcggtctgcttcactcgagccagaacgccggcgagcaaaaggagcagcggaggaagaggagcagcaagacggcgggcggctagggttttacggagcgcggaaggcaaagttcaaacagcgccgacccccgcccccttttataggcagggcgcggctcttcgggaaacccgcaatccgacaggccgcgacgcttcgggaaacccgcaatccaacagtacgccgtccatcaacggtcacatcaaaaacccccgcggaaccacttcgagcgagggcagcgtctccgccatctagcgacgtcttcggcaccagactatccgtgcaaaagtcgcctaagggtgcagctggactagcacaacaagtgcgaaaaatcgaagtcttccgcgaagactatccgtgcaaaagtcgcctaagggtgcagccggactcgcacaacaactgcgaaaaatcgaagtcttccgcgaagactatccgtgcaaaagtcgcctaa

SEQ ID NO: 35730 - DNA, 252 bp, Zea mays
  Peptide Sequence Number=SeqID_77509
atgaggttgtcccgaccccatggacagggagtggcacaacaacgagtgcatgggggaagttggcggagatcgacgcaaggagcacggggcaagcttggcgtcgacgcagtggaatttgagggcggaatcgcggagaagacgacgaacttctccctctacggcggagctcccctgggcggtactctccttgccggcggcaaactggatggcggccagggagcccaccgcggcggacgctatgccagagcataa

SEQ ID NO: 35731 - DNA, 543 bp, Zea mays
  Peptide Sequence Number=SeqID_77510
atgttcatcttcctcacacccctgcctaatcccacgccggtggctgggtgcggaccgaggaagagagggagcagcgtcgaggctcattctcttagcgcggcaaggggcccacggcggccagggagcccaccgcggcggacgctatgccagagcataagccggactagcctcgcgcaggagcagaggggtacggtggagcaggagcttgggaacgagggtgtggatttgctaccatggatgagcacgacgtccaagagccaaggcgcagggcaaggatggttaggaatcattcggcttcgaggattgagggagcaggggagaacatgtgggtatttattttccccgagtccgagcgaggaggaggcggtgaccggtaggtcggcccgagatctgcgcggcgggttgttgcggggcgcggacatcggcatcaggcgcaacgatacgaggaggaagatggtctgtcattcgggcccgcagtcagcgagagggaggtggatccaggataacgtgctgagctcgccaacgggacccgggcttcagtga

SEQ ID NO: 35732 - DNA, 687 bp, Zea mays
  Peptide Sequence Number=SeqID_77511
atgttcatcttcctcacacccctgcctaatcccacgccggtggctgggtgcggaccgaggaagagagggagcagcgtcgaggctcattctcttagcgcggcaaggggcccacggcggccagggagcccaccgcggcggacgctatgccagagcataagccggactagcctcgcgcaggagcagaggggtacggtggagcaggagcttgggaacgagggtgtggatttgctaccatggatgagcacgacgtccaagagccaaggcgcagggcaaggatggttaggaatcattcggcttcgaggattgagggagcaggggagaacatgtgggtatttattttccccgagtccgagcgaggaggaggcggtgaccggtaggtcggcccgagatctgcgcggcgggttgttgcggtgcgcggacatcggcatcaggcgcaacaatacgaggaggaagatggagaggacacaaaccattgagattatctatatcctctttattacatttttgagtattacaaatcctaccccccttaaaaataatctcgtcctcgagattagtaagccgaagggttataccgaggtaagaagagagatggtcagagtgaggttagctgatggtaagaaaaacttggtaagggaagactccgtccaaggtggtaaatttgaatcatctcgagatctgatttga

SEQ ID NO: 35733 - DNA, 258 bp, Zea mays
  Peptide Sequence Number=SeqID_77512
atggtcagagtgaggttagctgatggtaagaagaacttggtaagggaagactccatccaaggtgatggaattgtggtcattactccacaactcatcacactcaatcaaagatccaaatcatatatgtatcacaagaacaaacattcaggcatgcaggtccctttaggtacgagatttcaaagtgtgaaatccacttttgtctttagaaggaacaggtttcgtcctacagtcaacattcctctgataccacttctgtaa

SEQ ID NO: 35734 - DNA, 234 bp, Zea mays
  Peptide Sequence Number=SeqID_77513
atgaacgtatgtgagctcactcttgctgtctcacacacaccacaggtcaagagcagaactcctgttatatgtaaagatgtgacattcgattctgtgccactatacatcatatgtatgagacttggtcccagcatacctggtgtttatgttaaccccgggttttggatccctaaaatccgggtgttacagaagtggtatcagaggaatgttgactgtaggacgaaacctagatag

SEQ ID NO: 35735 - DNA, 174 bp, Zea mays
  Peptide Sequence Number=SeqID_77514
atgaacgtatgtgagctcactcttgctgtctcacacacaccacaggtcaagagcagaactcctgttatatgtaaagatgtgacattcgattctgtgccactatacatcatatgtatgagacttggtcccagcatacctggtgtttatgttaaccccggggttttggatccctaa

SEQ ID NO: 35736 - DNA, 919 bp, Zea mays
  Peptide Sequence Number=SeqID_77515
atggagctcggccatggggagcgggcagagctcggcgagctggagacgaccagggcgagctggggaaacaccgagctagagctccgcggcgcgcagggagacccggcgaagcaggcgatgcttcacctccgccataatgaccgcgtcaaaaaagggaccaggaaaggggatactccgaaagggatccttctccacgaaggaagcgggccccgagcccccctactgataagaggttcgaaggctggcccctcgaaaggattcaacagccgcctcagagcactagggctccgcgcccactataggtcagaggttcgaaggctggcccctcggaagggttcaacggccgcctcaggccacccgggctccgtgcccactactgatcaggggttcgtaggctggcccccgaagggttctgacagccgcctcagagcacgcagagcgagggatgaccctgggtacgttcgatacataaccaaggctcgggctacgctcccgagttgccgcggcgaagaaaagggcggaggggcttaccggcggcgagactgttccggtgaagtggccgagggtgaaggggaggtcgcggggatcacaacgggaggtccacggaataccagagaagctatgagcgaaaggaatcgggcggagactcactggatagctcggtccacgcgcggcggcggaagaccgaagtccggtgaggtcgatctcgggcctccggtgaagtccggtcgggtccgagggcttggcgagcttcacaggctactggcggagctagccgaagcactggttgggctggagggtggctggagtgggctggccacggcggccgtagctctggcggcaatggcgggcggaaacgagctcgccggagctaaggaaaagtggctggccggtgagggtgagtgcggggcgaagagag

SEQ ID NO: 35737 - DNA, 309 bp, Zea mays
  Peptide Sequence Number=SeqID_77516
atggagctcggccatggggagcgggcagagctcggcgagctggagacgaccagggcgagctggggaaacaccgagctagagctccacggcgcgcagggaggcccggttggggtagaggaaatccgagcccagggaggaagaaacagctgggcggccagaaaatctgctcctgggagccgagcgcgagaggggataaacaccgacagccaggaaatatcaagagagaacgacggtgggagctttggctgccggaaaaatcttgcgatggctgaggacgacggcatagaggatagcgacgggaggagatga

SEQ ID NO: 35738 - DNA, 309 bp, Zea mays
  Peptide Sequence Number=SeqID_77517
atggagctcggccatggggagcgggcagagctcggcgagctggagacgaccagggcgagctggggaaacaccgagctagagctccgcgacgcgcagggagacccggttggggtagaggaaatccgagcgcagggaggaagaaacagctgggcggccagaaaatctgctcctgggagccgagcgcgagaggggataaacaccgacaaccaggaaatatcaagagagaacgacggtgggagctttggcggccggaaaaatcttgcgatggctgaggacgacggcagagaggatagcgacgggaggagatga

SEQ ID NO: 35739 - DNA, 126 bp, Zea mays
  Peptide Sequence Number=SeqID_77518
atgcggcttcatatccttagaggtatgaaggcagaagtcatccttgcatttgcagacatttgcactcatgaggaggaaaagacgttacatgacatgagcaccatttgcttcacgtcaacagaatag

SEQ ID NO: 35740 - DNA, 417 bp, Zea mays
  Peptide Sequence Number=SeqID_77519
atgcggcttcatatccttagaggtatgaaggcagaagtcatccttgcatttgcagacatttgcactcatgaggagttctacgcccgagagcgggatgaacgggatcacgacagtggggagcaacggcggcacagccggatgggtgtcggacggcggggggtggcgcaaccgaccgggggtggggctgggtgggacgatggcggtgcggttgtggtggaggccgggggagggcgggggagacacggcggggcagaggaggaagatatgacttatggagagggttttacggtatataggggggtcagggccatagatcttggcgccgaccccccgccacgtgggactcgccgtcggggggtcgacaccaagatctatggcgccgaccccctggcacctgccacgtcccctgccacgtag

SEQ ID NO: 35741 - DNA, 798 bp, Zea mays
  Peptide Sequence Number=SeqID_77520
atgactgagaagggtagacctgttgcagtggacaagcctcagccgccacctgagggccgtcttcctgatgccaccaagggttctaaccacctgaggcaagtctttggcaagcagatgggtttgagtgatcaggacatcgttgccctctctggtggccacaccttgggaaggtgccacaaagagcggtctggttttgagggggcctggactacgaaccctttggtctttgacaactcttacttcaaggaacttctgagtggtgacaaggagggccttcttcagctcccaagtgacaaagccctgctgagcgaccctgtcttccgccctcttgtggagaaatatgctgcagatgagaaggcattctttgatgactacaaagaggcccacctcaagctctccgaactgggcattctcactgggcttctgtccttcatgatggacgatgcactgacaactggaagcatcaagacatcagatgcagaaaagaggcgtttagcaaaagcttcccttgcctacaattgtgagagcaaaaactgtccgcacttcaggaaacttttcccagagtatgttgagaagtacaatcaacagctacaattggagaacactgctgcagagccggtgcctcaggagaatcctgcacctgctccatcccctgctgcccagcaagccccgaccgtggccaatagggcacaaccactggcggaggcgcgccgtgacaagaaccagaagaaggcggtgcccttctggatggtgctggtcatgttttcagttttcggggctgtgatggcgtgcccctaa

SEQ ID NO: 35742 - DNA, 288 bp, Zea mays
  Peptide Sequence Number=SeqID_77521
atggctgcccttggctcgcacagtctcactgttcaggtgggatactacaggccaagaacgtttctgcacaattaccactgcctactacaggggagcaatgggcatcttacttgtgttgtgcccacttcaaagggacaagctctcgcagacgaatatgggataaagttctttgaaacgagcgcaaagacaaacctgaacgtcgagcaggttttcttgtctatagcaagggatatcaaacagagactttcagagactgattccaagcctgaggtgcggtcctttgcatag

SEQ ID NO: 35743 - DNA, 1476 bp, Zea mays
  Peptide Sequence Number=SeqID_77522
atgggttccaagaacattaaactggtatggagggatagggctcatcgcaccttctacctcggggtcggcgtcgcgttcccgaagccaacactactccccagcccctccgggagctacgtcctaggtgctgtttttcttcagctctgccaagttttgcaacttgcagaacatccagttgttcagaaacttgtagatcccagtcttttcatccatcgttttacaaaaccattccaacgagctgaaaagaaaagacttgaagctgctaaaagggctgaagaagctgcagcagctaaggaggcagcgctggaagaatctctttgcgacacacagaattctgaggttgagagtgccatgactcctagaaagggtttaagtggagataaatcttcgaaaatgggatctgagggactcataaatgactctatgccacccaaggatcctgaagagggagctgaatctgcttactcgggttggcttgtatcaaggaacctacctgatgtgtttgctgtacaggacaagcctcagccgccacctgagggccgtcttcctgatgccaccaagggttctaaccacctgaggcaagtctttggcaagcagatgggtttgagtgatcaggacatcgttgccctctctggtggccacaccttgggaaggtgccacaaagagcggtctggttttgagggggcctggactacgaaccctttggtctttgacaactcttacttcaaggaacttctgagtggtgacaaggagggccttcttcagctcccaagtgacaaagccctgctgagcgaccctgtcttccgccctcttgtggagaaatatgctgcagatgagaaggcattctttgatgactacaaagaggcccacctcaagctctccgaactgggcattctcactgggcttctgtccttcatgatggacgatgcactgacaactggaagcatcaagacatcagatgcagaaaagaggcgtttagcaaaagcttcccttgcctacaattgtgagagcaaaaactgtccgcacttcaggaaacttttcccagagtatgttgagaagtacaatcaacagctacaattggagaacactgctgcagagccggtgcctcaggagaatcctgcacctgctccatcccctgctgcccagcaagccccgaccgtggccaatagggcacaaccactggcggaggcgcgccgtgacaagaaccagaagaaggcggtgcccttctggatggtgctggtcattgactcagttggtcccctagactacctaccacctcggagtcgtattgatgaacctgtgatgagtgcaaagacaaacctgaacgtcgagcaggttttcttttctatagcaagggatatcaaacagagactttcagagactgattccaagcctgaggatcaaactatcaagatcaaggctgaaggggaagctgatgcagcagaggcgcagaaatcagcttgctgcgactcttga

SEQ ID NO: 35744 - DNA, 339 bp, Zea mays
  Peptide Sequence Number=SeqID_77523
atggcgtgccgtgttctgggcgtcgccgtgccgccgcctcctccgtcaactacatcgtcgtcctccggcggttcgtgcagcggcgggccgccgccggcgaactgctgcttggagcacgcgatgcacgtgagcatcctgccgccgaaggtcgtcaggtcacagaagcgcggtgacagtgtgagcatgattgcctaccgagaaggtggggaaggctccgttccgttgagtccgaaagaaagctgcaggtcgtctggtctctggacgacaaggagcatttcagcttcagatgctgggcatggagaaggtgaagttgtgatagcacaaggtgccagttcttaa

SEQ ID NO: 35745 - DNA, 549 bp, Zea mays
  Peptide Sequence Number=SeqID_77524
atgaggagagacgcgacaatgattgggaacgatgggccgaccaacttggagaaggagcaggtaggttggcgcaccttgctcctccatttcgtgtttcggtttatgtatttgctatttatcgcgctctacagcagcggtggcagtcccatcgacgtcggcggtggatgcaggatgtggctggacaaggctaacgacactaagtgttacacgcggttggcgaggagcttcagcctgctatgggaagatgaatccatgatgatgaaagcaagaggtaatgatagagctattgatagggctaatgtaactgcgctcacctcatggactacaaccccacgaaatgttgtggagaaacagttggggaagaacttcgatgacatgtttgaattcttcgatgtcgagcctgttgggtctgcttctattgcacaggtgcatcgagcaaggcttaaattatcaaagacagacgttactgtcaagaagcatgacctcaactttgatctattttctgccaccaaagagatggaaaaacaggtttctcccccactcccatag

SEQ ID NO: 35746 - DNA, 1044 bp, Zea mays
  Peptide Sequence Number=SeqID_77525
atggctgcttgtcgcgacatcgaatctcagcgtcacgaatctcagggatccctggtttcttcgcccatgaggagagacgcgacaatgattgggaacgatgggtcgaccaacttggagaaggagcagtgtcccactccccacccctttttgtttggtttcacctcggccctcgcctcttgccattcttcgtcgggaaagcacagccccgaaggaaaaataccgccgtacaccctcgccatgattgcctaccgagaaggtggggaaggctccgttccgttgagtccgaaagaaagctgcaggtcgtctagtctctggacgatgaaggagcatttcagcttcagaggtaatgatagagctattgatagggctaatgtaactgcgctcacctcatggactacaaccccacgaaatgttgtggagaaacagttggggaagaacttcgatgacatgtttgaattcttcgatgtcgagcctgttgggtctgcttctattgcacaggtgcatcgagcaaagcttaaattatcaaagacatatgttgctgtcaaggcagtgcctgaactgcaaggggagccagagtacatatccaaagagaaagcacgaatcgctgcatctcaggtgaatgggcatgtactggtggaggacacctgcttatgttttaatgcgctcaaaggcctaccagaatttgacatgcacatctttctgctgcaggaccctacatgtttaaataatctgttaaactcttatgaagataaatcagtgttcgctatgtgcatcttctctcttgctcttggacatggagaggaaccaatcacatttgttgggcaaaactgcgttctcattgtgcagggaaagatcgtgcctgctagaggccctaacgattttgggtgggatcctgtgttccagccagatggttttgaacaaacatatgctgagatgcccaagtcagtgaagaaccaaatatctcatagagggaaagctcttgctctggtgaaagaacacttcgcatctgctagctatacagttcagagcgacgactcagcttaa

SEQ ID NO: 35747 - DNA, 636 bp, Zea mays
  Peptide Sequence Number=SeqID_77526
atggctgaaaggtaccaacttccacgaagttgcgttcctccaacgacaaggcagaaggattgcgggtgttccccatccgggggctcggaaggtggaaagacacgatgcataagggagcgcgaaaacatggtcgcctttcaagggggccgccctccttttaaaggcgactctccctacttgcgtccccagacgtcgtgggctgagtcttctccaacatgctccaaggtcctccccctatggtgcaggggctgggtcccacgcgtcatgcaagctggcccagggcagaagaagccaaaccgccgcgcgcggtgcatgcaaccgcccagcggttacaagcgtccctccactttcgcccagactagcgggggaagcgagcgacgcttcgccttcgccataatgactgcgtcaagaaagggaccgggaaagggggataccccgaaaaggatccttctccgtgaaggaaacaggctcggagcctccctactgatcagaggttcaaaggctggcccctcggaggggtttaacagccgcctcagagcgcgtgggctccacacccactactggctggccctcgaagggttcatagccgcctcagacacagagcgagggatgaccctgggtacgttcgatacataa

SEQ ID NO: 35748 - DNA, 750 bp, Zea mays
  Peptide Sequence Number=SeqID_77527
atgggggacacccacaatccttctgccttgtcgttggaggaacgcgacttcatggaagttggtacctttcagccatcaatcagcccagctgcgttccctcgccggtggtcacccaagacggtgaccaccagcccctgggtggggagaagcaagccgggctgcgatcttggtcccgccctcagcttcaaggatgttcatcatcctcgctggggcggaggccaggctgagccagagctctacctcccgcgcgagttcgtgggtcagcctctccttcagcattcaagggagagggcgctcactggccctgcgagcggggcggatttcgataacgcggggctggccgacggcgggcgtcgtcagcttcagcgcgttaggctcgccggcttggctcccggtgccccctcctgccgtgagggcagttgtcgcgccgcgcgcacgggaggaccgcccaagacgtcgcacgctgctagggcggcgttcgtgttctgggggcggtcctgcctttgcaccggtacggcgcctccgcgcggaggtcggtgctccactcgtctgggaggatctgagtggggacctgccggagggctgacggctcctgtcgttggtgccgaggtgggggcggctcgagaagtccccgttgccgatgggatcaccgccaccatccgcgcttcgggcctccggctctttgtacttgtcctcgcccctcgagcgtcggcgtgggcgtgggcaaggttgcagcagcatccgccctga

SEQ ID NO: 35749 - DNA, 990 bp, Zea mays
  Peptide Sequence Number=SeqID_77528
atgggggacacccacaatccttctgccttgtcgttggaggaacgcgacttcatggaagttggtacctttcagccatcaatcagcccagctgcgttccctcgccggtggtcacccaagacggtgaccaccagcccctgggtggggagaagcaagccgggctgcgatcttggtcccgccctcagcttcaaggatgttcatcatcctcgctggggcggaggccaggctgagccagagctctacctcccgcgcgagttcgtgggtcagcctctccttcagcattcaagggagagggcgctcactggccctgcgagcggggcggatttcgataacgcggggctggccgacggcgggcgtcgtcagcttcagcgcgttaggctcgccggcttggctcccggtgccccctcctgccgtgagggcagttgtcgcgccgcgcgcacgggaggaccgcccaagacgtcgcacgctgctagggcggcgttcgtgttctggggcggtcctgcctttgcaccggtacggcgcctccgcgcggaggagtccctcggctcggtcggccttgctgtccgaggcccctcttgcttagttaaaggaacccctcggccgctcttcgatgagccgaagccaggggtagcagtgtcagcacggacagaggcagagttggctctaaaagaagacttggtcggccagagcctggccgggtcgtccactggtgggaccgacgccggaattgagttgccgaggcctcgggccgggctgatgtcttcgggggacagctggccgaggtctcggggtgaccggccgagccgcctgctcgagccggattctcggagaagaccctggcggcgatggcccgggcgtgatgatgacgtcgtccttcagagtggagatcctcggaccgcgtcgccgtccgaggctaggtcggacctcgccgaaggtgtagttgacgccgagggtgctgctgctcccttcaactgtcaagatccgagcctgtag

SEQ ID NO: 35750 - DNA, 231 bp, Zea mays
  Peptide Sequence Number=SeqID_77529
atgaggacttcaaagccgactccagcgatttggatttggagctcacagaaggggctgactccagaagggctttctccagagtttggccctgtcccggcgtggtggcggcagtttggccctgtcccggcgtggtggccgctaaacttcatggagctcgaggacgtgtggatcctcggcacctcgcacctctccgcgtcctccacaccgtcaaaggaaaagatcatcgtgtaa

SEQ ID NO: 35751 - DNA, 564 bp, Zea mays
  Peptide Sequence Number=SeqID_77530
atgaggacttcaaagccgactccagcgatttggatttggagctcacagaaggggctgactccagaagggctttctccagagacgattagaatctacgagttggttggggtgccgccgccgccgcagggaacccctcgctggcgggtctggtcgagtccggtgcgcttgtacgcgtatcgtggcggcagtttgggccctgtcccggcgtggtggcggcagtttggccctgtcccggcgtggtggccgctaaacttcatggagctcgaggacgtgtggatcctcggcacctcgcacctctccgcgtcctccacaccgtcaaaggaaaagatcatcgtggccccctcattgaagagcctccatctctgcctgtgccattacgtcactaatcaaggttttgcagaggcagttaattgcttccctcagctcgaggagctagacattacattctgctcattgtatggcatcgtgtgtgagactgctgggagagcctgcccgacaacgtcgtcgtctagctctgccggagcaggcaaggacgtgtatccccttaaatgttatgccgcttaa

SEQ ID NO: 35752 - DNA, 339 bp, Zea mays
  Peptide Sequence Number=SeqID_77531
atgaggacttcaaagccgactccagcgatttggatttggagctcacagaaggggctgactccagaagggctttctccagagacgattagaatctacgagtttggttggggtgccgccgccgccgcagggaacccctcgctggcgggtctggtcgagtccggtgcgcttgtacgcgtatcgtggcggcagtttggccctgtcccggcgtggtggcggcagtttggccctgtcccggcgtggtggccgctaaacttcatggagctcgaggacgtgtggatcctcggcacctcgcacctctccgcgtcctccacaccgtcaaaggaaaagatcatcgtgtaa

SEQ ID NO: 35753 - DNA, 258 bp, Zea mays
  Peptide Sequence Number=SeqID_77532
atggcctcagggcggatgctgctgcaaccttgccctcgcctacgccgacgctcgaggggcgaggacaagtacaaagagccggaggcccgaagcgtggatggtggcggtgatcccgtcggcaacggggacttctcgagccgcctccatgtgacggaacctcccaagttgcagggaagtgaccaagtcttcataaccgcgaaggtagaagccatcctctcccgggttaaattgaggacaacctctatccacaagatctaa

SEQ ID NO: 35754 - DNA, 156 bp, Zea mays
  Peptide Sequence Number=SeqID_77533
atgcctctaatatctgcaaagcagggctacgctccgataccagctgtgacggaacctcccaagttgcagggaagtgaccaagtcttcataaccgcgaaggtagaagctatcctctccatggttaaattgaggacaacttctatccacaagatctaa

SEQ ID NO: 35755 - DNA, 321 bp, Zea mays
  Peptide Sequence Number=SeqID_77534
atgatggttcttagatcagggttgagaattgctttacgctgggctaaccagttcatgcccaaaacgacatttatgtcttggccttttgggacaatcatattagcgggaaagtcccgtctggccaatgctaagggcacttggaacgtttcacccgtcttgcagacattacagaacatcggagataaagacatgcggaagcttttacataacttacatttatttagaaagttgcagggaagtgaccaagtcttcataaccgcgaaggtagaagccatcctctcccgggttaaattgaggacaacctctatccacaagatctaa

SEQ ID NO: 35756 - DNA, 495 bp, Zea mays
  Peptide Sequence Number=SeqID_77535
atgggtcgagatagactgatgaagatagcaggcagatgcgtcgatactctcgatgcccacgatggcgatcgatttgcctccgagaaggcagctgagaaaattgttgagaaaatatatcaaacagaaagatttaagctaacaagagaagaggaaaatgctattttccaaacaacattcaaggaaacaacaggatgtaaggcaaacagacttcatggtcatgggtacctatcaagatatccaacaagaagtcaagtgatggaatcaaagttcctcgaacaagctcgtgccacggttgcaaccaaccaaaagaacattgaactcgaaagtcaggtccagttgttaaatcaaaaacttgcgtgtgaggttgcagaacgagaaagaatactacaggaaaaaatgcaagcactgcaagaagaagaagaaagaaaaagaaaagtgcaagtgtttaggtcggtttcattttccactgttaagccgaagcttctccatccgtag

SEQ ID NO: 35757 - DNA, 270 bp, Zea mays
  Peptide Sequence Number=SeqID_77536
atgaaggcaaaggggcgcaaccaattgggagagaatgcgaaaagtgcagcagcaacaaggcgccccacgtgtggctcgacgaaaccaccagtcgtgggaaccgtgggtcagtcagccgcggggacagatatggcagttgacgtgactgaaggtggatttacagtgggcgcatcagcagacgtgctaaaacagtgcgccaatcaccgatcaggccatgttgaggcaaagtacaagctttggccccacctgcaggctcgcatcctcccctaa

SEQ ID NO: 35758 - DNA, 480 bp, Zea mays
  Peptide Sequence Number=SeqID_77537
atgaggcatcccgcgcgtggcctgacgaaaccaccaggcatgggggccgcggccatgttgaagcaaagtacaagttttggccccacctgcaggctcgcatcctcccctaaggtgggcccgggggccaatgtcggtaccctaaaactagggtaccctctgctactgtataaagatgcagtgcccacgcgactatctcttagtcgcgtggtagaggtgatgtgtgtggggccaagccatgactcgccccagcctcgggggactactctgggtccacaacagcgcctgaccccgccacatgggtgggtccagagccgccacgacctccacgtgtgcaagccggacccctggaatgggatccggacccccgcatatggggtccgggccacccacaatggggtcccaaggttccaggatagaacatactcggaccttgaacaggacctaggcgggggtccggtgccgacacgtgtccggacctag

SEQ ID NO: 35759 - DNA, 519 bp, Zea mays
  Peptide Sequence Number=SeqID_77538
atgaggcatcccgcgcgtggcctgacgaaaccaccaggcatgggggccgcggccatgttgaagcaaagtacaagttttggccccacctgcaggctcgcatcctcccctaaggtgggcccgggggccaatgtcggtaccctaaaactagggtaccctctgctactgtataaagatgcagtgcccacgcgactatctcttagtcgcgtggtagaggtgatgtgtgtggggccaagccatgactcgccccagcctcgggggactactctgggtccacaacagcgcctgaccccgccacatgggtgggtccagagccgccacgacctccacgtgtgcaagccggacccctggaatgggatccggacccccgcatatggggtccgggccacccacaatggggtcccaaggttccaggatagaacatactcggaccttgaacaggacctaggcgggggtccggcggggacccattgctgccacgtggcatactgcgtgcggcttaagccaacgggtggaacctag

SEQ ID NO: 35760 - DNA, 957 bp, Zea mays
  Peptide Sequence Number=SeqID_77539
atgggagaatatggtcggttctggcgactgaagaacaatcgccatggaactgtaactgagcagatcagaacgccagctcagctcgccgacgttgatcgccgcccggattcgtgcacgaaaataaatgaaaacgaagaagagagtgaagtgactgaagagaagacaccaccacctttggaatctcaggcagggacttggctctacttcaacatctgcgagtccgagcctgactcacctacgaacgaaggcaaaccccgcttccgcatttctttatctccgatgttctgtaatgtctgcaagacgggtgaaacgttcctgatgaatcaacaagaagctcctacagaagttggagagtttcttcgagattttggtgttccagtggtcctgtggcgactacttcaagaatttggatataccgaagcacctaagtaccagtggtcacgcactgttcttagaggacaaccatggtatgaggtagtagtgcgtattccagaacgtgctagaaagccatcttggccacattggatgttccatgctgaaggaatgactccttgggagggtgctcagggctgtacccaggcacaagaacgactggaggaaacaaaggttcaagcagaacaggttattggactaaagcatcaggtgacagaacttcagacgcaacaccaagctgatcagaatcgcattaaggagcttgagcatcagctaactaatgctcattctaaatcaaaagttctgagtcagcaacaagaagaaattcactggtatgttgttgctgttagagaagaccttaaggaaaccctaagattcataagccatcaggatcaggcgatcaaggaattgaattgtgctcatccaatggaatttcaagcagcgcaacggcttgttaaccatctgcagcaagcaatgcatatgctcattgttgccttttatcctactccggcatcagcggactaa

SEQ ID NO: 35761 - DNA, 1134 bp, Zea mays
  Peptide Sequence Number=SeqID_77540
atgggagaatatggtcggttctggcgactgaagaacaatcgccatggaactgtaactgagcagatcagaacgccagctcagctcgccgacgttgatcgccgcccggattcgtgcacgaaaataaatgaaaacgaagaagagagtgaagtgactgaagagaagacaccaccacctttggaatctcaggcagggacttggctctacttcaacatctgcgagtccgagcctgactcacctacgaacgaaggcaaaccccgcttccgcatttctttatctccgatgttctgtaatgtctgcaagacgggtgaaacgttcctgatgaatcaacaagaagctcctacagaagttggagagtttcttcgagattttggtgttccagtggtcctgtggcgactacttcaagaatttggatataccgaagcacctaagtaccagtggtcacgcactgttcttagaggacaaccatggtatgaggtagtagtgcgtattccagaacgtgctagaaagccatcttggccacattggatgttccatgctgaaggaatgactccttgggagggtgctcaggcccgattgttggaaagcattcctattgggcaggattctgctgaatcggcatctgctcgagttttgatggtcgtgctagagttgcaacttactcgagggcacagtcgtcaaaagtggcagcagttgtacactgggagttttgcagcatttaagatgatggaaacggccaagaatagggcttgtacccaggcacaagaacgactggaggaaacaaaggttcaagcagaacaggttattggactaaagcatcaggtgacagaacttcagacgcaacaccaagctgatcagaatcgcattaaggagcttgagcatcagctaactaatgctcattctaaatcaaaagttctgagtcagcaacaagaagaaattcactggtatgttgttgctgttagagaagaccttaaggaaaccctaagattcataagccatcaggatcaggcgatcaaggaattgaattgtgctcatccaatggaatttcaagcagcgcaacggcttgttaaccatctgcagcaagcaatgcatatgctcattgttgccttttatcctactccggcatcagcggactaa

SEQ ID NO: 35762 - DNA, 666 bp, Zea mays
  Peptide Sequence Number=SeqID_77541
atggccctctccacgcccacgtcagcacgagcagagcagcctgacatcaccaggtaccgaaagctggggagtggagtcatactcaaagatgtcgtcgagggggaggcggccgaggtgcgggagggcgacctggtgcagttcaactacgtgtgccgccgcgcgaacgactacttcgtgcacaggtgcgtggtggagttcccagacgccatagcgttgctgttcgacgccacggtggaccagttcaacggcgagagcaggccggtgacgctcgcgctcggcggtgaagaggtcacaagcttcactcctgaatttgtctatccaccagagatgattccattgtggtgtgacagagtcaaagatggatgcttctcaggcgatggggagctccacaatagcgtgctcaaccactatgctatcggcgtttgcaccatagacttcagtacccattttatggaggagctggtaggaacaagacctcaagccgaagcagctgctcctgccaagaagggtgatgccaagattcaggccttgaaggttgccaaggctgtgaagtctggggtaggaaagaagaagaccaagaagattcgtacgtccgtgacatttcaccaccccaagaccctgaagaaggctagggaccccaagtacccaagaattagcactacctga

SEQ ID NO: 35763 - DNA, 1167 bp, Zea mays
  Peptide Sequence Number=SeqID_77542
atgaccatgtttaccaagagcaggacgctcgacagaggaaggcactcggcaaagacagctttgccgagtgccaaacactcggcgaacagcgacgctcagcaaagagctatcagcagccacgtccacaatcacacggtgcacggttctgcccgacggctgcccccccggtccgcgcacgcccccgatccaccccaatctcgctccgtgacctcgccaccccaatctcgctctgtgaccccttccccgcgcggcggtcgcggtcatctcgctcaaaaccctagcgactgcgcctccaccccggtggcgaggacacccggcatcgattcgtccccgcagatcgaccggacaagctcctcctcgccatgggtgtctccgacctcgaggctactccctgtacctgcggccgtcaggccggtgggccgcagcagggctccgtatctgaaggcgacctgcgcactctccaggcggagggcggtctcagacatggcggttgtcggtgccatggccctctccacgcccacgtcagcacgagcagagcagcctgacatcaccaggtaccgaaagctggggagtggagtcatactcaaagatgtcgtcgagggggaggcggccgaggtgcgggagggcgacctggtgcagttcaactacgtgtgccgccgcgcgaacgactacttcgtgcacaggtgcgtggtggagttcccagacgccatagcgttgctgttcgacgccacggtggaccagttcaacggcgagagcaggccggtgacgctcgcgctcggcggtgaagaggtcacaagcttcactcctgaatttgtctatccaccagagatgattccattgtggtgtgacagagtcaaagatggatgcttctcaggcgatggggagctccacaatagcgtgctcaaccactatgctatcggcgtttgcaccatagacttcagtacccattttatggaggagctggtaggaacaagacctcaagccgaagcagctgctcctgccaagaagggtgatgccaagattcaggccttgaaggttgccaaggctgtgaagtctggggtaggaaagaagaagaccaagaagattcgtacgtccgtgacatttcaccaccccaagaccctgaagaaggctagggaccccaagtacccaagaattagcactacctga

SEQ ID NO: 35764 - DNA, 387 bp, Zea mays
  Peptide Sequence Number=SeqID_77543
atgtctgagaccgccctccgcctggagagtgcgcaggtcgccttcagatacggagccctgctgcggcccaccggcctgacggccgcaggtacagggagtagcctcgaggtcggagacacccatggcgaggaggagcttgtccggtcgatctgcggggacgaatcgatgccgggtgtcctcgccaccggggtgggaggcgcagtcgctagggttttgagcgagatgaccgcgaccgccgcgcggggaaggggtcacagagcgagattggggtggcgaggtcacggagcgagattggggtggatcgggggcgtgcgcggaccgggggggcagccgtcgggcagaaccgtgcaccgtgtgattgtggacgtctacgttagtgtcttatga

SEQ ID NO: 35765 - DNA, 1311 bp, Zea mays
  Peptide Sequence Number=SeqID_77544
atggggcgctacgtgccgaagacagagggtctacggagctgggatatccatgggtccaacgacagattgaatcgggtcttcgaattgaaccgcttgctatatggtggttatcccggggaagacgccaccgaccgccgcgggaagaaaccgatgggcgtgaccgaggaagggccttcgcaggaggctgccccggccactaagaagagaaaattagggtcgggtgagggacagttggttgttgtcccgccttcggtggcaacgacttcgccatcggcggtggtaagggcgaagggagccgcgcaggacccgtgggccgccttctgcgtgagcagcgagattctgacggccgctgccgctaaggacgtggcgggcaccatgtcccagcggctgacgcagcagttgaagcaagtggccgacttcgccgaccgtgttgcgtcgggcgtcctgactgcagacgtcgctgccgaagtcgagagtcttcgggcgcaacatgcggatgctgtccgggagaagtcggctgcggagagcaaaaaccgcaggctggcggagaaggtggctgccttggaggccgagaagacggacctccggcgccgactggcggatgagaggagggaggctaaccaggccatcgctgaagcgcaggctgcgcgagcggaggcgaaggtggcgcgggcggagaacagactcgccagccaacgcgccgaggagtgggaggcaagattcaacgccctacgcggccgcgtggacaaggctgaggcctcggcgtgctcagaagtcgggcggatgcacgcgcagttcgtggatgcgtaccgcgatctgggtgcgcggaccggtttcatgtccttcgcctcccttgtcacttgtgaggggaccctgaacgcgttgtcccgcgaggggtgccgacactacgaggtcttcgaccaatcaagcgagaactttgaacgtgaagttttcaaggccgaagaccccgtggtgaagcagtcagcgggggcactcttcgacaggatgtggggtccgcacggtcaggaggcggttaaggagcggtctgaccgggtgatagagcagatggcgtgtgccgaggatgtcgaggtccttggagatctggtcggcgtgccgcccgaggctgaggtcgacccggtgccaccttcgagtgccggtgaaggctcctcggcagcattcgtggctaccgtggccagtgaaggacctttgccagcccctgcgccgacggtcgaagaacccccgaaggtggtggctaagccggtgactgaagaccccacggccgcggccgggccttcgcaggtggctcagtag

SEQ ID NO: 35766 - DNA, 333 bp, Zea mays
  Peptide Sequence Number=SeqID_77545
atggcagatcctgcgcgcgaggcgaagagggcgcgggggagcgcgaaggctgctgcctccggcagtagcaagccagtggcgcctgcaaaggcagctgctcccggacccagcaaggcgttggcaagtgcgaaggctgccgcctctggcggaggcaggcctcccctgggcgaacctatgaaagggcaggagctgccttcgccggggagacgtgttgctgactttggcacgaatatcagtgtcgaggattatcttgttgggtcgggtgagggacagttggttgttgtcccgccttcggtggcaatgacttcgccatcagcggtggtaagggtgtga

SEQ ID NO: 35767 - DNA, 1071 bp, Zea mays
  Peptide Sequence Number=SeqID_77546
atgggttcaacatcggaaaagatgtacctctgccaggtaccaaactttgggtttgaaatgattaagctgagaccgggcgggtcacttgcacgagaaaggagtctcggtgtagtgtctccgtttgagtcgattaaggaccgtcacgatgtaggcctgctgaccggggaccctttaactagtcacatgcctcgtcatggtaagcatttctgcaaaacggagtctttgattattgagaagccttaccttgactcccttacaaccagcatacccttgagagtcttttctttagtcggggatcccgccacattcgtgcgtgaagcggaggacggtgcggcgaggatcgtggggtgctacgtgccgaagacagagggtctacggagctgggatatccgtgggtccaacgacagattgaatcgggtcttcgaattgaaccgcttgccatatggtggttatcccggggaagacgccaccgaccgccgcgggaagaagccgatgggcatgaccgaggaggggccttcgcaggaggctgccccggccactaagaagagaaaattaggtactacagcagtgatgaacaaggatcgtcaagacactgcgcagaagcgccgggccgtcgtcaggatggcagatcctacgcgcgaggcgaagagggcgcgagggagcgcgaaggctgctgcctccggcagtagcaagcttggcaaccacttcgccatcggcggtggtaagggcgaagggggtcgcgcaggacctgtggccgccttctgcgcgagcggcgagattccgacagccgctgccgctaaggacgtggcgggcaccctgtcccagcggctgagggaggtgtcgcagcagctgacgcagcagttgaagcaaaagtcggctgtggaaagtaaaaaccgtaggctggcggagaaagttgccgccctggaggccgagaaaactgacctccggcatcagctggcggaggagaggagggaggcgaatcaggccattgctgaggtgcaggctgcgcaggcggacgccaaagtggcgtgggcggagagcagccttgccagtcaacgtgtcgaggagtag

SEQ ID NO: 35768 - DNA, 300 bp, Zea mays
  Peptide Sequence Number=SeqID_77547
atggcgagctcgtcggtgctcgccgtctcccccatccccctccctcccccgagcacctataaaaggacccgcccgagccccgtcttcgccacacaactccagccatccccactgccctcctccccaagccgttcaagcaagcgccgccgtgctccctgccttgctccgctatggccgaagctccgccacacgctcacgagcacagggcaccactttgcctcccctatcgtggccggaaacatcaccggcggcttcgccgccgcgggcacccgccactgctccgtggaccggccgccatag

SEQ ID NO: 35769 - DNA, 201 bp, Zea mays
  Peptide Sequence Number=SeqID_77548
atggcgagctcgccggtgctcgccgtctcccccatccccctccctccgccgagcgcctataaaaggacccgcctgagccccgtcttcgccacacaactccagccacccccactgccctcctccccgagccgttcaagcaagcgccgccgtgctcccttcactgctccgcggaagagggatctgatcctccggaactcttag

SEQ ID NO: 35770 - DNA, 420 bp, Zea mays
  Peptide Sequence Number=SeqID_77549
atgctgaggctggaggccatggaggccaaggccgattccgggatcatcggtggccttcggcggcggagggtcggttgcgcgagaggacctcgcgacgatgaccccgaggagggccctgttcccgcgcgcatgccacaaccgttcgaacgcgccgccgcccacaccctagcctccgtccccacggccgaggcggaacgagaatgcggggtacaagacgccagagtatcgcgtggtgacgccactgcgctgttggaggaatcgacgtcgctcgctgagctgccgcggtggagattgtgcggcatgtgggagctcacctccgccctcaacttcctccacgtgttccggccattgctgaacattgcggtgggagttgataattttaggaagttaaagatatattttaaaacatctggtacctaa

SEQ ID NO: 35771 - DNA, 459 bp, Zea mays
  Peptide Sequence Number=SeqID_77550
atggcggatggcaatccctgctgctgcttgctgcctgcagctgcaggccgatcacgaaaaggccattcattttttttcctgagtagtgtatgcattcggcggcggagggtcggttgcgcgagaggacctcgcgacgatgaccccgaggagggccctgttcccgcgcgcatgccacaaccgttcgaacgcgccgccgcccacaccctagcctccgtccccacggccgaggcggaacgagaatgcggggtacaagacgccagagtatcgcgtggtgacgccactgcgctgttggaggaatcgacgtcgctcgctgagctgccgcggtggagattgtgcggcatgtgggagctcacctccgccctcaacttcctccacgtgttccggccattgctgaacattgcggtgggagttgataattttaggaagttaaagatatattttaaaacatctggtacctaa

SEQ ID NO: 35772 - DNA, 582 bp, Zea mays
  Peptide Sequence Number=SeqID_77551
atgtgggagctcacctccgccctcaacttcctccacgcaagtggtctaattcttccgtgcccttcagccttcaattgcttctggtctccattagataaggtgttccggccattgctgaacattgcggtgggagttgataattttaggaagttaaagatatattttaaaacatcgggtggtcttttattctctatggggcttctagaatacatcttctccagaagcaccataagtcttgtcttgggcattgcaccagggctagccactctgttacttggcactctcagtctgaagttccggaggagcggcagatccagcttcctgcttatgttggctcaggcaacaatttctgctttcctggcatggaagtactctcatgcttacttcttgacaaatagactccttccttggggcttctacgcctcactgaggtcattttctttgtaccgtccatctccatccaaagctttttccccctttggacaaagatctgatggtctctcctgcttgaaaatcatgcaacactgcaatgggttgtttctacgcctatgtgctacttgcgggacgaaatcccgcaaataa

SEQ ID NO: 35773 - DNA, 396 bp, Zea mays
  Peptide Sequence Number=SeqID_77552
atggagaagaagcccctgcgcatagaggtggtcgagcaggagatggtcgctggcttcttgctgccggagaacaggggaagggcttcagttgctggtgcccttgggaggaggggctggagctttgggcgccgaccatggaagggagggagctcctgctggcaaccccgcacacgcagagaaggcagcgaccaaaggggagagcagggggcgcagggaggtgaagctgcagggggtggcgccatggggaagaagctgggcagccatggagctgctgctcgccagcagggaggaggacgccggcttgaggtggaagaagggtatggcacgccatgggaggaagaagagacgccctgctgcagcacgtggaagaaaacaggaagagagagtggcggctag

SEQ ID NO: 35774 - DNA, 864 bp, Zea mays
  Peptide Sequence Number=SeqID_77553
atggggcttgtgctcgcgcgcagggaatcctcggcgccatggctgctggccggagctggagctcggcagcaaaagaggggggggctcggcttacagctgggcagcatcaatggagaagaagcccctgcgcatagaggtggtcgagcaggagatggtcgctggcttcttgctgccggagaacaagggaagggcttcagttgctggtgcccttgggaggaggggctggagctttgggcgctgaccatggaagggagggagctcctgctggcaatcccgcacatgcagagaaggcagcgaccaaggggagagcagggggcgcagggaggtgaagctgcagggggtggcgccatggggaagaagctgggcggccatggagctgctgctcgccagcagggaggaggacgccggcttgaggtggaagaaggcgaggtacggctcgacgatggtggtggccagaatcgactggtcctcgtgcgcaagggggtgaactcatcggaggcgaggaatcggaaaatggtgcagagatttacccggtctacgttcaccggcgattgggtgaagtccggcgacccgtggactggcttctccggcgaggcaaagtccgattccttgcttggggagcttcaccgaggcatgcacggtctactccgagggtcgggcgcggatgggagaggctctgctggccggtctacggtggcgggggatcgggtggccgcgggcacgctatttgcagggcaaactctagtgatctctggctccgagcgcgtcgaacacgtggaagtgttcttctgcccttgttcaacagctcgccaagatcgcaagcgtgcgaatcttggcaaaaatccggcgcaggcctcctcctag

SEQ ID NO: 35775 - DNA, 504 bp, Zea mays
  Peptide Sequence Number=SeqID_77554
atggggcttgtgctcgcgcgcagggaatcctcggcgccatggctgctggccggagctggagctcggcagcaaaagaggggggggctcggcttacagctgggcagcatcaatggagaagaagcccctgcgcatagaggtggtcgagcaggagatggtcgctggcttcttgctgccggagaacaagggaagggcttcagttgctggtgcccttgggaggaggggctggagctttgggcgctgaccatggaagggagggagctcctgctggcaatcccgcacatgcagagaaggcagcgaccaaggggagagcagggggcgcagggaggtgaagctgcagggggtggcgccatggggaagaagctgggcggccatggagctgctgctcgccagcagggaggaggacgccggcttgaggtggaagaagggtatggcacgccatgggaggaagaagagacgccctgctgcagcgcgtggaagaaaacaggaagagagagtggcggctag

SEQ ID NO: 35776 - DNA, 321 bp, Zea mays
  Peptide Sequence Number=SeqID_77555
atgtctgatgatcgtgtctcgcttccggtgccgtccctgcaagccatggacgagcactccttcgctaccgacgagtcccagccggtggtgaggtcgccaatctccaccacgccaccgccgaaacccgtggacgccgctgcagaaaccctctccacgttctcctccagcgatgaggctgacgccggtggcagtggtgaagcagcggggggtgtcgatgttttgggtccgaccgcacacccagggttgcccctcaagagatgcgtaacaccctacgtcctggtgagtatgtttggtgaacgcggttacaagagagctctctag

SEQ ID NO: 35777 - DNA, 1812 bp, Zea mays
  Peptide Sequence Number=SeqID_77556
atggaggagcaccgcccgcgctgcaatgccacagcgccctcggggaggattgccggcggtggcaagaggaaagtggcggcggtggcgggcgcgccggcggagccgaggtacaggggtgtgttgagacggcgtcgagggaggtacgtggcgaggacctacgatcggaagggcaatcagatgtggctatgcacgttcgacaccgctgaggaggcgtctaggaggtacgacagcgagacgcgtcggcttcacgggtcgtcagcgatcaccaacttccccgcgacgtctgataatcgtgtcccgcttctggcgccgtcgctgcatgctgtggacgagcactccttcgctgccgatgagtcccagcccgtggtggagtcgtcggtctcaaccacgccgccgccgaaacctgtggacgccaccgcagaaaccctctccacgttctcctccagcgacgaggctgacgctggtggcggtgctgaagcggcggcggggccgcgtaagtttgttatggaaatacacatggaggagcaccacccacgctgtaatgccacggtgcccacagggagggttgccggcggtagcaagaggaaagcggcggcggcgggcgcgtcggcggagccgaggtacaaaggcgtgctgagacggcgtcgggggaggtacgcggtgaggacctgcgaccggaagggcaagcggatgtggctaagcacgttcgacaccgccgaggaggcggcaaggaggtacgacagcgagacgcgtcggctccgcgggtcgtcggcgatcaccaacttccccgcgacgtctgatgatcgtgtctcacttccggcgccgtcgctgcacgctgtggacaagcactccttcgctgccgatgagtcccagccggtggtggggtcaccggtctccaccacaccactgccgaaacacgtggacgccgccgcagaaaccctctccatgttctcctccagcgacgaggctgacgccggtggtggtgctgaagcggcggcggggccgcgtaagttcgtcatggaaatacacatggaggagcaccgcccacgctgcaatgccacggtgcccacggggagagttgccggcggtggcaagaggaaagcggcggcggcgagcgcgtcggcggagccgaggtacaggggcatgctgagatggcgtcgagggaggtacatagcgaggacccgcgaccgaaagggcaagcggatgtggctaggcacgttcgacaccaccgaggaggcggccaggaggtacgacagcgagacgcgtcggctccgcgggccgtcggcgatcaccaacttccctgcgatgtctgatgatcgtgtcccgcttccgacgccgttgctgcacgccgtggacgagcactccttcgctcccgatgagtcccagccggtggttgacgacggtggcggtgctgaagcggcagccgggtcgcgtaagttcgtcatggaaatacacatggaggagcaccgcccgcgctgcaatgccacgacacccacggggagggttgccagcggtggcaagaggaaagcggcagcggcgagcgcgccggcggagccgaggtacaggggcgtgctaagacggcgtcgagggaggtacgtggcgaggacccgcgaccggaagggcaagcggatgtgcctgggcacgttcgacacagccggggaggcggccaggaggtacgacagcgagacgcgtcggctccgcggaccgtcggcgatcaccaacttccccgtgacgtctgatgatcgtgtcccgcttccggtgccgtcgctgcacgccgtggacgagcactccttcgctgccgacgagtcctag

SEQ ID NO: 35778 - DNA, 1587 bp, Zea mays
  Peptide Sequence Number=SeqID_77557
atggaggagcaccgcccgcgctgcaatgccacagcgccctcggggaggattgccggcggtggcaagaggaaagtggcggcggtggcgggcgcgccggcggagccgaggtacaggggtgtgttgagacggcgtcgagggaggtacgtggcgaggacctacgatcggaagggcaatcagatgtggctatgcacgttcgacaccgctgaggaggcgtctaggaggtacgacagcgagacgcgtcggcttcacgggtcgtcagcgatcaccaacttccccgcgacgtctgataatcgtgtcccgcttctggcgccgtcgctgcatgctgtggacgagcactccttcgctgccgatgagtcccagcccgtggtggagtcgtcggtctcaaccacgccgccgccgaaacctgtggacgccaccgcagaaaccctctccacgttctcctccagcgacgaggctgacgctggtggcggtgctgaagcggcggcggggccgcgtaagtttgttatggaaatacacatggaggagcaccacccacgctgtaatgccacggtgcccacagggagggttgccggcggtagcaagaggaaagcggcggcggcgggcgcgtcggcggagccgaggtacaaaggcgtgctgagacggcgtcgggggaggtacgcggtgaggacctgcgaccggaagggcaagcggatgtggctaagcacgttcgacaccgccgaggaggcggcaaggaggtacgacagcgagacgcgtcggctccgcgggtcgtcggcgatcaccaacttccccgcgacgtctgatgatcgtgtctcacttccggcgccgtcgctgcacgctgtggacaagcactccttcgctgccgatgagtcccagccggtggtggggtcaccggtctccaccacaccactgccgaaacacgtggacgccgccgcagaaaccctctccatgttctcctccagcgacgaggctgacgccggtggtggtgctgaagcggcggcggggccgcgtaagttcgtcatggaaaatacacatggaggagcaccgcccacgctgcaatgccacggtgcccacggggagagttgccgggcggtggcaagaggaaagcggcggcggcgagcgcgtcggcggaagccgaggtacaggggcatgctgagatggcgtcgagggaggtacatagcgaggacccgcgaccgaaagggcaagcggatgtggctaggcacgttcgacaccaccgaggaggcggccaggaggtacgacagcgagacgcgtcggctccgcgggccgtcggcgatcaccaacttccctgcgatgtctgatgatcgtgtcccgcttccgacgccgttgctgcacgccgtggacgagcactccttcgctcccgatgagtcccagccggtgggcaagcggatgtgcctgggcacgttcgacacagccggggaggcggccaggaggtacgacagcgagacgcgtcggctccgcggaccgtcggcgatcaccaacttccccgtgacgtctgatgatcgtgtcccgcttccggtgccgtcgctgcacgccgtggacgagcactccttcgctgccgacgagtcctag

SEQ ID NO: 35779 - DNA, 1464 bp, Zea mays
  Peptide Sequence Number=SeqID_77558
atgacaagacagaagaaccgcgggcgctccccatccgggggctcggaaggtggaaggacgcgatgcatgaagggagtacgaagacatggggctgggtcccacgcgtcatgcaagctggcccaggacagaaggagccaaaccgccgcgcgcggagcgcacaactgcccagcggttacaagcactcctccactttcgcccagaccagcgggtgaaagggcggaccgccatgcaggcggcatgcaaccgtacctaggggcgcaccctttcgactccgacgcgtccagcgtgggggccgaggcccacacgtcatgtaaccggcggccggttactacgtgcgggaaactgcaccgccacttgcgccaataccgcgccttctcgactgcggaaccagtgccgcgactcgaggcgaccctgcgcatgacccaacagtgccaaccgagcacatcgatcatgggtcagtcagccgcgggagaaggagcgacggtcaatatggccaaaagtgggccggcagtaatggcggtggcaggcaggcggaagcagcgggcaggcggcacctttggcaggcggcacctttggcaggcgaagcaggcgacgcttcacctccgccataatgaccgcgtaaaaaaagggaccgggaaaggggatactccgaaagggatccttctccacgaaggaagcgggccccgagcccccctactgatcagaggttcgaaggctggcccctcggaagggttcgacagccgcctcagagcactcgggctctacgcccaccactggtcagaggttcgaaggctggcccctcggatgggtttgacagccgcctcaagccactcgggctccgcgtccactactgatcaggggttcataggctggcccccgaagggttcgacagccgcctcagagcacgcagagcgagggatgactctgggctcgggggctgctctcgcaaacccggctccggccaaaccgttgacagcgtcaacataccagcccgagaacttggaacctgactatgcacccaggctatggccaggctcggactcagcctcgaccccggaagacggactccgcctcgcccgaccccagggctcggactcagcctcggccttagaagacggactccgcctcgcccgacccagggctcggactcagcctcgacctcggaagacggactccgcctcgcccgaccccagggctcggactcagcctcggcctcggaagacggactccacctcgcccgaccctagggctcggactcagcctcgacatcggaagacgaactccgccttgaccgaccccagggcccagactcgacctcgacctcggaggagcctccgcctcgcccaacctcgggctcggacccgccacgtcatagggaaggccatcattaccctacccctagctagctcaggctacggggaacaagactggcgtcccatctggctcgccccggtaaagaagtaa

SEQ ID NO: 35780 - DNA, 564 bp, Zea mays
  Peptide Sequence Number=SeqID_77559
atgtcttcgtactcccttcatgcatcgcgtccttccaccttccaagcccccgaatggggagcgcccgcgcccggctgcatcccctcgccggtggtcacccaagacggtgaccaccaattcgatggtggggagaagcgagccgggctgcggcctctgtcccgccctcagcttcaaggcttctggggtggaaaccatcctccaactctgaggaggaggcgtcctccatgcatgccggggaaggcgaactgttgctgcccagccagggtgcaacattccgtcctctgtcctcgctttcgtggcgaggacgggagtgaggacctgccggtgcgctttggggcggccggcgctcgctggtgcagtgttggcggacaggtggacgccgccgtcggtgctgacgtggtggcagctggagaaagcttctccgccgtcgagcccgtcagcgctacccgtggaccgacctccggctctttggctttaatgtccggttctcgtcccttgagtggggacgcgaacgagagctttccggcggcagcgtccgtcctgggaccgtcgttgctgctgtag

SEQ ID NO: 35781 - DNA, 945 bp, Zea mays
  Peptide Sequence Number=SeqID_77560
atgccggggaaggcgaaatgttgctgcccagccagggtgcaacattccgtcctttgtccgggcgacggtggccagcagcaccgggaggtctcactccattctcgttttcgtggcgaggatgggagtgaggacctgccgatgcgctttggagcggccagcgcccaccggtgcggtgttggtggacaggtggacgccaccgtcggtgctgaggtggtggcagctggagaggtaggctttttcgccgacgagaccgtcagcgcgacccgcggaccgacctccggctctttggctttaatatctggttcgcatcccttgagtgggggacgcgaacgagagccttccggtggctgcgtccgtcctgggaccatggctgctgctgtggaggtcgctggcgagtcgcccggagaatccctcggctcggtcggccttgccgcccgaggcttcacttgcttagtcgaagaaaccctcggccgctttgcggtgagccggggccgagggcagcggtgtcagcatggacagaggcggagttggttcgaaaaaggaagcttcatcgaccggggcttggccgggtcgtcgactggcgggaccaacgccggagtcgagttgtcgaggccacgagtcgggctggtgtcctcgggggacagctggctgaggcttcggggcggctggccgagccgtctgctcgggccgggttcctggaggagaccctggcggcgatggcccgggcgtggtgctgacgtcgtccttcggagcggagatccttcgcccgtgttgccgtctgaggctcggtcggacttcgccgaaggtggagttgacgctgagggtgctgctgctccccctccatcgacgtctgagcctgcaggatcggttcgcctgtatatcagggcttgctcatcggtagcagaatcgtttatccaagctagagttacttctcacggaaggtga

SEQ ID NO: 35782 - DNA, 594 bp, Zea mays
  Peptide Sequence Number=SeqID_77561
atgaccggggataaacaaaggcaaaagctcaagcaaaagccatcaagcaaaatctccaacacctacatcaaaaaggtgaacaaaaaggatgctacaccatattttatcaagaagaaaaagaatggaaaggtgatagcaatcaaggccaacaagcaagccaacaaaggaaagggggccaaacgcatctgggtgccaaaggagataatttcaaccatgaaaagcaccaagaaggtttggatcccgaaagggaatttattgccaagtgggttagtgaaaattttggacccaaatttcccacccatgactaaggatgcaagaactacttggactaaggaattgaggaaaagcaacacctcaaaagaagacattaagaagatcaagaaaagtccaagaaaggaggcgtgtgctgcctgcggactgtctgtgcgtggagcaccggactgtccggtggcacaccggactgtccggtgcccacacgccggactgttcggtgcacctgggaactacagcccaacggctagttctaggtggcacccggagcctgcggcgccaacggtcacctgctctgacaggagtcagacaggcaacggctag

SEQ ID NO: 35783 - DNA, 339 bp, Zea mays
  Peptide Sequence Number=SeqID_77562
atgaccggggataaacaaaggcaaaagctcaagcaaaagccatcaagcaaaatctccaacacctacatcaaaaaggtggacaaaaaggatgctacaccatatttgatcaagaagaaaaagaatggaaaggtgatagcaatcaaggccaacaagcaagccaacaaaggaaagggggccaaacgcatctgggtgccaaaggaaataatttcaaccatgaaaagcaccaagaaggtttggatcccgaaagggaaattattgccaagtgagttagtgaaaactttggacccaaatttcccacccatgactaagatatgcgtatctattttactttgtatctag

SEQ ID NO: 35784 - DNA, 375 bp, Zea mays
  Peptide Sequence Number=SeqID_77563
atgaccggggataaacaaaggcaaaagctcaagcaaaagccatcaagcaaaatctccaacacctacatcaaaaaggtgaacaaaaaggatgctacaccatatttgatcaagaagaaaaagaatggaaaggtgatagcaatcaaggccaacaagcaagccaacaaaggaaagggggccaaacgcatctgggtgccaaaagagataatttcaaccatgaaaagcaccaagaaggtttggatcccgaaagggaatttattgccaagtgggttagtgaaaactttggacccaaatttcccacccatgactaagttcacaggatgcgaagagagttggaccaaggcaaatgaggatgcaacacctcagaagaagacataa

SEQ ID NO: 35785 - DNA, 375 bp, Zea mays
  Peptide Sequence Number=SeqID_77564
atgacctcgtcacaggtcttcgtccgatgtcgtatggggcgaagggtgtccctgcccgctgtcttgtctccgttggaccaacgactacggcgaaggcctcgagcgaagggtggcgtcttcgccttcgccccaacagcagccactcagccgcatgcactgcacgccttctcactgcttggcggggctcgctcgtcaaatgctcaacagtacaacgcaagcacccatgccttaagccgccgttccgcgggtcccactgggtcaacaccttcgtcccattcgcaaccctatgccaacagctctgcgagttccacggtggccgtaatagctgctgttgggggccttcggcttccgaaggtcctcaaaaacatgatttga

SEQ ID NO: 35786 - DNA, 234 bp, Zea mays
  Peptide Sequence Number=SeqID_77565
atggaggccaagtcacaccgacaaccaatcatcctaaggagtacctgcaaaaattatgccacaagcaaggctgagtatactaatactcagctagacttacccggtgtaccttcggactcggatcagaaccacagtgtgaagaagcacaaagaatacgaagcatttgagaacaagtccccaacattggcgcccacctccggtgaactcttttcgaccaccttcggcaagcactga

SEQ ID NO: 35787 - DNA, 708 bp, Zea mays
  Peptide Sequence Number=SeqID_77566
atggcaaaaagcgtgccaaatgagctcgtggctggagggtcccgcttgtcattgactgttgctattctagcaaagggaaggggctactgttgggggccttcggcttccgaaggtcctcaaaaacatgaacaggtaccttcggactcggatcagaaccacagtgtgaagaagcacaaagaatacaaaggtaccttcggctttgagatgaaggtgcacacggcggtaaagatcaagccccaaggtcaagagggccctaggggggtaactatatatgggcaaatcctggccgaggaaatgtcacacctgggtttcaggggtccaaaacccgggcgcgaaataatcacccaggttgtgcatctttacccacaagtcatgttacccattgatgaggacatcactatcattgatacaaccataccagtgaccacttcaccattcgtagctaatcaaggaccaatggcacgagcccgtgcacgtaaacttaagtatcaggtgaactcgttccttgctattgaagctaattcttctttaaatgaggtactaaagccttgcgatgactttattatgctcaggtgtttgggaggtgaaaccatcttgaactggagaaggcaacaaggcaataaaggttgctgcacccgagaggatttcgtaacagcatcaagtacaaatttaaatggggcatatcttccaacttccaaggtcgtttaa

SEQ ID NO: 35788 - DNA, 690 bp, Zea mays
  Peptide Sequence Number=SeqID_77567
atggactgcctaaaacggatgcctatgttgttcaacgactaccgtgaagaagatttttatgggctaccgcggaaatacagtattgtcgctcggggagccaagatcgaggccataacatatatgtatgagacagtcaaacatttcgacaatttgctccatgaaaagcatgtttacaagatgcataatgtaaagttcagtcttcatccgggtgaatttaattttcatcatctaaatggtcccatggaattgtgtcttgaccaacaaactatcgtggagccatacactgttccaattcaaatggcgccattcccaaaacaaatactcttgaaccttgctgatattgccgagttgccaaacaggactttagtcgacattatggctattgtagtccacttggatacaattcatcgcacaatgtggggacctttcagaaagattgttataatggatgctagagggtatttacatatcattaaagtttggggtgacctacaaaacaaaaatgcactccgctgggcgttggctaaggaggattatggcataataattgggactatgtttagacggttcagaagacaagagtgcctcgagtcttcggatcataccgcaatacacttcaatccgttccatcacaacacccatcattttggaccaattcaaaaagctttggtggcgctgaacaaccgttag

SEQ ID NO: 35789 - DNA, 861 bp, Zea mays
  Peptide Sequence Number=SeqID_77568
atgaattgtaaagtcgtaaaggttttgatggaaccggtcgtattgaaccgcgaaagagccgcagcggaccgcctaaaacggatgcctatgttgtttgacgactaccgtgaagaagatttttatgggctaccgcggaaatacagtattgtcgctcgggtagaagttaaattcccgaaggaaccacgtttccgtgatagacaacatttcgttttatcagacatcaatggagccaagatcgaagccataacatatatgtatgagacagtcaaacatttcgacaatttgctccatgaaaagcatgtttacaagatgcataatgtaaagttcagtcttcatccgggtgaatttaattttcgttatctaaatggtcccatggaattgtgtcttgaccaacaaactatcgtggagccatacactgttccaattcaaatggcgccattcccaaaacaaatactcttgaaccttgctgatattgccgagttgccaaacaggactttagtcgatattatggctattgtagtccacttggatacaattcatcgcacaatgtggggccctttcagaaagattgttataatggatgctagagggtatttacatatcattaaagtttggggtgacctactaaacaaaaatgcactccgctgggcgttggctaaggaggattatggcataataattgggactatgtttagacggttcagaagacaagagtgcctcgagtcttcggatcataccgcaatacacttcaatccgttccatcacaacacccatcattttggaccaattcaaaaagctttggtggcgctgaacaaccgtcaatttgctgttacatttcttgaagaacaaaggcgtagatag

SEQ ID NO: 35790 - DNA, 861 bp, Zea mays
  Peptide Sequence Number=SeqID_77569
atgaattgtaaagtcgtaaaggttttgatggaaccggtcgtattgaaccgcgaaagagccgcagcggaccgcctaaaacggatgcctatgttgtttgacgactaccgtgaagaagatttttatgggctaccgcggaaatacagtattgtcgctcgggtagaagttaaattcccgaaggaaccacgtttccgtgatagacaacatttcgttttatcagacatcaatggagccaagatcgaagccataacatatatgtatgagacagtcaaacatttcgacaatttgctccatgaaaagcatgtttacaagatgcataatgtaaagttcagtcttcatccgggtgaatttaattttcgtcatctaaatggtcccatggaattgtgtcttgaccaacaaactatcgtggagccatacactgttccaattcaaatggcgccattcccaaaacaaatactcttgaaccttgctgatattgccgagttgccaaacaggactttagtcgatattatggctattgtagtccacttggatacaattcatcgcacaatgtggggccctttcagaaagattgttataatggatgctagagggtatttacatatcattaaagtttggggtgacctactaaacaaaaatgcactccgctgggcgttggctaaggaggattatggcataataattgggactatgtttagacggttcagaagacaagagtgcctcgagtcttcggatcataccgcaatacacttcaatccgttccatcacaacacccatcattttggaccaattcaaaaagctttggtggcgctgaacaaccgtcaatttgctgttacatttcttgaagaacaaaggcgtagatag

SEQ ID NO: 35791 - DNA, 731 bp, Zea mays
  Peptide Sequence Number=SeqID_77570
ccaatctgcaccgtccatcaatatgcgtcaaatcatcaccgtccgacaccgccgccgcgcctggctccccctcctcctcgccccactcgcccagacgcacgccacggtgtccctgccccgctcgcgatgcatcccccgaaaccctaggccttccgcgatgaggagtcgcctcctccttcctccgtcgtggcgttctcgggcgccgcctccgcgagcaagacgcctctcccgcccctgccatcctcgccccgctccccgcgagatgagcgactcctactgccccgactgcaagaagcagacggaggtggcattcgaccactcggcgggggacacggtgtgcaccgagtccggcctcgtcctcgaggcgcactccgtcgacgagacctccgagtggcgtaccttcgccaacgagtccaacgacaacgaccctgtccgcgtcggcggcccctccaacccgctcctcaccgacggcggcctctccaccgtcatcgccaagcccaacggcgcccagggcgacttcctctcctcctccctcggcaggtggcagaaccgcggctccaaccccgaccgatccctcattctcgccttccgcaccatcgccaacatggctgacagcgtcgtgaagccgtccgtgatccagctgcgggggcccaccaaggtcagcgtcttcatcgccagcaacgacgccgagcaggcctgcgacttcaggatcaccggcatctaccacgacg

SEQ ID NO: 35792 - DNA, 534 bp, Zea mays
  Peptide Sequence Number=SeqID_77571
atgagcgactcctactgccccgactgcaagaagcagacggaggtggcattcgaccactcggcgggggacacggtgtgcaccgagtccggcctcgtcctcgaggcgcactccgtcgacgagacctccgagtggcgtaccttcgccaacgagtccaacgacaacgaccctgtccgcgtcggcggcccctccaacccgctcctcaccgacggcggcctctccaccgtcatcgccaagcccaacggcgcccagggcgacttcctctcctcctccctcggcaggtggcagaaccgcggctccaaccccgaccgatccctcattctcgccttccgcaccatcgccaacatggctgacagggcctgtggtcgcggaggccatgttcgtgaacagggaagagatccctgtgtacccgctgtacagagatcctgtgccattaagtttcttaagtatgatgagattcagctggcacctgaagcagcatcagtcgggctagaaatctgggttgtcggaaatgacaacgggaaaaatgttccatga

SEQ ID NO: 35793 - DNA, 738 bp, Zea mays
  Peptide Sequence Number=SeqID_77572
atggcatctaagaaatttggggagaaagtgactagcttcaccatgacatgcagcctgttgagccgctacatcaggtcgaacggcgccaccgccatggatattgacctcaccatcagagatgaaatctcttccattgtgagaaggacaatagtacattgtgatagtgaaatggatgcacatctaattatggttttcttggacaatagacatgcaaatgtggacatgacggaggtggcattcgaccactcggcgggggacacggtgtgcaccgagtccggcctcgtcctcgaggcgcactccgtcgacgagacctccgagtggcgtaccttcgccaacgagtccaacgacaacgaccctgtccgcgtcggcggcccctccaacccgctcctcaccgacggcggcctctccaccgtcatcgccaagcccaacggcgcccagggcgacttcctctcctcctccctcggaaggtggcagaaccgcggctccaaccccgaccgatccctcattctcgccttccgcaccatcgccaacatggctgacagtgctaatgccatattgttaacccaaatttttgtcctcttctctgcaaacaggtacatgattttggttttttttcgctatgatccaggtgccattaagtttcttaagtatgatgagattcagctggcacctgaagcagcatcagtcgggctagaaatctgggttgtcggaaatgacagcggggaaaatgttccatga

SEQ ID NO: 35794 - DNA, 357 bp, Zea mays
  Peptide Sequence Number=SeqID_77573
atgaagagttataacatgttgatgcatcagcaaggtgacttgaagccatgttttgaactcatacatggtgatatggtacaagtcacagggtttgatttatttttgcttcaaaagctgaacttcaagttcaaccggggtccagacaggttcaaccggggtccagggcaagttcaacaggggtctagagaggttcaaccggtgttcagggaaagttcagccggggtatttccccggacctcactgtctgacctgcagtctgccagtctgactggcagactgtctgtcagcctgccccaggcggttgaaccggtcttaggggcggttcaaccggtcttggtcaacttgaccagtctgcag

SEQ ID NO: 35795 - DNA, 228 bp, Zea mays
  Peptide Sequence Number=SeqID_77574
atgaacaagaacacaagggacacaagatatatcccgaggttcggtcacaccaccaaggtgccctacttcctcgttgaggcgcccacaaagagccgggtctctttcaaccctaatcctccctttgccgaccacaaagctgtggaggaccggttgaaccgcccctatgaccggttcaaccgcctggggcaggctgacagtcagtatgccagtcagactggcagactgcag

SEQ ID NO: 35796 - DNA, 288 bp, Zea mays
  Peptide Sequence Number=SeqID_77575
atggtgagagaacgaagaacacgaataatcacaatgaacaagaacacaaaagacacaagatttatcccgaggttcggtcacaccaccaaggtgccctacttcctcgttgaggcgcccacaaagagccgggtctctttcaaccctaatcctccctttgccgaccacaaagggcgattgaaccgcccctggcaagtcaggcagactgtctgccagtctgactgtcagactgactggcagactgacctgcagactggtcaagttgaccaagaccggttgaaccgcccctaa

SEQ ID NO: 35797 - DNA, 288 bp, Zea mays
  Peptide Sequence Number=SeqID_77576
atggtgagagaacgaagaacacgaataagcacaatgaacaagaacacaaaagacacaagatttatcccgaggttcggtcacaccaccaagttgccctacttcctcgttgaggcacccacaaagagccgggtctctttcaaccctaatcctccctttgccgaccacaaagggcggttgaaccgcccctggcaggtcaggcagactgtctgccagtctgactgtcagactgactggcagactgacctgcagactggtcaagttgaccaagaccggttgaaccgcccctaa

SEQ ID NO: 35798 - DNA, 195 bp, Zea mays
  Peptide Sequence Number=SeqID_77577
atggtgagagaacgaagaacacgaataagcataatgaacaagaacacaaaagacacaagatttatcccgaggttcggtcacaccactaaggtgccctacctcctcgttgaggcgcccacaaagagccgggtctctttcaaccctaatcctccctttgccgaccacaaagatttggagactcacagagacacctag

SEQ ID NO: 35799 - DNA, 318 bp, Zea mays
  Peptide Sequence Number=SeqID_77578
atggtgagagaacgaagaacacgaataagcataatgaacaagaacacaaaagacacaagatttatcccgaggttcggtcacaccaccaaggtgccctacttcctcgttgaggcgcccacaaagagccaggtctctttcaaccctaatcctcccttttccgaccacaaagttgaagttcagctggagttgagaaagctcaactcagctgaagttcagctgcagctgaaaaagctcagctcagctgaagttcagctgcagctgaaaaagctcagctcagctgaagttcagctcagctgcttttcaacaagaacactctag

SEQ ID NO: 35800 - DNA, 288 bp, Zea mays
  Peptide Sequence Number=SeqID_77579
atggtgagagaacgaagaacacgaataagcacaatgaacaagaacacaagagacacaagatttatcccgaggttcgatcacaccaccaaggtgccctacttcctcgttgaggtgcccacaaagagtcgggtctctttcaaccctaatcctccctttgccgaccacaaagggcggttgaaccgcccctggcaggtcaggcagactgtctgccagtctgactgtcagactgactggcagactgacctgcagactggtcaagttgaccaagaccggttgaaccgcccctaa

SEQ ID NO: 35801 - DNA, 255 bp, Zea mays
  Peptide Sequence Number=SeqID_77580
atgaacaagaacacaaaagacacaagatttatcccgaggttcggtcacaccaccaaggtgccctacttcctcgttgaggcgcccacaaagagccgggtctctttcaaccctaatcctccctttgccgaccacaaagggcggttgaaccgcccctggcaggtcaggcagactgtctgccagtctgactgtcagactgactggcagactgacctgcagattggtcaagttgaccaagaccggttgaaccgcccctaa

SEQ ID NO: 35802 - DNA, 255 bp, Zea mays
  Peptide Sequence Number=SeqID_77581
atgaacaagaacacaaaagacacaagatttatcccgaggttcagtcacaccaccaaggtgccctacttcctcgttgaggcgcccacaaagagccgggtctctttcaaccctaatcctccctttgccgaccacaaagggcggttgaaccgcccctggcaggtcaggcagactgtctgccagtctgactgtcagactgactggcagactgacctgcagactggtcaagttgaccaagaccgattgaaccgcccctaa

SEQ ID NO: 35803 - DNA, 255 bp, Zea mays
  Peptide Sequence Number=SeqID_77582
atgaacaagaacacaagagacacaagatttatcccgaggttcggtcacaccaccaaggtgccctacttcctcgttgaggcgcccacaaagagccgggtctctttcaaccctaatcctccctttgccaaccacaaagggcggttgaaccgcccctggcaggtcaggcagaccgtctgccagtctgactgtcagactgactggcagactgacctggagactggtcaagttgaccaagaccggttgaaccgcccctaa

SEQ ID NO: 35804 - DNA, 255 bp, Zea mays
  Peptide Sequence Number=SeqID_77583
atgaacaagaacacaagagacacaagatttatcccgaggttcggtcacaccaccaaggtgccctacttcctcgttgaggcgcccacaaagagccgggtctctttcaaccctaatcctccctttgccgaccacaaagggcggttgaaccgcccctggcaggtcaggcagactgtctgccagtctgactgtcagactgactggcagactgacctgcagactggtcaagttgaccaagaccggttgaaccgcccctaa

SEQ ID NO: 35805 - DNA, 255 bp, Zea mays
  Peptide Sequence Number=SeqID_77584
atgaacaagaacacaaaagacacaagatttatcccgaggttcggtcacaccaccaaggtgccctacttcctcgttgaggcgcccacaaagagctgggtctctttcaaccctaatcctccctttgccaaccacaaagggcggttgaaccgcccctggcaggtcaggcagactgtctgccagtctgactgtcagactgactggcagactgacctgcagactggtcaagttgaccaagaccggttgaaccgcccctaa

SEQ ID NO: 35806 - DNA, 570 bp, Zea mays
  Peptide Sequence Number=SeqID_77585
atggatgatccccataactattacccacctgagttcctaaacacactaacacctaatgggctgcccccgcatgttttgaagctcaagattggatgccctgttatattgcttcggaatatagactctgcgaatggactttgcaacggtaccaggctggtggttcgtggtttccaaagaaatagcattgacgcaaaaattgtactgggtcagcatgctggaaaacggattttcctgccacgtatacctctttgtccctctgatgatgagatgttccctttccagttcaataggaagcagtttcctatacgtcttagttttgcaatgactgttaacaaagcacagggtcagactattcctaatgttggtgtgtacttgcccgaatcagtgttctctcatggccaattatatgttgctctatctagagcgacagcccgatcgaacataaagatccttgtcatcccagccgtcgatggaaataagaggtcgaggaagggtgtacgaaagaaccccacagtagattgtgggacatacaccaagaacatcgtctacaaggaggtcctaacaaactag

SEQ ID NO: 35807 - DNA, 372 bp, Zea mays
  Peptide Sequence Number=SeqID_77586
atgagaaatgagtccatcattagtgagatccaagcccagctaaagcacaagaatgtcacagtggatgtcaaagcaaattcagaccctcatattagtcctattcagctctcaactacagtcacagtcgaggaacttggtttaccaggcttgaaaaacataatggccatttcttatccacatcaagcatttgggagggaacgacaaaggggacaacctcactgcgtcctacactcctaccatttggcgaacacagagaaggacacaactgttggtatggaggtgacccgcaacttctcaaccaaggcgagcatagtcacctttgggacatgtcatgcactagaccctaccaccactatgaaggcgtgcaactaa

SEQ ID NO: 35808 - DNA, 6006 bp, Zea mays
  Peptide Sequence Number=SeqID_77587
atggttggagagcagtttggttggatcatggtgacctccatctcctcctcggtcgccagctcgccaccatcgcctcccggtcggccgcgccacctcccggaaggttttctttctgaaaagggactgttaacactttctataaggcttcttttcattcaccagggcactgttcttgttatggatcagctgggatacaatgttgatcgcacaccattcacgaacatctcaaacaccatcattacaggtacggacactaatccacaaagttacattgtaggtaatcaaaatgaatcgaactcgcttggaccaattgttgatgctagggaacatagctttccagatgactgtagcaccattgatttaaaatatttgtcaacacaaggcattgcaggtggagacgaacaagtaaacgtggatctagatgatgatagcgattggttgcatagaaatgagacattccaggtaaacaacattgtcgcaagtaatgaccttctgacaacaggttgtgtgcatgaaagtgttgataacacacctaatcatactatgaaaagggccgcctactttagtgagcggtacaaaaacttaactcccatcgagagggagtctaggcgtgaacaccttaggttgtataataagacaccaaaacggaaagatgcaaagacagagtacggcagaaaacgtagagcactgcaatctgccactttgaatcaggagtccatcgccatggaggacccaacatatacccctgaggttggacgtcatagaacagatgcaacacaaccgtatggatcctcagttaccacttgcgactgggttatccctgaattcgtcgggacacctttcctgccaacttcaatacaaatcgaggatgttggttcactcactatgtctactgagccactaagtcgtaaacatcatgtgctatctggggcaagaccagctatcttaggtagtcgaaaccaacaatttgaagccgccatttcaaggaacgtggctacggtgactgaggatacaatcagtgacgccgtggaaggggacgattggacacaaccccatacgactacagagatccacaacaatggtgacgatgatgagggtgtcatattcgaagaggatgatgatgataacgatggatacctattcgctgggcaatatgatgagaccgacgaggacatcaagattgatggtactcaagaagaatctattgacactgatttgccagacacgtacaacaaggtgtacagtaacgtgcctgaagaaacacatatgctgaagtctgttcccaactgcggttattgcaatgcgaagaagtttgagtatgagccacctagattttgctgtcgtggtgggaaggttgagctagccccactggagacccctccacaactccggaggttgtgggatagtgcagactctgatgctaggcactttcgtgataacatcaggttttttaatggccatttctctttcacttcgttgtactgttgccttgatagtatgacaactaatgttagggattctggtatatacacattccgagcacaaggcatgatgtatcacaatatcaagtcattcggtagggaaggtggggcggagcataaacaccttgaactttacttttacgatgatgatcccaatctcgagcatcggtaccgtatgtgccgcgaagaacatcaacagaaagacaaagatgttattaaacagatagtttccatactccgtgaaaatccatactctgaacatcttagaagcatgggtcatgttgagaaccttgatgactatcgtatcacattgaaccttgatcaatcgttgaaccagaagacatataacacacctatcacttcagaggtcgctgctgtatggatcgaggggagcgaacggcgaggccagttcaacaagagtgttatgctacatgggaaggataggtcaagccatggtatccgctcataccatggatgctacgatgcactatcgtatccactgttctttcctagaggtgaacttggatggcatgcaaatataccaaaggttggtgtatccatgggcgaagtggatgcataccgtgcgacgcatagggcaagtaatgcaaacgatgaagatgcagaatctcctaatcatctatgtgtgtccgtacgtgactattactgctacaaattccagattcgtccaggggtattcaatccaatacttcatggtaaacgtcttttccagcagttcgcagttgacacatacatcaagattgagagctcccgtttagatttcattcgtaagaaccaggatcggttacgggcagacctataccagggtttggtggatactatgttagatggcgatataagagcagaaaaggttgggaagcgaactgtgctgtcgtcgtcgtttattggcggtcctcgtgacatgagacgtcggtatatggatgctatggctctggtgcggaagtttgggaaaccagacatctttcttaccatgacatgtaaccctaactgggatgagataaggagggagcttctctctgggcagacaccacaagatcgttcggatcttgtagtgcgtgtctttcatgcgaagctacaggagttaaagtataggctgactaaacaagatattctcggtaaggttcgtgcttacgtctatgtcgtcgagtttcaaaagaggggtttgccccatgcccattttttactaatcatgcagaggaagtacaagctcacatgccctgagcagtatgaccttttgatctcagccgagatcccagacaaaaagtaccatgaactacgaaagatggttatcaagcatatgatgcatggtccatgcgggtcgctaaaccctaactgtccatgcactaagggtcgtgcatcatgcaagaatcattaccctcggcctttcagtgatgcaactttgcaagggaaggattcatatcctgtttacagacgtcgtgatgatgggcgtaaggaaaaggttcgagggtgcgagttggacaatagatgggttgtcccttacaatccttacctccttcgcctcttcaactgtcacatcaatgttgaggcgtgcgggagcatcaaggctgttaaatatttgttcaagtacatatacaaaggccatgatcgtgcgtctgttgttatgagagatgcgagcaagacagatgatgatgtagatgagatcaagcagtacagagatgcaaggtgggtgaccccgccagaagccttatggaggatatacggctttgagcttagtcagaactctccacctgtgatgcagctgcagctccatcttccaaacatgcacatggtggcgtttcatgatcggcaaatggtccagcgagttgtaaaccgtctaggtgctgataggtcaatgctcacagcatattttgaggcaaataggctacacgaagaggctccgggcatcctatattgtgacttccctgagtggttcacttggcagagtggtaagggcaaagtatggcaacggaggaaacgagatacgggtggacaagtcggtagaatagtctctgctcatccagccgagggggagcgctactatcttcgtgttctcctaaaccacgtggctggcgccatctcctatgtggatctaaggacagtagatggtgtcacgctaccgacttttcgtgaggcggcagagagaaggggactgcttgagtcggacaacacactggatgagtgtctcactgaacgtgctcttttccagatgccatcggcgctgcgacgactttttgccacaatactggtgtactgtgagccaagcgatgtggcggtactctggcggaaacacctagatgctatgtcagaggactatcaacgtaggagtgagagcaaaactcatgttgagcagatggtattgattgacattaggaacatgctgcagtcaatgggaaaggacataaagacattcccacttcctcctatcattgacacttatgacgatgctataggtactgctagggaggtttacgaggaggaaagtatcgaaccgacagtggcagatgtggctctcaaagagactcttaacgaggaacagagagccgcctatgataagattatgtctgctgttgacactgatcagggtggattgttctttgtggatggacctggtggcactggaaagacttatctatacagagtgttgcttgcgacgctacgcagccagaacaagattgcggtggcaacagctacatctggcgttgctgcttccataatgcctggaggaagaactgcccattcacgcttcaagatacctcttactattgatgatggcgctgtatgtagcttcacgaagcagagtggaaccgcagagttgctacggaaagcatctctcattatctgggacgaggcttctatgactaagagacaagctgtggaggcactagacaatagcatgcgcgatataatgggtcggcctggattgccattcggtggtaaaaccattgtcttcggtggggatttcagacaagtcttgcctgttgttcgtaaaggttcaagggctcaagtagtcgcttcttctctacggatgtcttacctatgggagtccatgtcccacttaaagcttgttagcaatatgagggcaaaaaacgacccttggtttgcagagtttttgctacgcataggtggtggaactgaggtcacgaatagagatggtgacatccgtcttcctggcgaggtatgtgtgccttatagtgggagtgacagtgatcttgacaatctaatagactacgtgttcccaaatctcaatgaaaatatatcagattccacctacattacttcacgagtgatactatcaacgcgaaacgattgggtggatatgataaatgttaagatgatcgatcgttttcaaggtgcacatacggtgtaccatagtttcgatagcgccatggatgatccccataactattacccacctgagttcctaaacacactaacgcctaatgggctgcccccgcatgttttgaagctcaagattggatgccctgttatattgcttcggaatatagaccctgcgaatggactttgcaacggtaccaggctggtggttcgtggtttccaaagaaatagcattgacgcagaaattgtactgggtcagcatgctggaaaacggattttcctgccacgtatacctctttgtccctctgatgatgagatgttccctttccagttcaaaaggaagcagtttcctatacgtcttagttttgcaatgactgttaacaaagcacagggtcagactattcccaatgttggtgtgtacttgcccgaatcagtgttctctcatggccaattatatgttgctctatctagagcgacagcccgatcgaacataaagatccttgtcatcccagccgtcgatggaaataagaggtcgaggaagggtgtacgaaagaaccccacagtagattgtgggacatacaccaagaacatcgtctacaaggagttagagatttctagcatggctgacacaagggatataacagctttaagcacaatgagaaatgagtccatcattagtgagatccaagcccagctaaagcacaagaatgtcacagtggatgtcaaagcaaattcagaccctcatattagtcctattcagctctcaactacagtcacagtcgaggaacttggtttaccaggcttgaaaaacataatggccatttcttatccacatcaagcatttgggaggtttggaatccagtacttgcgtaattatgttggtatcaatgtcagttcttccatgaacacaaaaccttcggttaaccttgatactcgctcaagcttggctatgatttttcttgttgcacttaagtcggagctggcggcggaggtgtacgctaagcagaaggtggatgaccagtgggcactgcacgtgtcgcaccacacatcggacatcctccactgctggatggagcagagctggctgcccacctccacggtggtgcaggctggcaccacgccgcagcccaacaagcgatgcctagatctagagcaagatgaaggcggatga

SEQ ID NO: 35809 - DNA, 429 bp, Zea mays
  Peptide Sequence Number=SeqID_77588
atggcttcagctggtgtagccccatctgggtacaaaaacagcagcagcaatcctccatctttgccacctaaaggatgcctcctcccctggagcccagaggcctacctcaaggggcatgaagcggagctcgcgttggctatgatttttcttgttgcacttaagtcggagctagcggcggaggtgtacgctaagcagaaggtggatgaccagtgggcactgcacgtgtcgcaccacacatcggacatcctccactgctggatggagcagagctggctgcccacctccacggtggtgcaggctggcaccacgccgctgcccaacaagcgtcgcctagatctagagcaagatgaaggcggacgacacagattcacgcatataaaatgtcaagaaacattacataacaaatgcatctcttcatactactgccag

SEQ ID NO: 35810 - DNA, 897 bp, Zea mays
  Peptide Sequence Number=SeqID_77589
atggtgaaggcgacgatgagtggcaagctcaaggagatggattgggaaaagaagatcaaaatctgcgagcttgtggagcaagatcctggattggctatgatttttcttgttgcacttaagtcggagctagcggcggaggtgtacgctaagcagaaggtggatgaccagtgggcactgcacgtgtcgcatcacacatcggacatcctccactgctggatggagcagagctggctgcccacctccacggtggtgcaggctggcaccacgccgctgcccaacaagcgtcgcctagatctagagcaagatgaaggcggacgacacagattcacgcatataaaatgtcaagaaacattacataacaaatgcatctcttcatactactgccagacatttagagtttaccccattcctgcaatgctttacctggtcaagaacttattgcagtattatatctttgaatatgtgtatgcaccatcttaccatattctgaagaacttgaatattatcagcactggtgtcctgtaccgtataattctcaagaaaaagactatgcaacagctaactctgaaatctgaaactgacacatttgttgaatctaataccatgctaccctcctatttggtcatcgttttcaatgagataagctcgagagacatggaggagatcaatgttttgaagggtttgccacagaactccattttcatgtgcatcctcggtggcaccattatcttccagttcatcctggtccagttcctgggagattttgccaacaccatgcctctcacccatctccaatggctcgtcagcattctctttggcctcctcgggatgcccattgctgctgccatcaaactgattcctgtggaacctcgcgaagacgatggccggataccataa

SEQ ID NO: 35811 - DNA, 534 bp, Zea mays
  Peptide Sequence Number=SeqID_77590
atgggcactaacatttactatcagacatttagagtttaccccattcctgcaatgctttacctggtcaagaacttattgcagtattatatctttgaatatgtgtatgcaccatcttaccatattctgaagaacttgaatattatcagcactggtgtcctgtaccgtataattctcaagaaaaagactatgcaacagctaactctgaaatctgaaactgacacatttgttgaatctaataccatgctaccctcctatttggtcatcgttttcaatgagataagctcgagagacatggaggagatcaatgttttgaagggtttgccacagaactccattttcatgtgcatcctcggtggcaccattatcttccagttcatcctggtccagttcctgggagattttgccaacaccatgcctctcacccatctccaatggctcgtcagcattctctttggcctcctcgggatgcccattgctgctgccatcaaactgattcctgtggaacctcgcgaagacgatggccggataccataa

SEQ ID NO: 35812 - DNA, 522 bp, Zea mays
  Peptide Sequence Number=SeqID_77591
atggtgaaagggtgcagcaattgggagagaatgcgaaagcgtaactgctacacgcagggggaatccctcttcaaggcagactctcccactcaaaaagcgaactgccgcgcacgcccgaaaagcgaaccgccgcccgcggtagcgcgcctctttgtctctgccccaagaaacatcagcccatactctgacacgggggcctgggcccacgagtcatactccttggcggtatcgaggcgcctcgcacgtggcccggcgaaaccatcacgcgtgggggccacgggtcaatcagccacggggacagacatggcagttggcgtgtccaaaggcggattggcggtgatcacgttagcaaacgcacagaagcggcgcaccattcatcaatcaagctttggccccacctgcaggctggtgtcctcccctgaggtgggcccgggggccactgtcggtatcctgaaactagggtaccccttgctacagtatgaagacgcggtacccacgcggctatctctagtcgcatggtga

SEQ ID NO: 35813 - DNA, 2871 bp, Zea mays
  Peptide Sequence Number=SeqID_77592
atggcatcgtcgtcggggtacgcggatggcggcaccggaggtctaggcgacggagaccccccggtgccgtcgatgaggaagcaaccctcgcggatcgcgtcagggatgcgtcggctagcatccaaggtgtctgcggcggtgcccgagatgcggggcctcaagcgtacacagtccggtgcccagtcaggcttgcgcgggctgcgtttcctggacaagacgtctgccggcaaggatggctggaagaccgtcgagaagcggttcgacgagatgagcacggacggccggctgcagagagagaacttcgccaagtgcgacaagaacggtgatggtaagctgacagaggatgaggtcaaggaggtcatcgtgctaagtgcctcggcaaacaagcttgcgaaactgaagaaacatgctgcaacctacgcctctctgatcatggaagagctggaccctgatcaccgcggctacatcgagggaacagggaaacagatttggcagctggagaccctgctacgcgggatggtgaccgcctcagggccgacgaacatgggggcgtcagcatctctggcgaggacgatggtgccttccagccaccggaccccgctgcagcggcgcatgaacaaggccgtggacttggtccatgagaactggaagaggatatgggtgctctccctctggggcgtcctcaacatggccctcttcgtattcaagttcacccagtaccggaggcgcgcggtgttcgaggtgatgggctactgcgtatgcatagccaagggcgcggccgagaccctcaagctcaacatggcgctcatactgctgccggtgtgccggaacacgctgacgaggctgcggtccacggcgctcagcaaggtggtgccgttcgacgacaacataaacttccacaaggtcatcgctcttgcaattgccatcggatctgcaacccatacgcttgcacacgtcctctgcgacttccccaggctggtggcgtgccccaaggacaagttcatggagaagctggggcccttcttcaactacgctcaaccgacctgggcgaccctgctgtcgagcatcccggggtggaccgggatcctcctcatcctcataatgtccttctccttcacgctggcgacgcactcgttccggaggagcgtcgtgaagctgccgtcgccgctgcaccacctggcaggcttcaacgccttctggtacgcccaccacctgctggtgatcgcgtatgtgctcctggtcatgcactcctacttcatattcctcaccaagcagtggtacaagagaacgacatggatgtacttggcagtccctgtcgtgttctatgcctctgagagaagcatcagaagaattcgtgagaaaagctaccgcgtgagcatcataaaggcagcaatttacccgggaaacgtgctgtcactctacatgaagaagccaacaagcttcaagtacaaaagtgggatgcaccccttctccatcacttcggctccgggagatgactacttgagcgttcatatccgtacgctaggcgactggacatcagaactcaggaatctgtttgggaaggcttgtgaagcagaagttacttctaagaaggctacactagcaagacttgaaacaactgttgtggcacatggtctggcagaggacactaggtttcctaaggtcttcatagatggtccctacggcgcaccggctcaaaactaccgcaaatacgacatccttctgcttattgggctcggcattggtgcgactcctttcatcagcatactcaaggatctcctaaacaacataaagtccaacgagagcatgcatgacaccgagttgggttgcagtttcaagaccaacgggccaggaagagcctacttctactgggttaccagagagcaaggctccttcgagtggttcaaaggtgttatgaacgacgttgccgagagtgatcacgacgatgtaatagagatgcacaactacctgaccagcgtgtacgaggaaggcgacgcgaggtcggccctgattgccatggtccagtcacttcaacatgccaaggacggcgtggatatcgtgtcaggcagcaagcagtaccacgacgacccggttccatttccacaaagagaacttctaacaagcaatggcgccactcacatttcagtggccttggtagctttgtggaactgggagctaggcctgggcttgactggaccaagagcagtatgcttggtcaggtttggtgttggggcaaaatggaaggaaataactaatgcctataacgcctgggcgatctccgagcgccataatgttcgtagtccatacagtattgatatgtcgcggttgcttcctcgaggccgcgcgacccagaggccttatgtcaggctccgcccgttggcttacgtcacgtgcgccatgccacgtggcagcatcggggctccgcctgagcggggagcaagagcgtttacgttatggtccggacacgtggctgctccggacccccgcctggccttgattaaggcctgggtattctttgtcccagaatcccgggaccctgctgtcagtggcccggaccccacacagaggggtccggaacccatcctaggggtccggtttgcgcccgtggaggtcctggaccttacccgggggtccggtctgtatatacgggggtccggaactttcccatgggggtccggacccactgttgataccttggagtatatcatcttctttggccacatggcagtcccggagccgtccacgtggtggggtcgggcgatgtctaccatgcgactagagatagccgcgtgggtatcgcgtcttcatactgtagtaagagccccagcccagacccctggtgctgggtgcgacgacgaccgccaacgctag

SEQ ID NO: 35814 - DNA, 752 bp, Zea mays
  Peptide Sequence Number=SeqID_77593
atggtgctcttcctcttccgctttggcgtgatcgcgatctttctggcggaacgaccaggatcaaaatctcagggaagcagaggagtgtggcgccttgccactggccttgccgctgccactgccgacgtcgccactaccgcctttgccgccacagtcgtcgtcgccgccgtcgtcacctccaccgccgctgccaccatcgtcgctgccgctgccgtcaccgtcaccgctgtcgtcgctgctgccaccgccctcatcgtcgttgtcgtcgccgctccgctcctcggacgagccagaggagttctcctcatccgagcagacctccgactcatccgacccctcgagcccgacacgctcgacagaacggatgagtcgtctgagtcattggaagacgtggggggagaagcgagagccagcgatccctcagactcggaggaaacctcctccactgaatactccgaatcgcagaagtcctccgagggaggacttgggtctcgcttccgcttgtcgccaacacgacggggcgagcctcgacctctcctgcctttgcccatggttggatggagaagaagagaaggggagaagaaagcagcagatgatcgaaggatgagtgaagagaacaacggtgcaagcaggctatttatagaggccgggagtgaccgtccacttcctaccacgctcgccgaacagtcacaagtattcaataggcaattcaagccgcctgaaaatgagtcaggcaaaaggcgccgcttcac

SEQ ID NO: 35815 - DNA, 456 bp, Zea mays
  Peptide Sequence Number=SeqID_77594
atggcgggcgctagtcaccgacgagctctagcaggggagagagagtgggttcgggtggggctcaaaaaggagctagggcgagtggggcagatccacgagctgagaatcccatattctttaagtcaatccgccatatcagcccttgttgaacaacttaataatccggagagaagatgcttctcggaagacgatggaaatgaggaacgaagttatccttcccctttttttaaggcacgggctcagaatgttcttgtaaattatggccaataccaggttacaagtgaaatctccagaatggagaaaaagctaatgagaagatctttgaaaattcttggcaacacacccaatgggtgcgcccaaggggtgtcttggcggcttgaattgcttattgaatacatgcgactgttcggcgagcgtggtaggaagtgggcggtcacccccggcctctataaatag

SEQ ID NO: 35816 - DNA, 258 bp, Zea mays
  Peptide Sequence Number=SeqID_77595
atggcgggcgctagtcaccgacgagctctagcaggggagagagagtgggttcgggtggggctcaaaaaggagctagggcgagtggggcagatccacgagctgagaatcccatattctttaagtcaatccgccatatcagcccttgttgaacaacttaataatccggagagaagatgcttctcggaagacgatggaaatgaggaacgaagttatccttcccctttttttaaggcacgggctcaggtatataagcagtga

SEQ ID NO: 35817 - DNA, 426 bp, Zea mays
  Peptide Sequence Number=SeqID_77596
atggctcgaagaagattccaaaagaacaagaagacatctccaaaggaaaacaatgaggtaacccttgacatattactttccaattgttctaattatgtttcatggtctactagtgtgataaatgcttttagaaccatagactcacaattagaacaaattttagacaagagtattataccctatagttataatgggaaaaatgcttccaaggaggatcaaagatgcatacgcttaaactaccttgcttatgacatcttaagtaattctcttagcaaagaagattatcgttgtcggtgttttgggtccgcccgcacacctggggttgcccctcaagaaatcagtgctcttcctttggcttatgctttagagatcaacattcggttctcggggtttcaggattcattgggtgtagcccccgagctttga

SEQ ID NO: 35818 - DNA, 426 bp, Zea mays
  Peptide Sequence Number=SeqID_77597
atggctcgaagaagatcccaaaagaacaagaagacatctccaaaggaaaacaatgaggtaactcttgacatattactttccaattgttctaattatgtttcatggtctactagtgtgataaatgcttttagaaccatagactcacaattagaacaaattttagacaagagtattataccctatagttataatgggaaaaatgcttccaaggaggatcaaagatgcatacgtttaaactaccttgcttatgacatcttaagtaattctcttagcaaagaagattatcgttgtcggtgttttgggtccgaccgcacacctggggttgcccctcaagaaatcagtgctcttcctttggcttatgctttagagatcaacattcggttctcggggtttcaggattcattgggtgtagcccccgagctttga

SEQ ID NO: 35819 - DNA, 426 bp, Zea mays
  Peptide Sequence Number=SeqID_77598
atggctcgaagaagattccaaaagaacaagaagacatctccaaaggaaaacaatgaggtaactcttgacatattactttccaattgttctaattatgtttcatggtctactagtgtgataaatgcttttagaaccatagactcacaattagaacaaattttagacaagagtattataccctatagttataatgggaaaaatgcttccaaggaggatcaaagatgcatacgcttaaactaccttgcttatgacatcttaagtaattctcttagcaaagaagattatcgttgtcggtgttttgggtccgaccgcacacctggggttgaccctcaagaaatcagtgctcttcctttggcttatgctttagagatcaacattcggttctcggggtttcaggattcattgggtgtagcccccgagctttga

SEQ ID NO: 35820 - DNA, 168 bp, Zea mays
  Peptide Sequence Number=SeqID_77599
atggccttgttggtagcgctgagcttgcctttcctcccgctgccggaggtgcacggtcttgtaggggcggcgctcttccaccggtgcttggcttcaaggatgttcatcagcctcgcactggtggagagcgagctgggttgcggctccgcctcctacctgagctggtga

SEQ ID NO: 35821 - DNA, 960 bp, Zea mays
  Peptide Sequence Number=SeqID_77600
atgaacatccttgaagccaagcaccggtggaagagcgccgcccctacaagactgtgcacctccggcagtgggaggaaaggcaagctcagcgctaccaacctgctggggagggtgaagacaaagagcacaatctctccggcggtgagttcgctggggaggatggcgccggcgcaaatcctcccgctgaactccggcgcatcccatccaagcaagcggcaaaccgaaatgcacagtacaaccagacacccaggcgctaccaccaacggttcgtgcatagtagggaagctcagtctggacatgctcggggtgagcttacaaggccatgggcaaactacggcgacgcaaggcagaaaccttgaaggcaaaggggcgcagagagctcgaaggcgaaagggcaccacgggtgggagagaagcaaggcatggctgctactcgagggatgaacccccttttaaaggcagattctcctgctcgagccccaaagcgtcacgggcgagtctcccccgatgcacatcagggtacccatcctatggcatggggcccgaccccgcatgtcatacagctggcccgctggtgcgaagaaggcaaatcgttgcgcgaggagcgtgctactgccccgcggtaggtgcgccgcttcatcttcgccgcgaccgacggtccaacctcgggcatggggtccaggcccacatgtcaggcacctggcgtggccggtttctatgcgcggagaagacagaccgccgcgtaagaagcatgccaccgcctacggtagcacgcctcttcgcctccgccaaaagcaacagcccagtccctgacacaggggcctgggacccacgagtcatccctcgggtaccggtccctgggtacagagaagtcaaaccgccgctcgcgccaataccgcgcctcctcggggccgccacagaagatggagaggttaaattttcgaaactaatgcggcagtaa

SEQ ID NO: 35822 - DNA, 528 bp, Zea mays
  Peptide Sequence Number=SeqID_77601
atggctgctactcgagggatgaacccccttttaaaggcagattctcctgctcgagccccaaagcgtcacgggcgagtctcccccgatgcacatcagggcccacatgtcaggcacctggcgtgccggtttctatgcgcggagaagacagaccgccgcgtaagaagcatgccaccgcctacggtagcacgcctcttcgcctccgccaaaagcaacagcccagtccctgacacaggggcctggacccacgagtcatccctcgggtaccggtccctgggtacagagaagtcaaaccgccgctcgcgccaataccgcgcctcctcggggccgccacagaagatggagaggcggagggccgatgctgccacgtggcctatcgcccgtgacgtaagccagtgggcgaagcctgacgtaagggctctgggccacgctgcccccgcatttattgcggaaaggaagtgccgcctggcagacgatgtgcctcctcagcatttattgcgacctgtccactccactggcaggcggcgctag

SEQ ID NO: 35823 - DNA, 315 bp, Zea mays
  Peptide Sequence Number=SeqID_77602
atggacaactaccagcctgaagtccaatgccagggttgcctcgtgaaaaaatattctatcatattccctgatgttccaattgcacttcggttatcaagtcatcttatgttaggcgtggtcagaatctattctcggaaggtcaactacctattccatgactgcagcgaagctttgctgaagataaaacaagctttcaggtccactgctgttgatcttcctcctgaagagtcaactgctccgtatcactctataactctgcctgagacattcgatcttgatgattttgaactgccagaagctgcgtttcaagggtaa

SEQ ID NO: 35824 - DNA, 3435 bp, Zea mays
  Peptide Sequence Number=SeqID_77603
atggacaactaccagcctgaagtccaatgccagggttgcctcgtgaaaaatgtacttgcagaagatcattatctgctagattctatcatattccctgatgttccaattgcacttcggttatcaagtcatcttatgttaggcgtggtcagaatctattctcggaaggtcaactacctattccatgactgcagcgaagctttgctgaagataaaacaagctttcaggtccactgctgttgatcttcctcctgaagagtcaactgctccgtatcactctataactctgcctgagacattcgatcttgatgattttgaactgccagaagctgcgtttcaaggcgacactgatcatcatgtgagcacaaaagaacagatcactttgcaagacaacccagagaaaacagggtattcaacatcccagtttggcctagatgaaagatttggtgatgccagttcatcacatattggctttgacttggaggaggaattaattctgaacaaggaccactcaattcatctccaatctgatgatggcattattattcaaggtcggtcatcagtcccttctactgatatggacattgatgataacaaaagtcaagacataatagctgaaggataccacaacatggatggtgggcattctagtcatggaaagctaggttcactgaatctgaatgcaattgacctaggaggaaacagtatccctaactggactggttacaatggcccatcagcttcgtacattcaacctagcccatatacttgtgatgaacctgcatcaccagagttcattagtgctcaggccccagctacacctggtttaatggaagagacagttccttctagagtccatgaaagtcctgttctaagtccacagagaaaaccatcaccgtcaaccaatgatgaaactgcaaagactgacactcctgctgctccagcctcagattttcttcattcggctacaggaaatgccaatgatgttggtgctgaaaggacagaacttggattggcgaagcatgtgcaagttgagtcttctgctttctgggacgctgatgcatcgggacaacagcacacaagtgagggtttaccatcccagggtcaagctgatcacttagaacccgctgctgataaattggtcaattctgatggtatagccgcatctgttgaaactgtaactgtcaatgcaaccattaaagatgtacctttggctgtaaatgattcagagccatgtgttgatggttctactgaaccatctgtggtggagaacctggtacagattaatgggccattaattgatgcacaagattttcaacatgaagcccaagcaatgcaacaagtagtggcatctaatgatagactgaatgaactagcaacttcagaatttgctgagcctgagaaaatgctgtcagttccagattctgaattcaatcatccaattgacttggggctcataactgcggaaaagggaacaactgaatctgatggaagtaacataataggcagccttgctagcagaaaaagacatctggaagatagcttaccagctttagagagtgagaccactgaaaggttgtctagccgaccacatggtatacgaaccaacgattttgttccccatgatgatgatatactggcatctattttagtcggtagaaggacccctggattcacacttgattcaacaccactaccaccgagggaatcgtctctgaaacgccggaggttgggctcgaagatgggcacactcaagaggaaagtgcaaatagacgatgccatggtcctgcatgctgatactatacggcaacagttgatcaacactgaggatatacggcgcattcgtaaaaaagctccatgcactcgttccgaaatatggatgattgagaaaggttcactggaagatgatatattccacgagcccatcttttcctgcctatctgaggagctaaacaaattacacaatcggacatatgaggctattgtacatcctgctgtacagaacatggaactgcaaggtcaattagacatgcctgaagcaattacagaagatagcaatattgctgggtttggtgctgctactattgatggcccacttcacataccagatgggattcaatcagatgccatgctgccacgtgccaatgatgcatatggcgctacagctgcttttagtttgcaagttcctcctaacaaccaggttaacggtgcatctaatgattttgttattggcactctgtttcaaggggtgactggaccttttattggtaatgagaaagaagtggcacttgctgacagagagcgtgctcaagtaaatacactgtatagtgaccattttcaagatgtcccatctgatttgcatagtactgatgcaaacatttctagtcaagatgtgactctagataactctggccaagcttgcgctcacgcaacggacggcatgacaagggagcttactcattttgttcatagtaatgctaatattttcgagagtaatgaggtccctgcttctgagattactggggtggaatataatcaaggtgcctctggtttccctcaatcaacggaggatgaaaatgcggtggggtataatcaagatgtctctggttttcctcgaccaacggaggatgaaaatgcggtagattataatcaagatgcctctggtttttctcgaccaacagaagatgttcaagatgcctctggttttcctcgaccaacggaggatgaaaatatggtagattataatcaagatgcctctggttttcctcgaccaacagaagatgtaaatgcggtgggatataatcaagatgcctctggttttgctcgaccaacggaagatgtaaatgcggtgggatgtaatcaagatgcctctggttttcctcgatcaatgaaggatgaaaatgcggtggaatataatcaagatggctctggttttcctcgaccagctgaaaatgaaaatgatgtgtctgctatgggagataattctggcttccatgaaaacaacatgggttctcttacggatctggatatggtgaatgactatgaactgaaggaaagcaatgattttgggagtgcaattaatggtgttgatacagattttctgaactacgacgatgatgacggcggggacttcgacgacgccaacgacgatgagccaaatcccaacgagtttcagtctctcgacaacagtggttggtcttctcgcaccaggggcgttgcaagatacctcaaggctttattcgacgacgagtctggtctggagaggaagagcgttgctatcgaccatctggtgcgcgggaagacgcggaaggaagcgtcgagaatgttcttcgagaccttggtgctgacgacgaaggactacatcagcgtggaccaaccgaaccccttcgacttggtgagaataaagccaggctcaaagctgctgatgtcggaattctag

SEQ ID NO: 35825 - DNA, 345 bp, Zea mays
  Peptide Sequence Number=SeqID_77604
atggcgccgggcagaagtcggcaccgttgcgggcccactgcccaacacggctggtctgcaggcactgaccggcgccatggacaagctggaggccctcttgaggcccaaggagggtcaatccaatccgggctggttattaatctaagtagattcgggcttggacagtctaaaccagcctttggcgatcaatctgttcttatcatttttgttcttggaggtattaatactcttgaggggaaaagcaaaatgtgttctgccctcggaaaaggctctggttttgatcatttctggggagggttcgtgtctaagcttcagggtcgttgtgcgtgccgctgtctgctgtag

SEQ ID NO: 35826 - DNA, 120 bp, Zea mays
  Peptide Sequence Number=SeqID_77605
atggcgccggcagaagtcggcaccgttgcgggcccactgcccaacacggctggtctgcaggcactgaccggcgccatggacaagctggaggccctcttgaggcccaaggaggagttctaa

SEQ ID NO: 35827 - DNA, 3294 bp, Zea mays
  Peptide Sequence Number=SeqID_77606
atggtcgagacgaggcggagcgccgccgcgaagcgcccggcggcgggggaagaggataagggggcgccggcatcgcctgcatcggctcccgcggagaacgcgggggcgggtccgagggcgggtgacgatgtcgcgtcgtcgcagcccccgaagcgagccaaggttgggtgcacggaggcggacaccgagaagccgttggtggcgccggcagaagtcggcaccgttgcgggcccactgcccaacacggctggtctgcaggcgctgaccggcgccatggacaagctggaggccctcttgaggcccaaggagggtcagtccaatccggccgggcataagcggggcactaacgataaagatataacggcgaagataaagagagccatggatttatcggaggatttatcagcaaagataaagaaaaccaaggataatgtggctgggatattgaataagccacaggcggcagccaccagcaggcgtcaggagccctggtgcagactaatttcacaatataccatgcaccctaccctttctatttatggtgcgcttttcactatcggtcatggagcacatcatgatttcagactgggcgaatcatccactgcctcacctgtttgtagactgaagcaggctaagcgaggtgcactccttgaagtctttgaatccaaagttgtccgtgtcaatgggaaatctttggacaaggctgccaaggttaccttaaatggaggagatgaaattatcttccgttcaccaatatttgagcaacttcatcaggagaaatcaagcactccagcattatcctccacttgcagtagtatccagcaggggcagtgctcacatttcaaagatattcagggtcatttatcatctaaagggcacaaagtcccaaccatttactttggaagaggttcatcagcagatccactcctgcttaatttatgtaaaacgatggagggccagagccagcatagctccgaagataatatatcatctggtcggtttcagctaataaaggaggatttgataaatgcaacggttgacgcgagtgacatttttgagtcatttgatagttgcccatattatctaagtgatcataccaaatgtgccctcatgtcatcagcatatgtacatttacactgcaaagactacttgaagtttacaaaagatatatcttctcttagtcaacgagtgctgctatctggcccaacaggaactgacatctatcaagaatatctggtgaaggcacttgcaaagaattttggtgctagattgctcactgtagattcttccatgctgtttggtgggcaaacttccaaggagccggagacatacaaaaagggtgatagagtgaggtatattggttcggtacagtcgacaggcgttattcttgatggacagagccccccagattttggttcacagggtgaaatatttcttcctttcgaagaaaatagatcatcgaaggttggtgtaaggtttgataaaaaaattctgggaggaaacgatcttggaggcaattgcgaagttgaccatggtttgttttgtccagttgattctttatgcctcgacattccaggatgggaggttacatccaaacatccattagatgtgatatttgagtttatctctgaagaaattcggcatggcccttttatcctttttctgaaggacacggagaaaatttgtggcaataatgattactatcatggtctgaaaagcaagctaaaacatttcccagctggtgcttttataattggatctcaaatccagcctgccaatcgcaaagagaaggcaaagggtagttctccttttctttcgaagttcccatacagccaaactatacttgacctcgcattacaggacattgatgcgataaatggtaataataaagaaacttcaaaggcagcgaagcatttaatcaaacttttcccaaataaagtgatactcgaggcaccacaagatgaaatggagctttcacggtggaaccagatgttaaaccgagatattgaagtccttaaaggaaatgcaaacatttcaaaaatgcgttcttttctaacaagggttggtttggaatgcactgatcttgaggcgatattggtcaaggatcgcgttcttacaaatgagtgtattgataaaataattggttttgctttgagccatcaacttaagaactgtacaaatccagacccccctttgagtaatgtgcagtttgttctatccagcgaaagccttaagcatggtattgacatgttggaaagtatccagtctggctcgaagagcagcactaaaaggaaatcactgaaggatattgctacggaaaatgagtttgaaaagaggcttcttgcagatgttatccctccacatgaaatcggtgttacctttgaggacattggagctttagaaagtgtcaaagatactctgaaggagttagtgatgcttcctttgcaaagacctgaactttttaaccgaggacaacttatgaagccgtgtaaaggaattttactttttggcccacctggtactggaaagacaatgcttgctaaggctgtggcaactgaggctggtgctaatttcataaacatatcgatgtcaagcatctcttcaaagtggcttggtgaaggagaaaaattcgtgaaagctgttttttcactggcaagtaaaattgctccaagtgtaatttttgtggacgaggttgatggcatgctgggaaggcgggagaaccctggagaacatgaagccatgcgtaagatgaaaaatgagtttatggtgaactgggatggtctgagaacaaaggagaaagaacgtgtattagtacttgctgcaactaacaggccatttgatcttgatgaggctgttattaggcggcttccaaggaggttgatggtgaatttgccagatgcatcaaataggagaaagattcttagtgtaatactagccaaggaagatttggcagacgatgttgatctagaagctatagctaacttgacagaagggtactcgggtagtgatctcaagaatctttgtgttactgctgctcatcgtcctattagggagattcttgaaaaggagaagaaggagagagcttcagcagaaacagaaaataggccattgcctctgtcgcacactagcaatgatgtccgtgcattaagaataagtgatttcatacatgcgcatgaacaggtgtgtgcaagtgtttcctcagattccagtaacatgaacgagcttgtgcaatggaatgatctctatggagaaggcgggtcaaggaaaaagacaacgctaagctacttcatgtag

SEQ ID NO: 35828 - DNA, 792 bp, Zea mays
  Peptide Sequence Number=SeqID_77607
atggccgatctcatgtatcataaactcggcccctggaacacacggctcacagctccagctccacgattttctggagcacctaatgacttggtccacgaacaccaccaaattttctggagatggagctatcccaaacagagccttaggagcagcgctcgcaccaggcagctctgcttaggtgcaaagcaaacagcccctaatgtacttgtagactgccagttttggatgctactaaagttatcatcatgctatgccgtctgtgaggtacacatgtgtaacaagcttgctagtcggcatgtgagagttggacttgcagaccctaataaacttgtccggtgtgatatatgtgaaaattcacccgctttcttctactgtgagatagacggcacctcactttgcctgagctgtgatatgactgttcatgttggtggcaagcgaacccatggaagatacctgctcctaaggcaaagggttgaatttccaggagataaaccgggccatatggatgacgtgcctatggaaatccaagatcctgaaaaccagagagaccagaaaaagccacccaaggagcaaacggcaaaccaccataacggcgatgatccggccactgatggcaactgtgatgaccagggtaacattgattcaaaaatgatcgatcttaatatgcgcccggttcgtactcatgggcaagaatcaaattcccagactcagggggtaggtcttagtgtgaacaaccatgactctccaggggtggtgccaacaagcaattccgaaagagacaccagcaagtaa

SEQ ID NO: 35829 - DNA, 1116 bp, Zea mays
  Peptide Sequence Number=SeqID_77608
atggccgatctcatgtatcataaactcggcccctggaacacacggctcacagctccagctccacgattttctggagcacctaatgacttggtccacgaacaccaccaaattttctggagatggagctatcccaaacagagccttaggagcagcgctcgcaccaggcagctctgcttaggtgcaaagcaaacagcccctaatgtacttgtagactgccagttttggatgctactaaagttatcatcatgctatgccgtctgtgaggtacacatgtgtaacaagcttgctagtcggcatgtgagagttggacttgcagaccctaataaacttgtccggtgtgatatatgtgaaaattcacccgctttcttctactgtgagatagacggcacctcactttgcctgagctgtgatatgactgttcatgttggtggcaagcgaacccatggaagatacctgctcctaaggcaaagggttgaatttccaggagataaaccgggccatatggatgacgtgcctatggaaatccaagatcctgaaaaccagagagaccagaaaaagccacccaaggagcaaacggcaaaccaccataacggcgatgatccggccactgatggcaactgtgatgaccagggtaacattgattcaaaaatgatcgatcttaatatgcgcccggttcgtactcatgggcaagaatcaaattcccagactcagggggtaggtcttagtgtgaacaaccatgactctccaggggtggtgccaacaagcaattccgaaagagacaccagcaagaattccggtaatctgtcgggtgtcccggtgatactaaatgatccactttatttgttcactagctggatgcccaacaacccaagagtcgtcgacgttggcgacaaccatgaggccctcttgcttaacgatggacagcacggtgcagctgctctggaccgcgtccaagcggtggcttcgcgggagcttgtcgtacacagcggcgcatgcgaccacgtaagactgcttttagaggtcgaactgacagtcgccaagcttcttctcgtcatcgatgagcgacgacaacgcgaatgcctcctgctcatggagtttgttcggggtttgaagtag

SEQ ID NO: 35830 - DNA, 1056 bp, Zea mays
  Peptide Sequence Number=SeqID_77609
atggacagcggtgcagctgctctggaccgcgtccaagcgacggcttcgcgggagcttgtcgtacacagcagcgcatgcgaccacgtaagactgcttttagaggtcgaactgacagtcgccaagcttcttctcgtcatcgatgagcgacgacaacgcgagtgcctcctgctcatggagtttgttcgggtgttaatcaacaattatggtgaagcagatgatgcttttcaagaaaatgatcaaagcatttgtggccagaaggatgaagaacctgtcaagggctttaagactccatataggctgtgccctcctggggtgagaccaacactagctgatgaggagctgacatacttgcgcaagcttgcacgccttttgccaacacattttgcccttggtgaaggcaaggattttcttcctggtggagttgctcaaactgtcattcaacgagaagctcaggtacatgatgaacaggtgaaggaagaggaagcccgactgaaagcagttgactcacttcagatggttggtgaattatctgaagaaagttctttaggaactttcagggagtaccagggtttccatgctaagtttgtgcatgaaaatactgaaaactctaacaccatgattgaactagaggctgagaagtatagattggaaaaggaactgaaagaccatgagtggaagctttccgttctcaacaagaagattgaaagatctaaccaggcactggcaaagcttcacagttcttggagcccttcagagcagtctgctgatagagaacacttgacagaagaggaaaaaataatgttccgccggattggccgcaaaatggatgggcttgttctcctaggaaggcgtggtatctttgatggtgtaattgaagagattcatcagcactggaaacataaagaggttgtgaaagtaattacaaaacagaatcaaactcgacagatcatgtacgccgcgagtctgctcgaggttgagacagaggtatgtgacaaggcaaatcaggtatcgaaccccatgatcatgaagagtttggatagcatggttagtaaatga

SEQ ID NO: 35831 - DNA, 705 bp, Zea mays
  Peptide Sequence Number=SeqID_77610
atgggggatatccgccgtctttccgcctcgtcgttggaggaacgcaactccgtgggagttggtacctttcagccatcgttcggcttcaaggattttcatcagccagcccggctgtaccccccgccggcggtcacccaagacggccgggctgagccggagctctacctcccgcgcgggttcgtgggtcaccctctcctgcggcgttcgagggagagggcgctcgctggccctgcgggtgggtcggacttcaacaacgcggggccggtcgacggcaggcgtcgtcagccccagcgcgtcgggctcgtcgggttggcccccggtgccccctcctgctggaaggtggctgccgcgccgtgtgcacgggaggaccgcccaagatgtcgcgcgctgctagggcggcgttcgtgttctggggcggttctgcctttgcactggtacggtgcctccgcggggaggtcggtgccctgctcgtccgggaggatccgagtggggatccgccggcgggctgacggcccctgtcgtcggtgccgaggcggaggcggctcgagaagtccccgtcgccgacgggatcaccgccaccatctgcgcttcgggcctccagatctttgtacttgtcctcgcccctcgagcgtcggcgttggcgagggcaaggttgcagcagcgttcgcccggaggccatcgccgctgcagtttggccacccgtag

SEQ ID NO: 35832 - DNA, 354 bp, Zea mays
  Peptide Sequence Number=SeqID_77611
atggctgaaaggtaccaactcccacggagttgcgtccctccaacgatgaggcgaaaagacggcgggtatcccccatccgggggcttggaaggtggaaagacacgatgcataagggagcgcgaagacatggtaccgggaaagggggataccccgaaaaggatccttccccgtgaaggaaccaggctccgagcctccctactgatcagaggttcgaaggctggccccccgaagggttcgacagccgcctcagatcgcgtgggccctacacccactactagtcagaggttcgaaggccggccccccgaagggttccacggccgcctcaggctactcgggctccgcgcccattactga

SEQ ID NO: 35833 - DNA, 1054 bp, Zea mays
  Peptide Sequence Number=SeqID_77612
atggctgaaaggaaccaactcccacggagttgcgtccctccaacgacgaggcaaaaagacggcggaccaacgggcgaaagaggcaggcagccatgcaggcggcatgcaaccacgccaagtggacgcgcttctccgactcccgacacgccagcatggaggcccaggcccacgcgtcgcgcaaccggcgcgccggatgctgcacgaaagcaactgcaccgccacttgcgccaccaccgcgcctcctcgattgcggaaccaataccgcgactcgaggcgacccagcgcgcgacccagcagcgccagcctgacgcggcggtcaacgcggccaaaagtgggccggtagtaatgacggtggcaggcgcgcgggagcagcggtcacgtcgtcagccaagctcacgtcccatccgggggcagcaagagaaccccctctcacggcgtgaagacaacgcgcccgtgatccgttcctcgaacggctcgcgcacgcgcaacggccgccccgccaactactcgccccatcgcattaactccgcggctggacaggcggcgcttctggcaggagcagcgggcgacgcttcgccttcaccgaaacaaccgcgccaaaaaaggctccgagcctccttactgatcaggggttcgaaggctggccccccgaagggttcaacagccgcctcagatcgtgtgggccctacacccactactggtcagaggggttcgaaggctggcccccgaagggttcacagccgcctcagacgccgagcgagggatgaccagggggaggcatcgagccctcggaccccgtcaccaggggaccgggtccggcagatcacccgcagctcaccggagacaccatgttcggcgcccatcgagggtaacatggcgctctcccccctcctccttgcggaaaggcgacgcaggggcatatgtaaaaaagccgagtctgtccctgatcgccctcttgccctatgcagaggctcaggggctgctctcgcaaacccggctccggccaaaccgttgacagcgtcaacataccagcccgagaacttgggccccgacc

SEQ ID NO: 35834 - DNA, 318 bp, Zea mays
  Peptide Sequence Number=SeqID_77613
atggacgagtctggtgtggtatggcaattagtgttttgttttcaaaaaaagaaaaaaggagatcgggagactaagttcttaggtcataccgtctctcaggaagggatagcagttgatcctgataaagtgcaagtggtgatggattggaagcctcctaccactatccgcgatcgctgttttattccagacttttgcagaattgcaaagccaatgaccgagctgttgaagaagggagtcaagtttgagtggagtcagaagtgcaaagatgcatttcactccttaatgcaacatctgaccaccgcaccagtactagcataa

SEQ ID NO: 35835 - DNA, 528 bp, Zea mays
  Peptide Sequence Number=SeqID_77614
atggcaaggctcggacacgcggcacaagaccgtgcgacggtggttcaccggcgagcttatctgcgcaagccacaaggcacatggggtacggcgctactggacttcccgtccaccatagctcacggctcaaccgtcggaccttttaaaaaccacttttctcaaaagcacctcttttttcgaaaacaaaacactatttgccataccacaccagactcgtccattcctgtggacacagactattcgaataggttttcaaactctgcgcagaggtgtacactttacccactagtccggctctgcgatcttactgccatgagatccgacaccgaatctctttctttcctcgcacgtcctaaccttaatggttataccggaaggagtcaggccaccgccatgtccaaaccggacaaaacattccctctccttatcttcccggtgctccccagccttcataaccctggggttggaccgtacgagttcagattgagtgactgcccacacagtcttgagtggttgtacttatcatga

SEQ ID NO: 35836 - DNA, 249 bp, Zea mays
  Peptide Sequence Number=SeqID_77615
atgaaggctggggaacaccaggaggataaggagggtgaatgttttgtccggtttggacatggctgtggcctgactccttccggtataaccgttaaggttaggacgtgcgaggaaagaaagagatttggtgtcggatctcatgaaaaaggagatcgggtaagagttacgcatgttcccaaccttgtctgtggctgttggatcgctgatttgcttcgctgtgtatatcgggctgcttcagccccactctga

SEQ ID NO: 35837 - DNA, 369 bp, Zea mays
  Peptide Sequence Number=SeqID_77616
atgtgggcagtcactcaatctgaactcgtacggtccaaccccagggttatgaaggctggggagcaccgggaggataaggagggggaatgttttgtccggtttgggcatggcggtggcctgactccttccggtataaccgttaaggttaggacgtgcgaggaaagaaagagatttggcattcggttctcacaatgcctcctaggactagtaattgtatcacatttgagtcccaaaggattggggcgcttcacagttccctcagtagcaacagcagcagtaccgttagaacaaccaatcaggtggaaaccagtaccagagacagaacaactagacacctcgtcttcctgccccagcaaccaatcagagtaa

SEQ ID NO: 35838 - DNA, 324 bp, Zea mays
  Peptide Sequence Number=SeqID_77617
atgtcatcccttaagcctgttattggtgcgttcgtgctatctcgtggaggccagatcaacaagtctatgccaggcagtggagctcgagctccccttcccccttcgccggataagcacgtcactcaatctgaactcgtacggtccaaccccagggttatgaaggctgaggagcaccgggaggataaggagggggaatgttttgtccggtttggacatggtggtggcctgactccttatggtataaccgttaaggttaggacgtgcggggaaagaaagagattcggatttggattcattgatcgtgagatcgcagagccggactag

SEQ ID NO: 35839 - DNA, 654 bp, Zea mays
  Peptide Sequence Number=SeqID_77618
atgacgacgaacaaagagcttcgcgacggcgccaagattggaggcagaaaagacggccaggacggagcacagatcggcgccacagaaacgaaaaccgggcgcagggacgcgcaccatttctctgggcgcgacggtggcctgggccaaaaccgtccatggccaggaggcatgcacagccaccatggccggccaagcgagcagaaaaccgcggcgccggaggagcaaggcgagcagggagatccgggctggggaaaaatggaggctgggccgactctgcaggggcaaacacgccgaacagagggccaagccgagctggggcagacagccatgggaggtcaggggcgagcgccagggaaaagaaccagggagcttggaccaggaagtggcgctggtcataaatggaggggatccagtgagggggcgcctgggcagagggagttaacgcacgcgcaggcgagccaggaagcaggcgcgccagagctgggaccaggggctacggcgacgagcgagcagagcatatgggtgcgcgccatagaaacaagcaggggaagcagagaagggagcgggcgccgcagggaaggagctggggactggcacacggctggaagaggctccagccatggggaaaacaaggggccggggaggaagctgtag

SEQ ID NO: 35840 - DNA, 654 bp, Zea mays
  Peptide Sequence Number=SeqID_77619
atgacgacgaacaaagagcttcgcgacggcgccaagattggaggcagaaaagacggccaggacggagcacagatcgacgccacagaaacgaaaaccgggcgcagggacgcgcaccatttctctgggcgcgacggtggcctgggccaaaaccgtccatggccaggaggcatgcacagccaccatggccggccaagcgagcagaaaaccgcggcgccggaggagcaaggcgagcagggagatccgggctggggaaaaatggaggctgggccgactctgcaggggcaaacacgccgaacagagggccaagccgagctggggcagacaaccatgggaggtcaggggcgagcgccagggaaaagaaccagggagcttggaccaggaagtggcgctggtcataaatggaggggatccagtgagggggcgcctgggcagagggagttaacgcacgcgcaggcgagccaggaagcaggcgcgccagagctgggaccaggggctacggcgacgagcgagcagagcatatgggtgcgcgccatagaaacaagcaggggaagcagagaagggagcgggcgccgcagggaaggagctggggactggcacacggctggaagaggctccagccatggggaaaacaaggggccggggaggaagctgtag

SEQ ID NO: 35841 - DNA, 903 bp, Zea mays
  Peptide Sequence Number=SeqID_77620
atggcggacaacctccacggcgagctgagcgacggcacaggggcgagcagagaaatagaagccgagctgaggatccactccaaccagggaacggcggccatggcagggaccaggggctacggcgacgagcgagcagaggatatgggtgcgcgccataggaacaagcaggggaagcagagaagggagcgggcgccgcagggaaggagctggggactggcacacggctggaagaggctccggccatggggaaaacaaggggccggggaggaagctgtaggggaacttgcagaagatccaccaccgggagctcagctgccatggtcaggggagccctggccgggcgctcaagaagcgaggcgcgcgcgcacggagccggagggcagggagggagacgcgctggagaagatgggagggcgccaagctagggaggagaaggccacggcgctttccggcgaggtcgcgaccaggcatggagttctatggcgcggagctcggccaggcgtgaacacaggccggccatgggtattggagcaaaggagatgggagccagagcatttgaagcagacgcccaaggtggaagataaggctgaagctctggtggacgcaggggagatggacaccgcggccggagaagataagacgcgcgcgagcagaaaaaaatcacggcagacaaatctacagcgagcaacgaggatagagattggctgtgggatattttccctggtgaaaagtccaagcacgttgaggatcagaccaagggaaggcgctgggaaaaatgcagctggtggagaccgtggcgaggagaagccagcacgagctacaccaggacggcaggacgcacgacaaaagaaaatattagagagagagcgatggaaggatgaggctgaaaaaaaatcaagctga

SEQ ID NO: 35842 - DNA, 753 bp, Zea mays
  Peptide Sequence Number=SeqID_77621
atggcttttgaaaaatacaatgaaaaatcattggtagcactgcacattaagggtgtgtttggttcgatggagtcgctcgtgatgccatgccatacggctttacgctgggaaagaaagatcaatgcagcaacagacggcgatgccgacgccgacgccgacgccgatggggtggtcagagcagtcgctggcggccgagacggcggcgatcgtgtccgctctcacgcacgtcgtcgccagcggccgcgggccgccgcgccaggcgccggcgctagtcatgccgtggcaccgcgcggacggcaacgccgtccagcacaggcaggtggctggggtggcggcgcagggcacgacgccggcgccggcgcccgcagcggcggggcccgcgcgggaagtaccggcgggcgtcagggcggcgccccgtggggggaagtggggcggcggagatccggggaccccgcagaaggcgggcgcggggtggtggctggggcacctttccccaccgcagaggacgccgcgcgcgcctacgacgccgccgcgctccgcttccgcggcggccgcgccaagctcaacttccccgaggacgccgccgcgcgccgcgccagggacgccgaggcggcctccgccgcggccagggcgggggccgcccgccgcgctgctcgactcgcaggccgtcggcgacgacatggccgattacctcgactattcgaggattctcgaagccaccgagcccagcggcatcgtggacgggctctttag

SEQ ID NO: 35843 - DNA, 608 bp, Zea mays
  Peptide Sequence Number=SeqID_77622
atgaccacatcctccccctcacctgcacgtaaaaacggatccacccgcgagacggaggcggtgaaggcggagatggtagatccgggacccgcagaaggcggcgcgggtgtggctgggcaccttccccaccgtcgaggacgtcgcgcgctcctacgacgccgccgcgccaagctcaactcccccgaggacgccaccgcgcaccgcgccagggacaccgaggcgggccttcgccgcggccagggcggggccgcccgccgcgctgctcgactcgcagccaccgagcccagcggcatcgtggacgggctctttagtggccacgggaacagacgcttcctcggctccgggtttgaaatgggctcggcggcggccggcgcggatgaggggtggtggggaagggcgagggcgggggcgacggaacacatccacgctcaccggcggtgggcggcgccgctgctggtatcggtcctgctctcgtcgctcctcatctccgcgtcgctctccttctcctcctcccgcgcgctgctcatctccttctcgccgctcccctccgcagcctccgccgagcccctcttcgttgaggccccgcgcggggcgccgtgcctaggatg

SEQ ID NO: 35844 - DNA, 732 bp, Zea mays
  Peptide Sequence Number=SeqID_77623
atggacggctccaggggtgccgcgtggccagaaaagatgatatatcccaagatgcaatcagttggaccggacctctacgaggaagcaccatacccctgcggcgtccaggccatcctgcaggcggcgggcctgtccagtccattgccaaacagtacgcccgtgctgcaagggcagactgcccccgccctacccaaagcctaccgcacgccagccccacgcgaaacctccgcacgcccgcatgtcccccgcatccgccgcggatctcaccccccccccccccccgcggatctcacgctagcccacaaccacgtgccctcccacgcgcgatggaatgcccctcccaccacaaccgtgcagcaccgtcccccgcaccatcctaggcacggcgccccgcgcggggcctcaacgaagaggggctcggcggaggctgcggaggggagcggcgagaaggagatgagcagcgcgcgggaggaggagaaggagagcgacgcggagatgaggagcgacgagagcaggaccgataccagcagcggcgccgccccaccgccggtgagcgtggatgtgttccgtcgcccccgccctcgcccttccccaccacccctcatccgcgccggccgccgccgagcccatttcaaacccggagccgaggaagcgtctgttcccgtggccactaaagagcccgtccacgatgccgctgggctcggtggcttcgagaatcctcgaatagtcaag

SEQ ID NO: 35845 - DNA, 903 bp, Zea mays
  Peptide Sequence Number=SeqID_77624
atgggactaaaagagcaagagagcgaagcggaggtgggcgtcgacgaatgcgttacagatcagaagattttatgggaagcggagcggatacggtgcccggggctgcagtcggtgcggagcggaaaattagctgacgcccaacttccagcccacgagccgtgcatgattgcattggttcggctcgccggaagagcagcttcgcggagcagggtcggcatagcggcggcggcggcaccccctcctgtcggcttgtccgtgcagcgccggagggcgttccagggcgtgagaatggagacggggggaagcaagggcggccgtggcgctctggtggtcctggaaggcctggaccggagcgggaaaacttcgcagtgtgcccggctgctgtccttcctcaaaggcaaaggctacaatgccgaaggatggaggttccccgatagggccaccagtgtggggcagatgatctcttcctacctcgcgaacgattcgcagcttgatgacaggacgattcatctgctcttcagcgccaaccgctgggagaaaagagctttgatggagagcaagctacttagtggaactactctcattgtagaccgctactcctattcgggagtggccttttcagctgctaagggccttgacattgagtggtgcaaggctccagaaaatggacttattgctccagaccttgtaatatatcttgatgtacagccagagaaagcggctgaaagaggaggctatgggggtgagcgatatgaaaagatagagttccaaaagaaagttgcagagcattaccattcactccgtgattcgacatggaaggaagcataccagtctgtctctcaaccaaggcctcgctcgtttgtcccagattcgtccgggaattataccaccctcctgctctaa

SEQ ID NO: 35846 - DNA, 414 bp, Zea mays
  Peptide Sequence Number=SeqID_77625
atggctattcgcgtgctgaaatctgcactcaacgcggcagaggatggccatgcaggccttcaggagcttggcgggaatgccacacatatattctacggcacggaggaggcaaaggaagggaagaacgcagctttgatggagagcaagctacttagtggaactactctcattgtagaccgctactcctattcgggagtggccttttcagctgctaagggccttgacattgagtggtgcaaggctccagaaaatggacttattgctccagaccttgtaatatatcttgatgtacagccagagaccggggggtccctgggccgacgagtgaaatgtcgccgcgtgccccagcctagatgggtctgcgcgaggccgagcgcgaagggggggaagaaaggcagccggagacgggcgtga

SEQ ID NO: 35847 - DNA, 1347 bp, Zea mays
  Peptide Sequence Number=SeqID_77626
atggagagcaagctacttagtggaactactctcattgtagaccgctactcctattcgggagtggccttttcagctgctaagggccttgacattgagtggtgcaaggctccagaaaatggacttattgctccagaccttgtaatatatcttgatgtacagccagagaaagcggctgaaagaggaggctatgggggtgagcgatatgaaaagatagagttccaaaagaaagttgcagagcattaccattcactctgtgattcgacatggaagctggcgacacggtcagatgcatttttggcttcaacattgcaagataatggtgaaggttgtcgcttcgacatgctcaaaagccttgatgattgcatccatgtgctaagttgtgggtacgagaataagacacaatgggggaaagagactgcccccgccctacctaaagcctaccgcacgccagccccgcgcgaaacctccgcacgcccgcatgtcccccgcatccgccgcggatctcgcccccccgcggatctcgcgctagcccacaaccgcgtcccctcccacgcgcgatggaatgcccctcccaccacaaccgcgcagcaccatcctgggcacggcgccccgcgcggggcctcgacgaagaggggctcggcggaggctgcggaggggagcggcgagaaggagatgagcagcgcgggggaggaggagaaggagagcgacgcggagatgaggagcgacgagagcaggaccgatagcagcggcgccgcccaccgtcgacccccgcgggaggcgaggtccttctgccctttccccacccgccctcgatttgcgctgctgttcgcggttgctgcctgcctgtctacagatgaggctttaggtagggcgggcgccaagactggaaacccctcggtatactctgaccacttgtgggctagcgcgttcctcgtgtttggtttcaagtctgagccgcccgccgtccagcttaaggcggtcgacatgatcctcttcatcaagaatacgacgctgcccctcgcggtcgaccccttcatgtcgttctcgcggtgcggcttggctctggagctgctcaaggtgtgcacgaacgtcctggaggaggtggagaagtcctacacgtcgcggatgcaggactggagccgcgggtcattgtgctggaggaagaagctgcagccgaaccaccgcgtcgacgagctcgtctggcaggaggtgacgctgcccaaggcgacgctgctggagacgagcgcgaagctgctgctccacggcgggttgttcgacacgggcgaggagctgtgcaggacctgcatcagcatccggactgtcatgctcggccacggccacgcctag

SEQ ID NO: 35848 - DNA, 165 bp, Zea mays
  Peptide Sequence Number=SeqID_77627
atgtcgcgtctactcgactgcagaaccagtgccgcgactcgaggcaaccctgcacgtgacccaacagtgtcaattgagtgcaacgatcacggggaccgggaaaggggatatttggaagaaggatccttcccagcgaaggaaacgggccctgagccctcctactga

SEQ ID NO: 35849 - DNA, 675 bp, Zea mays
  Peptide Sequence Number=SeqID_77628
atgagggatcgggaaaggggatatttcgaaaggatccttctcagcgaaggaaacgggccccgagccctcctactgatcaggggttcgaaggttgcgccttacggggttcgacgatcgccccaaagcactcgggctccgagccctttactgatcaggggttcgaaggctggcccctcgaagggattcgatagccgccccagagcatgcagagtcagggatgaccctgggtacgtccgttatatggccaaggctcgggctacgctcctgaggtaccctaagacatttctgagaccagcgggaacggtacttttggagcgcgcctctgggccactagccgacccttatcgaacagggcttgggcgttcgctcggattacccaatagcaactcactagaaacaccatgctcggcgcccaccgagggtaacatggcgtgttccccctcctccttgcggaaaggcgacgaaggggcgtacaataaaaagccgagacagtcctcgatcgtcctctcgctccgtgcagaggctcggaggatgctctcgcaccaggctacggccaaattgttgaccacatcgacaaaacagcttgaaaactcggagcttgtccatgcacccgggctgcggccaggccgcatgagggaacaacaaggccgaccgaggaatcacaagaagaattaa

SEQ ID NO: 35850 - DNA, 393 bp, Zea mays
  Peptide Sequence Number=SeqID_77629
atggccaggccgcatgagggaacaacaaggccgaccgagggatcacaagaagaattaagacctcagaggagtcaaaccactcctctgaggcctcaggggctacacccgatggcctcaggcgtgacagggagctccgcctcgcccgatcccatgcctcagcttcagcctcggcctcgggagaaggtctccgccttgcccgatcccaggcctcagcctcggcctcggcctcgagagaaggtctccgcctcacccgaccccaggcctcggcctcgggaggagtcacgacctcacccgacctcagtctcggcctcaggagaagtcaccgcctcgctcgacctcggcctcggaccgaccacgctacaggggatacatcattaccctacctctagctag

SEQ ID NO: 35851 - DNA, 1008 bp, Zea mays
  Peptide Sequence Number=SeqID_77630
atggccggagtcaccgccaccgggatggccggagttcccgccaccttctcctcagccaccgctcagatcgggggcttcctctcgaagaagccttacgcgccgccgttgtgggccacgcacctctcccccatgccttgccataccttctcgctcggccatcgagacgatttatcaggcatgcagttgagtggaaacaaggtccggaagctggagttcttgatggcagatgccgtagcacaaggcgcagactgcgttattactgttggggttgaccatgttcagcttcttgtggataaggaccctggtttggttggcaatcttcttgtcgagagactagttggggcacacgttgatcttgtgtcaaaagaagaatatggaaaaattggtagtgtggctttagctgacctgctgaaaaaaaggcttctggaagaagggaggaagccgggatatattgaggcaataagggagattgagcagcaaattcagcaatcttctgatgttcagtttgatgatattgttgttgcatgtggcagtggtggaaccattgctggccttgctttaggatccagattgagcagcttaaatacaaaagttcatgcattctctgtttgtgatgaccctgaatacttctatgactatgtccaaggcctgattgatggacttaattctggtttcgattcacatgatatagttagcatggaaaatgctaaggggttaggctatgccatgaacacagctgaggagcttaagtttgtcaaagacatagctgcatcaacaggcattgtccttgatccagtctacagtgggaaggcggtttatggtttgctaaaagacatggctggcaatccagccaaatggaaaggtcgaaaagttctgtttatccacacaggtggtcttcttgggttgtatgataaggctgaccagttgtcatctttggctgggagctggcgcagaatggatcttgaagattctgttccacgcaaagatggcactggtaagatgttctga

SEQ ID NO: 35852 - DNA, 495 bp, Zea mays
  Peptide Sequence Number=SeqID_77631
atggaggggggaggcggggcagcggcggctcacgcggggtgggggagggggacgaacgtgggcgtgggcgtgtggacggttcatgcattctctgtttgtgatgaccctgaatacttctatgactatgtccaaggcctgattgatggacttaattctggtttggattcacgtgatatagttagcatcgaaaatgctaaggggttaggctatgccatgaacacagccgaggagcttaagtttgtcaaagacatagctgcatcaacaggcattgtccttgatccagtctacagtgggaaggcggtttatggattgctaaaagacatggctggcaatccagccaaatggaaaggtcgaaaagttctatttatccacacaggtggtcttcttgggttgtatgataaggctgaccagttgtcatctttggctgggagctggcgcagaatggatcttgaagattctgttccacgcaaagatggcactggtaagatgttctga

SEQ ID NO: 35853 - DNA, 489 bp, Zea mays
  Peptide Sequence Number=SeqID_77632
atgaagcgatcgagcggcacagcggggcggaacgccggctgctccttcaggaaccgccggagcccgaacgtcgtcggcgctcaacccgcacggcggcaaggaggaggagcggagcagtggccccggggcctgattgatggacttaattctggtttggattcacgtgatatagttagcatcgaaaatgctaaggggttaggctatgccatgaacacagccgaggagcttaagtttgtcaaagacatagctgcatcaacaggcattgtccttgatccagtctacagtgggaaggcggtttatggattgctaaaagacatggctggcaatccagccaaatggaaaggtcgaaaagttctatttatccacacaggtggtcttcttgggttgtatgataaggctgaccagttgtcatctttggttgggagctggcgtagaatggatcttgaagattctgttccacgcaaagatggcactggtaagatgttctga

SEQ ID NO: 35854 - DNA, 546 bp, Zea mays
  Peptide Sequence Number=SeqID_77633
atgtcatttgatataccaaaccaagaaaacgagcacctaattggaaatttagatgaaactacgaacatccagtgcccttcaccgttgcaaataaacaagttgttctgcaatagcttaaggctttcgtacctttcaaatcccaagagcctccctcactgtggcattgtttgccataatcaagatattgtatatagcattgtctacaaagaatgcttgagaacattgtattggttggagcagcaggtgcaggagtgctacgagctaggatgttgtgacttcgccgacagcgaggttgttgccctcaccgagaacatcggcaagccgctcgccgaggtgctcaaggagctcgggaagagggtcccagactcccttgtgaagacccgcgtcgaggatgatggcttcactatcaagtacattcttaggattacccggactagatttagctcttgtgattttgcattctactacaattttacttgttctactgcattgacaactcaagaagagggttccagagtcccttgtgaagacccacgtcgaggatga

SEQ ID NO: 35855 - DNA, 909 bp, Zea mays
  Peptide Sequence Number=SeqID_77634
atggcgggtgcagcggattttgcctccatcccgcttggccccctccgcgcacagccagccacatgcccgcgcatggcggatccgcctccccctccgccaacgagcatgcgccagcacccgatcctcgctcgctcagccatgccctcgctcggccccttccgcgcacgcgcaaaccaccgttcccccgcctgctccactgatccccatccccctcagatcctccctgcaaatcagatccccacgcccgcagcgcctcgcctcggctgctctacctctatcccgcgacccatgagatcggaatcgcggagccccgccgccctcctccaaaacggcaccgtctctactcggggtcacctttcctccctctcacttcctcttcttcattcaggggttcagcaagtcgctggccatgacggtgctctccgagatcagggacaagaccttcttcgccgtcgcgacgggtcgggtgcactcccgccaggtgttcggcggtatgccgctgcggcgtgcctctttgctcggctgttgggtgcgaccgtgggaggtggtaatgtggcatctctaaggtcgtacttgcatatcaatggcatctatttgcatgcacaggtgcaggagtgctacgagctaggatgctgcgacttcgccgacagcgaggttgttgccctcaccgagaacatcggcaagccgctcgccgaggtgctcaaggagctcgggaagagggtcccagactcccttgtgaagacccacgtcgaggatgatggcttcactatcaagtacattcttaggattacccggactagatttagctcttgtgattttgcattctactacaattttacttgttctactgcattgacagctcaagaagagggttccagactcccttgtgaagacccacgtcgaggatga

SEQ ID NO: 35856 - DNA, 909 bp, Zea mays
  Peptide Sequence Number=SeqID_77635
atggcgggtgcagcggattttgcctccatcccgcttggccccctccgcgcacagccagccgcatgcccgcgcatggcggatccgcctccccctccgccaacgagcatgcgccagcacccgatcctcgctcgctcagccatgccctcgctcggccccttccgcgcacgcgcaaaccaccgttcccccgcctgctccactgatccccatccccctcagatcctccctgcaaatcagatccccacgcccgcagcgcctcgcctcggctactctacctctatcccgcgacccgtgagatcggaatcgcggagccccgccgccctcctccaaaacggcaccgtctctactcggggtcacctttcctccctctcacttcctcttcttcattcaggggttcagcaagtcgctggccatgacggtgctctccgagatcagggacaagaccttcttcgccgtcgcgacgggtcgggtgcactcccgccaggtgttcggcggtatgccgctgcggcgtgcctctttgctcggctgttgggtgcgaccgtgggaggtggtaatgtggcatctctaaggtcgtacttgcatatcaatggcatctatttgcatgcacaggtgcaggagtgctacgagctaggatgctgcgacttcgccgacagcgaggttgttgccctcaccgagaacatcggcaagccgctcgccgaggtgcttaaggagctcgggaagagggtcccagactcccttgtgaagacccacgtcgaggatgatggcttcactatcaagtacattcttaggattacccggactagatttagctcttgtgattttgcattctactacaattttacttgttctactgcattgacagctcaagaagagggttccagactcccttgtgaagacccacgtcgaggatga

SEQ ID NO: 35857 - DNA, 360 bp, Zea mays
  Peptide Sequence Number=SeqID_77636
atggatggcgggtgcagcggattttgcctccatcccgcttggccccctccgcgcacagccagccgcatgcccgcgcatggcggatccgcctcccccttcgccaacgagcatgcgccagcacccgatcctcgctcgctcagccatgccctcgctcggccccctccgcgcacgcgcaaaccacgttcccccgcctgctccactgatccccatccccctcagatcctccctgcaaatcagatccccacgcccgcagcgcctcgcctcggctgctctacctcaatcccgcgacccgggttcagcaagtcgctggccatgacggtgctctccgagatcagggacaagaccttcttcgccgtcgcg

SEQ ID NO: 35858 - DNA, 468 bp, Zea mays
  Peptide Sequence Number=SeqID_77637
atggatggcgggtgcagcggattttgcctccatcccgcttggccccctccgcgcacagccagccgcatgcccgcgcatggcggatccgcctcccccttcgccaacgagcatgcgccagcacccgatcctcgctcgctcagccatgccctcgctcggccccctccgcgcacgcgcaaaccacgttcccccgcctgctccactgatccccatccccctcagatcctccctgcaaatcagatccccacgcccgcagcgcctcgcctcggctgctctacctcaatcccgcgacccgggttcagcaagtcgctggccatgacggtgctctccgagatcagggacaagaccttcttcgccgtcgcgacgggtcgggtgcactcccaccaggtgttcggcggtatgccgtcgcggcgtgcctctttgctcggctgttgggtgcgaccgtgggaggtggtaatgtggcatctctaa

SEQ ID NO: 35859 - DNA, 801 bp, Zea mays
  Peptide Sequence Number=SeqID_77638
atggcgggtgcagcggattttgcctccatcccgcttggccccctccgcgcacagccagccacatgcccgcgcatggcggatccgcctccccctccgccaacgagcatgcgccagcacccgatcctcgctcgctcagccatgccctcgctcggccccttccgcgcacgcgcaaaccaccgttcccccgcctgctccactgatccccatccccctcagatcctccctgcaaatcagatccccacgcccgcagcgcctcgcctcggctgctctacctctatcccgcgacccatgagatcggaatcgcggagccccgccgccctcctccaaaacggcaccgtctctactcggggtcacctttcctccctctcacttcctcttcttcattcaggggttcagcaagtcgctggccatgacggtgctctccgagatcagggacaagaccttcttcgccgtcgcgacgggtcgggtgcactcccgccaggtgttcggcggtatgccgctgcggcgtgcctctttgctcggctgttgggtgcgaccgtgggaggtggtaatgtggcatctctaaggtcgtacttgcatatcatgcccttcaccgttgcaaatgtgagactgatttatgtattttcccctgagggtgaaagttgcatgtctgagttccacttgggtccagtattaagcactcttaccatgcaggagaaaaaaatgacttaccctccaacttgtccatcaacataccatggtctccagtcattcacaatagagaaattaagggatctaatccaggattgtgtgccaatataa

SEQ ID NO: 35860 - DNA, 519 bp, Zea mays
  Peptide Sequence Number=SeqID_77639
atgcatcaaagggttccaagcaactcctatgaacctaatgcacatttcactagacttaaagatcactcttcggatgacaaagtcgacgatgaaccccatggagtaaacgacgacgttgttgtatccaccacatggagacgaatgacgacaacggcacaacggcacgagcagaaaggcttggccagggcagagtccgagcgggttgacggcgagccggaccgtgatagatcaaggctgaggctgagggagagtgaccgggccacaagcaagctgcgcgagctgagggcgtggccatggaagagcaggggatgggcgagctcggaccaaggcgacaacgcgatggagcttgctgggaagcccgtccaaggagcaacgttcggcgagctccggcgagaggagggaagcgacggcaaatacgtcgagcagggagtgctgggcgagttccacatcgaactagaggagaaagacagagggaggtcgagcgctgagagcaaaacgcccaggcgttgtgctggggaa

SEQ ID NO: 35861 - DNA, 447 bp, Zea mays
  Peptide Sequence Number=SeqID_77640
atgacgacaacggcacaacggcacgagcaaaaaggcttggccagggcagagtccgagcgggttgacggcgagccggaccgtgatagttcaaggctgaggctgagggagagtgaccgggccacaagcaagctgcgcgagctgagggcgtggccatggaagagcaggggatgggcgagctcggaccaaggcgacaacgcgatggagcttgctgggaagcccgtccaaggagcaacgttcggcgagctccggcgagaggagggaagcgacggcaaatacgtcgagcagggagtgctgggcgagttccacatcgaactagaggagaaagacagagggaggtcgagcgctgagagcaaaacgcccaggcgttgtgctggggaagtaagagggagaaggcacgacctgttgaacgcggaggaaaatatccaggggagagcggtggttggatga

SEQ ID NO: 35862 - DNA, 438 bp, Zea mays
  Peptide Sequence Number=SeqID_77641
atggagcttgctgggaagcccgtccatggagcaacgttcggcgagctccggcgagaggagggaagcgacggcaaatacgtcgagcagggagtgctgggcgagttccacatcgaactagaggagaaagacagagggaggtcgagcgctgagagcaaaacgcccaggcgttgtgctggggaagtggagtatctcttgtatattgtcacccttgctcaatctattggtgtggcgcaagatttcttattggttacgtctgctgaaatgcaggagtttgtccagttgttctcttacttgatccatgtattccctaaccaagtggatgattcatctgacatgaagaaacagatgaacaacctgaccaaatggatttctacccaaatgtatgaccttttgctagcaaatgtgaactctcaacccttggcttaccgagggtactga

SEQ ID NO: 35863 - DNA, 999 bp, Zea mays
  Peptide Sequence Number=SeqID_77642
atggggtgcggggcgtcgagccacaaggacgccggggcgcgccggagacggcctgggagcgtcggcgacgtggtcgttttcctcccgggcctccgggtgccgagggccgtcgacttcgcccaggcgctcggcggctgcctggccagggctatagtcgagcggctgtcggctctgaggtcgcgggtcgtcgagatggcaatgcaagaatcggcggcggcgctcaagcccaggcggaaggcggctgcacggcacgggtctagtacagccaatcttctacaggccctcgaagactacttgccagttctgctgggactagcacaacaaggtagcgtcttgagacacaaagtgcagttcacctggagtaaccaagaggataatgctgagctatatgtaaattcatcagcttttcaatctcaggagacagccatttcagatgtctggccaacaccctgcttctcccaaggtcatacggcgatggctacgccccaagagtttctgaagtgctcatgcgctgacaagaccacatacttccaatgtgctacagagagtagacgggccactgttgatgtcttcttgaaggcagctggatacctagactgcgcaattcgtcatggggttgacatgcagctcggcttggctattgatagtccaaaggccactttagcagtcaaaaggcgcttagcctgtgagatggtcaaatattggcaacaagttcaagagagcattccagagcttccagtctctgatggatggggaaaaaagcaccggctatttgtaaagtggaagagtccgaatgcattcggaacagcaaaatatctgtttgacaagatcccaagagatgcttccagcaaggtccgaatcaaacaggacctgtatactcaagaaaaggtcattggagcaccacccccattaccagattttgcattggcgctaacacctgaagattatgatcttcctccactagatccactttggaacaaagaagatacacaccattaa

SEQ ID NO: 35864 - DNA, 723 bp, Zea mays
  Peptide Sequence Number=SeqID_77643
atggcttcgtggttgttgctccccttctcctccttctcgtggcctgccccgcccccagccagctcctcctcttgtcacgacagcggcagtgatggtggcggagacaacggctattggaggccgaccgtcgtcacagccttcgtaggttcactgatgagctaccgttgtagtgtgtcacttgctgttggtgcatcaggtgccatttttggattgggggttgacatgcagctcggcttggctatttatagtccaaaggccactttagcagtcaaaaggcgcttagcctgtgagatggtcaaatattggcaacaagttcaagagagcattccaaagcttccagtctctgatggatggagaaaaaagcaccagctatttgtaaagtggaagtatgttgaagccaaggaagatatccggagcgtgccaaattctgtacatcacaacaatgagatagagtcagattctccacctcacgtctgtgagataaaaagtgtgaaaagcaaccaagaagggtaccaatcttcggatggtcgtgctttccccaagacaagatctgagcgaagcaatgaccaatgtgtatttgcaaagtcaaaatatgaggaaagcattgatcagtggtctgaaataccttcaaatgtggaatccttcagagaaggtaaaaggtacctcagtagcgaggagctgagtgacgttgagggcattgcgcctatttcaatgacatgttag

SEQ ID NO: 35865 - DNA, 1380 bp, Zea mays
  Peptide Sequence Number=SeqID_77644
atggatcagtggtctgaaataccttcagatgtggaatccttcagagaaggtaaaaggtgcctcagtagcgaggagctgagtgacgttgatagtgccaacgttgttgtcatggacaaatacatggattcactcctctctgaccggaggaaccttccctacgctagctcctcggtgcgccgggattcagtcagacaaaaacctgcttcgtccgccaattacagtcgccgacctccgcagccaactccacctgcatcgctgtcaaagaaggaatcgtgggatgtcattgaagattcggagttcgatatacttgacaatattttattgcagatcttgccacctatcattgcaaaaatctttgtatcattacccttctcacccttatttcattctagccacaatggaaacaatgtgctccacggagagctagaacaaactgggacgatgaacatgattataggattccaaagacaaattgatatggtatctcagcgcaaggagttaaaagatcacaggtggccagacctccaggatgacatgacacattttaggaaaaaaatggctgctatattactatcttcagacgtgaacaagagaaatgggtgtctgttatacaaatatgaaaaagaagttgacatgggaagcccctctgatgttcagatattagatagtcctacaaattctaagaagagaaaaatactctgtgcacctgatgatagcgaagtattgatggaagatgatgatggtcccattactcaagcggacttagaaaggtggtttgttcattattgggataaaggaactataaaggtattggctgatgagtgcaccaacgactttttaatgagtggtgtttccacaaaggatatgctcatgaccaaagctgatagatgttctatgcgattacatcatgacaatccaagacgatatgacattacaagaatggttggttttggcaaacttccaaagtaccacgaggaccgtacaacagaagagctagccaaaacactcgactgttggccatcaatgaactactatatcactggttgtagatatgctcttatgccatggaaattcaacgagtgctacgccctttttgtaattgaccatggtaaaaagcacatgacttttatcgactttacacccactcaagattggtgtaagcatatgccatacaagaggttaataccagctacctcgttctacaagctatggtcatgtggggaaatggtaggtgaatggaatttggaatttgttaggaatgcaaagattcttcgaaggaactttgtggttgatctattaagttacaaggacaattcatgccgttatgccatccctgcaaatatacaacagagacttatcaatatctctacaaaggaatag

SEQ ID NO: 35866 - DNA, 288 bp, Zea mays
  Peptide Sequence Number=SeqID_77645
atgcaggaatcccttgcaggaccgccatcgcagcaaaatcctcccgagggcctccctacactgaccactcccctactgcccttgcccctttcggaacatgagtgggtaaaaagaagtgatcaagggcacaacttgcctgggacttcagattccagtttaaataagctctggactgggcctcatttaaacaggaacatagggggctcggggggctctttaacaaaagtgcccgcgaaagggtatcgagggtgctcagccgtccgatcagagcctgatggcgaggattag

SEQ ID NO: 35867 - DNA, 561 bp, Zea mays
  Peptide Sequence Number=SeqID_77646
atgcgcctcatcctgtggtacctgttcttgacctgtggggggtgtgagacagcaagagtgagctcacatacgttcatcgctcaacaagttgtggggaataatgtgcatgaactcgccaaaggaccgccatcgcagcaaaatcctcccgagggcctccctacactgaccactcccctactgcccttgcccctttcggaacatgagtgggtaaaagaagtgatcaagggcacaacttgcctgggacttgagattccagttggctggactgggcgtcaattaccagaaagatcagggctcttggcgaaagatgtccaaggcacagggaacatggagagggatggcgggttggtttctactttctacaggggcttaagtgttaatttgacaggccgaagaggtatcttgcaatctcggccacacgatccaaaacggacgccgttgcctgctaaatcaacggatcacgccgatcaccttcctccgaccaaccgagacggcggcgccgccccgatccccacccagtcgagctccggtgaggtggaatcggtgctccccgggtgttaa

SEQ ID NO: 35868 - DNA, 231 bp, Zea mays
  Peptide Sequence Number=SeqID_77647
atgccccagcccgctgcttttgtctccgtgcagccgtccgatggtcaacccacgccgagcaacgtctcgaacaagaatatgaagcacggtggcgaggtgctgttcttggatggcaccggggaggtcgccgtcaccatcagtcgcaactcgcaacagcctctctccacagtccctgcacccggaggacaactggtccagcacgccgctcatccaagggcaactggactctag

SEQ ID NO: 35869 - DNA, 429 bp, Zea mays
  Peptide Sequence Number=SeqID_77648
atggacactgataacgagatccaagttctgcgtgatcaactggctgaaaaatcttcagattctctttgccttttgaaagagctagggattttagggcgtaccgggtgcagggactgtggagagaggctgttgcgagttgcgactgatggtgacggcgacctccccggcgccatccaagaacagcacctcgccaccgtgcttcatattcttgttcgagacgttgctcggcgtgggtttaccatcggacggctgcacggagacaaaagcagcgggctggggcatcctaagcgcctccagattttgaagttccttacaacgaatctgtctttggtgctgaattgggggggaacaggttggagttgcaacgggcgcaccttgaacttgacaacatccttgctcctcttgatcttcacggaaccaccgccgtga

SEQ ID NO: 35870 - DNA, 804 bp, Zea mays
  Peptide Sequence Number=SeqID_77649
atgggtttgttaatgggttcaaatggaaacccaacggtgggtatgggaaacccgttgggtacccgaaacccgcatgggtatgggtttgggcaaaattttatacctgtcatgggtatgggttttttagcgggcgtattttttcttcgtgggtatgagtttgggcaagtaatacccagcggtttttacccattgccatctctagacacattggtcctgaacgagtggccccacgaggggtgccgcgcgcgcgtcgaggccgagctctccgggatctgcgcggggatcctacgcctcctcgacgagcgcctcgtgccggcggcggcgaccgtggacgccagggtcttctacctcaagatgaagggggactaccaccgctacctcgctgagttcaagaccggcgccaagcgcaaggacgccgcggactccacgctcgccgcctaccaggctgcacaggacatcgccgtcaaggagctgccgcccacgcatcccttcaggctcggcctcgccctcaacttcttcgtcttctactacgagatcctcaactcgccagaccgtgcctgctcgctggtcaagcatgttccccttctcctggcattcgacgaagctatttcagagttggatggtcttggggaagagtcgtacaaggatagcaccctcatcatgcagcttcttcgtgacaacctcaccttgtggacttctgacatgcaggaggatggtggcgatgaaatgcgggaccagtacaagatcatttactacattcaatttgtactcatatactctacctttaaagtagagatgaagtga

SEQ ID NO: 35871 - DNA, 246 bp, Zea mays
  Peptide Sequence Number=SeqID_77650
atgtggtgtagtggtagagatggcaatgggtacccgctacccgaaacctggcgggtttttgctctattagggtatgggtttgggtcaatttctctacccatgggtttgttaatgggttcaaatagaaacccaacggtgggtatgggaaacccgttgggtacccgaaatccgcatgggtatgagtttgggcaaaattttatacccatcatggctaggcgccggctgtacgagggaatgagaatgtga

SEQ ID NO: 35872 - DNA, 375 bp, Zea mays
  Peptide Sequence Number=SeqID_77651
atgggtagagaaattgacccaaacccataccctaatagagcaaaaacccaccaggtttcgggtagcgggtacccattgccatctctagctctggcggcggaggtcatcggcggctcctgctccggccaaaccacggcgaggcttacccggtccacgtgctccggcggggttccgaactccggcgagcatgattgcgctattccggtggcgcgggtcctcggttcaagctcgtgcaagcttcacggcctccaaggggagctatccaagggcttggatcgagcggacgagggcgggaaagggttcggccacggtggttgccctcgggcggctctggcgagtcgcggggaggtcgccggagctatgggcgagctctag

SEQ ID NO: 35873 - DNA, 906 bp, Zea mays
  Peptide Sequence Number=SeqID_77652
atggacactgtaggtctccagccgccggagttgcagccatggctccctgtgtttggttttggccgtgcccctacaccctttcctcgcccggtgacggctgctgcgagcgccctctcccggctgctgctcttccccggcgcgttcctgctccagccatgccgcgccctctctctgctcgtcgcgccctggccgcatcgagctccacctcgggtcgtcgcctccgagctcgaccccaaactgctgtgcgtcctgtcctgtctcccagtcgaggtcccgccgtccacgctctgccttgtcgcccagctcggcctctgctctgtccctgctgctgcgcgtgcgctcatcggtgttccccaggtcgcccggccggagttttcctgcgcgcgccgtttttcccagctcggatttcgccagccgccgttgtcctatccgcgtcagcacgtgatcgtggtcgtgttcatcgagtttgccaacgctctgttgtctattcgaccgtcgtcgctgttgtgtgcctcgttgcgtgttcgtcgggtgtcgtttgttatacccagcactcgtgcttgcctctggctcgtgttaacgctcgcgcgcctgcttgttgtcactacggcgcactcgctcttcgtccatcgggcttcacgtgtgctcgcgtttgtcgtcgagctattgaacctgtcctcccttacttgtgatttcgtcgttgctagagctcgcgctaacctgctcgaccccacctcaccagctcgctccaaactcgatcttgtcgtcgttccgtacgtcattaagaaatcctatggatcgggcgaagacgaagctagcagcatgatattcaccaaatgctcgacaaaaagctcgaacaagtcttcgatcgtcatcctcgtctacgccaagatccgagaagattag

SEQ ID NO: 35874 - DNA, 471 bp, Zea mays
  Peptide Sequence Number=SeqID_77653
atggctgcaactccggcggctggagacctacagtgtccatggacgcgagcagggatccggcgaagtggaagacgagcagaggcgcggtccgagcgcatgggagctccaggacgtgcggcacacagaccagagagagaaagaagggcgcggcttgggaaagcaggaggcgcgccagggagcttcacagcgagcggacgccagggaaccgcagccatggaggtgggcgccggcagaggagcgcggcgcggagggagatggagcagggagggcactggcgcgtccacggcgaccatggaagagaagcgtgcgcagggagacgagggagggagaggagctcgaccagagagaggggcgccacgatggagggactcggccagcgctggggacgacggagcagaggacgcggccaggaagaagataggggagaggaacgtcgacgaatgggaagcaggggaattgcgcggagaataa

SEQ ID NO: 35875 - DNA, 654 bp, Zea mays
  Peptide Sequence Number=SeqID_77654
atggctggagcaggaacgcgccggggaagagcagcagccgggagagggcgctcgcagcagccgtcaccggcgaggaagggtgtaggggcacggccaaaaccaaacacagggagccatggctgcaactccggcggctggagacctacagtgtccatggacgcgagcagggatccggcgaagtggaagacgagcagaggcgcggtccgagcgcatgggagctccaggacgtgcggcacacagaccagagagagaaagaagggcgcggcttgggaaagcaggaggcgcgccagggagcttcacagcgagcggacgccagggaaccgcagccatggaggtgggcgccggcagaggagcgcggcgcggagggagatggagcagggagggcactggcgcgtccacggcgaccatggaagagaagcgtgcgcagggagacgagggagggagaggagctcgaccagagagaggggcgccacgatggagggactcggccagcgctggggacgacggagcagaggacgcggccaggaagaagataggggagaggaacgtcgacgaatgggaagcaggggaattgcgcggagaataagtcctgggcggctgaaaaatatggggagaagagcggcggggaaaaaaaatctgaagagaggcggctga

SEQ ID NO: 35876 - DNA, 567 bp, Zea mays
  Peptide Sequence Number=SeqID_77655
atgaccaagaatacaagagacacaagatttatcccgaggttcggtcacaccaccaaggtgccctacttcctcgttgaggcgcccacaaagagccgggtctctttcaaccctaatcctccctttgccgaccacaaagctcaaatgaagaagaacaagagagatttagagatgaagcacaaaaaccgcagctctcaagctcactcaaagattcctctccaaagatttgaaatgggagaggcaagagatgtgtgtgagggagagggaggtgtttcttgggttagaaatggagttcaaatcgtgctcactactttggggagagagttgaaccgcccaggggggcggttgaaccggttttggccactcctgaccagctggttggtcagctgggtggtcgactggggatcaagaggtgacaggggtgagagaccaggtgaactggccctcaggaccggttcaaccggacttgaccaaatagtttgcgagataaaaccccctctcaactgcccagaggcaagttcagctggtgtatggtcaaagaggttcacagctgaagttgagttcagctga

SEQ ID NO: 35877 - DNA, 381 bp, Zea mays
  Peptide Sequence Number=SeqID_77656
atgaccaagaatacaagagacacaagatttatcccgaggttcggtcacaccaccaaggtgccctacttcctcgttgaggcgcccacaaagagccgggtctctttcaaccctaatcctccctttgccgaccacaaagctcgaatgaagaagaacaagagagatttagagatgaagcacaaaaaccgcagctctcaagctcactcaaagattcctctccaaagatttgaaatgggagaggcaagagatgtgtgtgagggagagggaggtgtttcttgggttagaaatggagttcaaatcgtgctcactactttggggagagaggtcaggcagactgtctgccagtctgactgccagactgacctgcagactggtcaaggttga

SEQ ID NO: 35878 - DNA, 381 bp, Zea mays
  Peptide Sequence Number=SeqID_77657
atgaccaagaatacaagagacacaagatttatcccgaggttcggtcacaccaccaaggtgccctacttcctcgttgaggcgcccacaaagagccgggtctctttcaaccctaatcctccctttgccgaccacaaagctcaaatgaagaagaacaagagagatttagagatgaagcacaaaaaccgcagctctcaagctcactcaaagattcctctccaaagatttgaaatgggagaggcaagagatgtgtgtgagggagagggaggtgtttcttgggttagaaatggagttcaaatcgtgctcactactttggggagagaggtcaggcagactgtctgccagtctgactgccagactgacctgcagactggtcaaggttga

SEQ ID NO: 35879 - DNA, 339 bp, Zea mays
  Peptide Sequence Number=SeqID_77658
atggggagtagctctctccgggcagaatgggaatcacggcttgtgggtggttatgagatcgatgattctggttatgactatggtgctggtaagtggtattctttccgttggaaagggtacatcgggttaataacttgggttaatgctaaaacttggctttctactactagtccactacagccaaacaggatacttgctgagtatgttgatgtgtactcacccttgctctacacaccaaaccccccatccccaggttgtcagcattgcaaccactgctcaggcgaagatgaagctgtggaaggagacttccaggagttccaagactacgacgagttctag

SEQ ID NO: 35880 - DNA, 288 bp, Zea mays
  Peptide Sequence Number=SeqID_77659
atgagatcgattggttttggttatgactatggtgctggtaagtggtattctttccgtttggaagggtacatcgggttaataacttgggttaatgctaaaatttggctttctactactagtccactacagccaaacaggatacttgctgagtatgttgatgtgtactcacccttgctctacacaccaaaccccccatccccaggttgtcagcattgcaaccactgctcaggcgaagatgaagctgtggaaggagacttccaggagttccaagactacgacgagttctag

SEQ ID NO: 35881 - DNA, 819 bp, Zea mays
  Peptide Sequence Number=SeqID_77660
atggtgctggtaagtggtattctttccgtttggaaagggtacatcgggttaataacttgggttaatgctaaaacttggctttctactactagtccactacagccaaacaggatgcttgctgagtatgttgatgtgtactcacccttgctctacacaccaaaccccccccatccccaggttgtcagcattgcaaccactgctcaggagaagatgaagctgtggaaggagacttccaggagttccaagattacgacgagttctaggtgtgggttagcggcaacccccagtcggctgcctgtgaaggccgcgatggctcgacttagacacactgcacgaaagtcagtcattcccttcttaccctcccgccttgctgagcgtccgcttcgccgtcccgtggccggacagtccagccacttggagagactacaccaccgcctccgtgaggagcaggaacgtcaacgacaggagcagcagggctcttctttctcgctccaccaggagatagagtctgtgaggagctgctcccctgtgcttcctctggagccgccccctgcaccaccactgggcgccccagcttctggagtagctgctggaggagacccagacgacggaggtggcgacgacagctcgagccacgacaccgacttctctgctaaccctgagccggaaggatgggttgctcgacccatcactcgcgacgctgctcgcgggtgtcacttccacgatgcgctcgacaccctgctacgtcgggcatttaaccggcatacttggtccgtcgagtatcgctgtgtggtttaccagcacagtcgcggggtctag

SEQ ID NO: 35882 - DNA, 999 bp, Zea mays
  Peptide Sequence Number=SeqID_77661
atgtgtcaggataaggtgtcaggcgatcctcgcattgaatactcctgtgatacggtcggttggcgaggcgatctggccaaggttgcttcactgcgaagcctgcccgagctgggcctcgggcgagtcgagggctctgcagcttgtgctgatggtgattaccagccgagattagggatcttggggccaactcccccaccaaaccctaattactccggcgccgcgccgcgccgcgcggacctgcctcgatccgctccagcggccgcccgccgaggcggctgtgcggtggttgcgcttacgctttcacgtgcaggtccccgtgggtctctgcgcgcagcgggacccgtccacggcgtcgaggcgcgggcttcaaggcgggtgcaggcggaggggcagaattgctcgggcgatgacacggaggctcgcggccgcggcttcacgtccgaggccgtgaatgggagtggcggggcgctgcgggcggcggctgcatacatggaggccggggcaccgcccctaatttggatgattttggatctggttctcacctacgaccgcattcagccagatacttggagtggagcttatctatgctgggggaaagagaacagggaggctccattaagaaccgcatgcccacctgggtcagcaaactcgtttgaaagaaaaagacctggaaagggaactcttggccaagcttttggtgtacttgtgcacagctcaagagcacttcctgagccagaggcagctactccaggggacataattatattggatctgagcacctgctccttggactgcttggtgagggtgaaggttattcgaatgattggtgagaccacagaagctgttggtgctggagttggcggcggcagcagtggtaataagatgccaactcttgaggagtatggaactaatttaacaaaattagcagaggagccacaaattgagtgtgtcataccgcacattcacaagtctctaatcaacaagtcatccaaggagtga

SEQ ID NO: 35883 - DNA, 444 bp, Zea mays
  Peptide Sequence Number=SeqID_77662
atgtgggaacacctccaacggccaagcccgacacctgtgatgacattctccttttatgctgttccagaaaaaaaagatttatcccaagcactaaatacttgcttcgcaagacataattatattggatctgagcacctgctccttggactgcttcgtgagggtgaaggtgtggtggctcgtgtgcttgagagtcttggagctgaccccagcaatatccgtacacaagttattcgaatgattggtgagaccacagaagctgttggtgctggagttggcggcggcagcagtggtaataagatgccaactcttgaggagtatggaactaatttaacaaaattagcaaaggagggaaaattagatcctgttgttggaaggcagccacaaattgagcgtgtcataccgcacattcacaagtctctgatcaacaagtcatccaaggagtga

SEQ ID NO: 35884 - DNA, 219 bp, Zea mays
  Peptide Sequence Number=SeqID_77663
gttattcgaatgattggtgagaccacagaagctgttggtgctggagttggcggcggcagcagtggtaataagatgccaactcttgaggagtatggaactaatttaacaaaattagcaaaggagggaaaattagatcctgttgttggaaggcagccacaaattgagcgtgtcataccgcacattcacaagtctctgatcaacaagtcatccaaggagtga

SEQ ID NO: 35885 - DNA, 906 bp, Zea mays
  Peptide Sequence Number=SeqID_77664
atgactgacacagggttgattctgggacaaccttcttctcatcttctcttcactatcttcttttcactgaccctttctttctctttgctcttcccactcgaggattctatcaaagagtattactatcatacactagaggaaaccaaagactatgaaccatgtgcaacagtcttcaacccaagaatcaccaagcattgtgatcttaggggcgagggagtggaaaatggagttgcttgcgatttagcaaaggggattttatcgggtgtgtggtttgctttgagtgagatgggagttgagggagctggtgggagggggattttattggcgagcggtatgcaagggtgtggagtggtggtgatggagcaggtgctacgtggaagcaagcgcgatggaggggaagggggcctggtgctggcgacgatggtggcggtgggtgcgctgcaaaggggcgtggtcggcggtagtgcgctgcaaagggggtgtggggcggtggtagtgcgcatggaggcgggcacgcgtgcgggggcacggcttgttccaggcttcaagggtaagcttcccggtatcttcttgggtaaggcacttttctcttcagatgggttaagatgtgaatggaagcataagattaggcccgtaacacaaaggcggccacgcagggcccgttacaatgggccagatcacacgtgggcctcagagctgaacgaggccgcgctgcgggatggcgtcgccgcaggccttcgtctggtgccgaatggagcgaagggtgtccccgcccgttttgtctctgtcagaccagcgactgcagcgaaggcctcgagcgaagggtggcgtctttgcctttgccccaacatttgccctccgagggaccagttcgacaaagtcacctggtgccgaagacgtcgctag

SEQ ID NO: 35886 - DNA, 483 bp, Zea mays
  Peptide Sequence Number=SeqID_77665
atgagaagaaggttgtcccagaatcaaccctgtgtcagtcatctctccgcagcctggtcaagcagcaatagcagaaggaggccccataacacccttgttatgaggtacttcaaggagttcaaatccccaagattcaggagatctaccctcattcattttaagtggggtagtgttccaataaggttcctgtcatggagaaaaagaagaaggcctatagcaagcttgtggaggaccagatcaccaaagcttataagtttctggatgagaagtggtcacacaagttttattgatgaagcaccagaagaccaatcaaggaaggaatccatgtgggagttcgcaagagaaagttatcggagcgttcgtgccgtctcgtggaggccagatctgcaagtctacgctaggcggtggagccagaagccagttccgcgagctccccttcccccttcgccgaataagcacggcaagctcactggatccctttga

SEQ ID NO: 35887 - DNA, 186 bp, Zea mays
  Peptide Sequence Number=SeqID_77666
atgtccaaaccggacaaaacattccccctccttatcctcccagtgctccccagccttcataaccctgaggtaatttatgcatcaaagggatccagtgagcttgccgtgcttattcggcgaagggggaaggggagctcgcggaactgggttctggctccatcgcctagcgtagacttgcggatctaa

SEQ ID NO: 35888 - DNA, 801 bp, Zea mays
  Peptide Sequence Number=SeqID_77667
atgtggagaattccagacgtccggtatccgggctcggggtcgggctcgcgcggtggtgaaaaatccggagccgctgttgtgccgtcgctggcgacttccatccaagtcggtgaggggggctcgcggcgctgctcctcggcggcgtcgcccaagctgggctcgaagaggccgtgctcgagcgggtccggaggcggactgctctcggtggctggaggcaaggaggtcggcgccgacgactcaaagatccaaggagcgggtggttccgtgggtgttcgtcgtcgtcgaaccgccatcgccaagaagctgagaagatcgacggcgccgacgaaggaagctggggagaaacgcaagcgcatctcgacgccaccttcttcatcgtcttccattaggtcaggtggtccagatccgaagaaaaaaagctttgttgatataggactcgagaccatggattcggagaacgcaaagctccgaagagcactggctcatttaattagagtagtggagcagcgttgtgccgacatcgtcgacgtcgtccacggtgccttccaaccagttagcggaccagtcctcaatgaaatgaatcgtgctttagttcagatcgaggacctcgccaaggaccttgatcacctagctctggaaaaagactgggagatggagcacatggccccttctccaattgcctcatcatcagaaacagaggatgagcttctgcttgattatgattcagagttgaatcctgacgatatcgtcggctacgacgatggacgcgactactccaccgatgacacctatccctactag

SEQ ID NO: 35889 - DNA, 419 bp, Zea mays
  Peptide Sequence Number=SeqID_77668
atgtggagaattccagacgtccggtatccgggctcggggtcgggctcgcgcggtggtgaaaaatccggagccgctgttgtgccgtcgctggcgacttccatccaagtcggtgaggggggctcgcggcgctgctcctcggcggcgtcgcccaagctgggctcgaagaggccgtgctcgagcgggtccggaggcggactgctctcggtggctggaggcaaggaggtcggcgccgacgactcaaagatccaaggagcgggtggttccgtgggtgttcgtcgtcgtcgaaccgccatcgccaagaagctgagaagatcgacggcgccgacgaaggaagctggggagaaacgcaagcgcatctcgacgccaccttcttcatcgtcttccattaggtcaggtggtccagatccgaagaaaaaaag

SEQ ID NO: 35890 - DNA, 794 bp, Zea mays
  Peptide Sequence Number=SeqID_77669
gaattccagacgtccggtatccgggctcggggtcgggctcgcgcggtggtgaaaaatccggagccgctgttgtgccgtcgctggcgacttccatccaagtcggtgaggggggctcgcggcgctgctcctcggcggcgtcgcccaagctgggctcgaagaggccgtgctcgagcgggtccggaggcggactgctctcggtggctggaggcaaggaggtcggcgccgacgactcaaagatccaaggagcgggtggttccgtgggtgttcgtcgtcgtcgaaccgccatcgccaagaagctgagaagatcgacggcgccgacgaaggaagctggggagaaacgcaagcgcatctcgacgccaccttcttcatcgtcttccattaggtcaggtggtccagatccgaagaaaaaaagctttgttgatataggactcgagaccatggattcggagaacgcaaagctccgaagagcactggctcatttaattagagtagtggagcagcgttgtgccgacatcgtcgacgtcgtccacggtgccttccaaccagttagcggaccagtcctcaatgaaatgaatcgtgctttagttcagatcgaggacctcgccaaggaccttgatcacctagctctggaaaaagactgggagatggagcacatggccccttctccaattgcctcatcatcagaaacagaggatgagcttctgcttgattatgattcagagttgaatcctgacgatatcgtcggctacgacgatggacgcgactactccaccgatgacacctatccctactag

SEQ ID NO: 35891 - DNA, 672 bp, Zea mays
  Peptide Sequence Number=SeqID_77670
atgaagaatctccagggctccggtggatttccccgcgtccgagaaggccacgagcacacccccgggtcccggcgtggtgcccagacagttccccagccccaaattgaggccacagatcgggcgaggcggagtccatcgtccgaggccaagacgagggccgagcccctggggtcgggcgaggcggagcttcctatggcgcccgaggccggacttggctgctgtcagccacactctgtcgagtggcacagcagtcggagcgacgcaggcggcgctgtcttcttgtcaggtgatccttgcattaaatgctcctacgatacgaatggttggcgtggcgatctggccaaggttgcttctcggcgaagactgggcctcgggcgagccgaagggggactgagccttgacttaatcgcacccatcaggcctttgcagctttgtgctgatgggggttaccagctgagattaggagtcttggggtcgagtcccaagttctcgggctggtatgttgacgctgtcaacggttcggccagagccgggaggaggggggaaagcgccatgttgccctcggagggcgccgaacatggtgtctccagtgagttgctaacggggcttgatgcctccctctggtgggattccgttacaaaatcgttcccgtcggtcttagaaatgtcctag

SEQ ID NO: 35892 - DNA, 336 bp, Zea mays
  Peptide Sequence Number=SeqID_77671
atgggtaaagaagtgatcaagggcacaacttgcctagcacttgagattccagaaatctggaaagtgcaggggcctcagcgcaagattccccagactcagagcacagtcaccctagactgcgggttgatatctaacatctacgggcggatgtcaggatgggacggccatggtgaagggcggtatggcggtggaggacacattccgatgaagaatctccagggctccggtggatttccccgcgtccgagaaggccacgagcacacccccgggtcccggcatggtgcccagacagttccccagccccaaattgaggccacagagtttgcatcccgctaa

SEQ ID NO: 35893 - DNA, 336 bp, Zea mays
  Peptide Sequence Number=SeqID_77672
atgggtaaagaagtgatcaagggcacaacttgcctggcacttgagattccagaaatctggaaagtgcaggggcctcagcgcaagattccccagactcagagcacagtcaccctagactgcgggttgatatctaacatctacgggcggatgtcaggatgggacggccatggtgaagggcggtatggcggtggaggacacattccgaagaagaatctccagggctccggtggatttccctacgtccgagaaggccacgagcacacccccgggtcccggcgtggtgcccagacagttccccagccccaaattgaggccacagagtttgcatcccgctaa

SEQ ID NO: 35894 - DNA, 633 bp, Zea mays
  Peptide Sequence Number=SeqID_77673
atggcaatgtcgacatccgggtcccaccgggcagcaaaacggagttttggcatgcatacgtcagatgcaggtatgaggtggattctacgtgtcacctacctcggcgccatagatcttggcgccgagagcttatggaaatttaggaagggtcctttgaccggaactgccttcgacccgctgcctttgccaagtggtgttccagtgcctatgtgtttttgtggtgatccttgtaagattgataagtctgaggatcatgagacttatcgacagaggtattggatgtgtgctaactttgcatttgagccaactattgttcaacgtcggatgaatttaatgactcctccaccactatgtgattttgagcagtggattgacacagaaatatcagagaaagacaagaagtggttggataatcttaaaaagtgggatgcagaggacaaagagaggattgagaaaagacgagaggagcttgctgccgagcaacaacgtgaagacgagcagaaaatgaggcgtgttgctgaatgcagggaagagaaggagaagaagcttgagcgtgcacatcgcgcaaaggaagcaatgaaggacaaccctgatgcatttcgcaagggcaaatggccccgttgcactcagtag

SEQ ID NO: 35895 - DNA, 360 bp, Zea mays
  Peptide Sequence Number=SeqID_77674
atgccgatttttacaagcaaaaaggataatcttcagcaaaaagacacaaaaggaagaccttcaaatggattatcctcaaaaatccacttgaagtggattgacacggaaatatcagagaaagacaagaagtggttggataatcttaaaaagtgggatgcagaggacaaagagaggattgagaaaagacgagaggagcttgctgccgagcaacaacgtgaagacgagcagaaaatgaggcgtgttgctgaatgcagggaagagaaggagaagaagcttgagcgtgcacgtcgtgcaaaggaagcaatgaaggacaaccctgatgcatttcgcaagggcaaatggccccgttgcactcagtag

SEQ ID NO: 35896 - DNA, 291 bp, Zea mays
  Peptide Sequence Number=SeqID_77675
atggagctcatgcaaaagccatcaagcaaaatctccagcacctacatcaaaaaggtgaacaaaaaggacgctacaccatatttgatcaagaagaaaaagaatggaaaggtgacagcaatcaaggccaacaagcaagccaacaaaggaaagggggccaaacgcatctgggtgccaaaagagataatttcaaccatgaaaagcaccaagaagaagtcctacttccggaagttcgggctctggtccctcttccggggctacaggttccggatcaacgatccccgcttcttctag

SEQ ID NO: 35897 - DNA, 570 bp, Zea mays
  Peptide Sequence Number=SeqID_77676
atggtcacgggccagtcggccgtgggaataggcgcagcagttggcatggccataggcgggccgacagtaattacagcaacaggcgcgcagaagcaacagtccaaccgccaatcagactctggtcccacctgcaggctcgcatcctcccctgaggcgggcccgggggccactgtcggtaccctaaatcaggggtaccctcttctacagcatgaatacgccgcacccatgcgacgtctcctagccacacgagggacagcgcctgaccccaccgcatgggcaggccaaagggtgccacgtggcaagaaaagacaacacatcccagtaagtccggaccccctcagaaggacaccggacccctatacatataagtctggagcctcagggtatgtccgaacctcagcagggttccgaaacgaggaggaccctggtatgagcaggggtccggtgctgacacgtgtccgggccttgccctccacttcccgctcagacggagacccgctgcttgtggcccatgacataagctatcgggccgagcctgacgtgaagtcgtgcagcccctgcatttattga

SEQ ID NO: 35898 - DNA, 834 bp, Zea mays
  Peptide Sequence Number=SeqID_77677
atgaaggagcgcgtaaccgcagggcagttgcacgctccttcttcggggatccgcgtcaaggctgtcttttccggcgacttcatcgccggagagcgcgtgctcgtggtggtgccgtcggtcttgttttcttcttgctgctgttggaggggtgcaaccccatgggagttgtcatccttccgccatcattcggcttcaaggattttcatcacgcagcccggtcgcaacctccagctggtggtcatccacaaggatgactaccagccttgtggtggagagaagcgagccgggctgcggcctccctcctgccctcagcatcaaggatgttcatcatccgcgctggggaggagggcgagccgagtgtgtgggctggcggtccgcttcttcctccagcattcgggggagaaggcgttcgccagccttgcggaggaggcgaactccgggtgcgtggggccggccgtctgtggcgccatcagctgccgcgtgtctagctccccggcctgggtggctctggtgccgcctccggcattgcctcctgccgctggggtggagcgtggctgcccgtccaccgcacgggcgacggtcgcgccgtgcgcgggtcggcctcatccacggcttctcccgcgccaccggccgcaccgggaggtcccgctgcccattggtgtagaggtggttgctgccactggtggggctgacgtggtcgcctccgctggggaagcttcttatagaagggaggatgagtatagcgcgctgctcggcacgggggctgcacgacttcacgtcaggttcggcccgatagcttatgtcatgggccacaagcagcgggtctccgcctga

SEQ ID NO: 35899 - DNA, 849 bp, Zea mays
  Peptide Sequence Number=SeqID_77678
atggtgaaagggtgccaactcccatggggttgcacccctccaacagcagcaagaagaaaacaagaccgacggcaccaccacgagcgcgcgctccccggcggtgaagtcgctagaaaagacggccttgacgcggatccttccaaagaacaccggcgcaccccatctggaggcccggaaggcgtaaaggcgcgatggtcgcaagaagagcgaggcatgtctactgcccgggagatcgacccctttttaaaggcagatccccccactcgcgcccctgaagcgtcacaggctcgcatcctggccttgaggcgggccccgggggccactgtcggtaccctaaatcaggaggagggcatgccgggtccctcgggtaagccccaggtccctcagagcagggaccgggccctggccgggctccgagacctggaagaccccggctcgaataagggtctggtgcccacacgtgtccacctctcgagtaggggcttcttgcccaggcggagccccgctgctgccgcttggcctgaagcccgtgacataagccggtgggccgaacctgacgtaaggcccatgcaaccgttcgacctcagcatttattatggaagggacacgctgcctgccaccacgcttgtgacaccccagtgtcacctagggttttctcttaaaatgccaaaccaagaaccatcattttatgtgaaccaaagtcggactccccgtcgccgacgagcacccccgcctgcgcacgtggaccggccaactccggccatccccgacggcgacccgcacaccgttgtgatcccccgagacctcccctacgtcctcgaccacttcaccggagcaatctcgccgccg

SEQ ID NO: 35900 - DNA, 1041 bp, Zea mays
  Peptide Sequence Number=SeqID_77679
atggggacctctgcccaggaatcgcctctctggaagcgtatcgacgatgccgagtactatctagtcagtggatcatttgaccaggcggtgttgactgctttatccgtcgccgatgaaatacacatggcttctttggagagcgctagcgaccaggatgagctcctggagatgcttgaatcggctgggatggtgcttgtgcaggcactaaaagaactcaggagggcctctgagatgtttgctcagcttaagatgatgtttggttcagtgccatcagtgcctgctagagttttccttacaggagctaccattcaaatggcagaaggatctatatctgacctcagaccaatctttgaggagtaccttgccaattggagatatacggatgatgaggtttatgtttttgatggaggaaatgacagcacttcaaatggttttgtcgttaaatctattatgtcaactggccagtattttgaggtggcagaattgtatacagtaacattcctctgtattgtctctcaagatagtgaaactgctatctcatgggcagaaaaggctcatctaactgagcaaagccggcaggacctactaaaaaagcttcatgcagtgcaattagctgcaaataaaaaactgtccactgttgaaggggtaaaacaaacagcagagaggaacctttctacttctacaaatgactcaacaccatcgccacatgaggatcctccaaagatagttcctgcgtgcgatgggctcaaaaaggtcctgctgaagtctgctcaacaagctcagcatgttgcaaatcattttgatccgtttttctggtggtttcattcaattcgcctgaagtttgggaaaatacatattgttctacccagtgccatgtacgtgctgcgaaggaaaactgctggcttgaagagggctgtgttccagcaagctgcttccctgcgacgagcattttttgatgcacttcagcttgcgttctctgtccagatgaaccctctagctgctgttcaacaagtgccacaagcccctcgaggaagctggtga

SEQ ID NO: 35901 - DNA, 1422 bp, Zea mays
  Peptide Sequence Number=SeqID_77680
atgacattcatcagcgaattttcccaccgctcagcagtgacctcgttcccgtcctcctcgcatccctctcgtccgccgccgcctggctcgcgccgccgacagtttctcggcccagatcgagacacgcccgccatcctacaccaggtgccgaggccttcgccgatcaaagagatcccagacagcagctatctagtcagtggatcatttgaccaggcggtgttgactgctttatccgtcgccgatgaaatacacatggcttctttggagagcgctagcgaccaggatgagctcctggagatgcttgaatcggctgggatggtgcttgtgcaggcactaaaagaactcaggagggcctctgagatgtttgctcagcttaagatgatgtttggttcagtgccatcagtgcctgctagagttttccttacaggagctaccattcaaatggcagaaggatctatatctgacctcagaccaatctttgaggagtaccttgccaattggagatatacggatgatgaggtttatgtttttgatggaggaaatgacagcacttcaaatggttttgtcgttaaatctattatgtcaactggccagtattttgaggtggcagaattgtatacagtaacattcctctgtattgtctctcaagatagtgaaactgctatctcatgggcagaaaaggctcatctaactgagcaaagccggcaggacctactaaaaaagcttcatgcagtgcaattagctgcaaataaaaaactgtccactgttgaaggggtaaaacaaacagcagagaggaacctttctacttctacaaatgactcaacaccatcgccacatgaggatcctccaaagatagttcctgcgtgcgatgggctcaaaaaggtcctgctgaagtctgctcaacaagctcagcatgttgcaaatcattttgatccgtttttctggtggtttcattcaattcgcctgaagtttgggaaaatacatattgttctacccagtgccatgtacgtgctgcgaaggaaaactgctggcttgaagagggctgtgttccagcaagctgcttccctgcgacgagcattttttgatgcacttcagcttgcgttctctgtccagatgaaccctctagctgctgttcaacaagtgccacaagcccctcgaggaagctgcgtgggagcagacgtctccccatattcgtccgacaccagcctcgacaccgacccgcgcaatagttattgcacgtccacggggacgtttcacagcatgctcgcaccatcgttttcaccgttgtcggacgtcccattcgtcttctcggccttcgccctattcttcctccccaacctgttgccccccgcccacagtcgcagccgcgagccgaccgacgctcgtcgacgcgggtacggggcgagtcggtcttgctcctag

SEQ ID NO: 35902 - DNA, 318 bp, Zea mays
  Peptide Sequence Number=SeqID_77681
atggtcgcagccgcgagccaaccgatgctcttcgacgtgggtacggggcgagtcggtcttgctcctgacctttcttcgtgcgtgccgccgaggaagacacggtggcgcctgccacgcttaggttatgttggcgatgaggagtccagcggtataatatatatgtcgcgtccagatgcccatgttttcgtcgtatccttctctggcaaagaacagattgaaatggaaatggagtacttgacgaagataaggcttccactccactctatcggtatcatttacccttcgccatcactccacatcactctcaaattggtataa

SEQ ID NO: 35903 - DNA, 693 bp, Zea mays
  Peptide Sequence Number=SeqID_77682
atgaggctacgtgactttagaggccatacgtcacgctccgcccgttggcttatgtcacgggccacaagccacgcggcagcagcgggtctcctcctgagcggggagcgcagggcaaggcctagacacatgccaacaccgtacccttactcatgccggggttctccccgtcccggggccttgccgtggtctggaccttacttgaagggtcctgaggcccatccgagggactcgacatgccttcttgggagctccggactgtacacacaggggtctggtgtccctctgtggaggttcggatccaatgatgcatcctggggtgtattatctttcctcgccacgtggtgccctttgacctgcccatgtggtggggtcgggtgccgttctccgtgtggccaagagacgtcgtacgtgtacaacgtcttcatactgttgaagagggtacccctgattcatggtaccgacagtggccccgggcccgcctcaggggaggatgcgagcctgcaggtggggccagagtctgattggcgattcgcccgctgctcctgcgcgcctgttgatgcatttactgtcggcctgcctatggccgtgccgactgccacacttattcccacggttgactggcccgtgaccttcgtacttaatgtcactgttgggccatgcgtggggtgcctcgggtcgctgcactggttctga

SEQ ID NO: 35904 - DNA, 219 bp, Zea mays
  Peptide Sequence Number=SeqID_77683
atggggcccaggcccacatgtcatgcaaccggcgcgccggttaccgggtgcggaaaaatcgcaccgccactcgcgccaatgccacgtcttctcggggccgtcacggaagactggaaagataagtttttagaaccagtgcaacgactcgaggcatcccacgcatggcccaacagtgacattaagtacgaaggtgcgcaggagcagcaggccaaccgctaa

SEQ ID NO: 35905 - DNA, 312 bp, Zea mays
  Peptide Sequence Number=SeqID_77684
atggcggaagagcgccaacccccatggggttgcgctcctctaacagcagcaagcagaagacaagatcggcatcacaaccacgagcgcgagctctccggcgcggtcaggaagatgaaccgccatgcaagaagcatacaaccgccccgtagttgtgcgccccctcagcttcgctgcaactggcagtccggcatgggggcccaggcccacatgtcatgcagccggcgcgccggttaccgggtgcagaaaaatcgcaccgccactcgtgacaatgccacgtcttctcggggccgacacggaagactgaaaagataa

SEQ ID NO: 35906 - DNA, 252 bp, Zea mays
  Peptide Sequence Number=SeqID_77685
atgaacgtatgtgagctcactcttgctgtctcacatacaccacaggtcaagaccagaactcctgttatatataaagatgtgacattcgatcctgtgccactttacatcatatgtgtgagacttggtcccagcatacctggtgtttatgttagcgcccggatctatcttaaccaagacaccaatacgaagaagatcaacctcatcaaggaaaggataagagtcattgtcaacgaaggtgatcgtcaaggataa

SEQ ID NO: 35907 - DNA, 213 bp, Zea mays
  Peptide Sequence Number=SeqID_77686
atggcggagtgcgccgcgaaccccggagcacgttgcgtggacccctccctcttccccggtcgttataagacggcggatctgcgctgtgcgagggcagctgtctccgtcgtctggtttctgatctatcttaaccaagacaccaatacgaagaagatcaacctcatcaaggaaaggataagagtcaccgtcaaggaaggtcatcgtcaaggataa

SEQ ID NO: 35908 - DNA, 120 bp, Zea mays
  Peptide Sequence Number=SeqID_77687
atggcgatctatcttaaccaagacaccaatacgaagaagatcaacctcatcaaggaaaggataagagtcaccgtcaaggaagccacacatggtaatgaagagaacttttgggagcattaa

SEQ ID NO: 35909 - DNA, 138 bp, Zea mays
  Peptide Sequence Number=SeqID_77688
atggagctggtgattgctgagccggatgggcacaccggcgtccaagatgtggtgacaaaattggcaggcgatgctgcccatggagacagggacgtcggttgccaggatgacgtgacgaaggtggtatgcggcgcatga

SEQ ID NO: 35910 - DNA, 603 bp, Zea mays
  Peptide Sequence Number=SeqID_77689
atggctgcccctagtggcgtcgcccatggggacggagacgccatcaacgaagatgatgtggcgaaatttggtgttgtccatagggatgggcacgccggcgtccaaggtgtggtgacaaaattggcaggcgatgctgcccatggagatagggacaccggttgccaggatggcgtgacgaaggtcatggagttaccactagacgcgcagagcagcggaagacgtctcgatgtagatgaacgcgtcgagcagtgccgtgcagtcgtcggcgtccttcacgtcctcgcacggttcgtcctagtgctccagatgcagcacctccgagctgccgcttcgggaggctcatccttccctctcggggcggctcccttcccagtcgcgtcggccacgacaggccacatcccagctgccgctgctcgtgctccccaccatcggccgctcgggctcaccttccctgcccacagcgcgggcgcgaccgcggccctcctcccccgccccgacctcctccagccccggttccccatcgcgctaggccaccgcgactccctccgctccgacgcgcgtgacgttgagggcaaccttggagcccgtggcggccgcctctga

SEQ ID NO: 35911 - DNA, 1017 bp, Zea mays
  Peptide Sequence Number=SeqID_77690
atggcgtctccgtccccatgggcgacgccaccaggggcagccacggctcagcaatcatcagctccatcgatgggagatttgtggaccaacataaaggctgatctcgcaaagatgcaagccacgctccagaaggttgagcaagggctgctacaaatcaaggcagcagtgcaacatgagcagcaccagctggcgttgtccgcacggctccggacgtcggcggctgtgggcatacaagctgctgctcgtggcttccttgcacgacggagagtgcgggagatgcgccggcagatgctcgaggcagccttggtgacggttgatctcggcacacgggggtgcgaccttgccctgtcggacggccatcagcagtggcaccgggccgctatctccaagtgcgagtatgggttgcaatctagcacatattacacatcagtggctgataagaaactgcatccagtggataggcgagactgttggggtcgcaatgtgttagagagtagctgcatgcccatgctttatacacctcgcagatatagatctttgggctttagatcttttgccttgccaattcctttgaaggaaattcctcttgtcaagaacacatcattagcactaactaggtcatgtgatgctttacttgcaaatcctgctacctcacttgtggtccctgcaatcgggattattgtgtttgctctgtggggttttttgcctctaatgcgggatattagaaaccgttttgatcatggaggcaactggaagaagagtcctacatatttgatttcttcgtcgtaccttcaacctctacttctctggacaggagcaacactaatctgcaggggtttggatccagttgtcttgccttcagcagcaagtcaagctgtgaaaacacgtctgataacttttgtgagatcattatcaactgtcctggctgttgcatatattctcacaaggtgcacatgctacatcctcagaaaaactgcagttgttttttgtaatgacaacatttatgcagtcaagtag

SEQ ID NO: 35912 - DNA, 282 bp, Zea mays
  Peptide Sequence Number=SeqID_77691
atgaggaagcctgtcccatcactcctcatgctcctcctcagccgaggcggggtcccactcgacagtccaacccggtggcaagattacaatggatcaagcagtctcattagctgcgagaagcagacgattcgaatcgagtttttatccttgcaagtgaccgcacttgtacccaccataaccggaatgggagaccacgtctcaggtcgcatgaggggtaaagtctgcgggcaggttcactcaggatttaataacattatgctaaaggaagaaaaactaagttag

SEQ ID NO: 35913 - DNA, 369 bp, Zea mays
  Peptide Sequence Number=SeqID_77692
atgtcgaaggtagatgctttgccgaagccgaggcaggatcccactcgactgtccaacccggtggcaagatggacggccaagtcactccagcaatcatgtcctccagagagcctgaaaaattatgctacaagcaaggctgagtatactaatactcagctagacttacccggttataatggatcaagcagtctcattagctgcgagaagcagacgattcgaatcgagtttttatccttgcaagtgaccgcacttgtacccaccataaccggaatgggagaccacgtctcaggtcgagtgaggagggcaatctgcgggcaggttcactcaggatttaataacattatgctaaaggaagaaaaactaagttag

SEQ ID NO: 35914 - DNA, 258 bp, Zea mays
  Peptide Sequence Number=SeqID_77693
atgtacaatggatcaagcagtctcattagctgcgagaagcagacgattcgaatcgagttttatccttgcaagatcagggctcaccgccttggcgtacaatgcctcactgaccccgactgccgtcgtgcagtgaccgcacttgtacccaccataaccggaatgggagaccacgtctcaggtcgcgtgaggggtaaagtctgcgggcaggttcactcaggatttaataacattatgctaaaggaagaaaaactaagttag

SEQ ID NO: 35915 - DNA, 312 bp, Zea mays
  Peptide Sequence Number=SeqID_77694
atggggaagcctgtcccatcactcctcatgctcctcctcagccgaggcagggtcccactcgacagtccaacccggtggcaagatggacggccaactcactccagcaaccatgtcctccagagaacctgtaaaaattatgccacaagcaaggctgagtatactaatactcagctagacttactcgtgaccgcacttgtacccaccataactggaatgggagaccacgtctcaggtcgcgtgaggggtaaagtctgcgggcaggttcactcaggatttaataacattatgctaaaggaagaaaaaccaagttaa

SEQ ID NO: 35916 - DNA, 462 bp, Zea mays
  Peptide Sequence Number=SeqID_77695
atggggaagcctgtcccatcactcctcatgctcctcctcagccgaggcagggtcccactcgacagtccaacccggtggcaagatggacggccaagtcactccagcaaccatgtcctccaaagaacctgtaaaaattatgccacaagaaaggctgagtatactaatactcagctagacttacccggttacaatggatcaagcagtctcattagctgcgagaagcagacgattcgaatcgagtttttatccttgcaagtgaccgcacttgtacccaccataaccggaatgggagaccacgtctcaggtcgcgtgaggggatatgtctgcgggcaggttcactcaggatttaataacattatgctaaaggaagaaaaaactaagttaatgagtaacttagggtttcttggtcatacgtggcttttagtggtttatgagtatcactctaggtttacgttttattaa

SEQ ID NO: 35917 - DNA, 150 bp, Zea mays
  Peptide Sequence Number=SeqID_77696
atggggaagcctgtcccatcactcctcatgctcctcctcagccgaggatttaataacattatgctaaaagaagaaaaactaagtttaatgagtaacttagggtttcttggtcatacgtggcttttagtggtttatgcttatcacttctag

SEQ ID NO: 35918 - DNA, 546 bp, Zea mays
  Peptide Sequence Number=SeqID_77697
atgtgggcacccatgcatacagggaatacttcttcccaatctaccatgattcccgcctctcaatcagctatgtactggaatcattacttgaattttgtcaggaatcctcttgggccacctgaagttaacccatttcctgattgcattccaccatcgaataccagtacaccattgcagggttccaatactataccttccatacctgtgaatttggactcagatgcagaacacagtgttcaagacatcaatagtcctgaaaagaatgcacctcctatacaaaaacccaaaaaggctaaggaacaaaactttactggccctgaagatcttctactttgcacaacctggttgcaaattagcagtgatcctgttgtgcacactgggcaacgtagggagggcctttgggctagaattgaaaaaggaacaattggatctataccattaaaagatccaaactttagatatataccatggaccccacatgtcattgactcatgtggacccacatggttgacaggaaaacggccgcgtggtcgtgattttcagtaa

SEQ ID NO: 35919 - DNA, 450 bp, Zea mays
  Peptide Sequence Number=SeqID_77698
atggcggagcggctggcactcccaacagcttatgaggccataataattgcacatcagaacctgcaaaatcccaagatacaaaaattgatagaaccaatatctcgccgtgcctccagacctgtggttgtcaatggtctcctgcaaagggaggactgggaaacagcaataacagtgccacttgggatcattccagcaggtactggaaatggaatggcacgatctctactgcatgctgctggtgaaccattctctatatctaatgttgtgttcgcaatcatcagaggtcataaacgtgcccttgatgttacttctgttgtgcagggaaaggcgaggttctttagtgtcctgatgcttacatggggtctggtggctgatgttgatattgaatctgagaagtataggtggatgggaagtgctcgccttgatttttatgtatactctctacactaa

SEQ ID NO: 35920 - DNA, 746 bp, Zea mays
  Peptide Sequence Number=SeqID_77699
gaacaattggatctataccattaaaagatccaaactttagatatataccatggacctcacatgtcattgactcatgtggacccacatgccggccaaagaaattgttcattatagtgaacccttatggtggaaagagaagtggaaggagtattttccagaatgaagtcctccccctcattgaagcttctggcgtgctttatacgatgcaagaaaccaagcatcggcttcatgctcaagagatcgcacgttcacttgatcttaggaagtatgatggcatcatttgtgtcagtggagatggtgtgatggtagaggttgtcaatggtctcctgcagagggaggactgggaaacagcaataaaagtgccccttgggatcgttccggcaggtcataaacgtgcacttgatgttacttctgttgtgcagggaaacacaaggttctttagtgtcctgatgcttacatggggtctggtggctgatgttgatattgaatcggagaagtataggtggatgggaagtgctcgccttgaattttatctcctactccgcatgctgaacctgcgacggtacaatgggcgcatcctttttgttccagcaccaggatatgaagaagttggtgatcccgtggaacaaactaccggtcatgaaacaaatggggttagcggggcaactgacaaaaatggtgaaacgtgcggttttcacccgtcgatcaaagaagccgatcttagatggagaacgaatcaagcttga

SEQ ID NO: 35921 - DNA, 297 bp, Zea mays
  Peptide Sequence Number=SeqID_77700
atgaaatgtctcatattctggaatagcaccctcaataggatcctggatgagactcttattgtgaccaagtacattacacttggatctttttcagttgaccttatagatgatgtactgcgccatcttaaggtcatcctaaggatcaggccactgttcggccgacggctctacactgttcttttggccgctcctgtgttcggcaaagtggaaccccgcgggctctcccgccgagaagcagcaggcatcgggatccgagctgctgtaggttgtcgcgtttccaaacaatccgacgcctag

SEQ ID NO: 35922 - DNA, 231 bp, Zea mays
  Peptide Sequence Number=SeqID_77701
atgtccggtgaatatagcggagcagccgatgcaatttacagaagctggcgagttcctgaggacgctcttccttggagcaccggacactgtccggtgtacaccggacagtcccgcaccctcaataggatcctggatgagactcttattgtgatcaagtacattacacttggatcttttctagttgaccttatagatgctgtactgcgccatcttaaggtcatcctaaggtga

SEQ ID NO: 35923 - DNA, 165 bp, Zea mays
  Peptide Sequence Number=SeqID_77702
atgacatgtgctttactgatcatgaaatgtctcatattctggaatagcaccctcaataggatcctgaatgaaactcttattatgctcaagtacattacacttggatcttttccagttgaccttatagatgctgtactgcaccatcttaaggtcatcctaaggtga

SEQ ID NO: 35924 - DNA, 537 bp, Zea mays
  Peptide Sequence Number=SeqID_77703
atgccgcgagcaaccgcctccccccagtccgcccacgccgcgagcccctgcctcccccgcgcatgcccccgcctccccccagtccgcccacgccgcgaggccccgcgccgccgtgattccctccccacgctcgccgcttccgcagtgaccgtacccctctcccccctccgcgaccgcgactgccgccgcccccacgcaacagccaccgtccagctccctccttgtcctccatttgtgaccgcacaatctccaagaaatagatcacgacaggccaccgctcgcgatggggtgctcgtggctgtgaacgaacgccaacttgcagaacaggtgccgccaccagggcccttcgattcagtcctcggcgccggttccaagacttgtcaggaacgtgctgccggtgcgcttgcaaacctggctgctgacgacaaatgtagcttggaagttgcaaaggctggtggtagcaggactcctagccaccctgaaaattttgaaacacatggtcttgaagtcaccaccggttgccagctgaaacattga

SEQ ID NO: 35925 - DNA, 429 bp, Zea mays
  Peptide Sequence Number=SeqID_77704
gaggagcaggtgctcttctggaggtggaagctgcggcggccgcagcggatgcacaacgtgtgcgtcttgttccggcgcttgctgaagctgcccgtacccttcccctgcaagccacaacaactgcacgttagcgagcctgctgggagtgtggttgctcggagttgggcgagattcacgcttggcgtgctggtcatgggcgcggctgcaagctgtgagtggggtcggctgctgggcgccatcgtcgggggcagtcggctgctgggcgccattagcggctacggtggcgtagcacggctggcaaccggtggtgacttcaagaccatgtgtttcaaaattttcagggtggctaggagtcctgctaccaccagcctttgcaacttccaagctacatttgtcgtcagcagccagaatggtggttattttgagtga

SEQ ID NO: 35926 - DNA, 288 bp, Zea mays
  Peptide Sequence Number=SeqID_77705
atggcgcccagcagccgaccccactcacagcttgcagccgcgcccatgaccagcacgccaagcgtgaatctcgcccaactccgagcaaccacactcccagcaggctcgctaacgtgcagttgttgtggcttgcaggggaagggtacgggcagcttcagcaagcgccggaacaagacgcacacgttgtgcatccgctgcggccgccgcagcttccacctccagaagagcacctgctcctcctgcggttaccctgctgcccgcatccgcaactgtgtaaatcttgcatag

SEQ ID NO: 35927 - DNA, 513 bp, Zea mays
  Peptide Sequence Number=SeqID_77706
atggacgcgatctaccagcgcaagatgtgggcgacaccctggagagcggataaaggtctcaccggcgaggaggcaccttgggagggagaaggacagccgaggaagaggagtgtccccgtgggggaaggggacttgtcacaaggaggagacggcgacggacaacgcgaggtgggcagggaggaggacgcgggcagggaggaggatgacgaggacgaggttacctgcgggttcgcggccgtgctcggaggaggcgccgtcccccgcctcgccgccgtggaggccacggaagaggcccgcggaggccaaggcgcgcgttgccgcatcgcggagggcggcggacgcgggggatctgcggatgacgcggacatgcaggcggttgaggatcatcggtcggtcgaacttggtggcgggcagagagtagagaggagtacgcggcgttggtttgtcgggtcagggagggaaggtgacgcgacgttcttgctgaccgcgaacgcgtgggctgagaggaagtag

SEQ ID NO: 35928 - DNA, 684 bp, Zea mays
  Peptide Sequence Number=SeqID_77707
atgatcctcaaccgcctgcatgtccgcgtcatccgcagatcccccgcgtccgccgccctccgcgatgcggcaacgcgcgccttggcctccgcgggcctcttccgtggcctccacggcggcgaggcgggggacggcgcctcctccgagcacggccgcgaacccgcaggtaacctcgtcctcgtcatcctcctccctgcccgcgtcctcctccctgcctcgacaaaggacgcacggctgctgcgcccctccctgctcgcggtgacgcccgttcctccgcctggcacacccacctcgcgttgtccgtcgccgtctcctccttgtgacaagtccccttcccccacggggacactcctcttcctcggctgtccttctccctcccaaggtgcctcctcgccgaattccctccacgtggcttcaaattttgcgggagatggtgcttgtgagaattctccacggattggaagactcaaggtgatccggtcgctgctccccacccggcgccgcctccgcctcaacccgcccgctaagttttatttcccatatgaacccggtaagcaagtccggagcgctgtcaggatcaagaacatcagcaagtctcatgtggctttcaagcaagattacttctcagagggactctacacgttcgatattgggcagaatgaccttgctggctgttatctctag

SEQ ID NO: 35929 - DNA, 1473 bp, Zea mays
  Peptide Sequence Number=SeqID_77708
atgccggtaacagccagagatatgcacagccgatacattcctcagcaagattacttctcagagggactctacacgttcgatattgggcagaatgaccttgctggtgagttctattcaagaacagaggaccaggtcatcgtttccattccaactattttgttggaatttgagaatggtctcaagacggttatctctagcagacggctgagtaattatttatctactctagagcatcactcatccgagttaaatgcctctgctgaccttttaaaccaccactttaaaagcagctctgttgctgagctgaacatagttctcagagatatatctttgcagctacaaaaagggctctttattgcaattgtaggcgaggtgttcttggaaagttatgtggtgggggtacacaatttcgttaatggtttgtttggtacagatctttcattttccccatcatttgagcaagcatgcaagacaatgtttgagcaagtagatggtgcatttcaaaagggaatgtctgagcaaatgtatgctattcagcagcaagttgaggctgcacatactccgttagcgctaactctaaaagaaaccatcaattcgcgcagatggagatgggcacaactggcatttgagcaagcatgcaagacaatgtttgagcaagtagatggtgcatttcaaaagggaatgtctgagcaaatgaaaccatcaattcgcgcagatggagatgggcacaactgggtacgtgaagctgcctccgatgaggccatgtcggagacggccggcagggctaaggccaatttcaggatagagtcagcaatacatagtgtctctgggggcgctgtgataaaaggcctggaagcaatggcagtcactagcctgatgatgtttgttgaatccttgcaagtaaacattaaagctgccatgaagctggatgaaggctcatgtagtcgattaacaacacttacagaaacacataccaggcaaagttatattgaatttcttggggatctcttatttaagtttgacgaagcatttacaatggctcttcaaaggagtgatgtttccatagtatcgtggctgtgctcccaggttgatttgcgggcactatgtgcaatggttccagtacctcttaaccagggggtctttctggccttattgcagcagctagcaattgacattcacaatgagacatcacggaaggttcaatggatgacagatgttgccatggcaatcaacccagcagaccagatcatcgcggtgcatgtgccaccaatctttgagcaagtctacagccaattggcccaccaacggacactccccacggccgcatcagatggcaccagtatccgtgtgatcatgcatgtagcctgccctgaaatggactacctgactcctggaggagagatagagacaagtacgacaaaacagaagttgcttggaagcttaatgacatacgaacgagtggcttgtggctag

SEQ ID NO: 35930 - DNA, 195 bp, Zea mays
  Peptide Sequence Number=SeqID_77709
atgcacaccgatcgagtcaccgactggaactatacgagatggatcggagcgcctcttggcttcacgtcgagcgtgcccgtccaaagccgggaccgggtcgtcgactacatgcgccggggtgtcggagaccgtgacgtaggtgcccgtgcgatgccacggaacataaattgcgaacctccaatggacttcatttga

SEQ ID NO: 35931 - DNA, 2028 bp, Zea mays
  Peptide Sequence Number=SeqID_77710
atggcccgcgttcgtcccctgccccggcaacccagcttaaccctagctcgctccctccgtagccgcctcttcctgcttcgctcctctcgcgtagcaaccgctccctccactcccgagatcgtggcccgacgccgtgccgctcccgagaccgcgccacaaagccgcggaacgtcctcaccgatgcaccgacgcgcccccgagcccgcttcccgacgccaccctcacacaacctgccccctgtcaccctctagacgggacgacacaggtctggagaagggtccagaaaccggcgcgagtccaccgcgaatccacacgatcgatgtcgtcctcccgctcgtttcgccgtcgacctttctccagtggttgagtgcgacagggttggtggctaggtcgtgcgatggcgaaatcgagtccagagtagcagagcaaggctggtcccagcgggctgccggtgctgtgacctgcgtgcgtggtcgtacgcctggccgttgtgccgctagctgcggcgggcgggtggctggcggcgtcgcatggcggacccgacgcccatacaacctccagggattgcttcctccccatggcgtggatctagatggtcttcacggcagaggaggaagaggtgccacagcagcttccgaagacatcgtcgacgtcccttaccacctcgattggcgatggcatcgacagcccccagccactgcccgcgctaacggtggcgtggacctcactgtcttcaagcagttcgagcggatgaatcctgagcctgccaatggcgacgacgatggagctttgtcactgccagagacaggattggggcttagcttgaatactgacggggtgctcaaggcgtgttcatatcgtctgggtcttagattattcaacattgatatgattagggagcacccccccttgtcaagcaactcacaccattacaagatctacacgacatggcatctgcatcgccaaggcctcgctcaactcagcgcggtgttgactgccgatacctggagatgtgacaccgccagatgtgtcgctcaggccagtcacactgctctgctgtttttcaaagaacaacctcttgctgcgtcatcaaggggtagaccagtctctgatgattcgtgtaagaatccttgggagaaagcaagtggtcctggaaatgttaccaggacatctctggccccacaagggctgcaagcacaagtagtgcagatcaacgagtttgtgaagcttggtggggaacaacttgttccctactatgcagatatattgggcgctgtcttaccatgcatatctgacgaggaggagaaaatccgagtggttgcacgcgaaacaaatgaggaactccgtgctataaaagctgatccagctgagggatttgatatcggagcaattctttcaatcgcaaaaagagaattgaacagtgaacatgaggccactcgaatcgaagcattgcattggttcttcactttgctggatcgatattgtgctgagttcttggcttacctgaacgatatttttgatccactcctaaatgcactttctgatccttcggacgcgcctgctcacgagaaaatcggtgtcgttgattcccaatggattgtacaccaagtgattccttctctcgggaaccaggggcagtcggagaatgggagggcgccatggtacaagtttcaacccacattttttcctttgtgtccagcagtggctcttcgaatagagttagatattgatgaatgtttagagcttatattctctgaacatgaacattcagaatcgacagcattgtgcgcacacgaaaattctgcagaaaacatttcagacggacaaggatggccaagttcgcttccacaagttaatcggaaatcttcatgggtgatagctatgtcagattcttccgcgcatagggcaagtaatgcaagtgatagctgtgtcagtttacccccattttttgggcatcacttgtctcaaatgaagtccattggaggttcgcaatttatgttccgtggcatcgcacgggcacctacctag

SEQ ID NO: 35932 - DNA, 747 bp, Zea mays
  Peptide Sequence Number=SeqID_77711
atggggaggaagcaatccctggaggttgtatgggcgtcgggtccgccatgcgacgccgccagccacccgcccgccgcagctagcggcacaacggccaggcggggcaggttgtgtgagggtggcgtcgggaagcgggctcgggggcgcgtcggtgcatcggtgaggacgttccgcggctttgtggcgcggtctcgggagcggcacggcgtcgggccacgatctcgggagtggagggagcggttgctacgcgagaggagcgaagcaggaagaggcggctacggagggagcgagctagggttaagctgggttgccggggcaggggacgaacgcgggccattggatggtacggagggagcgagcgctgccgtcgttgctggcgatgaagacgctgaccttggtgggcccccgcagctggatcacggacggcttcacgacgctgaacacgaggtcccaccggcgggagctgtcgccctggagccgggtttgccgaggcgaggcggcggcggcagcgctcgctgtcggagatccatgggcgggcgcgaagggagcacgagagggagcgacagcggcgcggctgcgggatccgtgggggatgcgggatctgggggcggggcgatgcgtgggggtgagagcgtgcgcatcggacggctgcgcatcggacggctgagagactctaaagtgtattggacggttgagatcgtcggaaggcagaaccaaacagaggcagcctaccccttagagccttaa

SEQ ID NO: 35933 - DNA, 525 bp, Zea mays
  Peptide Sequence Number=SeqID_77712
atgcaggcggcatgcaaccgcgccaagggggcgcaccctttcgacttcaacacgtccagcatggtggcccaggcccacacgtcatgtaaccagtgtgccggttgctacatgcaagaaactgcaccaccactcgcgccactaccgtgcctcctcgactgcggaaccagtaccgcgactcgaggcaaccctgcgcacgacccaacagtgccaaccaagcacatcggtcacgggacaggcggcacctttggcaggcgaagcaggcgacgcttcacctccgccataatgaccgtgtcaaaaaagggaccgggaaaggggataccccgaaagggatccttctccgcgaaggaaacgggccccgagccccctactgatcagaggttcgaaggctggcccctcggaggggttcaacagccgcctcagagcgctcgggctccgcgcccgctactggtcagaggttcgaaggccggcccctcggaagggttcaacggccgcctcaggccactcgggctccgcgcccactactga

SEQ ID NO: 35934 - DNA, 543 bp, Zea mays
  Peptide Sequence Number=SeqID_77713
atggcggcggtaggcgggcggaagcagcagtcaagtcatctgcaggctcacgtcccctcctatgatagcgagagagccctctcccacggcgtgaagacgacgtgcctgtgtcccgttcctcgcacggctcgcgcacgcacaacggccgcctcgccaaccactcgtcccgtcgcgttaactctgtggcaggacaggcggcacctttggcaggcgaagcaggcgacgcttcacctccgccataatgaccgcgtcaaaaaagggaccgagaaagaaaatactctgaaagggatccttctccgcgaaggaagcgagccccgagccctcctactgatcagaggttcgaaggcggacccctcggaagggttcgacagccgcctcagagcactcgggctccgcgcccactactggtcagaggttcgaaggctggcccctcggaagggttcgacagccgcctcaggccactcgagctccgcgcccactactgatcaggggttcgtaggctggcccccgaagggttcgacagccgcctcagagcacgcatag

SEQ ID NO: 35935 - DNA, 1125 bp, Zea mays
  Peptide Sequence Number=SeqID_77714
atggttgccatccaagggagtcaccccccttttaaaggcgactctccccacttgcgtcctcagccgtcgcggactgagtcttcaccaacacgctccaagatcctccccctacgacacgggggctggtcccacgcgtcatgcaagctggctcaggatagaaggagccaaaccgccccgcgcggagcgcacaactggccagcggttacaagcactcctccacttttgcccagaccagcgggtgaaagggcggaccgccatgcaggcggcatgaaaccgtaccagggggtgcaccctttcgactccgacgcatccagcgtggaggcccaggcccacacgtcatgtaaccagcgcgccggttactacgtgcgagaagctgcaccgccacttgcgccagtaccgcgccttctcgactgcggaaccagtgccgaaactcgaggcgacccagcgcatgacccaacagtgccaaccgagcacatcgatcacgggtcaatcagccgcgggagaaggcacaatggtcaatatggccaaaagacaggcggcacctttggcaggcgaagcaggcgacgcttcacctccgccataatgaccgcgtcagaaaagcgggccccgagccctcctactgataagaggttcgaaggctggcccctcggaagggttcggcagccgcctcagagcactcaggctccgcgcctactactgatcagaggttcgaaggctggcccctcggaagggttcgacagccgcctcagagcactcaggctccgcgcccactactggttagaggttcaaaggctggcccctcggaggggttcgacagccgcctcaagccactcgggctccgcgcccactactgatcaggggttcgtaggctggcccccgaagggttcgacagccgcctcagagcacgcagagcgagggatgactctgggtacgttcgatacacaaccaaggctcgggctacgctcccgaggctcgggggctgctctcgcaaacccggctccggccaaaccgttgacagcgtcaacataccagcccgagaacttggaactcgactatgcacccgggctacggccagttcgcattagggaacaaccagaccggctgaagcatcacgaaacgcgctaa

SEQ ID NO: 35936 - DNA, 919 bp, Zea mays
  Peptide Sequence Number=SeqID_77715
gtatgtcaagagccgtaacgacgcacaattaagagataaaagtaaggcgagtgacactaccaattgtgatcccgaggccaaaacagtagatggaaagccaattgtgccttgcggtcttattgcatggagcctgttcaatgatacatataccctcatccacaacaataaaaccttgagagtggacaagaaagacatctcttggaagagtgacagagaccacaagtttgggagtgatgtcttccccacgaacttccagaaaggacctcttcaaggtggaaaaatacttaatccaaaaatcccgttgagtgaacaagaggaccttattgtttggatgcggactgcagcgcttccaacattcagaaagctgtatggtaggatacatgttgatctcaaggaaaacgatacaattacagttcagttggagaacaactacaacacctatagcttcagtggcaagaagaagctggtgctttctactgcaacctggattggtggaaagaacgattttctgggccttgcatatctcactgttggtggaatctgcttcgttttggcatttgcattcaccttgctatacttgataaaaccaagattgtacattaaactgaaacagatagctttatgttctccaaaattgtataatcagaagttaatgtcagtttcgatgctttgctcttcttctttaaaagaattaaatctaacctacatgactaagcaagtaattgctgagatactggccctcagggtatgcggggtcgatagggtgatcacatgctgccccagcttgacttccatccgaaaagccactaaaagcaggtctaggggtgctttcagatttgcactacgagaaagtcggcttttagaaaaagctgcttcctggatccacccctttggttggcttttggcttttagggggtaa

SEQ ID NO: 35937 - DNA, 411 bp, Zea mays
  Peptide Sequence Number=SeqID_77716
atgaccaagaaagacgcggccccggttatatacccagggttgggcactagttggcgacgaaaccggaggattccgtgcgttctgttgcgagatccccgaccatggagaatctgttgcggtcgatttgggatagggacggacctgaccgtgcggtcccacacgtcagcgacatatgccgggactgacgcatggagcccatacggcagaggcacaggactgggaacgcacgcgcacagttccatccgaaaagccactaaaagcaggtctaggggtgctttcagatttgcactacgagaaagtcagcttttagaaaaagctgcttcctggatccagccctttggttggcttttggcttttagaggggcaaaagccaaagccaaaagtcaaaccaaacacacccatagaatctaa

SEQ ID NO: 35938 - DNA, 258 bp, Zea mays
  Peptide Sequence Number=SeqID_77717
atgactgaggaccctttaactggtcacatgcctcgtcatgggatccactttagtaagcatttctgcaaaacagagtctttgattattgaaaagccttaccttgactcccttaaccagcatacccttgagagtcttttctttagtcgggtgaggaagcgacaaattattgttgcttctgctccaaggttgttcccaaggaagaaaaacaagagtgaagccgcgggaggacttggtcctccatatagaacttttgtttaa

SEQ ID NO: 35939 - DNA, 258 bp, Zea mays
  Peptide Sequence Number=SeqID_77718
atgaccgaggaccctttaactggtcacatgcctcgtcatgggatccactttagtaagcatttctgcaaaacaaagtctttgattattgaaaagccttaccttgactcccttaaccagcatacccttgagagtcttttctttagtcgggtgaggaagcgacaaatttttgttgcttctgctccaaggtggttcccaaggaagaaaaacaagagtgaagccacgggaggacttggtcctccatatagaacttttgtttaa

SEQ ID NO: 35940 - DNA, 1221 bp, Zea mays
  Peptide Sequence Number=SeqID_77719
atgatgattggcaaagtgggtggaaggttttcgaaaataaaacttgatggtggatctgtcaaaggccttgatggattcaacatcggaaaagatgtacctctgccaggcttgctgaccgaggaccctttaactggtcacatgcctcgtcatgggatccactttagtaagcatttctgcaaaacagagtctttgattattgaaaagccttaccttgactcccttaaccagcatacccttgagagtcttttctttagacgggtgaggaagcgacaaatttttgttgcttctgctccaaggtggttcccaaggaagaaaaacaagagtgaagccgcgggaggacttggtcctccatatagaacttttgtgaaagaacttatcgggaggagtttttgccttccttgtttatgtaatcgcttccgcatttctatatctccgatgttctgtaatgtctgcaagacgggtgaaacgttcctggaaaggacaactgtaggtgggcctaattacttgggaggttccgtcacagctggtatcggagcgaagcccttctttgcagatattatgaggcatcttcaaaaagattttctaaaagacttatctaggaactctcttcctttcttacctaagtgttctaaagagtttattctaaagaccaggagaacaacgtgcaaacatactggaccgattgatgtgccgagtcaccagctggccccaagacatgataatagtagtagcggaagcaacgatcctataggggatctcgaagctgaagtaagtcggctccaagcggaacttcgtcgcaggacagctatctgggtcgtagatggcgaccacataaatgagttgagaagagacgtccgccatctacgagatcagctcgcggatcgggatttggcactcgactgggttgtccaatcccgttcgcttgcatgggacaaggagcaaaaagctcaagctctagtagccgagctcaacttggccgttgatgaactgcagacatattgcaataccttacatgaagaagttcatgtattatattcgcaaatgcatcccagtgagcctacgaatcctgttgagtcggaagccggaccctcgcatgttgcgggacacgcgcttggtggtgagttagacctttttcagccccctccttctatgaggctggtcgatgaatggtctcccacacccgacgacgaggccgccaaaagcaacggaaagcaggaataa

SEQ ID NO: 35941 - DNA, 303 bp, Zea mays
  Peptide Sequence Number=SeqID_77720
atggtggtggccccctgggtgaggtaccttagccaagaatacgtccccatgttaacgtgggctgccagcacctaccgctcccccacttgcccatatttcaggtacaaacagaatatgcagagggagaagtccacttaccttgcacaaacgcgtcctgcggatcgtcttcgaacgaattcgagatggatgggagcacggctggtggcgtcgacgaagggctccggcaaaggacaacgtatgacagcaggacgctcgggaaacttcagcgcagcggcttcgcgggctcaagaacgacgacgatga

SEQ ID NO: 35942 - DNA, 111 bp, Zea mays
  Peptide Sequence Number=SeqID_77721
atggtggtggccccctgggtgaggtaccttagccaagaatacgtccccatgttaacgtgggctgccaacacctaccgctccccctcttgcccatatttcaggaacaaatga

SEQ ID NO: 35943 - DNA, 135 bp, Zea mays
  Peptide Sequence Number=SeqID_77722
atggtggtggccccctgggtgaggtaccttagccaagaatacgtccccatgttaacgtgggctgccaacacctaccgctccccctcttgcccatatttcaggtggtcactccatgttccaattaatatgcaataa

SEQ ID NO: 35944 - DNA, 222 bp, Zea mays
  Peptide Sequence Number=SeqID_77723
atgaggctttcacaaaatacacttaatacgaagcaacccgctaaggtttctaaagacgatggtggaggcccctgggtgaggtaccttagccaagaatacgtccccatgttaatgtgggctgccaacacctaccgctccccctcttgcccatatttcagagtatgcagagggagaagtccacttgccttgcttattgaaaacttgaggttcttccacggatag

SEQ ID NO: 35945 - DNA, 180 bp, Zea mays
  Peptide Sequence Number=SeqID_77724
atggagttctgcatcatagcttcatctgcaaattatgatcaaaatttaagcaagggtgagctcacttatggtcggggctcaacaagtgggggaaaaactaatgcaggatcaaatagagtatgcagagggagaagtccacttgcctcgcttattgaaaacttgaggttcttccacggatag

SEQ ID NO: 35946 - DNA, 171 bp, Zea mays
  Peptide Sequence Number=SeqID_77725
atggtggaggccccctgggtgaggtaccttagccaagaatacgtccccatgttaacgtgggctgccaacacctaccgctccccctcttgcccatatttcagagtatgcagagggagaagtccacttgccttgcttattgaaaacttgaggttcttccacggatcggaatag

SEQ ID NO: 35947 - DNA, 165 bp, Zea mays
  Peptide Sequence Number=SeqID_77726
atggtggtggccccctgggtgaggtaccttagccaagaatacgtccccatgttaacgtgggctgccaacacctaccgctccccctcttgcccatatttcagagtatgcagagggagaagtccacttgccttgcttattgaaaacttgaggttcttccacggatag

SEQ ID NO: 35948 - DNA, 210 bp, Zea mays
  Peptide Sequence Number=SeqID_77727
atggtggtggccccctgggtgaggtaccttagccaagaatacgtccccatgttaacgtgggctgccaacacctaccgctccccctcttgcccatatttcagagtatgcagagggagaagtccacttgccttgcttattgaaaatttgaggttcttccacggaatagcacttgattctcaactattagatcaatcactgaatatcacataa

SEQ ID NO: 35949 - DNA, 165 bp, Zea mays
  Peptide Sequence Number=SeqID_77728
atggtggtggccccctgggtgaggtaccttagccaagaatacatccccatgttaacgtgggctgccaacacctaccgctccccctcttgcccatatttcagagtatgcagagggagaagtccacttgccttgcttattgaaaacttgaggttcttccacggatag

SEQ ID NO: 35950 - DNA, 165 bp, Zea mays
  Peptide Sequence Number=SeqID_77729
atgaggctttcacaaaatacacttaatacgaagcaacccgctaaggtttctaaagacgatggtggtggccccctgggtgagagtatgcagagggagaagtccacttgccttgcttatagaaaacttgaagttcttccacagataggaatagatcttgattcttaa

SEQ ID NO: 35951 - DNA, 153 bp, Zea mays
  Peptide Sequence Number=SeqID_77730
atggccaccctggcctgttcgtgtgccctcttctctgtcctgccagtggttgatctagtagttaagaatcaagatctattcctatccgtggaagaaactcaagttttcaataagcaaggcaagtggacttctccctctgcatactctgtttga

SEQ ID NO: 35952 - DNA, 519 bp, Zea mays
  Peptide Sequence Number=SeqID_77731
atggccagccccctgtcttctcccccaccgagccatctccctcctcccctttctctccctgctcacaacagccgccaggagcccgcagaagccgttgtgagccgcgcccaggcgactgagcctcgcctccccgaagcgcccagagcctgcgcgttgagcccgacacgcccgcgccaagcagcgccaggaccgagccccgcgcaacgccgcgaccgaccgttcttcttcccacgttatggagtttattgcagtcgtttcttccccattaatagcgacagtttcttctccattacttcatcctggcgacgttctcccttccctgctcctataaagctcgacgtcgtatccctgcgaaccgattcccaaagactcctccatgcctccctgttgtgctgctcgccgagcggtgctgtggttgatctaatagttaagaatcaagatctattcctatccgtggaagaacctcatgttttcaataagcaaggcaagtggacttctccctctgcatactctgtttga

SEQ ID NO: 35953 - DNA, 143 bp, Zea mays
  Peptide Sequence Number=SeqID_77732
ccgccgccgcgggagaggtgccccacgcctcggccttcaacgacgaggagctcgtctcctcctatctccgtcaccgcattctcggctgtcgcctccgcgtcgacgccatcgccgagatcgacctctaccatctcgagccctag

SEQ ID NO: 35954 - DNA, 2240 bp, Zea mays
  Peptide Sequence Number=SeqID_77733
atgagggggttgctggcctcagtgatctccttggactttttcctgctgtcgagcaagctaaaatctgtgtgcgcggctatgacttcccagaggcatagccgatcacaggagaggtcaaaatcaaaggggttgacctgcaggagagttgcagtccatctgctgttctttttcatggttggcattttcattgggttcatgcctttgttctctgtcgatgtttacaagaaaatagtatccgaaaacgagaggcttccgttccatgatggtgtgattgaggtggaaatgatgggcaccaaagttaaggagttggagacagttgtagtagagaaagaggtcgaactgattgacgagcctcaggttcaagagagccctccagttcctgcaatgttggatgatgaggcagattttgctgaatcttcacctgcattacctgctattgaagaatctgacattcctgtgaagaagctgctgataatcgtgacgatcacttctgttcggccacaacaggcatattacttgaatcggctagcccatgttttgaaagctgtacaggcacctcttttatggttggtggtggaatggcctgaacagtcctatgaaacagcagaaattctgaggtcttctggggttatgtacaggcatcttatatgtagaaagaataccacgagtgtacgaaagattgctgtatgtcaaaggaataatgcaatctatcatgtcaaaaggcatcaccttgatggtataatgcattttgctgatgaagagcggtcatactcagctgatgtatttgaagaaatgcagaagatcagccaatctacaccgtccatctatatgcgtcaaatcatcaccgtccgtccgtcgcctccgcttcaagcctccgacaccgtcgtcgcgcctggctccccctcctcctcgccccactccccctggacgcacgccacggtgtccctgccccgctcgcgatgcatcccccgaaaccctaggccttccgcgatgaggagtcgcctcctcctccctccgtcgtggcgttctcgggcgccgcctccgcgtcaacgccatcgccgagatcgacctctaccgcctcgagccccacatgcgcagccgccgccgcgggagaggtgccccacgcctcggccttcaacgacgaggagctcgtctcctcctatctccgtcaccgcattctcggctgtcgcctccgcgtcgacgccatcgccgagatcgacctctaccatctcgagccctaggacctcccctccctcttccacatccgcagtcacaacgccaatgggtagttcttcgcccgtgcggtcgaggcggtcccagcaacaggaccaaccacgcacactcgcatctcgctccttgatgttaccagggaaggaccacgacgtccacgccgacgcgcacctctacaacgcgctaatgaaggcgaacgtcgcggcggacgaccccggtgccgtcctcagggtgttccggcaggtttcagttactggtacattcttggtgaataaagaacatgtggaaagtcacaggtggtcatgtatgtttggggatgttgaagtaccagctgaggttttgaccgatggcacgctacgctgctatgcaccagcacaccaatcaggaagagttccattttatgtgacctgttcaaacatggtggcttgtagtgaagtgcgagaatttgagtatcgtgattctgaagctcattacatggagacttctcgttcccaagccaatggtgtaaatgaaatgcatctacacattcgtcttgagaagctactcactttggggccagatgaccatcaaatgcttgctataaattccttaatgcttgatgggaaatggtcaaatcaagaatcttctgtcaaggaagtagtttccactgctagggtccaaagtttaaagaaactggtgaaagagaagctgcatcaatggctcatctgcaaagtaaacgatgatggaaagggtcccaatgttctgtgcaaggaaggacagggtgtgattcatttagtagcagcactgggttatgattgggctataagaccgataataattgctggtgtcaatgtgaacttccgggatgctcatggatggactacactccactgggttgcgtctttgggaagagtcgaaggacttccccaacaccctttcctccatcggcgcgacatcggccagctcatctgcgacgatgaggcatcttcgaccgacttcccaacaccccatcctccatcaatgcggctcca

SEQ ID NO: 35955 - DNA, 540 bp, Zea mays
  Peptide Sequence Number=SeqID_77734
atgacagactggaacaaactgaggctagctagttgttgcttaccgacgaatcgggatgtgcctccagcagcaaacaccattataacagatgatctggcgtgtatcagggaaaggaaatccactgcacaaactcaacggttggagcaacgattagcaagcagcgacaaacataggaaaaatgattcatcagaaggagaaggccaaggggggagggaagaggccgaggagatggagcgagatgcgagtgtgcgtggttggtcctgttgctgggaccgcctcgaccgcatgggcgaagaactacccattggcgttgtgactgcggatgtggaagagggaggggaggtcctagggctcgagatggtagaggtcgatctcggcgatggcgtcgacgcggaggcgacagccgagaatgcggtgacggagataggaggagacaagctcctcgtcgtggaaggccgaggagtggggcacctctcccgcgtcggcggctgcgcatgtggggctcgaggcggtagaggtcgatctcggcgatggcgttga

SEQ ID NO: 35956 - DNA, 438 bp, Zea mays
  Peptide Sequence Number=SeqID_77735
atgaaggaaaggaaatccactgcacaaactcaacggttggagcaacgattagcaagcagcgacaaacataggaaaaatgattcatcagaaggagaaggccaaggggggagggaagaggccgaggagatggagcgagatgcgagtgtgcgtggttggtcctgttgctgggaccgcctcgaccgcatgggcgaagaactacccattggcgttgtgactgcggatgtggaagagggaggggaggtcctagggctcgagatggtagaggtcgatctcggcgatggcgtcgacgcggaggcgacagccgagaatgcggtgacggagataggaggagacaagctcctcgtcgtggaaggccgaggagtggggcacctctcccgcgtcggcggctgcgcatgtggggctcgaggcggtagaggtcgatctcggcgatggcgttga

SEQ ID NO: 35957 - DNA, 438 bp, Zea mays
  Peptide Sequence Number=SeqID_77736
atgaaggaaaggaaatccactgcacaaactcaacggttggagcaacgattagcaagcagcgacaaacataggaaaaatgattcatcagaaggagaaggccaaggggggagggaagaggccgaggagatggagcgagatgcgagtgtgcgtggttggtcctgttgctgggaccgcctcgaccgcacgggcgaagaactacccattggcgttgtgactgcggatgtggaagagggaggggaggtcctagggctcgagatggtagaggtcgatctcggcgatggcgtcgacgcggaggcgacagccgagaatgcggtgacggagataggaggagacgagctcctcgtcgttgaaggccgaggcgtggggcacctctcccgcggcggcggctgcgcatgtggggctcgaggcggtagaggtcgatctcggcgatggcgttga

SEQ ID NO: 35958 - DNA, 351 bp, Zea mays
  Peptide Sequence Number=SeqID_77737
atggctgtccagatctcaggcgcagcagggattgttctaggcgctgaaacatggagaggagcaaagggaggaagggggaagattgcagggcgtcatgggaggaagaggggaaacagggagggcgcagggagggtcgagcccatggaggagcagggcgtcgcgccctggctggagagcgcctgctccaagggagctcggccatttgcagcagtggcagggggcgtccatggcggctggccgagcagagggggtggcgccatgggaggtgcttcgatgcgctggggaagaagggcgccctgccggatgggtgtcgagtgccatggcgagaaagagccgagctccctgcgctag

SEQ ID NO: 35959 - DNA, 594 bp, Zea mays
  Peptide Sequence Number=SeqID_77738
atggctgtccagatctcaggcgcagcagggattgttctaggcgctgaaacatggagaggagcaaagggaggaagggggaagattgcagggcgtcatgggaggaagaggtgggcgagctgctgctcgccgtgggcgacggcggctcgctgcggctgctgttttatggggaagaggggaggagaggggccggggcggcatggctcctactgctgtccatggaaaataaataggacgcaggaacagcagggaaagggaggtcgtcggcctgcacttgtgctcgtccaagggaaacagggagggcgcagggagggtcgagcccatggaggagcagggcgtcgcgccctggctggagagcgcctgctccaagggagctcggccatttgcagcagtcgcagggggcgtccatggcggctggccgagcagaggtgtcggccatgggaactgctggcagccatgaagcaaaagggggcgctgggaggtgaagctgcagggggtggcgccatgggaggtgcttcgatgcgctggggaagaagggcgccctgccggatgggtgccgagtgccatggcgagaaagagccgagctccctgcgctag

SEQ ID NO: 35960 - DNA, 546 bp, Zea mays
  Peptide Sequence Number=SeqID_77739
atggagaggagcaaagggaggaagggggaagattgcagggcgtcatgggaggaagaggtggggcgagctgctgctcgccgtggggcgacggcggctcgctgcggctgctgttttatggggaagaggggaggagaggggccggggcggcatggctcctactgctgtccatggaaaataaataggacgcaggaacagcagggaaagggaggtcgtcggcctgcacttgtgctcgtccaagggaaacagggagggcgcagggagggtcgagcccatggaggagcagggcgtcgcgccctggctggagagcgcctgctccaagggagctcggccatttgcagcagtcgcagggggcgtccatggcggctggccgagcagaggtgtcggccatgggaactgctggcagccatgaagcaaaagggggcgctgggaggtgaagctgcagggggtggcgccatgggaggtgcttcgatgcgctggggaagaagggcgccctgccggatgggtgccgagtgccatggcgagaaagagccgagctccctgcgctag

SEQ ID NO: 35961 - DNA, 586 bp, Zea mays
  Peptide Sequence Number=SeqID_77740
atggacgtggcactgttggactgcatgtttcctgaagtgccgcgtcatgtctataaaaaggcgggcgcggccagggctgtttcttacccttgcgtgcgccgggaaaccctaactttgtcaaaccgctcgcctgctcgcctgccctccttgttcttctgcttcgaagatctggcccgcgtcaagcagaccgcacaccaccgccgacggtatgtagcaatgtcttcttcctcatctgatccatcgtccaaggataccctgagtgatttggtggcgacggagttgcagccgggccacactgtggagtttgacacctcgatgatttcctcggttcgcatgcaggagatgcagcagcttgggtactttggtgacagtgtcgggtgcgttccgggcgctgaggagattcctcagactgaggaggttcgacgtctaggtccaccaattgacgccgaacgtcgtggttgccttggcgaagtggggaaatcgaagatcttcctgggctcccttcgactgttatgtgatcccactgttatgtggcgttcccaccatttgaggtggtggaggacgatgaggacgaaggggccctccg

SEQ ID NO: 35962 - DNA, 369 bp, Zea mays
  Peptide Sequence Number=SeqID_77741
atggcagatggtttaactcgaaaacacggttcaaacgaacattggaaccgcgaatatcccaactccgcaaagtctccatcctcggcacatatcccccacaattctcacttctccatcctctacttcacgcacaaacgtggctgggttccggacgcgcaaatccaaggcaaaggcaggacttcgcaccaactgctcgcccaaggtaggcatctggagagggcacagttcgccaagtacccagccgtgcgccaagggccatactccatatccaatgaactcttcaaccagatcacgcccgctactcatgcgggcagcataccggagggccccttcgtcctcatcgtcctccgccacctcaaacggtggtga

SEQ ID NO: 35963 - DNA, 1732 bp, Zea mays
  Peptide Sequence Number=SeqID_77742
atggaggctttgcggagttgggatattcgtggttccaatgttcgtttgaaccgtgtctttgagttaaaccgtctgccatatggcggttaccctggagacgacgctgctactactgtcgatcgccggggaaaaaagccagcggctgcggctgaggaaggcccttcacggggagttgtgccggccattaaaaagagaaaactaggtactgcagctgaggggttggggggtctcccaccattttgctgtggatttaatgggaacttgtgcgaccctcgcgggaaggatgtcttcgcccgagctcaaggaatctttggcacgaatgctggagcaaaatcttcgtcgggaacgagggctgtcgcttcgagctcgagcaagccgccttcggctgagctcacgaaggagcaagggccaacgtctccgctgcgcgccgccaaggctgcggcgggtggggctgacctcgccatggacatctgcgtggatgattaccgtgtgggtggtgtcatgatgtttgatgcccacacgggccgggacttgttggtgagtgtttatatattgttattactctcttttttcacacggggattgggtcttggacaagattatggtgcagggtcggatgctgagcaactggctgttgtcccggctccggtggcagcggtgccagccgtggcggcggtcgaggcgaaggctgcttcacaggacccatggtccaagttttgtgccagcggcaagattacatcggccgccgccgttaaatacgtggcgggttctgtttcccagcatctgaagcatgcgacgcagcagttgaagcatcatacggaagctgtgcgggacaagtcagctgcgaaaaataagagccacaggctaatggagaagctggcggctgtggaggccgagaaggaggacctcaaccgtcagttggtggtggagaggaaagacgcaaacagagcctgcgctgaggcgcaggctgcacaaaccgaggccaaacttgcgcgagcggaggccagtctcgctcgccaacgcgccgaggaggtggaaacgagctacagcagcctacgcgaccacctggacaaagcggaggaggagctggaggtgctcccaacgattgtgatgggcctcatgtccttcgcctcactcatcacatgcgaaggggccgtgaatgccctgtcccgcgagggatgctggcacttcaaagtcttcgaccgatcagacgaggacttcgagcgcggaatcttccaagttgaggacccggtgctgaagcggttggccgaggcactttatgataggatgtggggccctcacggtcgtgaggctgtccgagagaggtccgaccaggcgatggagcagatggcgcatgatgaggaggtcgaagacctcggggacctggatagcgcgctgcccgaggcatcgagtgcgaaggaggggactggggggagttggcgccgccatccgatatctgggtgtttttcttctgatggtgagtctcggagtccgttttcctggaccgaagagtcctcggatggagacttggattattttgctgtgttagatgtggccgcggcggagtcctcgccgcgggtggaggttggcgaggtagctgatctttctagtgcgaggaccaagtgctggcgacgaagggtggtgccgaagcatagtgtgggcgaggtttcgtggagtggtaggcgctgtcggatggggatggagcgggaccgtcttcgagtagaccgtattg

SEQ ID NO: 35964 - DNA, 186 bp, Zea mays
  Peptide Sequence Number=SeqID_77743
atggtctatgacgccgaaatcacgccatctgaaccaactacacttccactaaaattttcgaggatcattggtgacgcgcaggacacttcaagagtcttcggaggtagggataacaaaagcaacaacagtgaggaacctgatcccatgcgcgactgtggaggtggaagacctaaaccagggcaatga

SEQ ID NO: 35965 - DNA, 372 bp, Zea mays
  Peptide Sequence Number=SeqID_77744
atgacctacggcgccgaggtaacactgatcggtgccatagaacatggcgccgaggtaacactgatcggtgccatagaacatggcgccgagactacataccaaaaggaattgcatagccgtgcaaatcagactgtgtaccctaacaataagcatttttactatgatttggtcgctactttagctgtgctaccatgctatatatgctttgaaataaaaggggaaactgccttatgtgttggttcattgcctatcattggtgatgcgcaggacacttcaagagtctttggaggtagggttaacgaaagcaacaacagtgaggagcctgatcccatgcgcgactgtggaggtggaagacctaaaccagggcaatga

SEQ ID NO: 35966 - DNA, 336 bp, Zea mays
  Peptide Sequence Number=SeqID_77745
atgacctacggcgccgaggtaacactgatcggtgccatagaacatggcgccgagactacataccaaaaggaattgcatagccgtgcaaatcagactgtgtaccctaacaataagcatttttactatgatttggtcgctactttagctgtgctaccatgctatatatgctttgaaataaaaggggaaactgccttatgtgttggttcattgcctatcattggtgatgcgcaggacacttcaagagtctttggaggtagggttaacgaaagcaacaacagtgaggagcttgatcccatgcgcgactgtggaggtggaagacctaaaccagggcaatga

SEQ ID NO: 35967 - DNA, 372 bp, Zea mays
  Peptide Sequence Number=SeqID_77746
atggcgccgaggtatcaatctcgttggcatctggttgttgtgttggcccttacgtggcgtgacctcggcgccatagatcatggcgccgagactacataccaaaaggaattgcatagccgtgcaaatcagactgtgtaccctaacaataagcatttttactatgatttggtcgctactttagctgtgctaccatgctatatatgctttgaaataaaaggggaaactgccttatgtgttggttcattgcctatcattggtgatgcgcaggacacttcaagagtctttggaggtagggttaacgaaagcaacaacagtgaggagcttgatcccatgcgcgactgtggaggtggaagacctaaactagggcaatga

SEQ ID NO: 35968 - DNA, 234 bp, Zea mays
  Peptide Sequence Number=SeqID_77747
atggtgccgaggtatcaatctcgttggcatctggttgttgtgttggcccttacgtggcgtgacctcagcgccatagatcatggcgccgagctcctgcgcttcctcgcgcttgccgtcaccctgaccgcgctcctcgtcctggccagcttcacgctcacagccgcgctcgccgcgctggtcctgctcagcccgctcgtgtcgtgcccctcacagtcccgctctgggcgcccgtag

SEQ ID NO: 35969 - DNA, 102 bp, Zea mays
  Peptide Sequence Number=SeqID_77748
atggcgccgaggtatcaatctcgttggcatctggttgttgtgttggcccttacgtggcgtgaccttggcgccatagatcatggcgccgagggttcaaagtag

SEQ ID NO: 35970 - DNA, 363 bp, Zea mays
  Peptide Sequence Number=SeqID_77749
atggacaaatggtacaaggggaaaaaggaagcggttgaggccgagaaagggaggaatgaaggcgtggggcgtggccgcgtgggtcccgctggggctgggtcccgcgagaggcgaacaggcgtggcagtcgggttatctccgcccattgcatttgctataaataacaaatctaccatcgcgttctggatgagtctggacctgtccggcagaggcctgtccaccgagttcgtgtcacgttcatgggacctaatggagaccgacgctgccgggatggagggcatcgatgacaagtcaccaaccttaggcacgatgacgggcattggcggcagcgtcacttttggaatgcggtgggtactacagtag

SEQ ID NO: 35971 - DNA, 755 bp, Zea mays
  Peptide Sequence Number=SeqID_77750
gttaaacgattcgcccttcccacatggatctatggcacaatgcccaccgcgggaaccgtcggtatgacgagcatcagtggaagggtggccacgggcaggatcggcggcttcgacacgataggaatgcctaggacgctccattcgaagctgagcgtgtactatttcgccagagctaggccagttgagaacgagatagagatggttggtggtctttcaatgcaaagcatggacgacagatacgcgcagacgcatatgtccgtcgccgccgccttgggccgcgccgatgagctccgcgcgctggacgacaccctcgccggcgtccgcggccttgtagcgtctggtgcgaagcaagttcctcgcatctttcgcgtcccctacccggaggagctactccaccatgaacaaccgccagcggcggcgaccgtcccggtgatcgatctcagcggcgaccgcgcagccgtgatcgacgccgtccgtggggcggcggcggggtgggggttcttccaggtcacgggccacgcggtgcccgagcaggtgatgtcagcagccgtggcggcgatgcgggcgttccacgaagccgacggcggggagggcagcgacaaggcgcggctctactcgcgagagcccgggagggcggtcaagtaccactgcaacttcgacctgtaccagtctcccgtggccaactggcgcgacacggtctacctgcggatggcacctgaccctcccgccgccgacgatctgccggagatctgccg

SEQ ID NO: 35972 - DNA, 1768 bp, Zea mays
  Peptide Sequence Number=SeqID_77751
acctatccaccgagttcgtgtcgcgtttatgggacctaatggagaccgacgctaccgggatggagggcatcggcggttaggcacgagccacacggagggcatcagcggcaagtcactaaccttaggcacgacgacgggtattggcggcaaggcgccaaccttcgacatgacgacgggcattggcagcaacgtcacttttggcatgacggcaggtactatagtcagcatagggagcagcgcggcggtgttcgacaccacatggatctatggcacaatgcccaccgcgggaaccgtcggtatgacgagcatcagtggaagggtggccacgggcaggatcggcggcttcgacacgataggaatgcctaggacgctccattcgaagctgagcgtgtactatttcgccagagctaggccagttgagaacgagatagagatggttggtggtctttcaatgcaaagcatggacgacagatacgcgcagacgcatatgtccgtcgccgccgccttgggccgcgccgatgagctccgcgcgctggacgacaccctcgccggcgtccgcggccttgtagcgtctggtgcgaagcaagttcctcgcatctttcgcgtcccctacccggaggagctactccaccatgaacaaccgccagcggcggcgaccgtcccggtgatcgatctcagcggcgaccgcgcagccgtgatcgacgccgtccgtggggcggcggcggggtgggggttcttccaggtcacgggccacgcggtgcccgagcaggtgatgtcagcagccgtggcggcgatgcgggcgttccacgaagccgacggcggggagggcagcgacaaggcgcggctctactcgcgagagcccgggagggcggtcaagtaccactgcaacttcgacctgtaccagtctcccgtggccaactggcgcgacacggtctacctgcggatggcacctgaccctcccgccgccgacgatctgccggagatctgccgagatgcactgtttgaatacgccaaacaagtgaaagatttggggcagaggttgtttgggctgctctccgaatccctcgggctcaaaccgagctacttgacagatattgagtgcgaccagggacagattatacttgggcactactaccctccatgcccccagcctgaactcgccattgggacaagccggcattcagactccggcttcctgaccatactactgcaggacaaagttggcggcctccagatcctccatgatggtcagtgggtcgacgttgcaccgacgcctggagcattcatcgtcaacataggcgatctcttgcagctggtctctaacgacaagttcagcagcgtcgagcacagggtggtagccaagaatgctgaaccaagagtttcgatcgcgtgctttttcagcacccatttccatcccgcttcgacaagaacgtatggcccaatcaaggagctgctgtccgaggagaaccctcctttgtatagggaaacactcgtgagagagggcgtccctgtggccgccatgcaagggaagggggcgccgcgcggctaccgctgcgggcagcctaagctcctcaggttgtctgcagccgtgtccgcgaggccgccctctcccctacatctagcgactacagaagccctctacggccgcaacggcatcctctacaaagccccccacacagcagatgtgaacagcaacacgctgcagctagcgcgaattcgctgtcccccttcaactattcatttgtacgactgtttttttaataggtga

SEQ ID NO: 35973 - DNA, 147 bp, Zea mays
  Peptide Sequence Number=SeqID_77752
atggcctggttccaccgagacaactgcggggctagggtttggattcgtgggtggagcccaaggctagatccagcagggggagggaggaagacatcgctgcgcaagtgcctcaaggagtggaatggtgagcccctgtccatctactga

SEQ ID NO: 35974 - DNA, 150 bp, Zea mays
  Peptide Sequence Number=SeqID_77753
atgatctggagatgtcgcagttggaagggtccaggaagatttatgaacaaggagatgattatcacgagtacttcaagcgctcatttgaggaagacatcgctgcgcaagtgcctcaaggagtggaatggtgagcccctgtccatctgctga

SEQ ID NO: 35975 - DNA, 150 bp, Zea mays
  Peptide Sequence Number=SeqID_77754
atgatctgtagatgtcgcagttggaagggtccaggaagatttatgcacagggagatgattatcacgagtacttcaagcgctcatttgaggaagacatcgctgcgcaagtgcctcaaggagtggaatggtgagcccctgtccatctgctga

SEQ ID NO: 35976 - DNA, 528 bp, Zea mays
  Peptide Sequence Number=SeqID_77755
atgtgctcggagctaaatagagacccagaaaaatgcaaggatgttgtcaactggctaaggcaaaatcaagcaggttcaatagctgtttcatccccaagctcactgaaggatgataagttcaatctgctagcagcagatgatagcaaactcttagtacaaccaagttcagataacaaacagaaggctccaattatggcttctagttcttcatcttttcataactcaagcttaccgaaccttttttcatcgccttctcagcaaaaaaaacaccagattacagtgaagaacacgtccagtgatagcaataaaccagctttccagtttggtggaaataatgtcatatttggtggcaagaaggatgcacctgttgacagtagtaaacctttccagtttggtccgaataatggcatatttggtgacaagaaggatactcccagtgacagcaacaaacctttccattttggtgcaaacaagggcatatttggtgacaagaagacgacaagtggtgacagcagtaatcctatttag

SEQ ID NO: 35977 - DNA, 795 bp, Zea mays
  Peptide Sequence Number=SeqID_77756
gggtgaaaacaggtcgggtatacccgtcgggtaccggatacggatagtgcaaatactcgttttttcggatatggatccaggtcggatgcggaatgaggactacccggtaaatacccggatattcggggtccgatacgagtacccggaattcgaggcggagtcttcccatcagcatgtgatggcaggacccgctagtttagatcctcggcgggcggaggctgctagcaaacatgtgagggcacttaatacccagtttgcaagctgggttcaattgcagctgcaaaatcatccagctgaactttgggaggacggccttaaggattacatatcacatgcttctgaaatcatgaactcaagcttaccgaaccttttttcatcgccttctcagcaaaaaacaccagattacagtggtatgtttgctgacaagaagaacacgtccagtgatagcagtaaaccagctttccagtttggtggaaataatgtcatatttggtggcaagaaggatgcacctgttgacagcagtaaacctttccagtttggtccgaataatggcatatttggtgacaagaaggatactcccagtgacagcagcaaacctttccattttggtgcaaacaagggcatatttggcgacaagaagacgacaagtggtgacagcaggggagaagtgggggagcaggagggaccttcagatgacgtgctcatctcgtcactggttcgcagccaccgccggttggagactgcagcagtgcagcaggcgagcaggactgcaggagaaggggcaggggacgcagg

SEQ ID NO: 35978 - DNA, 264 bp, Zea mays
  Peptide Sequence Number=SeqID_77757
atggagtacagagaagggggagaagtgggggagcaggagggaccttcagatgacatgctcatctcgtcactggttcgcagccaccgccggttggagactacaacagtgcagcaggtgagcaggatacaggagaaggggcaggggacgcagggtgttgtggccgccggtgtagccgccgacaatcagcagtccaggactggaggggcggtgccaagagaggagagaagaaacgtgcaagttggagactgttggcggctaggttag

SEQ ID NO: 35979 - DNA, 1938 bp, Zea mays
  Peptide Sequence Number=SeqID_77758
atggagcgcggagggatggcaggcgcacaacgcatagggaagacggcagaaccgtgcaccgtcctcaaatacgatggtattgggcctccagatacgccttctgatgtcctgggctccaggctcaccaacggtcccgtgacaaacctacaggctacagcattgcggttcgctgcacaccacactgccgctccgtcgccgagccgcatgagcacgggaggcggcaccaccttgcgcgagctgacggccctcctctccacgctgcgccgcgcgcgactccaacaccccgctcacgctgcgcagctccacgcccgcctcctcatctctgctggcgcgcgtcctcacccgcacccggtcctcctcacgcagctcgtctccctctacgccgccgcgggccgcctcgccgacgcgctccgcgccttccgcgcccatctacccagcgccaacctgcacacctatgccgtcctcgtctccgccttcgcgcggccgtacccggacctcgcgttctccctcttctcgggctcgcgccgccagctccgccccagcccccatgtcatctccgccgtgctcgccgcatgcgccggcctccagcctctctgcggacgccaggtccacacgtgcgcggccaaggtcgtaccgcccggcgatgtgttcgtctacaccgggatggtcgacgtgtacgccaagggcggggacatggagtcgtccagaaaggtgttcgatgaaatgctgaaccggggcgcggcgtcgtggaacgcgctcctcgttggttacgccaggaacaagatgtgcctcgaagccctgtcggtgttcagggagttggccgcgcaggggcgggaggtgtctctcgatcaggtgagcgtgtcgagtgtgctcagcgcttgcgctgtggcaggggccctgaactatggtcgccaggtacacgcgtgcgctaccaaggtagggctggagctcagcgcggtttgtgtcagcaacgctcttcttgacatgtacaccaggtgtggatgctcacgagaatcttccgctctgctaaatgctgtgggttgcagggatgttgtcacctggaacatcatcattcgtagctgcattcatgacaatcggttcaaggaagcttgtgtgctgttccggtccatggtcaggaacggtaccttgccggatgatgtagcctttgctactgtgttgcaggcatcagcgtgtatgtcggcatgggctataggagcaagcatgcatgcctccgtcgtgaagacagggttcttatacagtgatggcgtcactagctcgctaatcaccatgtattccaaatgtggctgcttggacgatgcacaccgagcatttgtgggggcaaaagatcatctgcatataatgtcctggacggccatgataactgcactgcagcagcatggacatggcatgcaggcaattgatgtatttgagaatatgctagagaatggcattcctcctgaccacatcacatttgtgagtgttctctcttcctgtagccacagcggacttgttgagcaaggacgcaggtacttcgattcgatgactcgagttcataagatcacaccacagaatgagcactatgcgtgcatggttgacatgtttgggcgagcaggccttctaactgaggcaaagcgattcattcaccagatgggacctaagcaagatgcatcagtccttggggcactcctttgggcttgcatgaactgcagggaccttgagatgggtaaggaggttgccaagaagctttttgtgattgagccaggagttaaggaaggaaaagggatgcagtttaatcaacaattgagaaccaaatctgtaccttatgaatacttcagcaaagacacaattaaggcaataaggcctactggagtttctgcatactcaagggttcatgggcatccaaggctcccagcagtggaatctgcaaggcagacttag

SEQ ID NO: 35980 - DNA, 843 bp, Zea mays
  Peptide Sequence Number=SeqID_77759
atgcagcaaagggaagggtccgggaaacaggcgcacgtgcctccacgcgcgctcttgtcatttgggcatgacggcattggccggcgacgggatttggacccgcgcgcagtgtgcacgatgcagctgcagcagcatgattggatcgcctccgccttcgaccgatgcatatacggcagccgcacggcgtccacatttgagaacggtgcacggttctgccgtcttccctatgcgttgcgcgcctgccatccctccgcgctccctccgcctccctccgcgctccatcctggaatccagcgctccctccacgctccatccgtcctccacgctctctccattgaaggtgacatcctccgccccagatcccgcatctgcgacatcctccaccccggatcgtgggatccggctgtctccgcgtccgcgctctccatggacggcgaagagggttttgctgctccgtacaccatgcgcagcggcgacgcgacagcggctggtcgccgccccggatcgaggagggggaagagccggcggaggcccctatggtggtcgcgagggtgggagcgggagcgccatgaggggcggtggtcgtggcggtgggaggcagccttcctacgcggcgtcggatggggcggatgcggcggcgatcccggtcgcctccaggaagatggtgcagagatcctggccgaccgcttggagggcgagatctacgccacgctctacgactgcggaatggaccccgacatagccgtcaagaggctcatctgccaggattgtcggtctcagaattccatcctggcgaggatgcttcgtgatttcgacggactagcaagggttctcttccgtgag

SEQ ID NO: 35981 - DNA, 549 bp, Zea mays
  Peptide Sequence Number=SeqID_77760
atggacggcgaagagggttttgctgctccgtacaccatgcgcagcggcgacgcgactgcagctggtcgccgccccggatcgaggagggggaagagccggcggaggcccctatggtggccacgagggtgggagcgggaacgccatgaggggcggtggtcgtggcggtgggaggcagccttcctacgcggcgtcggatggggcggatgcggcggcgatcccggtcgcctccaggaagatggtgcagagatcctggccgaccgcttggagggcgagatctacgccacgctgtacgactgcggaatggaccccgacatagccgtcaagaggctcatctgccaggcagctgaccaagcgcaggcttctaccccggacgtagatgaggagtgcaaacgggcgctcactccattgggtttctccaacgaagacgccgagaagatgctgaagaaagcatttagctggacccactcgccgtactggagcgaggagagggagaaggaggttccgaccgccgaggcggtagctggagtgctggggtcatgcgatccatag

SEQ ID NO: 35982 - DNA, 822 bp, Zea mays
  Peptide Sequence Number=SeqID_77761
atggtcccgaatgagtatccgtatccggtacccgtttcgggtaccctacccgttttcacccctacctggagtcatattggccagattcatatccaggtgctgctgccatcggaggagcgtggtcggttcgagcccaaggtcaggcgaggtggtgactcctccgaggtcgaggctgagtccgagccctggggtcaggcgaggcggagaccatcttccggggtcgaggttgagtccgagccctggggtcgggcgaagcggataccgtcttctgaggccgaggcgggggccgagccctggggtcgggcgaggcggagcttcctatggcgcctgaggctggacttggctgctgtcagcctcaccctggcgggtggcacagcagtcggagcagggcaggcggcgctgttttcctgtcagtgggtgtgcgcgagcgcacccgccgggtgtagcccccgaggcctcggaggagtggttcgactcctccgaggtcttagcgcttttcgtgacacctcggccggtctggttgttccctcatgcgaactggtcgtagcccgggtgcatggtcaggtttcgagttctcgggctggtatattgacgctgtcaacggtttggccggggccgggtttacgagagcagcccccgagcctccgcacagagcgagaggaaggtcaaggactaactcggcttttatcatatgccccttcatcgcctttccgcaaggaggagggggaaagcgccatgttaccctcggagggcgtcgaacatggtgtctctagtgagttgctaatgggtgatccgagtggacgcccgtgccccattcgataa

SEQ ID NO: 35983 - DNA, 655 bp, Zea mays
  Peptide Sequence Number=SeqID_77762
aaaaagaaaaaacgggtacccgaattccgggtacccgtatccgacccgaatatccgggtatttaccgggtagtactcgttccgtatccgacccgaatccgaagctgtattatccgggtattacccgtatccgtcccgaatataaaaatacccgtatccgtatccgaaaaatggtcccgaatgagtatccgtatccggtacccgtttcgggtaccctacccgttttcacccctacctggagtcatattggccagattcatatccaggtgctgctgccatcggaggagcgtggtcggttcgagcccaaggtcaggcgaggtggtgactcctccgaggtcgaggctgagtccgagccctggggtcgagcgaggcggagaccgtcttccggggtcgaggttgagtccgagccctggggtcgggcgaagcggataccgtattccgaggccgaggcgggggccgagccctggggtcgggcgaggcggagcttcctatggcgcctgaggctggacttggctgctgtcagcctcaccctggcgggtggcacagcagtcggagcagggcaggcggcgctgttttcctgtcaggtcagtcagtggaggggcgaaatgactgcggtcacttcggccctgtcgactgaggaacgcgcgtcaggataa

SEQ ID NO: 35984 - DNA, 774 bp, Zea mays
  Peptide Sequence Number=SeqID_77763
atgagtggggtggggttggggttgcgcgcgtgcgggagctggcggtggtgcggcgtggtctggccgtgccgtgcgggtggcgttgtcctatatatgtatggcgattggcgcaggaggcgggacctggagaagttgcgcggacgcgggcggagccagtgggcaaccgcccccgcccccggaaaccccgcgcccgcctccgcccgcccgcacgccggaaacctcgccgcaggaaaccgcggtccctaccacccgcccgccctaccgcccgcccgcaaatccttccgcgaaccgccctaccacccgctcccacgccgcaatcccactgcgaccgctgcgaaccgccctaccagccgccgcaatcccgcctcgttttcctgctacagctccaacctccgcgaaaggacctcggggacggtgtcgggtgctggtccgtactactgggtgaagtgcaagcctgcagacgagcccataccagttagtcagccgaaccaagggagcgtgcgagggaggaaggagaagaagcggatcaagcagcgcaaggactttatcatgaaaaagaaaaaacgggtacccgaattccgggtacccgtatccgacccgaatatccgggctgagaagaagaagcgcagagctctgtattctgctgctgttaagagaaaggaggcagaacgaacagaaaggaagatggctgctgtggcaagagagcgggcatgggcagcaaggttgatagagctaaaacagcttgaggaagaaattaaagctgtaatggcataa

SEQ ID NO: 35985 - DNA, 459 bp, Zea mays
  Peptide Sequence Number=SeqID_77764
atgaagatcctgatgtaccagctttgcaacagcgtggccttcgtccacgaccccaaggtgctgcaccgggagctcaagttgcacatccttctcaatgaccacaagaccatggtgctcaagatcaccgacctcagccttagccacgccatcaggcagcaggagtctaaccttcgctatgctctccaggagttccttttctttagcagggtcagatgtggtctgcatgagaatgtcaatgcacagattgatgggagccttggaggaatcggtccactgttatcaagtatgaaacctaaaaagaaagaccaactcatgaaacttctggacccaaggatgggtgttcttatcctattagcagtggacataaacaaagacattattgaattacaagtgtacctccgattgaaaggaaatgaaagtacaagcgtgacgcaaaaagcgaatgcccagtcagcgtga

SEQ ID NO: 35986 - DNA, 168 bp, Zea mays
  Peptide Sequence Number=SeqID_77765
atgaagatcctgatgtaccagctttgcaacagcgtggccttcgtccacgaccccaaggtgctgcaccgggagctcaagttgcacatccttctcaatgaccacaagaccatggtgctcaagatcaccgacctcagccttagccacgccatcaggttcatggagatctag

SEQ ID NO: 35987 - DNA, 633 bp, Zea mays
  Peptide Sequence Number=SeqID_77766
atggccagacctcaacgcctggcgcctcccagcgacctccgcacgtggggcccaaacagtccttgcgcctctgatgttgatgagccagcggctgacgacgacgtggcctcgtcgctactggagatgggggcgctcgtgctatccaccgccgaccctctcaccaaggcacgacgcacccacgtcgccttctcccggtgggccgtcgggctccctgtcggccaggcgaaggccccctaccaccccaagcgcaaggaccgcctcgtcgagcgcgcgccctacgcccgcccgtcgtcccccgcggagaagaagacggtcaagccggcctcggccttggcctcctggctcgggctcggcagcacggaagccgaccgcctcaccatcgctacctggtctgccccgccgtcttcccccagatcatgcgagacctgggtctacccagtcgccgctcgccccctcaacctccaagcccagatcctgatgtaccagctttgcaacagcgtggccttcgtccacgaccccaaggtgctgcaccgggagctcaagttgcacatccttctcaaggaccacaagaccatggtgctcaagatcgccgacctcagccttagccacgccatcaggttcacgaagatctag

SEQ ID NO: 35988 - DNA, 507 bp, Zea mays
  Peptide Sequence Number=SeqID_77767
atggcgttgtgtggagattggagaggatttgatctctttgggactaggtgtaagcctaattccctttcacacgtccacagcggggcagtcacaacagacgtcggggccgcctaccgcgagctccccgtcggggacagtgtcggcgacagcgctttctatttcgacgccggcctcctcctcaccccctcccgtggtggcgacgctcacgggcgttgctgccgctgctgtggtggctggagtgggagaggaggattacatatcgtcgtcggaggatttctagatgctggccatggtgctgtcggcggttttccaacggcaatagaataccacgaaaataagatccatactggttggcttgacagcagaatagctatgtgtgttagagccgagaggcccccatggtacctctcagttgttggaggagctctatatgtatgcctgttttactacaaccatgatttcttacctgcttttgagctcggaagtcagctatctttgttgacataa

SEQ ID NO: 35989 - DNA, 798 bp, Zea mays
  Peptide Sequence Number=SeqID_77768
atggtgctgtcggcgttttccaacggtgattgcgcggggtgcctggacagggagcagatcaggaaggccaagcccatgagcctcaactgctttgccgccaaccgcgacgagacccacactgcggagtccctctcctgtcgatattgggcaacagaataccacgaaaataagatccatactggttggcttgacagcagaatagctatgcgtgttagagccgagaggcccccatggtacctctcagttgttggaggagctctatatgaagcatcaagcaggagctcaagcgttattactaattatgttggttatctcaacaaaggtcagataccaccaaagcacatctcgcttgtcaatttaactgttattctgaacatagaggggagcaaattcacggcattttcccagcacaaggagcttgcacttctattcctggagtacactttatctatacttcacaaagaacctgtcataataaacagttctgagaagggggagagtacctctgagtcattggctgatgactgtattctacaggcaactatgtttgctctcaatgcatttatgaggtattggtcaccatttgatggctcacttttgatgttgaggatggtaggcacattttcctcttctgattttacatacttcaaaaaaacatccaagctttacagaggtggtgggaagattgggaaacaagctgttgagaaaagttacccttctgttctttcgggccttatactgaagctcggaagtcttaatggtgttgctgaattgggtcgaaatgaacttctacggtga

SEQ ID NO: 35990 - DNA, 1266 bp, Zea mays
  Peptide Sequence Number=SeqID_77769
atgattatgccttcaagcagctttcaccttaatttaaagcagatatcatgcctagcagaaaacaccaatcacgttgtggtctttgatgaggttctatctgtggctggaaaagatatctgtacaaaagacataccaaggattcgtggaggctgggccatacaggatgttttttatgcattttcccagcacaaggagcttgcacttctattcctggagtacactttatctatacttcacaaagaacctgtcataataaacagttctgagaagggggagagtacctctgagtcattggctgatgactgtattctacaggcaactatgtttgctctcaatgcatttatgaggtattggtcaccatttgatggctcacttttgatgttgaggatggtaggcacattttcctctgctgattttacatacttcaaaaaaacatccaaactttacagaggtggtgggaagattgggaaacaagcagttgagaaaagttacccttctgttctttcgggccttatactgaagctcggaagtcttaatggtgttgctgaattgggccgaaatgaacttctacgatcgttgttaattgcatttcagtcattttgcgaatgtgttggtgatgtagaaatgggaaaggttctgccaacttgtgttatcttgtgtaatgctctcaaccgaaatcagagggctgaaagggaggctgctgctgctgcactatcagaatttatccaccacattgaaaaagaacctacattgcttgaacaaatggttgaggaaatgtgtcaacatgtttctgatgattcaccaactgtcaggagcctctgtttgcgtggacttgtgcaggttggattatattctttgacaaacatagagttcaaggtccttaatttgtcagaacaagatgctgttggtccaatcttaataaatctcttagtaaggctgcgaaatcttcaggcagccgttgaggccgctcaggctgtcgccgcccaggagacggagcaggaagccctgccgaagccctccaaggtacgagctactgtcgctgccactcacgcccgtgagtgtgttgttgtgcttgcgtgggagaaggccactctcatcgccctagagtggcaattgaaggacgctgaggaggatgcaaccttcaaggaggacgacgatcactccatccccgacgatggcggcacctacgaggccactaaggtggccaatcccacgtgtaggcggcttctgtctagaacatccgctccttcgtcatgcttgttctga

SEQ ID NO: 35991 - DNA, 222 bp, Zea mays
  Peptide Sequence Number=SeqID_77770
atggcgacggggcggcatggctgttcggccttgcgtttgggccgaaaacgaggggttcgcccatggcgcacgggccaaaaaccgaggttcgggcatggccccggaaataagctaagtccaagcgtgtggaaagacaccgaagggcaaggtggaacggagggaaaacgggaggaggcgcgcggcgacgggcggcagggctgttcggccttgcgtctgggctga

SEQ ID NO: 35992 - DNA, 258 bp, Zea mays
  Peptide Sequence Number=SeqID_77771
atgggcggcagggctgttcgtccttgcgtttgggctgaaaacgaggtgttcgccatggcgcacgggccgaaaacggagtctcgggcacgacctcaaaaattagtgaaggtcaaggtggaacggagggaaaaggggaggaggcgcgcggtgacgggcggcatggctgttcggccttgcgtttgggctgaaaacgaggcgttcgccatggcgcgcgggccgaaaaagggcggctggggcacggcctcggaaataagctaa

SEQ ID NO: 35993 - DNA, 288 bp, Zea mays
  Peptide Sequence Number=SeqID_77772
atggctgttcggccttgcgtttgggctgaaaacgaggcgttcgccatggcgcgcgggccgaaaacaacgggcacgttggaactgagggaaaacgacacggaggcgtgcggcatggctgttcggccttgcgtctgggctgaaaacgagaactccccgaagtcctgggagggggtctcctcggccgagccccgcaccccctcgcggcctagccgtggccggtcggcaccctaccgcgcccagctccggctggcgctgttggctgcctggccggccatggttcggccgtga

SEQ ID NO: 35994 - DNA, 204 bp, Zea mays
  Peptide Sequence Number=SeqID_77773
atggcgaacgggccaaaaaggattttcggccacggccgcgaaaacgggcacgtggatgggcacgggaccctcccgtggtccccccgcgtctcctcggccgagccccgcaccccctcgcggcctagccgtggccggtcggcaccctaccgcgctcagctccggctggcgctgttggctgcctggccggccatggttcggccgtga

SEQ ID NO: 35995 - DNA, 204 bp, Zea mays
  Peptide Sequence Number=SeqID_77774
atggcgaacgggccaaaaacggattttcgggcacggccgcgaaaacgggcacatggatgggcacgggaccctcccgtggtcccccgcgtctcctcggccgagccccgcaccccctcgcggcctagccgtggccggtcggcaccctaccgcgcccagctccggctggcgctgttggctgcctggccggccatggttcggccgtga

SEQ ID NO: 35996 - DNA, 633 bp, Zea mays
  Peptide Sequence Number=SeqID_77775
atggcgaacgggccgaaaacggattttcggccaagaccgcgaaaacgatcacgtggaagggcacgggaccctcccgtggtccccccgcgtgagacgtggaagttcgggtccacccgcgagggaaaacggaactccccgaagtcctgggagggggtctcctcggccgagccccacaccccctcgcggcctagccgtggccggtcggcaccctaccgcgcccagctccggctggcgctgttggctgcctggccggccgtgcggctacgctggcgcatgagttgtcttggacccgtgactgcttggaggacccccgctgccgtgcagccgactcccggcgcccgtgtcccatcgctcgtgcgggcatcctatgcctgctgcgctgagaagtgcttgcgtgctgctacccgtcccacgggaagccgtgctcgatacacgttgccttcgtcgagctcaccccccggggtgcggctcgtcggctcgagagcgcctgcggcgtttgcctcgtgccgccgtcggcctatggctggcggcaccgaggacacctcgctggcgcttttggtctcggatgtggctcacgctgaaggccggagacgcgttggcgtcacgcgcccaagaatcggtccgcccgaatga

SEQ ID NO: 35997 - DNA, 618 bp, Zea mays
  Peptide Sequence Number=SeqID_77776
atgaaggaaaataacgtcgatgcggaatcgaacaaggagcgtcgcggtctcaccggggtgaacgacgacgactacggggcagcgcaaaaacagcaaaccaccggcgggcatcacagcgtgctgctcactgctcaacaccccacttggaaagatcaccgaacacatggcacgcgcgcagagcgagcagcgaggaagccagggaaggtgccggggctgcaggaacagcgccgtttcgccgaggggctgcgcagcgaggggaggtggggcgagctgctgctgtggagagggagccaagcaggagaggggcgctggccttgggaaggagccgcagcaaggaaatgcgggcggccatggggaggaaatagccggggaaaacacctgggcagtggagagcgcgctcaagaggccgacagcgctctgcgcgatggtccatggctagggcgagcagagctgctggccacctgtgtgtcggccatggagaggcttcttgcagccatggagcagaagggggcgctgggaggggatgagctgggcgcagggaacaacaagggggcgtccatggagggggtagatccggccatggcgtgctcctgctcgcagctctgcgcagaatcgtga

SEQ ID NO: 35998 - DNA, 429 bp, Zea mays
  Peptide Sequence Number=SeqID_77777
atggccacggggaggctgctacgcgctgtccttgggaggcagtcgcagcaaggaaaagctcgcggccatggagaaatggagctgcgcattttgtcgagcacctacggcgcgtcgatttggtggggctgcggggaaaaggagataggggcgctgcttcttgctgctcaaggtacaaggggcgagcagagctgctggccacctgtgcgtcagccatggagaggcttcttgcagccatggagcagaagggggcgctgggaggggatgagctgctgttggaattcctgggcgccgtggacagggagctgggcgaccatggaagtcgaaaagggagctgcacggctgggaaaacaggggcgctggtcatgggaaggagcagcgaaggagcgagctcggagaggggcgctgcgcaggcttgggcgccatggctga

SEQ ID NO: 35999 - DNA, 498 bp, Zea mays
  Peptide Sequence Number=SeqID_77778
atggagacttcaaagacaatagctgtcgaagcaatcgagaagacccctttaggttcgaagatgatcgaggcatctgccgcagtggtcgatgcacctagcattctattgggtacaacaaagatagaagactctaggatggagcagcagccgaagttgcaagatcctccggcagcgcaagggctgccgaagatagcgctcgtgctagaagtaactcctaagaaggggagaaggatggccaacgtgctagatgctgtcctaacgccctcgaaagtggtaatgccttctgctacaaagatttccaaagataaatctgaagaattgaaaaaggctagtgaaagtactgctcttgactatgttgtagctaaaccttcagaaagtagaccaacaaaacaattatcggagcgttcgtgccgtctcgtgaaggccagatctgcaagtctacaccaggcggtggagccagaagccagttccgcgagctctcaccccttcgccggttaa

SEQ ID NO: 36000 - DNA, 318 bp, Zea mays
  Peptide Sequence Number=SeqID_77779
atgtcatcccttaagcatgttatcggagcgttcgtgtcgtctcgtggaggccagatctgcaagtctacgccaggcggtggagctagaagccagttccgcaagctctccttcccccttcgccggataagcatgttattatggccacccaactgcttgccgcaatcaatccttgatatatttgttccaaatgatttgagaaaagaaaaaggagatcggcctcctgggactagtaattgtatcacatttgagtcccagaggatctggggcgcttcaggtggtatcagagctgtcaggttggccgcaggacgtaacccttag

SEQ ID NO: 36001 - DNA, 495 bp, Zea mays
  Peptide Sequence Number=SeqID_77780
atggacgagtctggtgtgaaaaaggagatcggcctcctaggactagtaatggtatcacatttgagtcctagaggatctgggacgcttcaggtggtatcagagctgttaggttggccgcaggacgtaacccttagctcgatccaaaagtttttgagtcagaactattttcttaataaaattcttgctctcatcccttcatttcaaacatgctttccccctttccttctctcagaagtcagatggaggttcgctgccaaaccagcttttgccagaatgaagatggtttccccaagttgcctgagagcatgcacagtccgcctcggaatcaggagccagccagagtatgatggtcgtgaattcgttgagcatggcatagagaagtgtgtcgtgactgtatacattggatctagtccgtacctgcgggggcacagattcaaagacacctgtcaagtcatcgctcgcaaggcattgatggtccctgtgtcagatctatga

SEQ ID NO: 36002 - DNA, 300 bp, Zea mays
  Peptide Sequence Number=SeqID_77781
atgccctggatatgggacagggtaagcttgaacccggctattccatacatgaaaagacaatcgcgcactgggagtggagagatggcgagagtggcacgtaccctcctggcaaaggaccgcctaaaaaggatggtaaatgatgtagctgaggtgcccgatctttcggcgagtagagataattccgatttggcggaagatgacccttgcgatccgactacgacgagcaagcccgaggcgccaatgcaatcgctgaaccaactccctatggttaccgaccttgctgatgcgagatcggcctga

SEQ ID NO: 36003 - DNA, 201 bp, Zea mays
  Peptide Sequence Number=SeqID_77782
atgccctggatatgggacagggtaagcttgaacccgactattccatacatgaaaagacaatcgcgcactgggagtggagagatggcgagagtggcacataccctcctggcaaaggaccgcctaaaaggggtggtgatgaggagtactctaggtgttcctgtggctggagggcgtttccagttctggaggaggattagttag

SEQ ID NO: 36004 - DNA, 480 bp, Zea mays
  Peptide Sequence Number=SeqID_77783
atggggaaatggttaataaatctagaccaggcgctgagcagacagagtcgcccgtctgtgtcgattaaggaccgtaccgttgactggcctgttgtggttgagactttgccactagccacataccctggtatgggacagggtaagcttgaacccggctattccatacgtgaagggacaatcgcgcactgggagtggagagatggcgagagtagcatgtaccctcctggcacagagcacgcctgcaacgcagcagaagacgcgttgtcgaaactaggatccagtcgagctcaggtcccacccagagttttcgtccaggaagtgccacgcccaagcattctttcagatcaggcggaagagtgcaacgctttgagccagccagagtcagactctaatgactggagagagcctatcatcaagtatataaaaaatgaagaagaaccggatgacaaggccgcagcagagcgtatcgcaagacagtag

SEQ ID NO: 36005 - DNA, 513 bp, Zea mays
  Peptide Sequence Number=SeqID_77784
atgggcagaggcaacgggcacacgtgttcgaccgtggctgacacctccggttcacgcccgttcgtgcaccgcgcctcccagccggacttcaccggaggcccgagatcgacctcaccggacttcggtctttcgccgccgcgcgtggacagagctcaccggccggactcctcgccgccgacgagcatccccgcctgcgcgcgtggaccgactgatggcgacccgcacaccgttgtgatccccgagacctcccctacgtcctcgaccacttcaccggagcaatctcgccgccgatcatacacctccaaagttgtaatttctaaaagcacatatcatatcatgcatatatcttacgcattgcattcattagattgtaatcttgccgacggagagtacgtgctcatccccgagcaaggacttgtccaagaggaggaccaggagcaggcttccgaggctgctattgaggatctccccgcagccccagcaattgaaggcaagccccggttttatgcataa

SEQ ID NO: 36006 - DNA, 330 bp, Zea mays
  Peptide Sequence Number=SeqID_77785
atggaccgaccgactccggccatctccgacggcgttctgcacaccgttgtgatccccgagacctccccttcgtcctcgaccacttcaccggagcaatctcgccgccgatcatacacctttaaagttgtaatttctaaaagcacatatcatatcatgcatatatcttacgcattgcattcattagattgtaatcttgccgacggagagtacgtgctcatccccgagcaaggacctgtccaagaggaggaccaggagcaggcttcagaggctgctatcgaggatctccccgcagccccagcaattgaaggcaagccccggttttatgcataa

SEQ ID NO: 36007 - DNA, 300 bp, Zea mays
  Peptide Sequence Number=SeqID_77786
atggataataaaaatccagtgaacttacaaccaccagagcctcactacaaaaataaagaacacctcagcccaaccttatcatacacctccaaagttgtaaattctaaaagcacatatcatatcatgcatatatcttacgcattgcattcattagattgtaatcttgccgacggagagtacgtgctcatccccgagcaaggacctgtccaagaggaggaccaggagcaggcttcagaggctgccattgaggatctccccgcagccccagcaattgaaggcaagccccggttttatgcataa

SEQ ID NO: 36008 - DNA, 296 bp, Zea mays
  Peptide Sequence Number=SeqID_77787
atgacagttggggtcagtgaggcattgtacgccaaggcggtgagccctgatctgctgacggggaatcgatggggacggttgataagcgaagtcgaagacctcctagggctccccgcggccgtgatgtgctccaattgttatgtggcattcccacaatttgaggtggcggaggatgatgaggacgaaggggccctccgctggtgcgaagtccagccttctctttggatctacgtggccgagacccagccgcgttcgttcgtgaagtgggaggacgtggctgtgaggattgtggggcg

SEQ ID NO: 36009 - DNA, 1938 bp, Zea mays
  Peptide Sequence Number=SeqID_77788
atgtgctcccattgttatgtggcattcccacaatttgaggtggcggaggatgatgaggacgaagggcccctccggtgcgctgcccgcatgagcagcgagcgtgatttggttgaggattttattggttatggagtgtggcccttgccgcatggctgggtgctgggcgaagacgggtctgtgaggattgtggggcggtatgcgccgaggacggagagtctgcagagttgggatatccgagggtccaatgttcgcttgaattgggtcttcgagttaaatcgtttgccatacggtggttaccctggggatgacgctgctgcggctgttgactgccgcgggaaaaaaccagtggtcgtggctaaggaaggcccttcgcgggaggctgccccaaccactaagaagagaaaaataggtactgcagtcggggggttgggggtctctgaccgttttgctgtggagttgatggggacttgcgcggccctcgggggaaggatgtcttcgcccgagcttcgggagtcttcggcgcgaatgctgaagatttttccttatggacggaatattgctgctgttgtatcagcattgatggacaaggatcgtcaagatgcggcgcggaagcgccgggcaatcactagggtcggggaccatatgcgcgaggtgaagcgggcgtggggaggcgcgaagtccaccactcctggcagcagcaaaccaccgccggcagcgaagcctgccgtccccgggcccagcaagtcttcggcgggttcgagggctgccgcttctggcgcgggcaagccgccctcgactgagcccgtgaaggagcgaaggtcgccgtcaccggtgcgcaccgacaaagcagcgacgggtggtgccgactttgatatgaacatctgcgtggatgattacctcattgggtcggatgcggggcagctggctattgtcccgtctccggtggcggccacttcacgtgcggcggtggttcgagcgaaggacacttcgcaggacccatggtccaacttatgtgccagcggccagatttcgtcggccgccgccatcaaagacgtggcgggctctgtgtccgagcagctgaggcatgtgtcgcggcagctgaagcatgcggctgccatcgccaaccatgttgagtcgggcaccctgacttcggagttcgctgtcgagagacaacgactcgagggcacgatcgagcgcctccgggcgcagcatacagatgttgttcaggacaagtcagctgtggaaaataagagacgcaggttggcggagaggctagcggctgcggaggccgagaaggaggatgtcaggcgtcggttagcggaggagaggagggacgcaaacaaagcttgtgctgaggcgcagtctgcgcaagccgaggccaagcttacgcgggcggaggccagtctcgcccgccaacgcgccggggagatggagacgatgctcggcagcctgctcgaccgcctggacaagacggagtcctcgatgcgcgcggaggtcgagcggacgcatacgcagcttgtggacgcgtaccgggagatgggtgcgcggaccacgcccttcgaagcgcccagtcaggaggtgggcctccgcttccttggatggctacagaaggagctggaggtgctcccgaccattgtgacgagcctcatgtccttcgcctcccgcgtcacctgcgagggggccgtgaatgccttgtcccgcgagggatgcaggcacttcgaggccttcgaccagtctgacgaaggcttcgagcgcgaaatcttccaggtcgaggacccggtgctaaagcagtcggttggggcgctttttgataggatgtggggcctcacggctgagagactgtccgagagaggtccgatcgggcgatggatcagatggcgcatgacgaagaggttgaggaccttggtgatctggacagcacgctgcccgaggcattag

SEQ ID NO: 36010 - DNA, 258 bp, Zea mays
  Peptide Sequence Number=SeqID_77789
atggatcagatggcgcatgacgaaggggttgaggaccttggtgatctagacagcacgctgcccgaggcatcaggggtggagctggcgcctccatccgatgcaggcgagggcccctcggcgacccccacgccgattggagctggcggagaccccgcgccagccactgcgctgacgggtgaggacgcctcgaaggtggtgggcgaaccagctgccgaagccccgacggcgtcggctgggccttcgcaggtggcagaatag

SEQ ID NO: 36011 - DNA, 261 bp, Zea mays
  Peptide Sequence Number=SeqID_77790
atgtgggcagtcactcaatctgaactcgtacggtccaaccctagggttatgaaggctggggagcaccgggaggataaggagggggaaagttttgtccggtttggacatggcggtggcctgactccttccggtataacagttaagaaaaaaggagatcggcctcctgggactagtaattgtatcacatttgagtcccagaggattggggacgcttcaggtggtatcagagctgttaggttggccgcaggacgtaacccttag

SEQ ID NO: 36012 - DNA, 135 bp, Zea mays
  Peptide Sequence Number=SeqID_77791
atggacgagtctggtatgaaaaaaggagatcggcctcctgggactagtaattgtatcacatttgagtcccagaggattggggacgcttcaggtggtatcggagctgttaggttggccgcaggacgtaacccttag

SEQ ID NO: 36013 - DNA, 135 bp, Zea mays
  Peptide Sequence Number=SeqID_77792
atggacgagtctgggtatgaaaaaggagatcggcctcctgggactagtaattgtatcacatttgagtcccagaggattggggacgcttcaggtggtatcagagctgttaggttggccgcaggacgtaacccttag

SEQ ID NO: 36014 - DNA, 198 bp, Zea mays
  Peptide Sequence Number=SeqID_77793
atggcgcccaagagaaaaactgcgagctcgtctgctgcggtgatccctccgatcgaccccaacagccagttgcctttcgcagaaaaaggagatcggcctcctgggactagtaattgtatcacatttgagtcccagaggattggggacgcttcaggtggtatcagagctgttaggttggccgcaggacgtaacccttag

SEQ ID NO: 36015 - DNA, 165 bp, Zea mays
  Peptide Sequence Number=SeqID_77794
atgccgcaatcaatctctgatatatatgttccaaatgatttgataaaagaaaaaggagatcggcctcctgggactagtaattgtatcacatttgagtcccagaggattggggacgcttcaggtggtatcagagctgttaggttggccgcaggacgtaacccttag

SEQ ID NO: 36016 - DNA, 973 bp, Zea mays
  Peptide Sequence Number=SeqID_77795
cctcctgggactagtaattgtatcacatttgagtcctagaggattggggacgcttcaggtggtatcagagctgttaggttggccgcaggacatggaggttcagtgccaaaccagcttctgccataatgaagatggtttccccaagttactgagagcatgcacaattcgcctcgtaatcaggagccaggcagagtatgatggtcgtgaattcgtcgagcatggcacagagaagtgtgtcgtgattatatacattggatccagtccgtaccatgtggaatggagtgtcactgctgctgggcacagattcaaagacacctgccaagtcgtcgctcgcaaggcattgagggccctgtgtcagatctatgaagaagaagtggccaacacaccgctcagattctttccgccctttcagagagaccgtcccgcttggatggccaggatgcgtgcattggaagagcagcaactgcttgaggacgaccccacagtcgtgtacctcactgcatacatgctcacccttgatgcacagtatgatttcttggctcggcaccaccgtcagatgattgcccgagaagaagatgcagagaagctcaaccccctgaagcaagccaaggatgagcacgtccagaagttgatggaggcctacgtggtaacccataaccaacgtagagccctgcggatccaagagcccgcctcatacaacccagttcaacccaggagagctgaagatccccagattcttgaagtctcccctaaggctatggataagcaagagcaccccgagtcctcccaagatcccccgccggagttgtgtgagcccctcaccatgaagaagattccagcaccatcccttgaagtcaaggaaaaagctgcaagcaccccaccagcaccgtcgccctcagaggagctacaagagccagtcccgcttgaagaagagttcgaccccgtgctgccatctcagtcgccgctagaagaa

SEQ ID NO: 36017 - DNA, 456 bp, Zea mays
  Peptide Sequence Number=SeqID_77796
atggcgagcagccccctgcagcgagctctttcccctaacctgctcgcggctaacaccatggagccgagctccttctctgcagcagccgctgcacctttccccttttcgccactatggtgcgcagccccgtctcttcccctcaacgcagcagatcggacagctcctctgctcctccattcatcgccatcaaatatttttggggctcgattcggcgcgctgtccatctgcgttgcctcgctgcgcacccgcgcgctgtgccgtgccatcccgcttttgcagccatcgttggtgcacgcgcagcgccgcacctcactgttgcatgttccgctgcgcgcgtgccaggcgttcggcgaaatgtctaggtggggtgctgcgcagcgaaccgcacgccgtggtgcccaccgggtgcttgctgcttttgcgcagccccgccgtcgtcatcattcattccggtga

SEQ ID NO: 36018 - DNA, 456 bp, Zea mays
  Peptide Sequence Number=SeqID_77797
atggcgagcagccccctgcagcgagctctttcccctaacctgctcgcggctaacaccatggagccgagctccttctatgcagcagccgctgcacctttccccttttcgccactatggtgcgcagccccgtctcttcccctcaacgcagcagatcggacagctcctttgctcctccattcatcgccgtcaaatatttttggggctcgattcggcgcgctgtccatctgcgttgcctcgctgcgcacccgcgcgctgtgccgtgccatcccgcttttgcagccatcgttggtgcacgcgcagcgccgcacctcactgttgcatgttccgctgcgcgcgtgccaggcgttcggcgaaatgtctaggtggggtgctgcgcagcgaaccgcacgccgtggtgcccaccgggtgcttgctgcttttgcgcagccccgccgtcgtcatcattcattccggtga

SEQ ID NO: 36019 - DNA, 630 bp, Zea mays
  Peptide Sequence Number=SeqID_77798
atggcgagcagccccctgcagcgagctctttcccctaacctgctcgtggctaacaccatggagccgagctccttctctgcagcagccgctgcacctttccccttttcgccactatggtgcgcagccccgtctcttcccctcaacgcggcagatcggacagctcctctgctcctccattcatcgccgtcaaatatttttggggctcgattcggcgcgctgtccatctgcgttgcctcgctgcgcacccgcgcgctgtgccgtgccatcccgcttttgcagccatcgttggtgcacgcgcagcgccgcacctcactgttgcatgttccgctgcgcgcgtgccaggcgttcggcgaaatgtctaggtggggtgctgcgcagcgaaccgcacgccgtggtgcccaccgggtgcttgctgcttttgcgcagccctgtcgtcgtcgtcattcattccgaaaaggaaccccgtgttttgtgtggagaagaaggcaagtcgttcaacgctcgtcgatgttcggagcgatgcacaaatcggaatcaccgtcgttcttgcaaacgccgtttgggtttgatatggttaaattaggtgaaaaacgtaaattacgtgacatatatttagtgtttggaagatga

SEQ ID NO: 36020 - DNA, 537 bp, Zea mays
  Peptide Sequence Number=SeqID_77799
atggaggatggcgttcttaagctgttcgggatgatgtcgaagcgaaactcgggccacggtcgagcaccgagcccatctgcgaggcacgtgaggtggaggggggcagtctcggggagggggcaatctccaggatatggtagtggagtggcggcgcgcggtcgagaaggtgtacgtgggagccagtggagggatgacgcaacgggcggtacagaaacgtcaggtacaggtacaaccacaacggctcgggaattccatggctctattggattggatggaaaaattaccctgacgtttccctaccgcccgttgcgtcatccctccactggctcccacgtacaccttctcgaccgcgcgccgccactccactaccatatcccggagattgccccctccccgagactgcccccctccacctcacgtgcctcgcagacgggcgacctcgcatcgcgggctcggtgctcgaccgtggcccgagtttcgcttcgacatcatcccgaacagcttgagaacgccatcctccatctcatcacagtataa

SEQ ID NO: 36021 - DNA, 171 bp, Zea mays
  Peptide Sequence Number=SeqID_77800
atggaggatggcgttctcgagctgttcgggatgacgtcgaagcgaaactcgggccacggtcgagcaccaagcccgcgatgcgagtggagggatgacgcaaccggcggtagagcagcgtcggggtcggtgtccgacagagcttcgcgctgcggcggcgggagggagaggcag

SEQ ID NO: 36022 - DNA, 477 bp, Zea mays
  Peptide Sequence Number=SeqID_77801
atggcagggatgaaggccaagtcacaccagcaaccaatcatcctaaggagtacctgcaaaaattgtgtcacaagcaaggctgagtatactaatactcagctagacttacccgtgaccgcacttgtacccaccataaccggaatgggagaccacgtctcaggtcgcgtgaggagggcatctgcgggcaggttcactcagttcttctactatcactggatattaactctagaggagatggaggatggcgttctcaagctgttcgggatgatgtcgaagcgaaactcgggccacggtcgagcaccgagcccgcgatgcgaggtcggcccgtctgcgaggcacgcgaggtggaggggggcagtctcggggagggggcaatctccgggatatggtagtggagtggcggcgcgcagtcgagaaggtgtacgtgggagccagtggagggatgacgcaacgggcggtagagaaacgtcagggtaa

SEQ ID NO: 36023 - DNA, 678 bp, Zea mays
  Peptide Sequence Number=SeqID_77802
atgactgaaaatcttgcttcagttccatatacaagcttccctgcccaggcagagctaactgttgtaggttgcagcaaaggattggatgcaaaagggcgctggacacgtgctcgtgtggcccaacttacgtccaatctgtctctaagatacaccactgtcacgtttttagcatcatttgaatttggagaagaaaattccaatgtgtttgcagatttgaaagatgacaatggatctgatagtggcattaattttgattataatgatccagacatgccaaacaacatagatgttgatctagacgttccaacatatcctgatgagttatctggaatttgggtaatgattcacttccatttttcctatgctcagattattgttgcaactcccaaaagtactcatggcacacatgatggcatagatacacatgaaagcctcgatgatgacttgtgttggttacatcagtgttatgcttttcctttcaatttcccgtttgcaaggaatctccacaacttggagtctcttgcccttacacttgagattcacaaagaaatacagagtaagggagggaagcaacacacacaaatccacagcaaaatacgcacacacacggccaagaatcgagctcaaaagactatcccaaagttctcactagaacggagctcgaatcacttagaatga

SEQ ID NO: 36024 - DNA, 381 bp, Zea mays
  Peptide Sequence Number=SeqID_77803
atgacacaacaatctggtgaaatggaaatggagcacagtctgcgcatgagtccctcaaaaggagctcacacaatactatcatttgaatttggagaagaaaattccaatgtgtttgcatatttgaaagatgacaatggatctgatagtggcattaattttgattataatgatccagacatgccaaacaacatagatgttgatccagacgtttcaacatatcctgatgagattattgctgcaactcccaaaagtactcatggcacacatgatggcatagatacacatgaaagcctcgatgatgacttgtgttggttacatctgtttaattgtgcattactgaacatattctctcatcctgctagctgtttcagacacctatag

SEQ ID NO: 36025 - DNA, 996 bp, Zea mays
  Peptide Sequence Number=SeqID_77804
atggttggcatcgtcagccctgaacatactaaatcttttgaagcacaacagtctcaggaggagcaacattatggtttccaatcaccctcttgttttgaaaaggaacttaagattgaattttcatctaagcttggaggtcccgtaggaccaaacactcgcacttttgtggatgaaatcgtattatttacaaagaaaaaggcactgctcattggagtgaaaaagtggaaatatatagagctcaatattagatcttctatagcctccgacatactgagagacctagaaactggtatagaaccaactgatctaaccctttggatcagtactcattgtaagaatggtgaatggtctaaagaggcttcacatggtatttatgagaaggcacctgagaaaattgttgagaaagtatatcaagatgacatatttgttctgacaagagaagaggaaaatgctattttccaaacatcgttcaaggaaacaacaggatgcaaggcaaacaggcttcatgatcatgggtacctatcaagatatccaacaagaagtcaagtgatgaattcaaaattcctcgaacaagcttgtgcaacggctgcaaccaaccaaaagaacatcgaactcgaaagccaggtccaactattaaatgaaaaactttccaaccgagaaagcatcactccagtcgatcctcctttagtgatcccaactaaaactcttagactcatcccagctgatcctcttgcacctacaccaagtagtgaaaacaacattcgtaccccagacacaaacaacaagaaagacaatgtgccagtgaactatattaactcttacactctaaggaatggtacaatctgtaagtgcaagcgagaagcaaagcagatcaacttaagaagttatatcgaagtgtgtttaagttttttggcatcatttgaatttggagaagaaaattccaatgtgtttggagatttgaaagatcacaatggatctgatactggcattatttaa

SEQ ID NO: 36026 - DNA, 270 bp, Zea mays
  Peptide Sequence Number=SeqID_77805
atggagacggtggggagcatccgagaggagtcagaagcggagcaccgcttgcgtgtggagaaggcctgcggctctctacggagttactcgaccgtggtcttcgtcaaagtgtcgagtcctgcgaagggtgtccctgcccgctttgcctccgtcggaccagcggctgcagcgaaggcctggagcgaagggtggcgtctttgccttcgccccaacatttgccctccgagggaccagttcgacaaagtcacctggtgccgaagacgtcgctag

SEQ ID NO: 36027 - DNA, 768 bp, Zea mays
  Peptide Sequence Number=SeqID_77806
atgagcgtggaccgggcgaaacagaggggaagggagaaaacccatggggtgtctcgcgttgatggcgatgaggcggagctcaccgagacaacggatgcgacagaaactcgacggcggccacagaatgaacagcggaccacggtggagctccacgggtgtgcgcgcggtgcgagagagagaggtgcgagggggtctgctagggcgcaactgagcgagtgggtgcatgttctagaaagaggtcgagcgcgtgggggtggccaggaaacgcgcgtccacgtcgaagagtgcgggcgggaggttagggaaggggaggtggctgacaggtggggtcagcgagccagcgagggcgcgtacgcaaacagacgatcaacgctgacagagcgggcccaccggacagaaggagggagcaagcacgtgcgcgaaagaaccggagctgacaagccggccccaccgcgcaacgggagggagagagcgcggacgcgggccatcgctgacagttggctcaccggtggcacacagttggctcaccgttggcacacttttggtgcaccggactatccgccgccatcgtgtaccggagggaacgaggcccgcggcgtttcggccagaagctcgatagtggagacggcggggagcatccgagaggagccggaagcggagcaccacttgcgtgtggagaaggcccgcggctctctacggagttactcaaccgaggtgcttggccctcgcgtgggcttccctttgcgtaggggcaccaacgaggattag

SEQ ID NO: 36028 - DNA, 240 bp, Zea mays
  Peptide Sequence Number=SeqID_77807
atggcggtcgggcgagttattcctgcactggagcttcctataaactatagcggcaatgctcagcttcaaccatcctctttgaagctaaagagcaaggtagagatgcaaactctcatggatgatgctggtctttaccgaggtatccggaaccacgcaatgtcctgcctaatcctcgttggtgccgctatgcaaagggaagcccacacgagggccaagcaccttggccgagtaactccgtag

SEQ ID NO: 36029 - DNA, 480 bp, Zea mays
  Peptide Sequence Number=SeqID_77808
atggcgcagtcgatcgttggcagtctgagagccattggcgcaccggacatgtccagtgcacactggacagtccggtgcccccttctagctgttggcttggccacgtgtcccgcgcagattgcacggccgaccgttggctcaccggaacagtccggtgcacaccggacagtccgggtgaattatagccatacgtcgtcggtgaaattcccgagagcggccacttcgctcgagccagcctggcgcaccggacactgtccggcacttgtgttggacactaaatcaccaaaatacttagaaatggcccaagggcacatttccctttcaaccctccgtggcaagaggctggacggtggtgtatctgtgctcccggtgaggaagcgacaattttttgttgcttttgctctaaggtggttcccaaggaagaaaaacaagagtgaagccacgggaggacttggtcctccatatagaacttttgtttaa

SEQ ID NO: 36030 - DNA, 174 bp, Zea mays
  Peptide Sequence Number=SeqID_77809
atggcgatagtagtgtgtaccctccgtggcaagaggctggacggtggtgtatccgtgctctcggtgaggaagcgacaattttttgttgcttttgctccaaggtggttcccaaggaagaaaaacaagagtgaagccgcgggaggacttggtcctccctatagaacttttgtttaa

SEQ ID NO: 36031 - DNA, 237 bp, Zea mays
  Peptide Sequence Number=SeqID_77810
atggcgagagtagcgtgtaccctccgtggcaagaggctggacggtggtgtatctgtgctctcggtgaggaagcgacaaatttttgttgcttttgctccaaggtggttcccaaggaagaaaaacaagagtgaagccgcgggaggacttggtcctccatatagaacttttgtgaaagaacttatcgggaggagtttttacctcccttggtattgtaataatattactctgcactcctag

SEQ ID NO: 36032 - DNA, 249 bp, Zea mays
  Peptide Sequence Number=SeqID_77811
atggaaaccgtgaaaactagtgctttatatagtatagatcattcaggagatgaactatttgcaaaattttatgctgcacttgatgaaatcaatttctttaagacatcacctgctggagctgaagatcctggcctactttcaaaagcaacacaatactttgatgatgcattactggcgatgcagaagttgggaaagaaaagggcaagcttagtagacattgcagagtcctttaaatcaagagaaaattaa

SEQ ID NO: 36033 - DNA, 757 bp, Zea mays
  Peptide Sequence Number=SeqID_77812
atgggcgtattgcctgccaacggaatggacatgcatgtcgcctgcaggatggcctggtcgccgccccacatcgcctgccagtgggatgaacagggctcattaaatgccgaggcggcacgtcacctgccagtggaatggacagaatcccgggaccctgctatgagcggcccggaccctacacagaggggtccgaaaaccgtcctaggggtccggctcgcgcccgtggaggtcctggaccttacccaggggtccgacactttcccatgggggcctggacccaccgttgatgccttgagtaatattgtcttctctggccacgtggcggccccggagccgtctacatggtgggtcgaattagctcctggtgttgatcctgaagctctggaagttgataaggattgtctggagtccatttttagtgttaactcaacagccactggtgacgcaatacaaccaggactgttgtttgagctatttgcttctctcgaagcaaatgaaagagaccaggcaagagctgctttgctgtcacaatctgtttcaaacaagccatctcaaactgcgggagatgaactatttgcaaaattttatgctgcacttgatgaaatcaatttctttaagacatcacctgctggagctgaagatcctggtctactttcaaaagcaacacaatactttgatgatgcattactggcgatgcagaagttgggaaagaaaagggcaagcttagtagacattgcagagtcctttaaatcaagag

SEQ ID NO: 36034 - DNA, 684 bp, Zea mays
  Peptide Sequence Number=SeqID_77813
atggatgaagtatttgttgaaatcgggacgattttggttggtgccctcaatgaccagcctgctccagggcccaggcatccatctgagctctttgcattatgtagatgggactctgacagcacagttggtgagtttgatgggcactcaaagagggttctgagctgtgacttcaagccaacacgtccatttcgcattgtgacatgcggtgaagattttctggctaacttttatgaaggaccaccattcaaattcaagcattccataagggatcactcgaattttgttaactgtatccggtatgctcctgatggtagtaagtttatcactgtgagttctgataagaagggtttgatatatgatggtaaaactggagaaaaaataggagagctttccactgaaggcggacacacagggagcatatatgctgttagctggaatcctgacagtaaacaggttctaacagtttctgctgataaatctgcgaaagtatgggatatctttgaagatgcaagtgggaaattgaatcgaactttggtttgccctggtataggaggtgtggatgatatgcttgttggttgtctctggcagaatggtcatctcgtgacagtctctcttggtgggacatttaatgtgttctctgcaagcaacctagaccaagaaccagttacatttgaagacagttag

SEQ ID NO: 36035 - DNA, 1182 bp, Zea mays
  Peptide Sequence Number=SeqID_77814
atgaccagcctgctccagggcccaggcatgcatctgaggtctgagccccagtgctggaaattcaaaggcatgggagagctgcctggtccagggagcatatatgctgttagctggaatcctgacagtaaacaggttctaacagtttctgctgataaatctgcgaaagtatgggatatctttgaagatgcaagtgggaaattgaatcgaactttggtttgccctggtataggaggtgtggatgatatgcttgttggttgtctctggcagaatgatcatctcgtgacagtctctcttggtgggacatttaatgtgttctctgcaagcaacccagaccaagaaccagttacatttgaagacgtagaagaagagcttgttacctcaggttatgattataagccgtccgttctaccattctgtgatctcagccgtccgatcctgcccaccaaccccacgcggcctctcccaccctgccttccgtcgcccccaatccttttcctccccgtcgcagcgtcgccggctgccacgggtttcgcttcccgtctcaccgtcgtcagcatgggggacaactacgatgacgaaggcgagccgatcatgaacctcaacgaacgggaaccctcccctgagcatcagccgtatgaagacctcgatgacgacctcgacggcggcggcgattggacccgcgaccgctctccgacccccgtccacggcgacgacggggcagggtcctcctccaagccccgaaagcaccttctcaagaagggcggtggtggaggcatgcccagcgatgacgggctggatgactatgggttggcggacgaggacgcggacccttcggatgaggcgaggaagaggaagggccgcgcgagcaaagagcccctattcccctccccttccgctcgagtccgtcgccgtcgctctgccctcgtgcggaggccttcaggtcgaggcgccgagaagaaggacgatcgcgtgctcgtgccagatttggggtcgctcaccagcatccatgatagggcgcgtgaactcttctactacctcaagggtgggcaggtggactatggcgaggatcacaacaagacttgcggccacaacaggtttgggagaatatatcacacagggcactatcctatttgttacgagcacaacccagtgcattttgtggggcactctgctggcgcgtag

SEQ ID NO: 36036 - DNA, 291 bp, Zea mays
  Peptide Sequence Number=SeqID_77815
atggcgaggatcacaacaagacttgcggccacaacaggtttgggagaatatatcacacagggcactatcctatttgttacgagcacaacccagtgcattttgtggggcactctgctggcgcgcagaggaagttgtggtggaaaagaccaaaacaatgataaaaagcctctacatcttgtcaaaggtgcctttggacaggttgcccttctttctgttcttggaagaggttgttccacgaggaagctaagcttcaagcccttagattcagtgatgattgtccagactgtataa

SEQ ID NO: 36037 - DNA, 303 bp, Zea mays
  Peptide Sequence Number=SeqID_77816
atggttcatgaccagagaccttggtaccgacaggcgccaagcagcaaaatcctgggtgcacattcacaggaggccctcagtttcgctgcagtaccatacgttcttaaccatgacaccattacaaaactggcaccaatactgaatcgcatgtgctttgctgtcgggcgtagaagaccattcgtcagccaacttcatagagggagggggcctgaaaaggtccagttcaccatcaagtgcttctcccgctacatgagaaggtccggcttccatcccgacaggattcgcagggacgttcgggtgtag

SEQ ID NO: 36038 - DNA, 309 bp, Zea mays
  Peptide Sequence Number=SeqID_77817
atgtcagccagaagaacacataaggttccatgtgtgcaatttgcttcttctgatgacactgtactatctgagtctgttgggcgggcggctattacgcaattttacccaaacagaatcagatgcaccatcttgggtaaaacacaaagaaagagctttacggtcgggcatagaagaccattcgtcaaccaacttcatagagggagggggcctgaaaaggtccagttcaccatgaagtgcttctcccgctacatgagaaggtccgacttccatcccgacatgattcgcaaggacgttcgggtgcagttgtga

SEQ ID NO: 36039 - DNA, 396 bp, Zea mays
  Peptide Sequence Number=SeqID_77818
atgaagaaagtagcagtggtagcaacaatcctatcagggatctggaatcaagtcgaacagcttcaatcagaactccgttacaggaatgatctatgggtcgcggatgcagtcatccgctacttgcaagaccaactcgcgaaacgagatctagtgctcgattggacgggtaactctcgtctactcacctgggctaaggaagccaaagctcgagactgcgtgaaggagcttagcttagtcacggataacttgcaggtctgtggtaatacactacatgaagaagttcatgtgttgtattcgcaactgcacccgaacgtccctgcgaatcctgtcgggatggaagccagaccttctcatgtagcgggagaagcacttcatggtgaactggaccttttttag

SEQ ID NO: 36040 - DNA, 897 bp, Zea mays
  Peptide Sequence Number=SeqID_77819
atgacctcagggcggatgctgctgccacaaggccctcgcccacgtccccactcgaggggcgaggacgagcagaaggccgtagagttggaggtaccaacttccgtgaagttgcgttcctccaacgacgacaaggcggaagaactgcgggcgccccccatccgggggctcggaaggtggaaaaacgtgatgcatgaggggagcgcgaagacattgttgcctttcgagggggtcaccctccttttaaaggcaactcaccctactcgcgtcctcggccatcgtgggctgagtcttctccaacacgctccaaggtcttccccctacgacacgggggctgggtcccacgcgtcatgcaagttggcccagggcaggagaagccaaactgtcgcgcacgggatcgggaaaggggatactccgaaagggatccttctccgcgaaggaagcgggccccgagcccccctactgatcagaggttcgaaggcttgcccctcggaagggttcaacagccgcctcagagcactcgggctccacgcccattactggtcagaggttcgaaggccggccccttggaagggttcaacggccgcctcaggccactcgggctccgcgcccactactgatcaggggttcgtaggctggcccccgaagggttcgacagccgcctcagacgcagagcgaggaatgaccctgggtcaaggctcggtccactcaagggacacgatctcgcctcacccgagcccagcctcgggcaagggcagccggccccggaggattcacgtctcgcccgaggaccccctcaagcaacggacacaccttcggctcgcccgaggcccaatcttcgccaagaagcaaccttggccagatcgccacgccaaccgaccgaatcgcaggagcatttaa

SEQ ID NO: 36041 - DNA, 1083 bp, Zea mays
  Peptide Sequence Number=SeqID_77820
atggggagcgcccgcgattcttccgccttgtcgtcgtcggaggaacgcaacttctcggaagttggcagcccggccgcatcccctcgccggtggtcacccaagacggtgaccaccagttccggggtggggagaagcaagccgggctgcgacctctgccccgccctcagcttcaaggatcttcatcatcctggctggggcagaggccgtactaagccggagctctacctcccgcgcagtttcgtgggtcaccttctccctcagcattcaggggagagggcgctcaccggcctagcgggagggtcggacttcgacaacgcggggctggtcggtggcgagtgtcgtcagcttcagcgcgttgagctcgctggctcagttggctctggctcggctcccggtgccccctcctgccacgagagcggtcgtcgcgcctcgcgtaccggaggaccgcccaagacgtcgcgcgctgctagggcggcgttcgtgttcttgggctgtcttgcctttgccccgatggcttccgtcgtcggcgctgaggtggtggcggctaaagaagtcctcgtcgccgacgggatcaccgccaccatcctcgctccaggcctccggctctttggctttgatagcttgtcctcgcccctcgagtggggacgtgggcgagggccttgttgcagtagcgtccgcgctgaggccatcgctgctgcagtttggccacctggagcggaggtcgttgtcgctgctgccggagcgggcatcggcgagccaccaggggtttcgtcgccccgcaggccctccaatgtggggggttgttcgtacctgcgggggtggaaccggagttccgtttgtaacgacaccttgagtgccggtgtctgttcattgtggctgtcggggcctgaacatgagtccctcggctcagtcggccttgccgctcgaggtttctcttgcttagttaaaggaaccctcggccgctctgtggctcggtcggacttcgccgaaggtggagttgacgccgagggtgctgctgctcccccaccgtcaagaattgtttgtccgagcaagagttacttttcacggaaggcgatgagtgag

SEQ ID NO: 36042 - DNA, 1194 bp, Zea mays
  Peptide Sequence Number=SeqID_77821
atggggagcgcccgcgattcttccgccttgtcgtcgtcggaggaacgcaacttctcggaagttggcagcccggccgcatcccctcgccggtggtcacccaagacggtgaccaccagttccggggtggggagaagcaagccgggctgcgacctctgccccgccctcagcttcaaggatcttcatcatcctggctggggcagaggccgtactaagccggagctctacctcccgcgcagtttcgtgggtcaccttctccctcagcattcaggggagagggcgctcaccggcctagcgggagggtcggacttcgacaacgcggggctggtcggtggcgagtgtcgtcagcttcagcgcgttgagctcgctggctcagttggctctggctcggctcccggtgccccctcctgccacgagagcggtcgtcgcgcctcgcgtaccggaggaccgcccaagacgtcgcgcgctgctagggcggcgttcgtgttcttgggctgtcttgcctttgccccgatggcttccgtcgtcggcgctgaggtggtggcggctaaagaagtcctcgtcgccgacgggatcaccgccaccatcctcgctccaggcctccggctctttggctttgatagcttgtcctcgcccctcgagtggggacgtgggcgagggccttgttgcagtagcgtccgcgctgaggccatcgctgctgcagtttggccacctggagcggaggtcgttgtcgctgctgccggagcgggcatcggcgagccaccaggggtttcgtcgccccgcaggccctccaatgtggggggttgttcgtacctgcgggggtggaaccggagttccgtttgtaacgacaccttgagtgccggtgtctgttcattgtggctgtcggggcctgaacatgagtccctcggctcagtcggccttgccgctcgaggtttctcttgcttagttaaaggaaccctcggccgctctgtggctcggtcggacttcgccgaaggtggagttgacgccgagggtgctgctgctcccccaccgtcaagaattgtttgtccgagcaagagttacttttcacggaaggcgatgagtgagaaggtgatgagtgaggcatccgtatcccggaggcgtaggagtgcctcggctcggtcggccttggctgcttacgtgtactccgtcgttttcaggatcccactttcgaagtag

SEQ ID NO: 36043 - DNA, 1482 bp, Zea mays
  Peptide Sequence Number=SeqID_77822
atggggcggtcgcgaggggtgctgagttccggcgacgacgacaccgggcacaggtcgaagcggaggagagtctcgtcgggcggggatgcgacggactccatttcagcctccatcgggggagctggagagggagggggcaagaaggcgctctatcactgcaactactgcaacaaggacatctccgggaagatacggatcaagtgctccaagtgccctgacttcgacctttgcgtggagtgtttctctgtcggcgctgaagtcaccccgcaccgcagcaaccatccttacaaagtcatggatatgtctcatgttaatggcaagaataggaaggaacttctagctatggctaaagtacagggtgagagtaaaaaagggactttgctgttacctggagaactcactcctaaggttgaatctcaattttctccctccagggtcaaggtggaagatgcacttggagaaggtccagcaggtcgatcaccttcacacatggctgttgatgttcatgtagatagaagtgttggtgtgaagaagcccagatattctgcagatgaaggcccttcgttgactgaactgagtggatacaatgcaaagagacatgagtttgacccagaatacgataatgatgccgaacaagctcttgctgagatggaatttaaagaaactgattcggaaactgatcgtgaactgaaactccgtgtgctgcgtatttacctctccagggaactttaccatcgctataaagtcttcatgcgttttctttctaaggaggaacatgaagccctcgttaggagtgttattgaggagcgaaaaattcggaggagaattcaagaactccaggaatgccgttctgctggatgccgcacactggctgaagcaaagatacacatagagcaaaagaggaaaaaagaatacgagctgaatgcgcaaaaagctaaggatagcagtcaacttaatgcaaataataaatcagtacaaaagatgaatcgacctatgaaaattgagtccgatgggaatttggatccaaagaaaggtggtgctggcttggattctcctaagacaacaggacctacaagtgttaagcagtgggatgactgggatatagttggtcttcctggggcagagctattaagtgctagcgaggtgctgatgcaggagatattcaagggtagcgtcctaaagaaggaagacgcccacgtcttatttaaggtcgatcctaccaaagtagatagtgtttatgatatgacgaacgagaagggcgagttctgggtggcgatccactgccggagaagcctgtatgctcggctaatgagccgccatgtcaagctaaggaagttcttgctcagcctcccgatccccgccaagtaccactacctgatgcagatcggtggcaagctccacgcggagaaggacgggaagctctggatagggtccgtcctgatgccgttcatcgctgtctttgatctcacgatgagtggttag

SEQ ID NO: 36044 - DNA, 1290 bp, Zea mays
  Peptide Sequence Number=SeqID_77823
atggggcggtcgcgaggggtgctgagttccggcgacgacgacaccgggcacaggtcgaagcggaggagagtctcgtcgggcggggatgcgacggactccatttcagcctccatcgggggagctggagagggagggggcaagaaggcgctctatcactgcaactactgcaacaaggacatctccgggaagatacggatcaagtgctccaagtgccctgacttcgacctttgcgtggagtgtttctctgtcggcgctgaagtcaccccgcaccgcagcaaccatccttacaaagtcatggatatgtctcatgttaatggcaagaataggaaggaacttctagctatggctaaagtacagggtgagagtaaaaaagggactttgctgttacctggagaactcactcctaaggttgaatctcaattttctccctccagggtcaaggtggaagatgcacttggagaaggtccagcaggtcgatcaccttcacacatggctgttgatgttcatgtagatagaagtgttggtgtgaagaagcccagatattctgcagatgaaggcccttcgttgactgaactgagtggatacaatgcaaagagacatgagtttgacccagaatacgataatgatgccgaacaagctcttgctgagatggaatttaaagaaactgattcggaaactgatcgtgaactgaaactccgtgtgctgcgtatttacctctccagggaactttaccatcgctataaagtcttcatgcgttttctttctaaggaggaacatgaagccctcgttaggagtgttattgaggagcgaaaaattcggaggagaattcaagaactccaggaatgccgttctgctggatgccgcacactggctgaagcaaagatacacatagagcaaaagaggaaaaaagaatacgagctgaatgcgcaaaaagctaaggatagcagtcaacttaatgcaaataataaatcagtacaaaagatgaatcgacctatgaaaattgagtccgatgggaatttggatccaaagaaaggtggtgctggcttggattctcctaagacaacaggacctacaagtgttaagcagtgggatgactgggatatagttggtcttcctggggcagagctattaagtgctagcgaggtgctgatgcaggagatattcaagggtagcgtcctaaagaaggaagacgcccacgtcttatttaaggtcgatcctaccaaagtagatagtgtttatgatatggtatctaaaaaactgggcaaccatgaggaggccccaaccgtctag

SEQ ID NO: 36045 - DNA, 1497 bp, Zea mays
  Peptide Sequence Number=SeqID_77824
atggggcggtcgcgaggggtgctgagttccggcgacgacgacaccgggcacaggtcgaagcggaggagagtctcgtcgggcggggatgcgacggactccatttcagcctccatcgggggagctggagagggagggggcaagaaggcgctctatcactgcaactactgcaacaaggacatctccgggaagatacggatcaagtgctccaagtgccctgacttcgacctttgcgtggagtgtttctctgtcggcgctgaagtcaccccgcaccgcagcaaccatccttacaaagtcatggatatgtctcatgttaatggcaagaataggaaggaacttctagctatggctaaagtacagggtgagagtaaaaaagggactttgctgttacctggagaactcactcctaaggttgaatctcaattttctccctccagggtcaaggtggaagatgcacttggagaaggtccagcaggtcgatcaccttcacacatggctgttgatgttcatgtagatagaagtgttggtgtgaagaagcccagatattctgcagatgaaggcccttcgttgactgaactgagtggatacaatgcaaagagacatgagtttgacccagaatacgataatgatgccgaacaagctcttgctgagatggaatttaaagaaactgattcggaaactgatcgtgaactgaaactccgtgtgctgcgtatttacctctccagggaactttaccatcgctataaagtcttcatgcgttttctttctaaggaggaacatgaagccctcgttaggagtgttattgaggagcgaaaaattcggaggagaattcaagaactccaggaatgccgttctgctggatgccgcacactggctgaagcaaagatacacatagagcaaaagaggaaaaaagaatacgagctgaatgcgcaaaaagctaaggatagcagtcaacttaatgcaaataataaatcagtacaaaagatgaatcgacctatgaaaattgagtccgatgggaatttggatccaaagaaaggtggtgctggcttggattctcctaagacaacaggacctacaagtgttaagcagtgggatgactgggatatagttggtcttcctggggcagagctattaagtgctagcgaggtgctgatgcaggagatattcaagggtagcgtcctaaagaaggaagacgcccacgtcttatttaaggtcgatcctaccaaagtagatagtgtttatgatatgacgaacgagaagggcgagttctgggtggcgatccactgccggagaagcctgtatgctcggctaatgagccgccatgtcaagctaaggaagttcttgctcagcctcccgatccccgccaagtaccactacctgatgcagatcggtggcaagctccacgcggtgatcatcaagtacagcccagagggtcaggtgcttgatatcttggaggacaccaagggagaggtcaggagaaggacgggaagctctggatag

SEQ ID NO: 36046 - DNA, 624 bp, Zea mays
  Peptide Sequence Number=SeqID_77825
atgtctaagcaaactggcgcagcatcgttcatccacacccaaatcctagaaaaccacgagtgcataagccggcggcacctgaccggggcgcgccaaggacgggactctaagatagaaagaatcatcggcagcggtctcgcgatcgggaggggagcagggcgcatgcgcgagcaccggcactgcaaggacgagcatgagccccagccggggtgcggggagggggcggggcaggcggcggcgaactgcgcggcggtgtgctgctgcttcccgctggcgctgctcgacgtcctgctgctcgtcaccgtccggctccccacgggcgtcatgcggcgggtgaggaggaggcgccgccaccgcggccctacaggagccggagccggagccaacaggaagaggccggcctccgcgggggcggcgcccgcgccgccgtcgggaagcagcgccaaggcgatgatcggcgcgactctagtcaccgagaaggaagagaaggcgcgcggcgaggcggagtcgtcggcggcgacggctgagctggagcgcgagatcatggactcccacttctacggcgccggcttctggcgcagcgtctcctccagctccagctcctcgtccatgcgctgccaatag

SEQ ID NO: 36047 - DNA, 1185 bp, Zea mays
  Peptide Sequence Number=SeqID_77826
ttcaagggggcacatataaggatactgagccccgacatgtgggtcagggacaaatggaaggaagaaactactgcctgcaacgccaagcatcgggtctccgcctgggcggggagcagtagcgttatgcggacaggtccgcaccaggctgggcccggacacgtgtcggcaccagacccctgcctgagcaaggcctgggtattctctgtcccagagtctcgggacccggttgtgggcagcccggatccccatagaggggtccgggacccgtcccgggggtctgggtcgcgcccgtgggggtcccggaccctacccgaaggtccggtctacatgaaccgtcatccaaggagtatgactcgtgggcccgggcccgtgtcagagactgggccgctgctttcgtcatcgatgctggagattgacattgagaggttcgtccgtgacaataccttcgcagagatttgggagggtagggcaaaggacatggaggcctcgctggttgagtaccaggactgtgttttccaagtcaatttgaaggaggaagagatcaaggtgcgtaatgagtccttgcagtaccaagccagggactcggatgaacttcagtcgaagcttaaaccaaacgatgcgggagctggccggcggcacctgaccggggcgcgccaaggacgggactctaagatagaaagaatcatcggcagcggtctcgcgatcgggaggggagcagggcgcatgcgcgagcaccggcactgcaaggacgagcatgagccccagccggggtgcggggagggggcggggcaggcggcggcgaactgcgcggcggtgtgctgctgcttcccgctggcgctgctcgacgtcctgctgctcgtcaccgtccggctccccacgggcgtcatgcggcgggtgaggaggaggcgccgccaccgcggccctacaggagccggagccggagccaacaggaagaggccggcctccgcgggggcggcgcccgcgccgccgtcgggaagcagcgccaaggcgatgatcggcgcgactctagtcaccgagaaggaagagaaggcgcgcggcgaggcggagtcgtcggcggcgacggctgagctggagcgcgagatcatggactcccacttctacggcgccggcttctggcgcagcgtctcctccagctccagctcctcgtccatgcgctgccaatag

SEQ ID NO: 36048 - DNA, 1533 bp, Zea mays
  Peptide Sequence Number=SeqID_77827
aactcacccttctctggccgcggcgcggacccacggtgcgcacagcaacgacggaaccgcggcggcatccatatcgtcccaagaaagaaaagaaagaaagaaaacacccaccgctcagtcagtatcagttgccatcaacggaaccagcgcgacaccaccagtccacaggtggaggaaggcaaggcagtacgaacagagcggagctgcaagcgcaaacacaccttggatcctgttgagcaccttctcgatcttggcacggcagcggctgcattccagccgcggttcgcagttgcagggctggtccaccccgcgcacgacgcttggaccgtggcgcccgccgtgccatgcctacagggggcacatataaggatactgagccccgacatgtgggtcagggacaaatggaaggaagaaactactgcctgcaacgccaagcatcgggtctccgcctgggcggggagcagtagcgttatgcggacaggtccgcaccaggctgggcccggacacgtgtcggcaccagacccctgcctgagcaaggcctgggtattctctgtcccagagtctcgggacccggttgtgggcagcccggatccccatagaggggtccgggacccgtcccgggggtctgggtcgcgcccgtgggggtcccggaccctacccgaaggtccggtctacatgaaccgtcatccaaggagtatgactcgtgggcccgggcccgtgtcagagactgggccgctgctttcgtcatcgatgctggagattgacattgagaggttcgtccgtgacaataccttcgcagagatttgggagggtagggcaaaggacatggaggcctcgctggttgagtaccaggactgtgttttccaagtcaatttgaaggaggaagagatcaaggtgcgtaatgagtccttgcagtaccaagccagggactcggatgaacttcagtcgaagcttaaaccaaacgatgcgggagctggccggcggcacctgaccggggcgcgccaaggacgggactctaagatagaaagaatcatcggcagcggtctcgcgatcgggaggggagcagggcgcatgcgcgagcaccggcactgcaaggacgagcatgagccccagccggggtgcggggagggggcggggcaggcggcggcgaactgcgcggcggtgtgctgctgcttcccgctggcgctgctcgacgtcctgctgctcgtcaccgtccggctccccacgggcgtcatgcggcgggtgaggaggaggcgccgccaccgcggccctacaggagccggagccggagccaacaggaagaggccggcctccgcgggggcggcgcccgcgccgccgtcgggaagcagcgccaaggcgatgatcggcgcgactctagtcaccgagaaggaagagaaggcgcgcggcgaggcggagtcgtcggcggcgacggctgagctggagcgcgagatcatggactcccacttctacggcgccggcttctggcgcagcgtctcctccagctccagctcctcgtccatgcgctgccaatag

SEQ ID NO: 36049 - DNA, 237 bp, Zea mays
  Peptide Sequence Number=SeqID_77828
atgccggggaaggcgaactgttgctgcccagctaggatgcaacattccgtcctcctcctcgctttcgtggcgaggacctgccggtgcgctttggagtggcccgcgctcgccggtgcggcgttggtggagaggcggacgctgccgtcggtgctgacgtggtggcagctggaggaagcttccccatcgtcgaggccgtcagcgccgcccacggaccgacctccggctctttggctttaa

SEQ ID NO: 36050 - DNA, 540 bp, Zea mays
  Peptide Sequence Number=SeqID_77829
atggtggcagctggaggaagcttccccaccgtcgaggccatcggcgccgcctacggaccgacctccggctctttggctttaatgtctgactcgcctgtcggctatctgaaccgcttcaccaagcgtgagtcgcctcgtgcgaaggtgacgagtgaggtagcggtgtcagcacggacagaggcaaagttggctcaaaaagaagatttggtcggccagagcttggccgggtcgtccactggcgggaccgacgccagagttgagtcgccgatgccacgagccgggctgatgtcctcgggggacagctggctgaggcttcggggtggccggccgagccgtttgctcgagccggattcctggagaagaccctggcggcgatggcccgggcgtggtgctgatgtcgtcctttggagtggagatcctccgaccgtgtcgccgtccgaggctaggccggacctcgccgaaggtgtagttgacgccgagggtgctgctgctcccttcaactgtcaagatccgagcctgcaggatcgggttatcttgtag

SEQ ID NO: 36051 - DNA, 681 bp, Zea mays
  Peptide Sequence Number=SeqID_77830
atggtggcagctggaggaagcttccccaccgtcgaggccatcggcgccgcctacggaccgacctccggctctttggctttaatgtctgactcgcctgtcggctatctgaaccgcttcaccaagcgtgagtcgcctcgtgcgaaggtgacgagtgaggtagcggtgtcagcacggacagaggcaaagttggctcaaaaagaagatttggtcggccagagcttggccgggtcgtccactggcgggaccgacgccagagttgagtcgccgatgccacgagccgggctgatgtcctcgggggacagctggctgaggcttcggggtggccggccgagccgtttgctcgagccggattcctggagaagaccctggcggcgatggcccgggcgtggtgctgatgtcgtcctttggagtggagatcctccgaccgtgtcgccgtccgaggctaggccggacctcgccgaaggtgtagttgacgccgagggtgctgctgctcccttcaactgtcaagatccgagcctgcaggatcggggttctgtcaccgacgtagtcgagaaggcccgaaaaatcgtttcggcagaggagttttcgagcgtgaagacttgttcggtccgcggaatcacttatccgagcgtgagttacttatcgcagaaggtgataagtgaggatccactttcgaagtag

SEQ ID NO: 36052 - DNA, 462 bp, Zea mays
  Peptide Sequence Number=SeqID_77831
atgaggaaatgggcaaggcctagcccactactcctcatgctcctctcctgccggagcaacatcccactcgaccgtccaacccggtggcagggtggtaggccaagtcacaccatcaactacatcctgcatgtacccgcggcggaagaaagggcggaggggcttaccggcggcgagattgctccgacgggggagctcgtcggcggcaaggagtccggcctatccagggcacaattgaccaatcaaactggtcagagggcttcatcagggatcaagaaaggtctgaggacttggaaagcttcacgggccaatggtgaagctaaccgaagcgctggcgcgacttggggtgactggagtgggctggccacggtggccgaggctctggcggccatggcgggcggaaaggagctcgtcggagctaaggaggggtgtctagccggcgatggtgagcacggggtgaagtga

SEQ ID NO: 36053 - DNA, 495 bp, Zea mays
  Peptide Sequence Number=SeqID_77832
atgaccaggccggattcctcgccgccgacgagcatccccgcctgcgcgcgtggaccgaccgactcaggccatctccgacggcgacccgcacaccgttgtgatccccgagacctccccttcgtcctcgaccacttcaccggagcaatctcgccgccggagaggagcatgaggaatagtgggctaggccttgcccatttcctcattaccgacgacatcgattatccgctgcactttatttttaaccttgctgacggagagtacgtcctcgtgccggagcaaggagctgctcaggaggtagccccggacccagcaccagagcctgcaccagaggacctgcctgccactgctttggaaggcaagccctggaatccttttgagatagatactagttccttggaggacatggttgctggagtgacttggccgtccatcttgccaccgggttggactgtcgagtgggaccctgcctcggctgaggaggagcatgaggagtga

SEQ ID NO: 36054 - DNA, 225 bp, Zea mays
  Peptide Sequence Number=SeqID_77833
atggcggcccccagctctcttacggaagcagggcgacgtcagcaaggactcgaccgctccaacagctgtccctccgccaggctccgtcgcacctccgacagccacgacatcacgccagcaagaggttgtgcactttacccacaagccgtgattcccattctgcccggagatcatgactctccattgatcactaccaaggtgacccagcagggcatcactacgtag

SEQ ID NO: 36055 - DNA, 337 bp, Zea mays
  Peptide Sequence Number=SeqID_77834
tgatgccctgctgggtcaccttggtagtgatcaatggagagtcatgatctccgggcagaatgggaatcacggcttgtggagatactttggtacaggtggctatgagatcgatggttttggttatgactatggtgctgctgtcggggaccatacaacatgttctcacgatcgtttgcactgggcagtgtgcaactcatgctccacggcacttgtggcatctggacttgcactagaggctgaggtggcggtggatgctgctgagcttgctgcatcgctgctaaggtctaaccaattgcctggactgcttgggtctgcatcaagaacatctgctcaatag

SEQ ID NO: 36056 - DNA, 1090 bp, Zea mays
  Peptide Sequence Number=SeqID_77835
tgatgccctgctgggtcaccttggtagtgatcaatggagagtcatgatctccgggcagaatgggaatcacggcttgtggagacattatggtacaggtggctatgagatcgatggttctggttatgactatggtgctggtaagtggtattctttccgtttggaaaggatggctcgacttagacacactgcacgaaagtccgtcatccccttcttaccctcccgccttgctgagcgtctgcttcgccgccccgtggccggacagtccagccacttggagaggctgcaccaccgcctgcatgaggagcaggaacgtcaacgacaggagcagcagggctcttccttctcgctccagcaggagatagagtctgtgaggagctgctcccgtatgcttcctctggaggcaccccctgcaccaccactgggcgccccagcctctggagtagctgctggaggagacccagacgacggaggtggcgacgacatctcgagccacgacaccgacttctctgctgaccaggagccggaaggatgggttgctcgacccatcactcgcgacgctgctcgcggcatagtcgcggggtctactccggaccgctgggaggcgacctgcttggtgcgccgcccggagaacagtctccagggtgcggaggcctgctcagagcactattctatctctgagcgggactcagctgaggcagccatgcaagatgttgcacggcgtgcgctttcgcactactgctcggttctcggtgaggtagctgacggtctcgacctgaagtattacccccgccgtccatctggcagcacaggaggcgtgattgtctcacctgttggtgagggcaatcctaggttgaacagcacagtcaacctagccgctgtgctaaacacggagctggaccatgcattagacgagctgagtagggctcgtgctgagatcgccctgctgcgggctgagcgcgcggaacgtcgtcacctggatgatggttcccccgctcccgtcgggactcagcacccgtaccgctcacctcggcgtggacgccagccttatggcaaccccgactgcaagaccaagataaatctagaaccatag

SEQ ID NO: 36057 - DNA, 621 bp, Zea mays
  Peptide Sequence Number=SeqID_77836
atggcgacgtccacggccgcgaggtactgcgcgatgtcgtcctcgggggcctcgaagacgagcgcgtccggggtggcgtccccagagctggatgagctggtcggcggcgtcgaaggaggcggcggcggcggagatctcggaggcggaggcggcggtaaggtcgggggaggggaagaggtggtcgttggtgatggaggagaggcggttgtcgaagccggagagtatgcggatcatgtcgtcagcggcgttcttggaggtggcgagggacttgacgatgtgctgcgctgcggccaggaccttgtcgccgccggcggagggcgactccagctcctgctggggcggtggcgggggcaccgacgacgacatcaccgtcggtccgctcagtctcgaggtcgggtggggatttttggagcccgaggcggaggtgacttgggagttacgccgttgccgctgccggccggctgccgctgcctttgtttgaccgctgcgttgggtccctgcggagtctggggagtgtgtgcgcggtcggcgctgcgtcaccgggaggtcaaaaaaattcctgagtcttgccgacaaatagagtgttggaggaaactgagggtgtttggttttgaggactaa

SEQ ID NO: 36058 - DNA, 972 bp, Zea mays
  Peptide Sequence Number=SeqID_77837
atgaagaagtgggtgcacggggtcaagacggtcgtgcgcgtgctgctggctggtgagtgtcgcctctatgaccaggtgctcgatgcgtctgatgaacttatggatgcgtgtttccttgagtccaccaaaggatgcattatgcagattattagctttgggggtgtcgtggcggtgtgcccccgctcgccagagaaggtccctcggatccttgacatgtatgaggcacttgcagaggtgatccctgaaatgaaggactggtgcataggatgttctggggatggcgtgatcagtgacgtgcaagccattcttgataggcttggggatgtcgtgtggggtaacatgtttgagtttgggaagatgtttcagcaggagacctcaaggagggcgatgacagctggagagatccacccaatgacacgaacacttggagagaatggccccttttggaaggcgtcttctgaagctgatatcttacctggaggccaatttgcaagagtgtaccattattttgctgcttctgagatatacaatgcaatccgtgtgttcattgcttgctatgtctggatgactggatttgggaatttctcatattactatatcaagaaagattttagtattgcaagatttgctcagatgatgtggaggttaaatttctttgtggcattctgttgcattgtccttgacaatgatctcatgctctattatatatgcccaatgcacacactatttactcttatggtatatggatcacttggtctgtttaacaaatacaatgaggtaccatcaatcatggctattaagattgcttgctgcttcttgtctgtaattttgatatgggaaatccctggggtatttgaattattgtgggccccttttacgtttctgctagatcatgctaaccttaacatggagcttttgacgtacaaagaagttcacttcttagtccttgtatttgtgatatacacattgtag

SEQ ID NO: 36059 - DNA, 624 bp, Zea mays
  Peptide Sequence Number=SeqID_77838
atgaaaaggaaggatgagctcaccattgaagaggaaaagcagagagccaaggcaaaagagaagcttgataagtgtgtaaaagacactctgttggacctctgttggacccttggtattccaactccgaaagcaaacattagaaaggaaaatattgtgtcaaagttgttggactacattgttgaacctcactctgcagctgaatcttggggctctgatgaccagggatcaaattctaaaaaacgcaagagaggaggtgaaagtgcaagtaagacgcctgatggcacacctagtaggtcgaggaagaaatttttcgatgacgatacttctagtaaaaggcagaataaagcgctccagtatgatactgatgaggatgaatccatgaagtctgacagtgaggaaaacatagatgaagattcagatgaagttgctgacaaacaggaaggctatggatctagaaaagaaaaggcatggaagaagttatcggaggtaaaagaatcttcaggacacaatgctggtgcaatgacagatgctaaatgctccactacttcactgtgcaaaggtattgaattaccgttggccttccattcagggtttgtgtacaaaaaaaggtgcattagaagctga

SEQ ID NO: 36060 - DNA, 798 bp, Zea mays
  Peptide Sequence Number=SeqID_77839
atgaaaaggaaggatgagctcaccattgaagaggaaaagcagagagccaaggcaaaagagaagcttgataagtgtgtaaaagacactctgttggacctctgttggacccttggtattccaactccgaaagcaaacattagaaaggaaaatattgtgtcaaagttgttggactacattgttgaacctcactctgcagctgaatcttggggctctgatgaccagggatcaaattctaaaaaacgcaagagaggaggtgaaagtgcaagtaagacgcctgatggcacacctagtaggtcgaggaagaaatttttcgatgacgatacttctagtaaaaggcagaataaagcgctccagtatgatactgatgaggatgaatccatgaagtctgacagtgaggaaaacatagatgaagattcagatgaagttgctgacaaacaggaaggctatggatctagaaaagaaaaggcatggaagaagttatcggaggtaaaagaatcttcaggacacaatgctggtgcaatgacagatgctaaatgctccactacttcactgtgcaaagatgatgggtatattaagaaccacacctgtaaaaatttctcccacaacttatcaaaaggcaatgaacccggtgttaagaacataaaggcaatgtttgggttctttgacacagccataggcatcgaaagaacacccctaataaccactgatgaaactatctcttcatcagttcgctcccgagcaacaacagttgtggtccaaggatacctagatatagatgtgtttggcgcatggggctga

SEQ ID NO: 36061 - DNA, 927 bp, Zea mays
  Peptide Sequence Number=SeqID_77840
atggcgtggtcaagcgtgaagatctgtttgtcacctctaagctatggtaaccatgcacctgaagatgtgcaggaggatctttgttcggccctcgaagatttgcggctcgactatgtagatctgtaccttgaaaagcagagagccaaggcaaaagagaagcttgataagtgtgtaaaagacactctgttggacctctgttggacccttggtattccaactccgaaagcaaacattagaaaggaaaatattgtgtcaaagttgttggactacattgttgaacctcactctgcagctgaatcttggggctctgatgaccagggatcaaattctaaaaaacgcaagagaggaggtgaaagtgcaagtaagacgcctgatggcacacctagtaggtcgaggaagaaatttttcgatgacgatacttctagtaaaaggcagaataaagcgctccagtatgatactgatgaggatgaatccatgaagtctgacagtgaggaaaacatagatgaagattcagatgaagttgctgacaaacaggaaggctatggatctagaaaagaaaaggcatggaagaagttatcggagcgcttgtgccaccacggagcggtcacatacgaaggctggggttggacgacgacggtcgcggatccgggcatcaccgatgggggaggggaaagggaaaggggaagggagagggaggcctcaaatcctagatacatccatgggggtgttctcggcggacgcgacacggggcgatgggagcagggtggcggtcgcggacgacttcgggggacaggggcggggacaggcgagggcgcgacactggagcagagggggaggcgggcatgcgagagtcacgagctggcggtgtgggtaccagagggatgcctaggtgcagatttcgcggtggcggcgggcgtgcggcattga

SEQ ID NO: 36062 - DNA, 723 bp, Zea mays
  Peptide Sequence Number=SeqID_77841
atgcaggcggcatgcgaccgcaccaagggggcgcaccctttcgacttcgacgcgtccagcatggaggcccaggcccacacgtcatgcaaccagttcgccggttgctacgtgcaagaaactgcactgccactcacgccactaccatgcctcctcgactgcggaaccagtaccacgactcgaggcaaccctgcacatgacccaacagtgccaaccaggcacatcggtcacgggtcagtcagccgcgggagaaggcgctacagtcgatacgaccagaaatgggccggcagtaatggcggtggcaggcgggcggaagcagcggtcaagtcgtcagccaagctcatggaccgggaaaggggataccccgaaaggtatccttctccgcgaaggaaacgggccccgagccccctactgatcagaggttcgaaggctggcccctcggaggggttcaacagccgcctcagagcgctcgggctccgcgcccactactggtcagaggttcaaaggctggcccctcggaagggttcaacggccgcctcaggccactcgggctccacgcccactactgatcagggctcattggagacaccatgttcggcgccctccaagggcaacatggcgctttcccccctcctccttgcggaaaggcgacgcaggggccgtcaacataccagcccgagaacttgggacccgaccatacacccgggctacggccagcttgcatga

SEQ ID NO: 36063 - DNA, 327 bp, Zea mays
  Peptide Sequence Number=SeqID_77842
atgggcgcgattcaggtcaaggctctgtccactcaagggacacgatctcgcctcacccgagcccagcctcgggcaaaggcagccgacccaggaggattcacgtctcgcccgaggatcccctcaagcaacggacgcaccttcgattcgcccgaggcccggctcgggcaggcttcgcggagaagcaaccttggccatatcgccacgccaaccgaccgtatcgcaggagcattcaatgagagaaaacagcgccgcctgcgctgctccgactgctgtgccacccgtcagggtgaggctgacagccgtcaagaccggcctcaggcgccatag

SEQ ID NO: 36064 - DNA, 642 bp, Zea mays
  Peptide Sequence Number=SeqID_77843
atggcgctttcccccctcctccttgcggaaaggcgatgcaggggcgaaaatagcgccacctgcgctgctccgactgttgtgccacccgtcagggtgaggctgatagccgccaagaccggcctcaggcgccataggaaactccgccttgctcaacccccagggctcggactcaacctcgacctcgggcgacgtactccgcctcgcccgaccccagggctcggactcaacctcgacctcggacgacggactccgccttgcccgaccccagggctcggactcaacctcgacctccgacgacggactccgcctcgcccgaccccagggctcgacccccgtctcggccttggaagacggtctccgcctcgcccgaccccagggctcggactccacctcgacctcggaagacggactccgcctcacccgacccctgagctcggactcagcctcgacctcggaagacggtctccgcctcgcccgaccccagggctcggactcagcctcgactccggaagacagtctccgcctcgcccgaccccagggttcggactcagcctcgacctcggaggagtcaccgcctcgcccgacctcaggctcagaccgaccatgtcacaggggggccatcattaccctacccctagctag

SEQ ID NO: 36065 - DNA, 3267 bp, Zea mays
  Peptide Sequence Number=SeqID_77844
atggacgaagtagacgcgtaccgcgatcaacataggagaagtgatgcaaacaatgatgatacagaacgacctagccatctatgcgtgtctgtacgtgactattactgctacagattccaaattcgtccaagtatattcaatccaatacttcatgggaagcggcttttccaacagttcgcggttgacacctacatcaagattgagagctctcgtttggatttcatacgtaaaaaccaagacagattaagggcggatctatacaagggtttggtagatagcttgcatgaaggcgagaacagagcagacaaaattggaaagcgaaccgtgctgtctacatcatttatcggtggtcctcgtgacatgagacgtcggtatatggatgctatggcccttgtgcggaagtttgggaagccagacatattcctcactatgacgtgcaaccccaattgggatgaaataaccagagagcttctccctatgcagtcaccacaggatcgtccggaccttgttgttcgcatattccgtgcaaaactagaggaactgaagaagagattgactaagcatcatattcttggaaaaatccgagcttatgtctatgtcgtggagttccagaagcgaggtttgcctcatgtccatttcctactcatcatgcagagaaagtacaagctaacttgtcctgatcagtatgatcaccttatctccgctgagatccctgacaagaagaagtaccctgaactatacaagatggttatcaagcatatgatgcatggaccgtgcgggttgctaaatcctaaatgcccatgcactaagggccatgcttcatgcaaaaaccattatcctagagcttttagcaatgcaacgtctcaaggaaaggattcatatcctatttataggcgtcgtgatgatgggcgtaaggaaacgattcgaggttgtgaattggacaacagatgggtcgtcccttacaacccttacctcttccggctcttcaactgtcacatcaatgttgaggcgtgcgggagcatcaaggctgtcaaatacttgttcaaatacatatacaaaggccacgatcgtgcgtctgtggctgtgacagacgcaaacaaggctgatggtgacgttgatgagatcaagcagtatagagatgctaggtgggtgacccctccagaagccctttggaggatattcagctttgatctaagtcaaaactctccaccagtgatgcaactacagctccatcttgaaaacatgcatatggtgtcatttcacgagcgtgctaaagtaaatcatgttgtccaacgtccaggtgccgataggtcaatgcttacggcatattttgaggcaaataggctacatgaagaggctcagggcatcctttaccgtgattttcctgagtggtacactttgcagcagggcaaggtgtggcaaaggaggaaacgaaacacgggtggacaggttggtagaatagtctctgctcatccagctgagggggagcgcttttatcttcgacttctcttaaaccatgtgacgggtgctacctcctatgcggatctaaggacagtagatggtgacacactaccaacttttcgtgaggcagcacaaaggaggggactgcttgaagcagacgacacaatagatgagtgtctcaacgaagccgctatttaccaaatgccgtcagcactacgaaggttgtttgcaacaatactgtcaatgggtaaagacataaagacattccctctccctgctatcattgatagatatgacgatttacatggtactgatagagagatttatgaggaggaaagtatagtgccgacgacagaagacgttgctctgaaagaaaccctaaacgaggagcagaggtctgcttatgataagatcctatctgtcgttgacaccaataacggtggagtgttctttgtggatgggcctggtgggactggaaagacctatctgtataaggcattgcttgcagcactacgcagtcaggacaagattgcagttgcaacagctacatctggtgttgcggcttctatattgcctggggggaggactgcccattcgcgcttcaagataccacttactattgatgatggtgttgtatgtagcttcacgaaacaaagcgggacagcaaagttgctacaaaaagcatcgctcattatctgggacgaggcatcaatgactaagagacaagcaattgaggcgctagacaatagcatgcgtgatataatgggacagtctaggttgccctttggtgggaagactgttgtgttcgggggtgatttcagacaagtacttcctgttgtacgcaaggggtcaagggctcagatagttgctgcctctctacggagttcttacctctgggaatccatgtgccacctaaagctttttcaaaacatgagggcacagagcgacccatggtttgcagaatatttgttgcgcgtcggtggtggaactgaggaagcgaacaacgatggtgatgttcgtcttccagatgaggtatgtgtgccatatactggtaatgaccgcgaccttgatagactgatagatgacatttaccccaatctaaatgaaaacatgtctaacacaagctacatcacttcaagagcaatattgtctacacggaatgactgggtggatatgataaatatgaggatgattgatcgtttccaaggggagcagatgatgtaccatagttttgacaccgcggtggatgatcctaataactattacccatcagagtttctaaacacgctgactcctaatggactacccccgcacgttctgaagctcaaagttggatgcccaatcatgttgcttaggaatatagaccctgctaatggactttgcaatggcacgaggttggtggttcgtggtttccaaaaaaacagtattgatgctgaaattgtccttggccaacatgctggaatgcgaattttcttgcctcgtatacccctgtgcccctctgatgatgagatgttccctttccagtttaaaaggaagcagtttccgataagactaagttttgccatgacagttaacaaggcccagggccagacgattcctaatgttggtgtgtacttgccggaaccagtgttctctcatggtcaactttatgttgctctatcaagggccaccgctcgatcgaaagtgaagatacttgccattccagtccacgatgagaagaagaagaagggggttgaaaggaactcagcgataaatggcgcaacatacacaaagaatatcgtttataaggaggtccttacgccgtaa

SEQ ID NO: 36066 - DNA, 3252 bp, Zea mays
  Peptide Sequence Number=SeqID_77845
atggacgaagtagacgcgtaccgcgatcaacataggagaagtgatgcaaacaatgatgatacagaacgacctagccatctatgcgtgtctgtacgtgactattactgctacagattccaaattcgtccaagtatattcaatccaatacttcatgggaagcggcttttccaacagttcgcggttgacacctacatcaagattgagagctctcgtttggatttcatacgtaaaaaccaagacagattaagggcggatctatacaagggtttggtagatagcttgcatgaaggcgagaacagagcagacaaaattggaaagcgaaccgtgctgtctacatcatttatcggtggtcctcgtgacatgagacgtcggtatatggatgctatggcccttgtgcggaagtttgggaagccagacatattcctcactatgacgtgcaaccccaattgggatgaaataaccagagagcttctccctatgcagtcaccacaggatcgtccggaccttgttgttcgcatattccgtgcaaaactagaggaactgaagaagagattgactaagcatcatattcttggaaaaatccgagcttatgtctatgtcgtggagttccagaagcgaggtttgcctcatgtccatttcctactcatcatgcagagaaagtacaagctaacttgtcctgatcagtatgatcaccttatctccgctgagatccctgacaagaagaagtaccctgaactatacaagatggttatcaagcatatgatgcatggaccgtgcgggttgctaaatcctaaatgcccatgcactaagggccatgcttcatgcaaaaaccattatcctagagcttttagcaatgcaacgtctcaaggaaaggattcatatcctatttataggcgtcgtgatgatgggcgtaaggaaacgattcgaggttgtgaattggacaacagatgggtcgtcccttacaacccttacctcttccggctcttcaactgtcacatcaatgttgaggcgtgcgggagcatcaaggctgtcaaatacttgttcaaatacatatacaaaggccacgatcgtgcgtctgtggctgtgacagacgcaaacaaggctgatggtgacgttgatgagatcaagcagtatagagatgctaggtgggtgacccctccagaagccctttggaggatattcagctttgatctaagtcaaaactctccaccagtgatgcaactacagctccatcttgaaaacatgcatatggtgtcatttcacgagcgtgctaaagtaaatcatgttgtccaacgtccaggtgccgataggtcaatgcttacggcatattttgaggcaaataggctacatgaagaggctcagggcatcctttaccgtgattttcctgagtggtacactttgcagcagggcaaggtgtggcaaaggaggaaacgaaacacgggtggacaggttggtagaatagtctctgctcatccagctgagggggagcgcttttatcttcgacttctcttaaaccatgtgacgggtgctacctcctatgcggatctaaggacagtagatggtgacacactaccaacttttcgtgaggcagcacaaaggaggggactgcttgaagcagacgacacaatagatgagtgtctcaacgaagccgctatttaccaaatgccgtcagcactacgaaggttgtttgcaacaatactgtcaatgggtaaagacataaagacattccctctccctgctatcattgatagatatgacgatttacatggtactgatagagagatttatgaggaggaaagtatagtgccgacgacagaagacgttgctctgaaagaaaccctaaacgaggagcagaggtctgcttatgataagatcctatctgtcgttgacaccaataacggtggagtgttctttgtggatgggcctggtgggactggaaagacctatctgtataaggcattgcttgcagcactacgcagtcaggacaagattgcagttgcaacagctacatctggtgttgcggcttctatattgcctggggggaggactgcccattcgcgcttcaagataccacttactattgatgatggtgttgtatgtagcttcacgaaacaaagcgggacagcaaagttgctacaaaaagcatcgctcattatctgggacgaggcatcaatgactaagagacaagcaattgaggcgctagacaatagcatgcgtgatataatgggacagtctaggttgccctttggtgggaagactgttgtgttcgggggtgatttcagacaagtacttcctgttgtacgcaaggggtcaagggctcagatagttgctgcctctctacggagttcttacctctgggaatccatgtgccacctaaagctttttcaaaacatgagggcacagagcgacccatggtttgcagaatatttgttgcgcgtcggtggtggaactgaggaagcgaacaacgatggtgatgttcgtcttccagatgaggtatgtgtgccatatactggtaatgaccgcgaccttgatagactgatagatgacatttaccccaatctaaatgaaaacatgtctaacacaagctacatcacttcaagagcaatattgtctacacggaatgactgggtggatatgataaatatgaggatgattgatcgtttccaaggggagcagatgatgtaccatagttttgacaccgcggtggatgatcctaataactattacccatcagagtttctaaacacgctgactcctaatggactacccccgcacgttctgaagctcaaagttggatgcccaatcatgttgcttaggaatatagaccctgctaatggactttgcaatggcacgaggttggtggttcgtggtttccaaaaaaacagtattgatgctgaaattgtccttggccaacatgctggaatgcgaattttcttgcctcgtatacccctgtgcccctctgatgatgagatgttccctttccagtttaaaaggaagcagtttccgataagactaagttttgccatgacagttaacaaggcccagggccagacgattcctaatgttggtgtgtacttgccggaaccagtgttctctcatggtcaactttatgttgctctatcaagggccaccgctcgatcgaaagtgaagatacttgccattccagtccacgatgagaagaagaagaagggggttgaaaggaactcagcgataaatggcgcaacatacacaaagaatatcgtttataaggag

SEQ ID NO: 36067 - DNA, 489 bp, Zea mays
  Peptide Sequence Number=SeqID_77846
atgggtcagggaggtccacgaaatgccagagaagacatgagcgcaaggaattgggcggagactcactggatagcttggtccacgcgcggcggcggaagaccgaagtccggtgaggtcgatctcgggcctccggtgaagttcggccgggtccaagggcttggcaagcttcacaggctactggcggagctagccgaagcactggctcgacttgagggtggctggagtgggctggccacggtggccgaagctctggcggcaatggcgggcggaattgagctcgccggagctaaggaaaggtggctggccggtgaggagatatggagccaggaaatccggtctgtctccctgtccaaaccggaggcaaatccaaggcgcaccttcgactcacccgaggcccagctcgggcaggcttcgcggagaagcaaccttggccagatcgccacgccaaccgaccgtatcgcaggagcattcaatgcaaggatcgtctga

SEQ ID NO: 36068 - DNA, 150 bp, Zea mays
  Peptide Sequence Number=SeqID_77847
atggcgggcgaaattgagctcgccggagctaaggaaaggtggctggccggtgagggtcagtgcggggcgaagagagagatatggagccaggaaatccggtctgtctccctgcccaaacccgaggcaaatccaaggttttgtcgtgtctag

SEQ ID NO: 36069 - DNA, 372 bp, Zea mays
  Peptide Sequence Number=SeqID_77848
atggcgggcggaattaagctcgccggagctaaggaaaggtggctggcaggagagggtgggtgcggggcgaagagaggattcgagttagggatcaaggtgaacatccctgatctttggctcaagtacagtcgcggggtctacccggaccgctgggaggcgacctacttggtgcgccgcccggagaacagtctccagggtgcggagatctgctcagagcactattccatctctgagagggactcagccgaggcgaccatgcaagatgccgcacgacgtgcgctttcgcactactgctcagtgctcggcggggtagccgacggtctcaacctgaagtattaccgccgctatccatctggcagcacaggagcatga

SEQ ID NO: 36070 - DNA, 129 bp, Zea mays
  Peptide Sequence Number=SeqID_77849
atgccacacaagaggtttaataccagctaccttgttctacaagctatgaccatgtgggagaatgacagacgaatgaaatttgttggggatgcaaagaccaaagattcttcgaaggaactttgtgattga

SEQ ID NO: 36071 - DNA, 531 bp, Zea mays
  Peptide Sequence Number=SeqID_77850
atggctgttcggctgcttgccaataaagagtcatgtgggccgaaaggagaaatcataaataatagaaagcattatatggacatgcgtttctggagaatggttggttttggtaaacttccaaagtaccatcaggatcctacagcagaagagttagccaaaacactcgattgttggccatcaatgaattattatatcacaggttgtagatatgttcttatgccaggaaaattcaacggatgtcacacccttttcgtaatagatcatgttaaaaagcatgtgacttttatcgactttacactgaatcaagattggtgtaaacacatgccacacaagaggtttaataccagctaccttgttctacaagctatgaccatgtgggggaatgacagacgaatgaaatttgttggggatgcaaagattcttcgaaggaactttgtgattgatctgttaagttatgaggacaattcgtgccgatatgccatccctgcaaatatacaacagagacttatcgatatcgctagaaaggattag

SEQ ID NO: 36072 - DNA, 300 bp, Zea mays
  Peptide Sequence Number=SeqID_77851
atggctgttcggctgcttgccaataaagagtcatgtgggccgaaaggagaaatcataaataatagaaagcattatatggacatgcgtttctgggttgtagatatgtttaataccagctaccttgttctacaagctatgaccatgtgggggaatgacagacgaatgaaatttgttggggatgcaaagattcttcgaaggaactttgtgattgatctgttaagttatgaggacaattcgtgccgatatgccatccctgcaaatatacaacagagacttatcgatatcgctagaaaggattag

SEQ ID NO: 36073 - DNA, 459 bp, Zea mays
  Peptide Sequence Number=SeqID_77852
atgggaggagcagagagctcgcggccatggggggagaagaaaggacgccgcgggaagcttctacaggggagcccgaccatggacaacgaggggcgagctgcagagggcgtccatgggagagggctggggtttcgtgcgcttgaggagtccctgcacgtgagcagagagggagggcatgcgcgccgtggggagggagaagcaggggctcgcgtccagggagctgaggaacagggagcacgtgccaggaggaggatagggagggcactcggctgctcggctgccatgggagggggcgagcagagctgctgctcgggccatgggagagagggggcgctggtggtctgctgctggaggaagaagaagaggggcagggggcaccgcgcccatggagcaggggagggagcaggcctgggcgccatggagaggagcacggctccctgctggctgttgatgccgtga

SEQ ID NO: 36074 - DNA, 216 bp, Zea mays
  Peptide Sequence Number=SeqID_77853
atggaagtgagttcaccagaggtgggcgccaatgttggggacttgttctcaaatgcttcagctcgtgagaagggcgccggtagagagaggagggacagggggtgtcggcatggagcaggggagcaggggcttgcccagaggacgctcgccatgggaggagcagagagctcgcggccatgggcggagaagaaagggcaccgtgggaagcttctgtag

SEQ ID NO: 36075 - DNA, 357 bp, Zea mays
  Peptide Sequence Number=SeqID_77854
atggcgagcgtcctctgggcaagcccctgctcccctgctccatgccgacaccccctgtccctcccctctctaccggcgccctccccaaaacagcaagttccagcaccccctacatctcccatggaaaacagcaagcccccaccgcgtcctggtgttctcgctgctcagcttggcctcgcgagctcactgtcgagacaccctagccgctgctccaccgcgcgtactacctgctcgacgatatgcgcaaccggctgcgtgtggtcatgctggtgttctgcgcagcgcttgcgcgacgccatcgatctgcgcagcgcctacgagtcgtcgtcgaaacccgcggatcacatttgcggttag

SEQ ID NO: 36076 - DNA, 483 bp, Zea mays
  Peptide Sequence Number=SeqID_77855
atggcgggggccggagacaaggtggactacgtcttcaaggtggtgctgatcggagactcggcggtgggcaagtcgcagatcctcgcccgcttcgcccgcaacgagttcagcctcgactccaaggccaccatcggcgtcgagttccagacccgcaccctcgtcatcgaccacaggagcgtcaaggcccagatctgggacaccgccggccaggagaggtaccactaccagcaactaacgcacccgtccgcctccccgctctgctcccgatccctctccgctgctttactcgctcgctggtctcttgcgccaatcatgctcctcgacccgttcctcctgcgcattagatctctgtggactgtggcagtagctcaaacgttgagcgcaatggtggatctctctgcttgtgaagcgtttgctttttcgcgcgttcacacctaccttaccagcagggccgcacaggacaatgtgctgttaggtgattag

SEQ ID NO: 36077 - DNA, 1266 bp, Zea mays
  Peptide Sequence Number=SeqID_77856
atggcgggggccggagacaaggtggactacgtcttcaaggtggtgctgatcggagactcggcggtgggcaagtcgcagatcctcgcccgcttcgcccgcaacgagttcagcctcgactccaaggccaccatcggcgtcgagttccagacccgcaccctcgtcatcgaccacaggagcgtcaaaggcccagatctgggacaccgccggccaggagaggaaaacccagattttatagaaagcttagccgtgactagtgcttattatagaggcgcactgggagctttgctggtctacgacatcaccagacggcagagcttcgatcacataccccgctggctagatgagctccgagcccatgctgacaagaacattgtgataatgctggttggcaacaagagcgatctcgaggagcagcgggccgtgagcactgaagacgccaaggagtttgccgagaaggagaacctcttcttcttggagacctctgcgctccaggcaacaaatgtggagagttcttttcagaccgtcttgacagagatcttcaaaatccacagcaagaagaacatggtgtcggagccaaagagcaacggagccgcgccagcaatgccggggacgaaggtcctcgtcccaggtccggcgcaggaaatcccgaagagcaagtgctgcagttccatgtccaaggaagcccagggccttcgccttggcttccaacggccactaccaacttggaacgggcaggcccaacaaaggcacaccatggacccaggcaaagacacggcgtccacaggcagaacggcgcacggttctgccatcgcgctccctccacgctccctcccgagtcccaagcggacgtccgctatcctcgccccagcttccaactgcgcgccccagcctcatatcttccttgccaccgaccggatgagcagagacaaccccaccatcggtgacacccactccccgccaaagccaaccctccatctccgccgcggtctacatccgcagtcgtcggtggcgcccgctgcgggtggcaagcgagaaggtggtaggcatcgacccaccacaaattccgtggtggccgctgcaatgcgagaagatttacggctggcttatgcaaatcttgtagttgcaaaggccgatgatgatttctcgagggctgaggaaagtttcagagtcagagtcaagaaatattcttcaaaaatagtggatgaggctatccctcaaaaattaagggacggggtcaacccagggttgatcccgtcccatccttag

SEQ ID NO: 36078 - DNA, 432 bp, Zea mays
  Peptide Sequence Number=SeqID_77857
atggaagtcgccccggatcatgcccccagcaacgtccgccctggacttccatggaagccgtcagtggtgcccgctgcgggtggcaagcgagaaggtggtaggcatcgacccaccacaaattcctcggtggccgctgcaaagcgagaagatttacgactggcttatgcaaatcttgtagttgcaaaggccgatgatgatttctcgagggctgaggaaagtttcagggagctgggtatccaaacatgggccataactgataacaaactagaagaattgtttcagttatccctgcgaatgttcgatacaagattaccaccatgtgtaactgttatgttaccttttgccaatgattcttcgcttaacaaaattggagtagagagcttcccggaggagctattttcagtgcttcctgaaggagctattttcatgtaa

SEQ ID NO: 36079 - DNA, 267 bp, Zea mays
  Peptide Sequence Number=SeqID_77858
atggcccccacctgcgcgaattcgtacacccccgatcacatcaacaccgaccttctcaccctcagatcccggggcgggaggtgcttcaaccccgacaccgtccacgaccacacgccctacgccttcaacagctacccgcctcaaccagctgtgacttccgtggtacggccaccatcaccaattgtaggaggaagaggcttacgcggacgcatcgacgcttgtaggaaagctggagcaaaaggaggtaatacttccacttattcttag

SEQ ID NO: 36080 - DNA, 420 bp, Zea mays
  Peptide Sequence Number=SeqID_77859
atgcaagctttagtggtgctatcaggagaagctgcaaaagaatatgctggcacaaactcgacactatgtagaaatctcagacaagtgaagcccttctgcagtgaagtctggtgcaggagtgctacgagctctcgtcggagtacaagaatgaccaatatcaggctcgacttgcagggagggaggtgcttcaaccccgacaccgtccacgaccacgcgtcctacgccttcaacaactacccgcctcaaccagctgcgacttccgtggtggtctgcacatttggaagcatggtgtttgcaagcatccttcttgttcgtggtatatggtctgaggtgacatacagcagaaaaaaccgttacagctatattcaccggatcgacaacgatgagaaccgatggagcagagtccagactgttggttaa

SEQ ID NO: 36081 - DNA, 372 bp, Zea mays
  Peptide Sequence Number=SeqID_77860
atgaccaatatcaggctcgacttgcagggcgggaggtgcttcaaccccgacaccgtccacgaccacgcgtcctacgccttcaacagctacccgcctcaaccagctgcgacttccgtggtacggccaccatcaccaattgtaggaggaagaggcttacgcggacgcatcgacgcttgtaggaaagctagagcaaaaggtggtaatgtggcatctctaaggtcgtacttgcatatcaagatgaagaaccagagagcgctcaaggggatcatccccaccaagaggatgttgtttcgtgccatggccgccacatcagtggcaactgacgagatcgcggcagcaggaaagggccgatccaatctggctaatagatga

SEQ ID NO: 36082 - DNA, 450 bp, Zea mays
  Peptide Sequence Number=SeqID_77861
atgtcggagagtagatctccggccgggtggcggagtgcacccgccctaaatcctgagatgaggaggggcttaggcgtttcgcttgatcgtttggatgaactcaagaacacacaaggatttagagtgctgaaggggggcatgctcaaagatctgtgtatcttcggcgtgctggggaagcttcttatagaagggataacacagtgcactgcctggcacgggtgcactgttcgccagcagacccagcaggcgcaccgcctgctggatgaccttgacgccgcctgccagcagatgggacgagacgcattaaatgctgagaagaggcacgtcgcccgtcagcgcagtggcaggcgacgcgtcctctccttaataaatgcagggactgcacggcttcacgtcaggctcgagccgatagcttatgtcatgggccacaagcagcgggtctccacctga

SEQ ID NO: 36083 - DNA, 660 bp, Zea mays
  Peptide Sequence Number=SeqID_77862
atggcacgccagctaaagaaaggtgtcatggcgttgttcaaacttcgagtggtacaggggaaatacgacaacatcatcgcggaggtgaagagctactacatgtcgatgagcgggtacagggatgataaaaaaagaaagggtgagattatgatggcttatgccaatgatcaaataaaaacatgtgttgagtttccagagtgtttgtatgaagactcatgtggtcggaagagggctgatgagcacgatcaccatggatgtggacaccacgacaagggtagacgagttcttggttaccacctttgtaggcccattggtggaggagacttgacgagaggaccaatgaatgttctctcttttaagaatcttaataagccacgggagcaaagctggatagtatacataagtctgttcaccgtaaccaacaacagcggcctcaccgtcacgcaccgccaactgaagagcaaggtagaaacctttagtactgatgttttaaaaaagcacccttacatgagtgctgagttcaaacgacttcggatagctgtgaacaaccgtgcacagtcgctcgcccgtcgccctgcatcaccggaggtcatcgccagcgatcctatcggagagcaaatctccggccgggtggcggagtgcacccgccctaaatcctga

SEQ ID NO: 36084 - DNA, 153 bp, Zea mays
  Peptide Sequence Number=SeqID_77863
atggcacgccagctaaagaaaggtgtcatggtgttgttcaaacttcgagtggtacaggggaaatacgacaacatcatcgcggcggtgaagagctactacatgtcgatgagcgggtacactaccaatagtgtcggtgaagagctaccaatctga

SEQ ID NO: 36085 - DNA, 588 bp, Zea mays
  Peptide Sequence Number=SeqID_77864
gtcaaagggccgttggggctggatttcgccgtcgcaacaccgaactactgggtgcacaagggcattgccttcatctgcgagatcaggacctccttgtgcggctcgccgacacatacgacgcaagccattgtccgcctccagcccgacataggtagcagcggcgatgacacctccttccatctgcaacaacccatggaggccgacggcggtgcatctaggcgctcgctgcgggtgcccgtggacaagcaatcgctcgggatggcggtggaggtggatgcgaggtgggagcccatgggggcgcaggagtactacgactactggcgggccatgtacaacgcccgcggaaacagcaactacaattaccgtggagttgatattgaaggacgcccgattatggtgaatattcaaaaagataatggggtgcagatgaagattattggtactcatgtcgatgctacagaaattgtctacgatgaggactcctacaataaggggaaatacgacaacatcatcgcggcggtgaagagctactacatgtcgatgagcgggtacactaccaatagtgtcggtgaagagctaccaatctga

SEQ ID NO: 36086 - DNA, 285 bp, Zea mays
  Peptide Sequence Number=SeqID_77865
atggggagcggatgcgggccacagatctccttccaaactgccaaactcgaaggcgacagcccgacaagggccgaccttccatgccccttccccgcccccattccaaaatcagccctcaaccacgcatgcacccacatcaatggattgttattgtctgcattagcagcgctattgttctggttggctggaacatggggaggtcaaagggccgttggggctggatttcgcagtcgcaacactgaactactgggtgcacaagggcattgccttcatctgcgagattag

SEQ ID NO: 36087 - DNA, 414 bp, Zea mays
  Peptide Sequence Number=SeqID_77866
atggccgcagatctcgcctaccatggaaggggcccgcctaccatggaaggtcggcccttgtcgggctgtcgccttcgagtttggcagtttggaaggagatctgtggcccgcatccgctccccatgggtgtggacgtggaggcggctgtcacgacgggtgaagtgggcgcgactatcacggcagggcttcgcgagcaggaccggcgagggggagatctcgagcgagggcacgatggggcttcacgatctcggacgcagcccccacgcccacatcgggcgtagatcccgcgatctttgggcgagggtcaaggggaagaatgtctacttggagcagcaggaaggccgcaagaagcgacgtttggatagagcagcccgagcagctctagcagcagcagctgctgctgagcaggcatag

SEQ ID NO: 36088 - DNA, 258 bp, Zea mays
  Peptide Sequence Number=SeqID_77867
atgacgtcctctggctcgcccttctcctcctcctcctccgcgtctcacatgccggacagcggggacaggtgcgatctagatctgaggggcggtagcgacaggggcgggagggagttgctgatttcgttctacaagaggactggcaaaaagcccaaaaggattatattttacagggatggaataagtgaaggacaattcaaccatgttttgatccttgaaatggacgcgataaggaaggcttgtgcctctctggattag

SEQ ID NO: 36089 - DNA, 840 bp, Zea mays
  Peptide Sequence Number=SeqID_77868
atgacgtcctctggctcacccttctcctcctcctcctccttcgtgtctcgcatgccggacagcggggacaggtgcgatctagatctgaggggcggtagcggcaggggcgggagtggtaatttagaagtaatttttcactccacatttgagcataaagtggttgcatccatggactggccacaagtcacaacatataaagctctggtctcggcacaagcacacatggaagagattatacaaaatctcgacggaatgataagggagttgctgatttcgttctataagaggactggcaaaaagcccaaaaggattatattttacagggatggaataagtgaaggacaattcaaccatgttttgatccttgaaatggacgcgataaggaaggcttgtgcctctctggaagatgggtatctacccccagtgacatttgtcgtaatacagaaaaggcaccacacaaggctcttccctggagttcatggaaggagagatgttactgacagaagtgggaacattcttcctggaactgtggttgataccgagatttgtcatccgcgggagtttgatttctacctttgtagccatgctggaattcagattcgtttctccagggaaccagcaggccaatacactatcatgtcctctacgatgaaaactgtttctcggctgatgggctgcagatacttacaaacagcctgtgctacacatacgcacgatgcacacgcgctgtctcagttgatttttgcttactttttagtcttcatgtaccacctgtctgagattgatgaactgagacaaaaaccattcaaaagaaatggcccagactttgatgctaaataa

SEQ ID NO: 36090 - DNA, 789 bp, Zea mays
  Peptide Sequence Number=SeqID_77869
atggctgtgggctgcggctctctcccagtctccctgtccctgtccagcggcggaccggcggctgtggctctctccctgtctccactctccagcgcaaggagcaagacagtcgcgggggcgccgtccgcagagccggagccggagacggcggcaacggcatccccatcgtcgtcaccgatgccaagcaggagaagttactttggtagtaagaataatttgacacagatatcagtcctcgcgaaatccattcgcactcttgcacgtatggaagacccaatcaaccaaatactcaaaagaacagaggttgctgaaaatttaattctcgagaaaacatcatgtcctttgggtgtcctattggttatttttgagtccaggcctgatgccttggtccagattgcatctttagcgattcgaagtggcaatggtcttctcttgaaaggtggaaaagaagccatgagatcaaacaaagtattgcataaggttataactggtgccattcctagcaacgtgggtgaaaaacttattggctttgttacaagtagagacgaaattgctgatttactaaagcacatttactttcatagtagaaatctttgtgacatatatgatattttcagcacaattcatgatactcttactttttccgagacattgcttgttcataaagatcttataaaggctccaggtcttgatgacttactgctatcactcaaaacagaagatgtggagtcaagtgagctgtaccgttatagtcgatcttttgtaattcttagaatatgtctttgttaa

SEQ ID NO: 36091 - DNA, 810 bp, Zea mays
  Peptide Sequence Number=SeqID_77870
atggacgaagttatacctctgccttgggcaaagattggttcccgaaagatgcgattgcaattaccagaatgcgtgaacagtaaaggaatactgttcactatttataggcacaggacacaacctatatcagtcctcgcgaaatccattcacactcttgcacgtatggaagacccaatcaaccaaatactcaaaagaacagaggtttctgaaaatttaattctcgagaaaacatcatgtcctttgggtgtcctattggttatttttgagtccaggcctgatgccttggtccagattgcatctttagcgattcgaagtggcaatggtcttctcttgaaaggtggaaaagaagccatgagatcaaacaaagtattgcataaggttataactggtgccattcctagcaacgtgggtgaaaaacttattggccttgttacaagtagagacgaaattgctgatttactaaagcttcatgatgtaattgatcttgtcattccaagaggtagcaataagctggtttcacaaatcaaggcatcaactaagatccctgttcttggtcatgctgatggtatctgtcatgtatacatcgacaaatcagctaacatgaatatggcaaaacaaatagtgatggacgccaaaattgattacccagcagcctgcaatgctatggagacattgcttgttcataaagatcttataaaggctccacgtcttgatgacttactgctatcactcaaaacagaagatgtggagtcaagtgagttgtaccgttatagtcgatcttttgtaattcttagaagatgtctttgttaa

SEQ ID NO: 36092 - DNA, 774 bp, Zea mays
  Peptide Sequence Number=SeqID_77871
atgtcgggcggggagcagaggacgagggagatcacgcggggcagccacggcgacggcatgagcaggccagccatgacaacagcatgggcggggctgcctgattccggccaggagtggtttgtgctcgtggacgcaggtctgattccggcccctgttctaatcccttctatccccaatcctcttcccagtgttgttcgccacatgctcttaggcggtgaagattggctggttcttagtatgttgttggtagccagtgttgtctttcataacaaggcacagaatgggaagttggttgtgaactataagctttgcgtcccgcggcgtgtctacctgtacttccgatttggatttatcagtgaaggggttctcgacactgaggaattagccattgtaaacagcacctttcgtaaggcccaaggttccaggctacctggaatcattgaggaaacgaggagatcaggggagtcaacaacctcaacactggaaagtgaaacctgggcgatggaaagccttgagactgaactatttgataatgcctgtgcttcgatccagagatctcttggcaaacctgataaactttcaggtcggcccgttgctgcctcaacccccccaaaggccacagcaaatgcacctcgtgttgcaggcctagcagaagctggtttgatttctagcaagctttcaagatctgatatgaatatcccagaagatgttcatgacaatcatatctcggctgttgagtctgaaatggaagttctgttgttgagtctgaaatga

SEQ ID NO: 36093 - DNA, 141 bp, Zea mays
  Peptide Sequence Number=SeqID_77872
atgtcgggcggggagcagaggacgagggagatcacgcggggcagccacggcgacggcatgagcaggccagccatgacaacagcatgggcggggctgcctgattccggccaggagtggtttgtgctcgtggacgcaggttga

SEQ ID NO: 36094 - DNA, 474 bp, Zea mays
  Peptide Sequence Number=SeqID_77873
atggctggcctgctcatgccgtcgtcgtggctgccccgcgtgatctccctcgtcctctgctccccgcccgacattcttgtctgggagcgacggcacgaaatggccacagaaggcctcggcgaggtggtctgcgagtgtgacgaagtcgtggaagcagcagtgcacagaatggcggcgttggtcggggcggcatacgctggtgacgaggtaggagacatagctgggcgcagatctggggacgagcgaggcgacgacaggctcggcttctccgggtcgaagacgcgtgcggatctcggcaacgtggaggctatgacgcgtgcggatctcaagaacgtggaggagggcgaggaggcggagcacaaggaggagacggcgagcgtggaagcggcgagatcccagccattgaagtatgtggcgacctcgacggccaggaggagcaaggagatgacgacgagggccttgatgaaggtgtag

SEQ ID NO: 36095 - DNA, 591 bp, Zea mays
  Peptide Sequence Number=SeqID_77874
atggacgccgacggtagggcctctcggtcgccctcgtcgttctccaatgggaccttccaagaacaccaaccagaccatgtggctgctgctcctcaaggcgcgcatcgactgtcgggcatagggtggccgtggggaggaccgatgtgcgaagccggtgtggtggtctccactggcaagagcccagtggtgcgctccatgttctacaccttcatcaaggccttcctcgtcatatccttgctcctcctggccgtcgaggtcgccacatacttcaatggctgggacctcgccgcttccacgctcgccctccctgtcctctgcctcgagtcactgtaccctcttggttgcgcttccttgttagatctcagacctcttgacgtcggagccggccgagacgatggcccagatgacagttacgttgccggtgccgtgcgcgaacctgggcacggatgcctcgtccagcgggacggtgttggcggccgtgtggctcttttcctggctctagcagaaggagcgctcgatggcttgttggcgatggtgcaggctgtcctctccaacgatcccaccgtacagctgatgccttccatcgtctga

SEQ ID NO: 36096 - DNA, 831 bp, Zea mays
  Peptide Sequence Number=SeqID_77875
atggccacagaaggcctcggcgaggtggtctgcgagtgtgacgaagtcgtggaagcagcagtgcacagaatggcggcgttggtcggggcggcatacgctggtgacgaggtaggagacatagctgggcgcagatctggggacgagcgaggcgacgacaggctcggcttctccgggtcgaagacgcgtgcggatctcggcaacgtggaggctatgacgcgtgcggatctcaagaacgtggaggagggcgaggaggcggagcacaaggaggagacggcgagcgtggaagcggcgagatcccagccattgaagtatgtggcgacctcgacggccaggaggagcaaggagatgacgacgagggccttgatgaaggccccgtttggagaacgacgagggcgaccgagaggccctaccgtcggcgtcaacgactggagatctggcggccggtggcgaggaaggactggagcgagggtttccttggagacctttctgagacggggaatgcgaatcagtgcgcatgagagagtgaaagaagagggagcggttgctgcagtctggagacatcgcgcggaggacggcgtggagagagtggagactggggagaggggagaggagaagcagcgacacgctcgtcgtcgtcatcaagggtgtgggatggggcgtgggatttgggtgccgtggcacggggcggaggggtgcagccctcgacggttagacgagatttggcgacctcgacggaggggaggggttgcgatggacgatggcagcctcgggagggcgatgatcgagcaggcggatgcgcctcgggagggcgaggttccagcacacgattga

SEQ ID NO: 36097 - DNA, 1959 bp, Zea mays
  Peptide Sequence Number=SeqID_77876
atggagcacaccactgggatcttgccagtggagaccaccacaccggcttcgcacatcggtcctccccacggccaccttatgcctggccgcaccggccagccccgttggagaacgacgagggcgaccgagaggccctaccgtcggcgtcaacggctggagatctggcggccggtggcgaggaaggactggagcgagggtttccttggagacctttctgagacggggaatgcgaatcagtctggagacatcgcgcggaggacggcgtggagagagtggagactggggagaggggagaggagaagcagcgacacgctcgtcgtcgtcatcaagggtgtgggatggggcgtgggatttgggcgccgtggcaccgggcggaggggtgcagccctcgacgatttactggaggcagaacaggcagaacggcagaaccgtcagaggcagactacttttgctgtcttaataagtagtacagatattatcatggttgaatatggtagatatgctaaagatccatgcaacccggtgccacttcagccgacggaagctcatacgcgatgggttattttaactgaccccctcgaggtgcccaggctgttggaatcttccatgcgcgctgttgcgggcccacccaccgcgtggtctgcgcccgacttgctagttgctaccggttcggttctggtttgttttggacttggaaccgtctgcctggccagaacagggggcgacggggagccgaggaccaccgctcaagcccctctcgccgcctccgtccaccacccatgcacccacccgaacgagactactcaactcaacgtctcaacccaacccgtctctagccgccactccaccggcttcccacccactgccgccgcgcccccacctgtgactgtgccgcgtgcgtgcccacgccgcgaccacctcactacccccacctacgacgcaacttcccacgccccatcacacacccgccaccgctttaaaaccctcactcccctcactcatcacactcgcacagtctcaccacagcgagcgagagcaaggcgcccaagcaaccaccgcgagaacaagtcgcagccaaacagccccgtctcccagcgaagcttgagcttgcattattctaccatgtcttccatggagctgctccacgccgtcgtcccggagaagcagagcgaggaggaggtcgcgcccgcagcgacgaccacgagcagcagcgccaccgccacgggcggggacgagggcgcccacgtgccccaggggtgggccaagaggaagcgctcgcgccgccagcgatcggaggaggagaacctcgcgctctgcctcctcatgctctcccgcggtggccaccaccgcgtccaggcgccgccaacgccggtcccgtccgcggcgccggccgccgcggagttcaggtgctccgtctgcggcaagtccttcagctcctaccaggcgctggggggccacaagaccagccaccgggtcaagctgccgacgcctcctcctcctcctactgccgccgctgtaactgtctcggcagcagtgcccgtcccggaggcccccgccccgatcaccgtcgtcgtcccgccgctgccgccagtcgaggtcggccgcgagccggccacgtcatccaccgccgcgtcctccgacggggcggcctcgagcagagtccacaggtgctccgtctgccacaaggagttcccgaccggccaggcgctcggcgggcacaagaggaagcactacgacgggggcgtcggcagcgccgccgcgtccaccgacgtcccggcggcgcccgccgagacgtccgccgaggtcgggagctccgccgcgcgtgcgttcgacctcaacctcccggccgtgccggagttcgtgttccggtgcggcaagcccggcaagatgtgggaggaggacgaggaggtgcagagccccctcgccttcaagaagccccgcctcctcatgaccgcgtga

SEQ ID NO: 36098 - DNA, 702 bp, Zea mays
  Peptide Sequence Number=SeqID_77877
atgactccttgggagggtgctcaggtagctgccttagaggtgctaacaaccatttgttaccagaaaagggaagaaatacaagccacatctatgaggttgttccctgcagttgccttaagtgacccattggtgtatcatcaccaggcccgattaatggaaagcattcctattgggcaggattctgttgaatcggcatctgctcgagttttgatggtcgtgctagagttgcaacttactcgagggaacagtcgtcaaaagtggcagcagttgtacactgggagttatgcagcatttaagatgatggaaatggccaagaatagtgcttgtacccaagcacaagaacgacttgaggaaacaaaggttcaagcggaacaggttattggactagagcttcaggtgacagaacttcagatgcaacaccaagctgatcagaatcgcattaaggagcttgagcatcagctaactaatgctcattctaaattaaaaattttgagtcagcaacaagaagaaatttgtctgtatgctgttgctgttagagaagaccttaaggaaaccatgagcttcataagccatcaggatcaggcgatcaaagaattgaatcgtgctcatcccatggaatttcaagtagcacaacgccttgtcaaccatctgcagcaagcagtgcataggctcaatgctgcctttgatcctactcctgcatag

SEQ ID NO: 36099 - DNA, 915 bp, Zea mays
  Peptide Sequence Number=SeqID_77878
atggtgggatcttactgcaaagttccctgtgatgctcttttcatcctaaggaacagaaacaatcctaaggatggaagcttgatgatcgaggaccctttaactggtcacatgcctcgtcatggtttatgtaatcacttccgcatttcgatatctccgatgttctgtaatgtctgcaagacgggtgaaacgttcctggaaagtagttcaggggcacctacagggttgtctgagatgaatcaacaagaagctcctacaggagttggagagtttctacgagattttggtgttccagtggtcctgtggcgactacttcaagaagttggatataccgaagcacccaagtaccagtggtcacgcactgttcttagaggacaaccatggtatgaggtagtagtgcgtattccagaacgtgctagaaaaccatcttggccatattggatgttccatgctgaaggaatgactccttgggagggtgctcaggtagctgccttagaggtgctaacaaccatttgttaccagaaatgggaagaaatacaagccacatctatgaggttgttccctgcagttgccttaagtgacccatttgtgtatcatcaccaggcccgattaatggaaagcattcctattgggcaggattctgttgaattggcatctgctcgagttttgatggtcgtgctagagttgcaacttactcgagggcacagtcgtcaaaagtggcagcagttgtacacggggagttatgcagcatttaagatgatggaaatggccaagaatagtgcttgtacccaagcacaagaacgacttgaggaaacaaaggttcaagcggaacaggttattggactagagcatcaggtgacagaacttcagatgcaacaccaagctgatcagaatcgcattaaggagcttgagcattag

SEQ ID NO: 36100 - DNA, 259 bp, Zea mays
  Peptide Sequence Number=SeqID_77879
atggatcaacaagaagcgcctacaggagttggagagtttctacaagattttggtgttcccatggtcctgtgacgactacttcaagaagttcgatataccgaagcacccaagtaccagtggtcacgcactgttcttagaggacaaccatgagttgcagcttactcaagggcacaaccgtcaaatgtggcaacagttgtacactgggagttatgcaacatttaagatgatggaaatggccaagaatagggcttgtacttag

SEQ ID NO: 36101 - DNA, 285 bp, Zea mays
  Peptide Sequence Number=SeqID_77880
atggaagtgagttcaccggaggtgggcgccaatgttggggacttgttctcaaatgcttcagctcgtgagaaggaccttcggaagccgaaggcccccaacaatgcacataaagatttagcaaacggattgcatatccttgcaaggactatttcaggaactttacctctactcacttctaggatatacgaggttccatctgggaacgataatctcaactacgagatattctccctacataggagagtgattgaaagggaattaggcttacacctagttcctaaataa

SEQ ID NO: 36102 - DNA, 333 bp, Zea mays
  Peptide Sequence Number=SeqID_77881
atggggcagattcagagatgtgagacccctcaggggcaaagcagaaaactcaccaagggaaaaagagtacaacaactgtcatcgggacagatttcgatcctttgggatctagattctatcgaatcttctacaagggctaacattagaaaatgtgctccccctgatccttgcaaaaccgtatcaataaggcaaaaacatcttcttctagaagtatatgcacataaagatttagcaaacagattgcatatccttgcaaggactatttcaggaactttacctctactcacttctaggatatacgaggttccatctgggaacgatgatctcaactag

SEQ ID NO: 36103 - DNA, 438 bp, Zea mays
  Peptide Sequence Number=SeqID_77882
atggtgcggacgggaacaaaggcggcggcacagaggcgacaaaagcctacctcacgtgagaaattgagaattggaggggactcaggagtgggcagaacggggggcggggtcgacgcacgtgagccgtcagatgatacggacgatttagcaaacagattgcatatccttgcaaggactatttcaggaattttacctctactcacttctaggatatacgagcacaatgatattgcgcgcattgctagaaatttcatcatcaagatgaacctcttcgcgaggcaaatcaccagcagggcgagttcaccggaggagagttattacagaccacgtgaatctgcaatcagaacatatgctttgactaagaccaatggatcatattcacaggcgtccccgagaatagatcaaatgccaataagtcaaatgtggatacaatattaa

SEQ ID NO: 36104 - DNA, 144 bp, Zea mays
  Peptide Sequence Number=SeqID_77883
atggcgaggtggaggagccgcgccaaggcacgaggcggaagcgcggtcaaagatgtaattgtgggcattactccacaacccatcacactcaatcaaagatccaaatcagacaaatatcataagaacaaacattcaagtgcatag

SEQ ID NO: 36105 - DNA, 369 bp, Zea mays
  Peptide Sequence Number=SeqID_77884
atgggatggatggcgcccgcgcagccgtggtggatgttgctggggaaggggcggccttcggttttatcccagagtcgagctcgattccagggggagaagcggtcagcgaggagcgagattcgcatgacgaacgacccgagctccgcggagccactcctccatccgcccgcgcaggaagcggagaagagtttcttccctgcacttatccgatatttgcttgtggataatgtcgagcacgtggattatctactctttaatgaggaggtcatggaacagagccaggactcgaagggtatggaaacgaatccagagcgagcgataacacgtatacgcgtgacgagcgacggcggcggcgcaaccggccgatga

SEQ ID NO: 36106 - DNA, 468 bp, Zea mays
  Peptide Sequence Number=SeqID_77885
atgcagaggagcttgccatggggattaggaaggtctggtcgagcagtccgggcagggagcctccgccatgggatggatggcgcccgcgcagccgtggtggatgttgctggggaaggggcggccttcgattttatcccagagtcgagctcgattccagggggagaagcggtcagcgaggagcgagattcgcatgacgaacggcccgagctccgcggagccactcctccatccacccgcgtaggaagcagagaagaggtaggagagggaatggggatggatgtgccggctggggcccacatggtggcgaccacgaagacgttcgcgtgcacacgggttaggttattgtttacggtcgagttagtccaagatgtaattgtggacattactccacaacccatcacactcaatcaaagatccaaatcaaacaaatatcataagaacaaacattgcacacatagatacctataa

SEQ ID NO: 36107 - DNA, 273 bp, Zea mays
  Peptide Sequence Number=SeqID_77886
atgacacctatcgacaaagaaatctcacagaaagacaagaagtggttggagaatcttaaaaagtgggatacaaaggacaaagagagggtagagaaaagacgagagaagcttgcgaccgagcaacaatgggtagacaagcaggaaatgaggcatattgttgaatgcggggaggagaagaagaagaagcttgagcgtgcacgtcgtgcaaaggacgcaataggggagaaccgtgatgcttttcgcaagggcaaatggccccgttgcactcagtag

SEQ ID NO: 36108 - DNA, 261 bp, Zea mays
  Peptide Sequence Number=SeqID_77887
atggatctcggcgccatgaatctcggtgccgaggttgacaagtccactgatcatgacacctatcgacagaggtattggatgtgtgctaactatgcatttgagccaacgattgttcagtgtcggatgaatttaatgactcctcgaccgctctgtgattttgagcagtggattaacacagaaatctcacagaaagacaagaagtggttggagaatcttaaaaagtgggatacagaggacaaagagaggatagagaaaagatga

SEQ ID NO: 36109 - DNA, 294 bp, Zea mays
  Peptide Sequence Number=SeqID_77888
atgtgtaggcgtggtaaatctgctaaacaaaggaagggtccattgaccggaactgccttcgacccacttcctttgccaactagtgtttcagtgcctatgtgtttttgtggtgatccttgcaaggttgacaagtccactgatcatgacacctatcgacagaggtattggatgtgtgctaactatgcatttgagccaacgattgttcagcgtcggatgaatttaatgactcctcgaccgctctgtgattttgagcagtggattaacacagaaatctcacagaaagacaagaagtga

SEQ ID NO: 36110 - DNA, 324 bp, Zea mays
  Peptide Sequence Number=SeqID_77889
atgtattttaagcaggacttgcaaggtgtcaaagaagggggagcagtcaacgatgaaattgatgaggcattatccccgaacagggatggaaatgaggaggcttcaaagattaggttcaatgatagcggtcctacagtcagcaagggctttgataccacttatgtcacacccggttttggaaggtcgcacactttacccacaagtcgtgattcccattctgcccggagatcatggctctccattgatcactaccaaggtgacctagcagggtctcactacgtagcctttacaaaagatttcccagaggtcatagctgcccgttag

SEQ ID NO: 36111 - DNA, 441 bp, Zea mays
  Peptide Sequence Number=SeqID_77890
atgggcgcgcgctggggcacgggcaggccgaccaggcggggctgggggcacggtggctgcgcctacgcgcatgcgcgcatgcagaggcgtggcggcggctggggagggtgcggcctagagtttggggcgcggggctgcggcgagcgagggtgccgcgcggctgggccaccgaagcaggccgggggggaaggcgcgctggtgggctgcagcgagcgaatgggccaaggggaggacttgcaaggtgtcaaagaagggggagcaatcaacgatgaaattgatgaggcattatccccgaacagggatgtaaatgaggaggcttcaaagagtaggttcaatgtaagcaggaaggcagctgactgggggaggtcactagccttcctcgaactcgtcgaagtcctggaactcctagagatccgcctcgacaccttcttatttacctaa

SEQ ID NO: 36112 - DNA, 354 bp, Zea mays
  Peptide Sequence Number=SeqID_77891
atgggcgcgcgctggggcgcgggcaggccgaccaggcggggctgggggcgcggcggctgcgcctacgcgcatgcgcgcatgcagaggcgtggcggcggctggggagggtgcgacctagagtttggggcgcggggctgcggcgagcgagggtgccgcgcggctgggccaccgaagcaggccggggggaaggcgcgctggtgggctgcagcgagcgaatgggccaaggggaggtgggctgacttgcaaggtgtcaaagaagggggagcaatcaacgatgaaattgatgaggcattatccccgaacagggatgtaaatgaggaggcttcaaagagtaggttcaatgtaagcaggaag

SEQ ID NO: 36113 - DNA, 456 bp, Zea mays
  Peptide Sequence Number=SeqID_77892
atgccaggcctccccgagttctgccccgaggtgagactcctgccccatgcttgttttactttattcgcgcctgcttttagccaatttggcctcgccgacgccgagattcctcaccggagttactctggcccgcctgagaccttccctccgccgttctctcctctctgccctcggattcgtggcctcttccccgccattgagtttgtcgtggcgttctctccctctctacccaacttcggcgaccccggagccaccctagctcacacctgcctcaactccgacgacctcaccgccgcggagaggagcagcgccgcccgcagccattcacctctccccgacaacgagcagtccgaggttcctgagtgtgttgttggagacctccctgagcaacaacctggaggtgatgctggcaacatggatgacttcgaggagtttcaggattacgacgagttctag

SEQ ID NO: 36114 - DNA, 261 bp, Zea mays
  Peptide Sequence Number=SeqID_77893
atgaccggaatgcctcaccagaattactccagcccgcccaagaccttccctccgctgttctcccccctctgcaggcggattcgtggcctcttccccgccattgagttcaccgtggtgttctctccctctctgcccaactccgacaacgagcagtccgaggttcctgagtgtgttgttggagacctccctgagcaacaacctggaggtgatgctggcaacatggatgacttcgaggagtttcaggactacgacgagttctag

SEQ ID NO: 36115 - DNA, 216 bp, Zea mays
  Peptide Sequence Number=SeqID_77894
atgggcttcgctccgataccagcggtgacggaacctcccaagttattaggcccacctacagttgtcacacccggttttggaagtgcggaaatgcgaaatgtagaagctaagcctacacaggcagctgactgggggtttgccactaagaaagaactagaactcgtcgtagtcctgaaactcctcgaagtcttccatgttgccagcatcacctcttga

SEQ ID NO: 36116 - DNA, 237 bp, Zea mays
  Peptide Sequence Number=SeqID_77895
atgtatccaagctctcatgcagcttcttccaaaactgagaagttgtcacacccggttttggaaggcaaacagaatgcgaaccatgtacgtgctaggatcagaaactcacaattacgaaaagtagatgctaagcctacacaggcagctgactgggggtttgccactaagaaagaactagaactcgtcgtagtcatgaaactcctcgaagtcatccatgttgccagcatcacctcctga

SEQ ID NO: 36117 - DNA, 162 bp, Zea mays
  Peptide Sequence Number=SeqID_77896
atggcaagacacgtgatagggtctggtggtgctccagaccggtctggtgagtttgcagaagaatctaagcctacacaggcagctgactgggggtttgccactaagaaagaactagaactcgtcatagtccttgtcggcgtttcgagacaggggggtccctaa

SEQ ID NO: 36118 - DNA, 489 bp, Zea mays
  Peptide Sequence Number=SeqID_77897
atggcacgagagggagaggccggggacggacgcagcaaccacgcagattctactgtctatttcatggcgaagattgcgcgcacccaacaagagattgtctggaaacgaaggccaccagggacaggatgtccagagcacaaccagccgacaaccagcgagtcatcgcgtacacataccaccaccaccaacaacaaccttacaacaacgagcacgtccagcatccacccaaccacgcataccagcaccgtcaggaagtgcaagttcttccacctccacctccacctccgcctccacatcacccaaatccacaccaccataatcacccccaagcaccatgtcacacccggttttgcaaggcaaaccgaatgcgaaccatatgctaagcctacacaggcagctgactgggggtttgccactaagaaagaactagaactcgtcgtagtcctgaaactcctcgaaatcctccatgttgccagcatcacctcctga

SEQ ID NO: 36119 - DNA, 660 bp, Zea mays
  Peptide Sequence Number=SeqID_77898
atggaggcggggatgaatcgccgctgcgactcctgctttatccgcgcgcacaggtccgcggtggcccacgcgattctggcgagcacgacaaaacgcccagctgatctacggtgggttgtggagagaagttcacggcgacagggttcttatacccaggttcgggtgaaacaacccgcccggaaaccacggtggccagcgtgggatcggcggcttctgttgcggataaaagataggaaggttagggcaagaataaccaggggtaagaaagtttacgtaggcctcctattcctaaaggtcgctttaggcacgagatttcaaggtgtgaaatccacatttgtctttagaaggaaaaggagaaatcgagtcaaagaaaagttggctgtgtacagccaagaggctgttcggtctggagcaccggactgtccggtggtgcaccggacagtgtccggtggtgcaccggacagtgtccgtttctcccttactccgtatttctttgtgagtcttaagtgtaagggcgagaggctccaagttgtggagattcctcgcaaacgggatattgaaaggcaaagcaaaacaccgtggtattcaagttggtctttggactgcttgagaggggttgattgcaaccctcgtccgttgggacgccacaacgtggagtag

SEQ ID NO: 36120 - DNA, 520 bp, Zea mays
  Peptide Sequence Number=SeqID_77899
atggatatctcggctctcgcatcgatgaagaacgtagcaaaatgcgatacctggtgtgaattgcagaatcccgcgaaccatcgagtttttgaacgcaagttgcgcccgaagccttctggcggtgggcacgtctgcctgggcgtcacgccaaaagacactcccaacaccccccccacggggcgagggacgtggcgtctggccccccgcgccgcagggcgaggtgggccgaagaaggggctgccggcgaaccgcgccgggcgcagcacgtggtgggcgacatcaagttgttctcggtgcagcgtcccaacgcgcggccggccattcggccctaaggacccatcgagcgaccgagcttgccctcggaccgcgaccccagaggcgtcctcagcgacggaccgggcccaagttctctggaaagggacgcctgggagggtgagagccccgtccggcccggaccctgtcgcaccacgaggcgccgtcaacgagtcgggttgtttgggaatgcagcccaaatcgggcg

SEQ ID NO: 36121 - DNA, 424 bp, Zea mays
  Peptide Sequence Number=SeqID_77900
cgtcccggcgtgcggccggccattcggccctaaggacccatcgagcgaccgagcttgccctcggaccgcgaccccagaggcgtcctcagcgacggaccgggcccaagttctctggaaagggacgcttgggagggtgagagccccgtccggcccggaccctgtcgcaccacgaggcgccgtcaacgagtcgggttgtttgggaatgcagcccaaatcgggcggcttcgagttggagcacgcctgtcgggacccgaaagatggtgaactatgcctgagcggggcgaagccagaggaaactctggtggaggctcgaagcgatactgacgatagctggagcccacacgagttctatcgggtaaagccaatgattagaggcatcgggggagcaacgccctcgacctattctcaaactttaaataggtag

SEQ ID NO: 36122 - DNA, 424 bp, Zea mays
  Peptide Sequence Number=SeqID_77901
cgtcccggcgcgcggccggccattcggccctaaggacccatcgagcgaccgagcttgccctcggaccgcgaccccagaggcgtcctcagcgacggaccgggcccaagttctctggaaagggacgcctgggagggtgagagccccgtccggcccggaccctgtcgcaccacgaggcgccgtcaacgagtcgggttgtttgggaatgcagcccaaatcgggcgggttcgagttggagcacgcctgtcgggacccgaaagatggtgaactatgcctgagcggggcgaagccagaggaaactctggtggaggctcgaagcgatactgacgatagctggagcccacacgagttctatcgggtaaagccaatgattagaggcatcgggggcgcaacgccctcgacctattctcaaactttaaataggtag

SEQ ID NO: 36123 - DNA, 565 bp, Zea mays
  Peptide Sequence Number=SeqID_77902
cgtcccggcgcgcggccggccattcggccctaaggacccatcgagcgaccgagcttgccctcggaccgcgaccccagaggcgtcctcagcgacggaccgggcccaagttctctggaaagggacgcctgggagggtgagagccccgtccggcccggaccctgtcgcaccacgaggcgccgtcaacgagtcgggttgtttgggaatgcagcccaaatcgggcggagggaagcggatgggggctggcgacgcgcaccggccgtatgcggaacggctcctgctggtccgccgatcggctcggggcgtggaccgttgtctcccgcgccggcggccaaagcctgggggccctaggcgcccccggcagccgtcgtcggcgcggacagtatccgcgcgcctctggcgcgccccaacggcctgcgagctccccatccgacccgtcttgaaacacggaccaaggagtctgacatgcgtgcgagtcgacgggttcagaaacctgagatgcgcaaggaagctgacgagcaggaggccctcacgggccgcaccgctggccgaccctgatcttctgtga

SEQ ID NO: 36124 - DNA, 723 bp, Zea mays
  Peptide Sequence Number=SeqID_77903
atggatatctcggctctcgcatcgatgaagaacgtagcaaaatgcgatacctggtgtgaattgcagaatcccgcgaaccatcgagtttttgaacgcaagttgcgcccgaagccttctggcggtgggcacgtctgcctgggcgtcacgccaaaagacactcccaacaccccccccacggggcgagggacgtggcgtctggccccccgcgccgcagggcgaggtgggccgaagaaggggctgccggcgaaccgcgccgggcgcagcacgtggtgggcgacatcaagttgttctcggtgcagcgtcccaacgcgcggccggccattcggccctaaggacccatcgagcgaccgagcttgccctcggaccgcgaccccagaggcgtcctcagcgacggaccgggcccaagttctctggaaagggacgcctgggagggtgagagccccgtccggcccggaccctgtcgcaccacgaggcgccgtcaacgagtcgggttgtttgggaatgcagcccaaatcgggcgggttcgagttggagcacgcatgtcgggacccgaaagatggtaaactatgcctgagcggggcgaagccagaggaaactctggtggaggctcgaagcgatactgacgatagctggagcccacacgagttctatcgggtaaagccaatgattagaggcatcgggggcgcaacgccctcgacctattctcaaactttaaataggtag

SEQ ID NO: 36125 - DNA, 726 bp, Zea mays
  Peptide Sequence Number=SeqID_77904
atggacggcgggttgattcatgtgaagtgcggggtctctttagcaaatttacccggccgaaggggtacggtgccacccccaaccggcgaagctcgccggcgcgcacgcgacacgacgctccagtgccccaagcccaaaattgacgggttctacgccgtcccggcgcgcggccggccattcggccctaaggacccatcgagcgaccgagcttgccctcggaccgcgaccccagaggcgtcctcagcgacggaccgggcccaagttctctggaaagggacgcctgggagggtgagagccccgtctggcccggaccctgtagcaccacgaggcgccgtcaacgagtcgggttgtttgggaatgcagcccaaatcgggcggtaaactccgtccaaggctaaatacaggcgagagaccgatagcaaacaagtaccgcgaggggaaagatgaaaaggactttgaaaagagagtcaaagagtgcttgaaattgccgggagggaagcggatgggggctggcgacgcgcaccggccgtatgcggaacggctcctgctggtccgccgatcggctcggggcgtggaccgttgtcgcccgcgccggcggccaaagcccgggggccctaggcacccccggcagccgtcgtcggcacggacggtatccgcgcgcctctggcgcgaccctcggggcgctgcgccgcaatggcctgcgagctccccatccgacccgtcttga

SEQ ID NO: 36126 - DNA, 429 bp, Zea mays
  Peptide Sequence Number=SeqID_77905
atggagctgtgctcgaccatgggaagggagatggcagggggcgccatggccagcaggcgccgtggccaagcacggaggctccatgagcacctagtagtggtccggccatggatggatggtggagctcgggaggtgggcgtggaggtgagggaggaggctgctgctgcattttggaacagggaggaggagaagtggcgtgtgggggaagggaaggagaggggtgggctaccatttattgagctggagctctggacatgtcaggtggcagtgagcagtggcaggtggaaaaatatggacattgggcggccatttttggcgttttctgcttgttttcgtaccttggtcgctgtagaagatttctttcttgatgtacactctacaattgttgtacagaacttgagacgaattcaagctgattcatcagacgca

SEQ ID NO: 36127 - DNA, 405 bp, Zea mays
  Peptide Sequence Number=SeqID_77906
atggagctgtgctcgaccatgggaagggagatggcagggggcgccatggccagcaggcgccgtggccaagcacggaggctccatgagcacctagtagtggtccggccatggatggatggtggagctcgggaggtgggcgtggaggtgagggaggaggctgctgctgcattttggaacagggaggaggagaagtggcgtgtgggggaagggaaggagaggggtgggctaccatttattgagctggagctctggacatgtcaggtggcagtgagcagtggcaggtggaaaaatatggacattgggcggccatttttggcgttttctgcttgttttcgtaccttggtcgctgtagaagatttctttcttgatgtacactctacaattgttgtacagaacttgaggtga

SEQ ID NO: 36128 - DNA, 1047 bp, Zea mays
  Peptide Sequence Number=SeqID_77907
atggagctgtgctcgaccatgggaagggagatgcaggggcgccatggccagcaggcgccgtgccaagcacggaggctccatgagcacatagtagtggtccggccatggatggatggtggagctcgggaggtgggcgtggaggtgagggaggaggctgctgctgcattttggaacagggaggaggagaagtggcgtgtgggggaagggaaggagaggggtgggctaccatttattgagctggagctctggacatgtcaggtggcagtgagcagtggcaggtggaaaaatatggacattgggcggccatttttggcgttttctgcttgttttcgtaccttggtcgctgtagaagatttctttcttgatatggttcatactatccaaaccactcggatcaacaccaactacatccctccaccacggcaagttcctatctacccagttgtagtagaggaaatccctgtggatctccctcgcattcgtgtggagaacggagtcattctagaggacagctcggaggagtttttgcctacgcccaccccgttggcagaatcactagccttcgcagctggattgtcagcttcagcaccgcctgcaccagcagtccaagcccatgctcccgaaggcgacgacccagacgactctggtgacgatgatgaagatgtcgacgaagaagaagaagatgaggaaaacatcaacaaagaagccaacaaagaacaacaggaccactacgtggggttatggcctgtcactgaacattatacctcaatgttcgagatagggcacttccctaacctgctgcaggatgttctgcatgcgttgggaacctacgttcgacccttgtatgagacatggagggtgtatgagcctcctcgggcttgctactacatcactcgcattcatgtcagggtgatggatgcaggtgatagagggttcaggactctgtcagctcatgagtctctgacaccgctatccacctacgctgcttcaatcagcgatgttgctaggcgaacactgtggtccctcagccacacctaccggcagtag

SEQ ID NO: 36129 - DNA, 117 bp, Zea mays
  Peptide Sequence Number=SeqID_77908
atggagctaggactccgcttgaaggcggatgtaatacttttgctttttgtaagaccaataggccgggcttatgagggcggacctcaccgagctggcgtacacgtatgcgttacctag

SEQ ID NO: 36130 - DNA, 420 bp, Zea mays
  Peptide Sequence Number=SeqID_77909
atggagctaggactctgtttgaaggcggatgtaataacttttgcttttcgtaaggttttagtctgggaagccaagttgtgtgcccggaccccctggacggtggttccagatactaggacacccgtcgcagagtggtggagcgtgcaggcttacggccaacaggctgagtttatgagggcggacctcaccgggctggcgtacacgtatgcgcaacctagttacaaaaggaagaaaaactcaacccctcaggccgctcctatggacaggacttacagagatgctccagaggttaggaagaggcactctttcagttatagcgaggtgatcaccctcgggtcagcatatttccgtcgccttgaagggtccttcctagctgggggagagtttgcggagcccttcttggttcagtactcgccttag

SEQ ID NO: 36131 - DNA, 642 bp, Zea mays
  Peptide Sequence Number=SeqID_77910
atgaccaccagcctcgcggtggggagaagcaagccgggctgcagcttcctccccagcttcagcttcaaggatgttcatcatcctcgctggagtggagggagagccaagtcgggggtccgccctccgcgtgggctggtgacccgcttcttcctccagcattcggaggagaagggtgttcaccagccttgcggaggaggcgaacctcagctacgtggggccggctggctgcaggccgtcagctgcagcgtgtccggccctttgggttggacggcttcggtgccgcctccgacgctgcctcctatcgtctggctggaggcgtggctgcccgtccaccgcacgggcgacggtcgcgccgtgcgcaggcagccgtcgcccaccggcacggaggtgggcgctgtcgtcggagctgaggtggtcgccgtcgctggaggacgggggcgaggacctccttgcaacggcgcacaccctgaggtggacgctgctgctggcaaaccactcggagtggtggtcgttgttgctgtcgatgcagaggtggtcgctatcgccggcgatccgtcgatgcagaggtggccgccgctggatcttagtctgggaagccaagttgtgcgcccggaccccctggatggtggttctaggtactag

SEQ ID NO: 36132 - DNA, 424 bp, Zea mays
  Peptide Sequence Number=SeqID_77911
atgtgcagtagcgaagctcgacgacgacgcaaggcaagggacggagctgctgcaggatccgagggaggatgctgtccatggttgggagagcttagcgcgcactgccctgatgccgatctggaacagcgaaggaaaagaggagggtgccatgggagaagaaatcgagctccctgctggttgcctggagcaggggacgcgcccatggggtgagctcgcgcccgtggagcagggaaggcgctcggctggaggaaggggcgagctgctcgcggccatgtggggagaagaaagagcgccgtcgagggagcttcaacagtggagcgctcggctgcagggctgctcgccgtggacagcagagggaggcgccatggttggagcaaaggtacccgcgcccatggagaagcctctgcgcgcagggaaacagtag

SEQ ID NO: 36133 - DNA, 529 bp, Zea mays
  Peptide Sequence Number=SeqID_77912
atgtgcagtagcgaagctcgacgacgacgcaaggcaagggacggagctgctgcaggatccgagggaggatgctgtccatggttgggagagcttagcgcgcactgccctgatgccgatctggaacagcgaaggaaaagaggagggtgccatgggagaagaaatcgagctccctgctggttgcctggagcaggggacgcgcccatggggtgagctcgcgcccgtggagcagggaaggcgctcggctggaggaaggggcgagctgctcgcggccatgtggggagaagaaagagcgccgtcgagggagcttcaacagtggagcgctcggctgcagggctgctcgccgtggacagcagagggaggcgccatggttggagcagagggagagggagccggcttccatggggaagaaggcccctgtgctggtggcttgacggaggaagctgcagggagagtttcctgcgcaagaacagggaaagagatgagtggcgtgtgggagaggaggaagaaggttgtggcggctagggggtag

SEQ ID NO: 36134 - DNA, 420 bp, Zea mays
  Peptide Sequence Number=SeqID_77913
atggcgccctcctcttttccttcgctgttccagattggcatcagggcagtgcgcgctaagctctcccaaccatggacagcaccctccctcagatccctgcatcccctagctgagcgcccctgctgtgtcccccctgcgtgcaacgctcacctccctgcttgcgtgctgctgcgcagtgcccattggcgcttgctaggtgttcgacaaaatgcgcagcaagttgcgcgatgcagcagccctcccgttcgatctccactcccctcgtcgcgtgtcgtcgctctcgtgctcgctgcgcagccccatccgcgacgctctagtggtagacgccgcgcttcacgccttgcccgttcgacgaaatgccgagccatgtggacagcccatgcgtttagtcacgactcattcaggttgattgatttatag

SEQ ID NO: 36135 - DNA, 261 bp, Zea mays
  Peptide Sequence Number=SeqID_77914
atggacgccggcctcgcttccgcggtcaccgcgctccggacctgcaccgatgtcgcgcacctcgcgcacgtgctcgagcagtttcgcctcgcccggtgcggcaagctcgtccgggacgcccgcgccgtcgctccatcaagggcctatgcttcgacctcttcatcattaggattggaaacagagctttcaatgcatgtcggaggatctccttattcacaaggcgtcgaggctgtcatcgaccacgtcatgccgctgcgctag

SEQ ID NO: 36136 - DNA, 780 bp, Zea mays
  Peptide Sequence Number=SeqID_77915
atgcccaacaaaacactccacaacaccaaaactgttcctttcagcatgctcactgaaatgttcaaatataatagtgaaacactccacaacaccaaaattgttcctttcagcatgctcactagcatgctcactgaaatgttcaaatataatagtgtgccgtcgcaagagaagatccctcgatttgggtcagtgaacaatcaccctcgacaaccatctaggttgtcatcagaagttgcaggccttccgaatcaacagcatgacattgttcaacaaagttttctcactgacaacttggttccacagaatttaacaattccttctgtcaaatatccaaataaccacagccagcaatcactcaaggaaaacaagctgccaaatattgagataattgtagcagacatcaacaagtttgagcacatgaaaaactacaagtcgcttcttaagaagatatccaggtggatgaaagaggatggcctactattcgttcacctcttctgccataaaacatttccatatcactttgagaatccaaaagttcaccttcttgcactaactgtaagtctttctgtgattatgtgcactaacttttttacctatcttttgattttacccatggagaaatattggatgggtgactgccatgaaggcatgaaccttaaaaaactcatgctcatgtggtattttaagccctgcctctacatggacgccggcctcgcttccgcggtcaccacgcttcggacctgcaccgatgtcgcgcacctcgcgcacgtgctcgagtag

SEQ ID NO: 36137 - DNA, 240 bp, Zea mays
  Peptide Sequence Number=SeqID_77916
atgatccctggatttgggtcagtgaacaatcaccctcgacaaccatctaggttgtcatcagaagctgcaggccttccgaatcaacaacatgacattgttcaacaaagttttctcactgacaacttggttccacagaatttaacaattccttctgtcaaatatccaaataaccacaaccagcaatcactcaagtactgtatttatacaccaacatcaccttccacagtttctgtaggatga

SEQ ID NO: 36138 - DNA, 930 bp, Zea mays
  Peptide Sequence Number=SeqID_77917
atgacgacccccgacctgctgaaacggcagctggaaagaaacggatgcgtccgcagcgctcgccgctacccgctcccctccgccgcgaccctcctctctctcacgccagatgcagggcgtcactgtgcactccccctcgcctgcttctcgcggaagaatccgcacgtgccaccgaccggacacttcgcgctcctcttctctcccgttcgaggcgtctgcggaacggcgatttccggcgaggcggcggcgaatctaccgcgggaaggtcgcgtcggcgccggtccccgtcgggtctgtggaagacgaagtcgaggtgctcagcaagcaggtccggtcgtgaccgaagacgaagaggccgcaaatccgagtccgtcgaggttcgtcgtgaccgcttccttcgtttcccgctccgagcatcgacaccttcctcggatccggacatcttcgcttcgattcctcttctttcgaccgaaatcttcggatcttgagtggaacaaatggtactgcaaactattacggcctaatgcacacttgcgaatggcatcctcgaaagaagataccatgaagtctttgcttaaagtacttgtcgactgtgccgaggatgccacaaaatcccttggtggattagtagatcatgcattagaccacatgcatgatgaagagatattagctagaaccctctttgccatgaaagaaaaacttgatttgcttcaccaagatgccttagaggctaaagtccaagcttttcctgaaattgctaagtacgacggggatgacataagtgttgaaccgacatctccgtcgacccctccaacaattactgaaccatctgtcgatgaagaggagttctactgccccgatgtgagtgatgagtggtacttcagcgactcagataggtcaactcgtaatagctactggaatctttattag

SEQ ID NO: 36139 - DNA, 435 bp, Zea mays
  Peptide Sequence Number=SeqID_77918
atgaagcggtcgcaaatccgactccgtcgagcacacttccgaatggcatcctcgaaagaagataccatgaagtctttgcttaaagtacttgtcgactgtgtcgaggatgccacaaaatcccttggtggattagtagatcatgcattagaccacatgcatgatgaagagatattagctagaaccctctttgccatgaaagaaaaacttgatttgcttcaccaagatgccttagaggctaaagtccaagcttttcctgaaattgctaagtacgagggggatgacataagtgttgaaccgacatctccgtcgacccctccaacaattactgaaccatctgtcgatgaagaggagttctactgccccgatgtgagtgatgagtggtacttcagcgactcagataggtcaactcgtaatagctactggaatctttattag

SEQ ID NO: 36140 - DNA, 243 bp, Zea mays
  Peptide Sequence Number=SeqID_77919
atggcgcacggccgaaaactgaggttcgggcacgaccccgaaaataagctaaggcatggcggtacggagggaaaacggcacggaggcgcgcgacgacgggcggcatggctgttcgtcctagcgtctgggccgaaaacgaggggttcgcccatggcgcagggggcgaaaactaagggcatggcggaacggagggaaaacggcacggaggcgcgcggcgacgggcggcagggccgttcgtcctag

SEQ ID NO: 36141 - DNA, 342 bp, Zea mays
  Peptide Sequence Number=SeqID_77920
atggcgcacgggccgaaaaacgaggctcggcatggccccggaaataagctaagtccaagcgtggcatggcggaacggagggaaaacggcacggaggcgcacggcgacgggcggcatggctgttcggccttgcgtctgggctgaaaacgaggggttcgccatggcgcgcgggccgaaaacaacggttggccacggccgcgaaaacgggctaagtcccagcgtgtggaaagacaccgaacctagagcgcatgtcttgagtgaaggtaaaggtggaacggagggaaaacgggaggaggcgcgcggcgacgggcggcagggctgttcggccttgcgtatgggctga

SEQ ID NO: 36142 - DNA, 468 bp, Zea mays
  Peptide Sequence Number=SeqID_77921
gtggaacggagggaaaacgggaggaggcgcgctgccacgggcggcagggctgttcggccttgcgtttgggctgaaaacgaggtgttcgccatggcgcgcgggctgaaaactgaggcggcagggctgttcggccttgcgtttgggctgaaaacgaggggttcgccatggcgcacgggccgaaaactgaggctcgggcacgaccccgaaaataagctaagtccaagcatgtggaaagacaccgaacctaaagtgcatgtcttgagtgaagggcacggtggaacggagggaaaacggctcggaggcgcgctgccacgggcggcagggctgttcggccttgcgtttgggctgaaaacgagggatgggtttcgtggcgtcctgggaaaataccctggttttctgaaggctgaactccccgaagtcctgggagggggtctcctcggccgagccccgcaccccctcgcggcctag

SEQ ID NO: 36143 - DNA, 141 bp, Zea mays
  Peptide Sequence Number=SeqID_77922
aactccccgaagtcctgggagggggtctcctcggccgagccccgcaccccctcgcggccaagccgtggccggtcggcaccctaccgcgcccagctccggctggcgctgttggctgcctggccggccgtgtttcggccgtga

SEQ ID NO: 36144 - DNA, 141 bp, Zea mays
  Peptide Sequence Number=SeqID_77923
aactccccgaagtcctgggagggggtctcctcggccgagccccgcaccccctcgcggcctagccgtggccggtcggcaccctaccgcgcccagctccggctggcactgttggctgcctggccggccgtggttcggccgtga

SEQ ID NO: 36145 - DNA, 519 bp, Zea mays
  Peptide Sequence Number=SeqID_77924
atggcgaacgggccaaaaacggattttcggccacggccgcgaaaacgggcacgtggatgggcacgggaccctcccgtggtccccccgcgtctcctcggccgagccccgcaccccctcgcggccaagccgtggccggtcggcaccctaccgcgcccagctccggctggcgctgttggctgcctggccggccgtggttcggccgtgacgcagccacgaccggctatggctggctaccgccggctagacgccctggacgagtggctgcaccgtgggatggcccgttgctcgatgcgttttccgtttctcccgcgctcagtggaccttcggtcgccgtcctcgcaagcagacccgccgcgcccagcgcggagggatgctttggatggctcgaccgtagcggctacgctggcgcatgagttgtcttggacccgtgactgcttggaggacccccgctaccgtgcggccgactcccggcgcccgtgtcccatcgctcgtgcgggcatcctatgcctgctgcgctga

SEQ ID NO: 36146 - DNA, 276 bp, Zea mays
  Peptide Sequence Number=SeqID_77925
atggaggccaagtcacaccagcaacaaatcatcctaaggagtacctgcaaaaattgtgccacaagcaaggctgagtatactaatactcagctagacttacccgggctcaccgccttggcgtacaatgccccactgaccccgactggccgtcgtgcagtgaccgcacttgtacccaccataaccggaatgggagacctcgtctcaggtcgcgtgaggggatatgtctgcgggcaggttcactcaggtactaggcttaccgatttaccatatttctcg

SEQ ID NO: 36147 - DNA, 276 bp, Zea mays
  Peptide Sequence Number=SeqID_77926
atggaggccaagtcacaccagcaacaaatcatcctaaggagtacctgcaaaaattgtgccacaagcaaggctgagtatactaatactcagctagacttacccgggctcaccgccttggcgtacaatgccccactgaccccgactggccgtcgtgcagtggccgcacttgtacccaccataaccggaatgggagacctcgtctcaggtcgcgtgaggggtaaagtctgcgggcaggttcactcaggtactaggcttaccgatttaccatatttctcg

SEQ ID NO: 36148 - DNA, 357 bp, Zea mays
  Peptide Sequence Number=SeqID_77927
atggaggccaagtcacaccagcaacaaatcatcctaaggagtacctgcaaaaattgtgccacaagcaaggctgagtatactaatactcagctagacttacccgggctcaccgccttggcgtacaatgccccactgaccccgactggccgtcgtgcagtggccgcacttgtacccaccataaccggaatgggagacctcgtctcaggtcgcgtgaggggtaaagtctgcgggcaggttcactcaggtactaggcttaccgatttaccatatttctcgatcaccaaaaatagtgatccaagactttttggaaagcttagaaaaaagtactacacaacttttataatcaccaaggggtga

SEQ ID NO: 36149 - DNA, 384 bp, Zea mays
  Peptide Sequence Number=SeqID_77928
atggcgggggagatgcagggaggtgctcggctgctgcagagatggaactcaccatttggagcagtggcaggggcgtccatggctgctggagaaattagggcgccatccatgggaagaaggaggagctcgctgcaaggaagggctggcggccatgggagggaaggagccgtgctccctgcgctggggaagaaggggaggtcgccatggctggccggtctccctgctagccgctgtggggaagaaaggtgccatggagaagagctggaggcgtctgctccaagggctcggccagcgcccaagcagggaggtggaggcgccatgaacagggagagaagccaagcctgctgccgtggagcaaggaggaagaaagggagtggcggctga

SEQ ID NO: 36150 - DNA, 402 bp, Zea mays
  Peptide Sequence Number=SeqID_77929
atgaccgctgctcgctgcggcatttcgtcgagcacgcagcaagcaccacacaagcagggaggacgccgagttgcgagccatggcgagggagatgcagggaggtgctcggctgctgcagagatggaactcgccatttggagcagtggcagggggcgtccatggctgctggagaaatcagggcgccatccatgggaagaaggaggagctcgctgcaaggaagggctggcggccatgggagggaaggagccgtgctccctgcgctggggaagaaggggaggtcgccatggctggccggtctccctgctagccgctgtggggaagaaaggtgccatggagaagagctggaggcgtctgctccaagggctcggccagcgcccaagcagggaggtggaggcgccatga

SEQ ID NO: 36151 - DNA, 213 bp, Zea mays
  Peptide Sequence Number=SeqID_77930
atggcgtcggtcgacattggaggaaggaagcaggagcagagagggaacatggctcccgtgcgccagcacttggggaagatggcggccggttgggggcgtcgcggccatgggagggaaggagccgtgctccctgcgctggggaagaaggggaggacgccatggctggccggtctccctgctcgccgctgtggggaagaagggtgccatggataa

SEQ ID NO: 36152 - DNA, 786 bp, Zea mays
  Peptide Sequence Number=SeqID_77931
atggaggcctttggattgcgtaaccccatggtcgatgggtccttggagtggttgagcccgagatccttgacgaccgcgaacaccatatcccccgagaacagatccttgggtcagaggtccctcttggcgccggtgggagaggagcggctgctggctagcagcaacaccaacctgctgtggtgctccagcccgtctttctcattcgactactccacatctgcggcactacccatggcggctactgctgctctgacctcgtcgaaggtgtgggtgaccatccgcatggcgtcggcgtcgactgcggcgccgttgagaccgcgtgacaccaggctgctgcgccgcattgacggaggcaacgttggcaccgtgtacctatgccgccatggtcttcggcttctaaatgttcatacctcaaaaccattttctttgatttcaaaactgatggaggagaagaattctgctgttgaactgaacaacaagcttcgacaagaattggatcttctgaggcgagacatcagctgcggctacctgaatacttactgtatgttgcatgggaggactctgaacatcatgaacttgtggaggaagctcggactacctgctacggggaatgttctggaatgctccgtctgtcgggatcgcgccacaaaggtcgttgttggagaaatctctgcagaagcacaaaagaagaagaagaagaagaatgttaaggcatggctgaattgggtttgccgcaactgctacagtcgccgtagagagcaaaatgcagccgctcagctcacgtag

SEQ ID NO: 36153 - DNA, 186 bp, Zea mays
  Peptide Sequence Number=SeqID_77932
atggcgaggcgatggactgtcagaacctcgtggagaggggaaatttttgggaacaacatcagtggaccaatcccatcagagttcggtagcctggcgaacctgatcagcctggacctgtccagcaacagcatctcaggagctatacccgcagccctagggaacgccaagtccctgaagttcctatga

SEQ ID NO: 36154 - DNA, 642 bp, Zea mays
  Peptide Sequence Number=SeqID_77933
atgggtaatgtaccaaaccccactccgttcctcacccgcggcatcgtcgccaccgaggccgtcggcggcttagccaaagaccgttgcggccccgactccgccgtagcccaccacccggcaaccgctgtgacctacacgaaccaaacccgccgccgcggcatagcgcaccacaccaggctcctcgatggtatagactcgagagcccaacccgacctgagccgatctgaaaggagggttgtcatctggcctcccctggttccggcgcccatggtggtggcagcacctgtccagctaaaccctcgacgagggattaagtgtgactgcgtgatgatgtctgacgctcctgttcagcagggacaagaccgcctcttccccctccccgcgcttttgctgatcggccttcagtttctcaagcaacagcatctcaggagctatacccgcagccctcgggaacgccaagtccctgaagttcctgtgagtccgggaatacaatggcgtttggatcacaatcgcctgacggggccgatcccaagggagcttgctgggctgcccaatcttggaattgtagatttctccaacaatgacctttgtggcgcgatcccgacagacggagcattccagaacattccccgtagcaggtag

SEQ ID NO: 36155 - DNA, 528 bp, Zea mays
  Peptide Sequence Number=SeqID_77934
atggaggagcacggcggcgcgcgcccgttcacggcggtccgcccgccggagatcccgaatccggccagacccggcccccggcgtgccgcggcggcgcccatgccatcggcagtggccacgcgaactaacgcacctaggccaattccgagctactctaaacgtgctagagattcaagcgaaacatgggaaggagaactcaccgaggatggtggtggacaccgagctgaccacgacggattgcgagtctgcggcggtgttgagtcgacggcgacaaattccggtgccgccggtggcttgtcttctgaaattcggttgcggccaccttcaacacgtccgaaaggagcccctgggttccttaccccgagcacggtcgtcggcacgcccggattcgcctacggcggggtgaccgaccactgggtccaagctgtcagcgcaacagaggagctacgcgcgcggagtttggctgacgggtgggcccttgttgtcggcgtcgtgatgcctggtgggcgcgcgggtcagaatagatag

SEQ ID NO: 36156 - DNA, 162 bp, Zea mays
  Peptide Sequence Number=SeqID_77935
atggatctcgcgcgagctgttaccgatcccagggtgaccgaccactgggtccaagctgtcagcgcaacagaggagctacgcgcgcggagtttggctgacgggtgggcccttgttgtcggcgtcgtgatgcctggtgggcgcgcgggaattccttcttattga

SEQ ID NO: 36157 - DNA, 996 bp, Zea mays
  Peptide Sequence Number=SeqID_77936
atggaggagcacggcggcgcgcgcccgttcacggcggtccgcccgccggagatcccgaatccggccagacccggcccccggcgtgccgcggcggcgcccatgccatcggcagtggccacgcgaactaacgcacctaggccaattccgagctactctaaacgtgctagagattcaagcgaaacatgggaaggagaactcaccgaggatggtggtggacaccgagctgaccacgacggattgcgagtctgcggcggtgttgagtcgatggcgacaaattccggtgccgtcggtggcttgtcttctgaaattcggttgcggccaccttcaacacgtccgaaaggagcccctgggttccttaccccgagcacggtcgtcggcacgcccggattcgcctgcggcggggtgaccgaccactgggtccaagctgtcagcgcaacagaggagctacgcgcgcggagtttggctgacggagaatcctccctctcctcatcagagaagaggaaaccagatgcactggcgccgtcagagtttggggattcgactttgacggagttgaggttcgcccacagtccgatttgtgcacctcggctgcgttcaatcaaggcaggggatggcatcgggaccacggatggtggcggtggtatgacctcgtcgtcgttgaagaagggtggacaccctgttcttgctgctctggttggaggacgaccgaaacctggcggtgccggtgttggtggtctccaacgcggtgcagtaggttccacctccggtgtcgtactggcgggcagcggtgagagtagcctccagcacgccggcgtcgcgcagagcacatggtccgaatccgtggaatggacagtaaccgtgcgggtacttgtgtggacgttgctgtcgccggcggtggagggggaaccaccactggtggtgctcgacgacgacgagatgaactgcgattatgactgcggcgatttggaatccagacaccggtggcaccggtgttaa

SEQ ID NO: 36158 - DNA, 543 bp, Zea mays
  Peptide Sequence Number=SeqID_77937
gctgcctttgcatattcgaagggtgacaggtcatatgcttcttaccttgctgaggagaaaaagctagcacatcatatgcttttacccataataagggtctatactcgaatgctcctgttagcagtaacactatcatccaagagtacatacttggggaaacattatcgagaactaggtcgcatagaagacgagaaggccagcaggaatatatttgaagccagaaataagcatataacgaacacagtaaccatcgacttgcatggccaacatgtccaacatgctatgaaccttctcaaaattcacatgatgatttgtatttgcattccatctgtcttactgagggtaattaccggttgtggttcagaaggtacagggaagggaaaaataaagcgctcggttatagagcttgcggagaaggaacatattgagtggcgcgaagagaactctggaactgtagcccttcgacttggtgggccaagagagtatcggttccttgagcatgaaagcgattctgacctagtggggaactttaacatagattaa

SEQ ID NO: 36159 - DNA, 696 bp, Zea mays
  Peptide Sequence Number=SeqID_77938
atggactggaaaaaggtagtaaagaaactgcaaacaatcaattataccgctgcatcaaacaatcacgaaaggcctaaggatgggggtggctatcgtgagctccgtggtgttgctgcaaggcattacgataaaatgaaagaatactatcagaaagctgcctttgcatattcgaagggtgacaggtcatatgcttcttaccttgctgaggagaaaaagctagcacatcatatgcttttacccataataagggtctatactcgaatgctcctgttagcagtaacactatcatccaagagtacatacttggggaaacattatcgagaactaggtcgcatagaagacgagaaggccagcaggaatatatttgaagccagaaataagcatataacgaacacagtaaccatcgacttgcatggccaacatgtccaacatgctatgaaccttctcaaaattcacatgatgatttgtatttgcattccatctgtcttactgagggtaattaccggttgtggttcagaaggtacagggaagggaaaaataaagcgctcggttatagagcttgcggagaaggaacatattgagtggcgcgaagagaactctggaactgtagcccttcgacttggtgggccaagagagtatcggttccttgagcatgaaagcgattctgacctagtggggaactttaacatagattaa

SEQ ID NO: 36160 - DNA, 1020 bp, Zea mays
  Peptide Sequence Number=SeqID_77939
atggacccttatggtatcccaatgagatatggagatgctgggatatctatattgacagatgagatatccaacactgggctccagtctgaattaggacacgagtttttatggggtgaacctcagatcagtgactatgaaggatgccaaattgaggttcaagtatcttctgaacccatcccgccaattcgctatgcggaggctgttaaggaggcaccacgctcatcaacattgccgtcaagatcaactgtaatgaaagctggtccacaacaagtcctggattcactgtttaaaattcctgaaacacgcacgtatgagccaagttctatggactggaaaaaggtagtaaagaaactgcaaacaatcaattataccgctgcatcaaacaatcacgaaaggcctaaggatgggggtggctatcgtgagctccgtggtgttgctgcaaggcattacgataaaatgaaagaatactatcagaaagctgcctttgcatattcgaagggtgacaggtcatatgcttcttaccttgctgaggagaaaaagctagcacatcatatgcttttacccataataagggtctatactcgaatgctcctgttagcagtaacactatcatccaagagtacatacttggggaaacattatcgagaactaggtcgcatagaagacgagaaggccagcaggaatatatttgaagccagaaataagcatataacgaacacagtaaccatcgacttgcatggccaacatgtccaacatgctatgaaccttctcaaaattcacatgatgatttgtatttgcattccatctgtcttactgagggtaattaccggttgtggttcagaaggtacagggaagggaaaaataaagcgctcggttatagagcttgcggagaaggaacatattgagtggcgcgaagagaactctggaactgtagcccttcgacttggtgggccaagagagtatcggttccttgagcatgaaagcgattctgacctagtggggaactttaacatagattaa

SEQ ID NO: 36161 - DNA, 1083 bp, Zea mays
  Peptide Sequence Number=SeqID_77940
atggggggtatccgccgcctttccgcctccttgttggaggaacgcaactccatgggagttggtacctctcagccatcgttcggcttcaaggattttcatcacgcagcctggccacaccccgccaccggcggtcacccaagatggccaagatggaagatgaggcgagtcgggggaccgcccccgcgtgggtcggctgcccctttcttccccctgcgcccgggggtgaagggcgtccttgagccccacggagacttcctccagccatgccaggatatgcagggcgctaggggccctgggtccccgtctccctgcctgaatggctggttctcgtccccagcgggggggagcccttctgccgtgacaccttccccaaagctgctgcccaagccgcttcgctgtctagggcaggggtggttgccgtcacggttggaacgggcggcagcgagccgtccatcgttcttcagttactccgcaggccttccccttcggaggggggttgttcgtacctgcggaggagggaaccggagttccattggtagtggcgtctcgtacgccagtgttcttcgttcattgcggctgtcgaggcctgaacgtgaatccctcggcccgttcggccttgttgtctggggctcctctagcttagttgaagagacccctggccgcccttcggtggaccgaggccaggggggtaaccggttgagccgcctgctcgggccggattcccggaggagtccctggacagcggcgccgcccgaggctgggtcgggctttgctgaagacgtcgtcgatgccgagggtgccacggctcccttcagcgtgaagacccgagcctgcaggatcagatcatcttgtagcgtgtgctttctgcggccgccgaggccagaagaacacaccctcgccgcgcttgcgaagctgcgtcttttttcctcttgtttcgagcgtctggactctgtcggtaacagggatgtttgtgtgagcgagagctgcttttcgcggaagggacgagtgaggagtccctcggctcggtcagccttggctgcttacgtgtacctcgtcgtttccaggatccgctttccgaagtag

SEQ ID NO: 36162 - DNA, 1182 bp, Zea mays
  Peptide Sequence Number=SeqID_77941
atggggggtatccgccgcctttccgcctccttgttggaggaacgcaactccatgggagttggtacctctcagccatcgttcggcttcaaggattttcatcacgcagcctggccacaccccgccaccggcggtcacccaagatggccaagatggaagatgaggcgagtcgggggaccgcccccgcgtgggtcggctgcccctttcttccccctgcgcccgggggtgaagggcgtccttgagccccacggagacttcctccagccatgccaggatatgcagggcgctaggggccctgggtccccgtctccctgcctgaatggctggttctcgtccccagcgggggggagcccttctgtcgtgacaccttccccaaagctgctgcccaagccgtttcgctgtctagggcaggggtggttgccgtcacggttggaacgggcggcagcgagccgcccatcgttcttcagttactccgcaggccttccccttcggaggggggttgttcgtacctgcggaggagggaaccggagttccattggtagtggcgtctcgtacgccagtgttcttcgttcattgcggctgtcgaggcctgaacgtgaatccctcggcccgttcggccttgttgtttggggctcctctggcttagttgaagagacccctcggccgcccttcggtggaccgaggccagggccgacgccaaagtcgatcagtcgatgcctcgggttggactggcgcccttggaagccggtcgaccgaggccccaggggtaaccggttgagccgcctgctccggccggattcccggaggagtccctggaccgcggcgccgcccgaggctgggtcgggctttgctgaagacgtcgtcgatgccgagggtgctacggctcccttcagcgtgaagacccgagcctgcaggatcagatcatcttgtagcgtgtgctttctgcggccgccgaggccagaagaaaacaccctcaccgcgcttgcgaagctgcgtcttttttcctcttgtttcgagcgtctggactctgtcggtaacagggatgtttgtgtgagcgagagctgcttttcgcggaagggacgagtgaggtatccgtatcccggaggcgtgggaatccctcggctcggtcggccttgcggcttacgcgtactttcactcgtccatgaggccctgtccccgacttag

SEQ ID NO: 36163 - DNA, 570 bp, Zea mays
  Peptide Sequence Number=SeqID_77942
atggtgtctccggtgagctgcaagcgggtaatccgagtggacgtccgtgccccgttcgttgggggtcggctaggggcccagaggcacgcccaaaagtacctgcggcaactggcgcgccggttgctcgacgcgtgggcctgggttcccaagctggcgtgtcagaagtcggagaagcgcgtccatctggcgcggttgcatgccgcctgcatggctgcccgccccttctgcccgttggtctgggcgaaaacggggggtcgcttcgtcgtgtcttcccatcttccaagcccccggatggggggtatccgccgcctttccgcctcctcgttggaggaacgcaactccatgggagttggtacctttcagccatcgttcggcttcaaggattttcatcacgcagcctggccacaccccgccaccggcggtcacccaagatggccaagatggaagatgaggcgagtcggggggccgcccccgcgtgggtcggctgcccttttcttccccccgcgcccgggggtgaagggcgtccttgagccccacggagacttcctccagccatgccgggataggtag

SEQ ID NO: 36164 - DNA, 2330 bp, Zea mays
  Peptide Sequence Number=SeqID_77943
atggagaaatgcaaaccaatcaagacccccatgcctacaaatggacatctcgacttagatgagggaggtaacccgccgcaagctctctgtctccaggcgcctcgtctctgctttgcggtagtccggcgacctctccggcggccaccatctccggccatcatcgccgacgacctcgcctctctccatctccccctcgtgaccttgtgtgaccgtgtgccgtctcccgtcctgcctggatcgtcacctctcgtgatgccgcgcacgaagaatgcgtcggcatcagggggtggcgacgatgaggaccctcgtcgccccttcaggcaggtgaagggcaagactgtgtatctggagcagcaggaaggccgcaagaagcggcgttcagacagagaggctcgcgcagcagcagcagctgccgcagccgctgcacaggcagcactttggagatcagccggatattccatcagatcagattgctttccgtgctcgtcgtttcgcctcccggtctcgctcctccactcacacctccgcttccacttccgccaacccactctgcctgctccagtcactcctattgctccatccacctcccaccgccataccccactaccagcaccacgccagcttccactgcttcccctgcccccgctcccgcttcagctccacctgtccctccacctcgcttccgggagcgcgatgagactgaggtccgtccactgggttcggatcctcgtctatttgatcttcagccgtgccactgcagcccgggtacgtcggttcaggtacgtacccgtggagtcttggctgccagctcagagagacccagcagcaggagttcttttcagcactcggattcaggagtctttcttcagggcacagatgtcagctcagattgcgctacgtgttcaccgcctcttagatcttccagccttcttgctagcagccggtgctgagtctgaggcgcatctcacatatttgccaggccttctatcctttctgactatcagcggcagatatgttgaggagtgggtccgcgtcttctatgcctctgtttggattgacccggatcatcagtggatgaggttccgctttgagcgcgaggatgtcacgatcactgccagtcagatcagacagctttttggattccctgattcgtcgactcgcctccacagtctctgttacgggacttcagatcctccacgtcgccctcacggcggtgtggctccagggacagctcacgtcgcggctctgttccgcccgcctttttcagatgggtcgcgacgttctccagcagacttcactccggcagcgaagtacttatatgagctcgtcagacggacactcctgcctaggatgggatacagggaggccaccactcatatccagctttggctccttggtgccctggtatcccactctgagtttgatgttgttgactttctgatctgtgagattgaggacactgttctggatgggattcgtgctcggcggcagctaccctatgctcactacttatgccacatatttgcgcagctgatccagccacctcgctttcagagcacccttgaggcctctcgccttgtgtttggatcttaccgtcctgctccagagattccagtgccagcttatgctcctgtgtttgacactcaggctgaggatgcagcacttcgccagtttgacaccctgggtgccgccgacgatgatgatgatgatgatgattttgggattcctcctccgcctccgcctcctatgcctccacgctctcatgatcatgaggctgggagctctagtgctgcccctgctacccctcaggctatggaccctgctctagcttcgattcttcagactctccctcagcagcaggctcagctggcagccgagcaggcccgtatgtccgagaggatgctctcaatgttccagactatgcaggacaggcaggattcacttcagcagcagcttattcaggatagggcagagaatagggcattcatggccctcatgcttcagcattcgggtatctcagcacctccagttcagtctgctccgccttcttcgcttcacgctccagtagtgccttcgatcttgtctgcaccccctgctgttacctctccgctccggccggtcaccttggcgttcacttcaccagttctcagctctgtctgcccgcagccgccagtgccaccagcatctgctgtttccactaccgctgtggcagtatctgtgactgcttctgctccggtagctcctgcagcgctgcctgcgtccgagtcagtaccagctccagcttctaccgcagatcctggatccgagcctgactctgaccctccgtcggc

SEQ ID NO: 36165 - DNA, 387 bp, Zea mays
  Peptide Sequence Number=SeqID_77944
atggagagaggcgaggtcgccggcgatgatggccggagatggtggccgccggagaggtcgccggactaccgcaaagcagagacgaggcgcctggagacagagagcttgcggctgggagaagaaatgagacagagcccctggctcggtcgggctgggggctattttttaaaacgcgagatgggcacaccggacagtctacagtggctgtccggtgcacaccggacagcgcacagtagatgtccggtgaaccaccggacagcgcacaggaaaaaaggaacttcgcgcgcggctgccggtgcaccggacattgcacagtgcagtgtccggtgcacaccggactgtccggtattggcaccctcatatacttttcaaaatattttgccatag

SEQ ID NO: 36166 - DNA, 387 bp, Zea mays
  Peptide Sequence Number=SeqID_77945
atggagagaggcgaggtcgccggcgatgatggccggagatggtggccgccggagaggtcgccggactaccgcaaagcagagacgaggcgcctggagacagagagcttgcggctgggagaagaaatgagacagagcccctggctcggtcgggctgggggcgattttttaaaacgcgagatgggcacaccggacagtctacagtggctgtccggtgcacaccggacagcgcacagtagatgtccggtgaaccaccggacagcgcacaggaaaaaaggaacttcgcgcgcggctgccggtgcaccggacattgcacagtgcagtgtccggtgcacaccggactgtccggtattggcaccctcatatacttttcaaaatattttgccatag

SEQ ID NO: 36167 - DNA, 399 bp, Zea mays
  Peptide Sequence Number=SeqID_77946
atgggggatcgagaggacgaccgctccccaccggcgcagcccaagcccaagcactggagatccgtccgctcctctcctgaccgcgggatgggcattatgagcttcgtacctgaggaagcagagcgggcattgagttcttgttttgttcaaggcactgaactgacaccagatgtctcccaccgcaaagaattgttcaaaaaattcgtacgattatgttttggtacacaaattatccgatacaatattagtgcacaacaattacatgaaaacaaacaatatctcacaaattcaagtggagatattctaagcccatatgtcgcaactatccattatgaccacctgatggatacggaccaagcagtttgcgtcgctaacttgtttctgttatccttaacctaa

SEQ ID NO: 36168 - DNA, 306 bp, Zea mays
  Peptide Sequence Number=SeqID_77947
atgggggatcgagaggacgaccgctccccaccggcgcagcccaagcccaagcactggagatccgtccgctcctctcctgaccgcgggatgggcattatgagcttcgtacctgaggaagcagagcgggcattgagttcttgttttgttcaaggcactgaactgacaccagatgtctcccaccgcaaagaattgttcaaaaattcgtacgattatgttttggtacacaaattatccgatacaatattagtgcacaacaattacatgaaaacaaacaatatctcacaaattcaagtggagatattctaa

SEQ ID NO: 36169 - DNA, 1119 bp, Zea mays
  Peptide Sequence Number=SeqID_77948
atgggggatcaagaggacgaccgctccccaccggcgcagcccaagcccaagcactggagatccgtctgctcctctcctgaccacgggatgggctttatgagcttcgtacctgaggaagcagggcgggcattgagtgaattcatgcagggagcagcagaagcagttggagagtttggtaaatctactggcagagacaaacagagcctgactgcaaaaggatatgaagtcgtctccaatgggattgacaaccatttagtttcagtgaatctcaagaataaggaagcgaagggtactagagctggattaatgggaacaaccattttagcaatgttgagtgttcggagagtttgtgagggctgtggaatgtcgaaggtgaagaacaataatggttatcatggagtcactgagccaatctcgctgagtgggccgactgagaagtaccttatgcagacagatgaggttgaaaagtacctttcagatgcacgactctatgagaggcaagatgaggctatcttgcgagaagaggttttaggcaagctggaccagactgtgaaagcttggattaagaaggctactaggatcaacgggtatggggagcaatttgtgcatgaagcaaatgcaaagacctttacatttggttcatactgtcttggggtacatggccctgatgccgacattgacaccctatgtgttggtccaagacatgcaactcgaaacgagtacttcttcagatggcttcatgacatcctagctgagatgccagaagtttctgagttacatccagtaccagatgctcatgtgcctgttctaggattcaaaattaatggggtctcaattgaccttttgtatgctaatcttgctcatgcagtgattcctgagtcaagagagattatgatccattacaagcatagaaaagatggagattatgattctaggtcctacataggacctactgttaaggaatcacaaatactcaaggataaatacaagttaaggactatttttgggctccaagctacaactaccctccccaaccctattttgaatccaagaaccgcactggtggccatggggaagaagggcattgccaacccacacgctaagaagctagctaagtag

SEQ ID NO: 36170 - DNA, 2037 bp, Zea mays
  Peptide Sequence Number=SeqID_77949
atgaggcggaaagacggcgggtaccccccatccgggggcttggaagatggaaagacgcgacgcataagggaggaagaagacatgaccaacgggcggaaggggcgggcagccatgcaggcggcatgcaaccgcgccaagtggacgcgcttctccgactcccaacacgccagcatggaggcccaggcccacgcgtcacgcaaccggcgcgccagatgctgcatgcaagcaactgcaccgccacttgcgccaccaccgcgcctcttcggttgcggaaccaataccgcgactcgaggcggcccagcgcacgacccagcatcgccagcctggcgcgacgatcaatgcagccgaaagtgggccggcagtaatgacggtggcaggcgggcgggagcggcggagaagcgggcgacgcttcgccttcgccgcaataaccgcgccaaaaaaaagggaccgggaaagggggataccccgaaaaggatccttccccgtgaaggaaccgggctccgagccccccctactgatcagaggttcgaaggctggccctccgaggggttcaacagtcgcctcaggtcgcgtgggccctacacccactactggtcagaggttcgaaggccggccccccgaagggctccacggccgcctcaggctactcgggctccgcgcccattactgatcaggggttcgaaggctggcccccgaagggttcacagtcgcctcagacgccgagcgagggatgaccaggggtacgttcgatacataaccaaggctcgggctgcgctcccgagctcaccggagacaccatgttcggtgcccatcgagggcttgggggctgctctcgcaaacccggctccggccgaaccgttgacagcgtcaacataccagcccaagaacttgggccccgaccgtgcacccgggctacggccagttcgcatgaagagaacaaccagaccagccgaagcattacgcaaggcattaagacctcgggggagtgaaaccattcctccgaggcctcgggggctacacccgacgggtgtgctcgcgcgcacccaccggaacaaaatgcaaccgagaaaggctggtccccttgcaaaaaagtgcgacgaaagcctccaagcgagtgctaacactcccttcgaggctcgggggctactgtcggggaccataattaggggtaccctcaagacacctaattctcagctggtaacccccatcagcataaagctgcagaggcctgatggggctcggacttgggctaagccccggaagacggcgaactccgctccgcccgacccagggctcagactcgggctaagccccggaagacggcgaactccgctccgcccgacccagggctcggactcgggctcaaccccagaagatgacgaactccgcttcgccagaccccagggctcggactccgccctggcctctgccgaacaacctccgcctcgcccgacccaggggctcgggctcggcctcggccatggaagacagactcgacctcggcttcggaggagcctccacgtcgcccgacctagggcacaggcccgccacgtcaacaggaagcgccatcatcaccctaccccgagccgactcgggccgcagagaacaagaccgggaggacgtcagcaaggactcgaccactccgacagttgtccctccgccaggctccgccactcctccgacggccacgacatcacaccgactgggtgccaagatctctccggctgccacatcggcatggccttcttagagaaggttggccgcgcggggacgaggacgggacaggcgctctcttggggccgctcgcttccctcacccgcgtggacgcttgtaaccccctactgcaagcgcacccgacctgggcgcgggacgaacacgaaggccgcgggatttccacctctctcacgcccgtctccggccacctcgctctcccccttcgcgctcgcccacgcgctcgacccatctgggctggggcacgcggcacactcactcgtcggcttagggacccccggtctcgaaacgccgacaataatctag

SEQ ID NO: 36171 - DNA, 621 bp, Zea mays
  Peptide Sequence Number=SeqID_77950
atgtcttcttcctcccttatgcgtcgcgtctttccattttccaagcccccagatggggggtacccgccgtctttctgcctcatcgttgtcgtccgtggcgctggcagctgcagcgtgcccggctttcggacgcgagtggcttcggagccgctcgcggcgccggcgtccgccacggcagctggaagaggttcttccgccggcgtgatagccagggccggccacggactgacctccaactctacggccttctgcccgtccttgccttacgagttttggcatgggcgggggccacctggcagcagcatccgccctgaggtcagtgctgccgctgttcggccccccggagcgaaagtcgtcgtcgtcgccgctgctggagcaggtggcggcgcgccgttcgtcggtcttccgttgctccgcaggccttcccccatggagtggggttgttcgtacctgcggagggggaaccggagttccgtttgtaatggcaccttgaatgccgggaaggatggacttgccttcgttgaagctctcttggcacagaagatctacttccggaagttcgggctccgacccttcttccggagctacgggatccggatctgcggttcccgcttcttctag

SEQ ID NO: 36172 - DNA, 216 bp, Zea mays
  Peptide Sequence Number=SeqID_77951
atgcccaaaccggacaaaactttccccctccttatcctcccggtgctccccagccttcttaaccctggggttggaccgtacgagttcggatcgaggaaggatggacttgccttcgttgaagctctcttggcacaagggatctacttccggaagttcgggctccgacccttcttccggggctacgggatctggatctgcggttcccgcttcttctag

SEQ ID NO: 36173 - DNA, 1152 bp, Zea mays
  Peptide Sequence Number=SeqID_77952
atgggcacgactggacgaagacacagggagatggtcagctgcgacgagtgcagcgtgtgggtgcacacgcgagagaagcccaaggagatgccagatgatgttttgataggtactgaaccgaagaaggagaagcattacgtccgaagcctgagttgtcgtggcaagaagattgacagcgatcagcaagcaatgactcctctaaccaagagcctgatagttggaagaatgggtgtcagcggagtgagggctgaagatgctagatgtagaaagagggaagacgtggagactgctactaaaaagagtgaagaatcggacactgaatctgaagaggaagaacaaacacgaactgaatcaagcacaatcgaaaagcaaggtcctatcatcattaaccttgttcctcagtttgatttcgtatttgaattgtacttatatgacactttgtctaatttgttaatccagatggttgatgcattttatgtctttaccttgcaaacagtctgtcctcttttattttctgtttgttctttgatccttatcacacttaggtactttgtagactctgaaattttagtcactaagtttacaattgaaataggcaatgtgcaaattgtttgtgagcatggttacacgttagcccagaatttggatccgaacagcgaagggagaggagtattgcagttcaaaaccgatttaatgtcagtgatctggcaaaaactagcaaagaggggaggtgttgctattgatcgaagtcgggatattgctaaattgcaagaattttacaagctttatagagaaaagcataaagtggatgagttgattgaagatgaaatgaagctgagggaatctgccgtgttcagcggtaaccttggctttcctcttcttggaccttctgaagcagctttgcgacttattttggatttgagtagcacaatcataacattgctgccacaccagaaccctttaattcttcatgcttttacggatctgttttgttcatatgcccgagtgaatattcttttctctagcaagggtagctgtggtggtgggtttagcaccattatgggcgctactttagagaataaaaattttagcagtgattcaggtgaaggaggcaataaggttgttggttctgccggagagtcatcaaagtag

SEQ ID NO: 36174 - DNA, 198 bp, Zea mays
  Peptide Sequence Number=SeqID_77953
atgggattgggtgtgagccggtgcacgttctgccgcatccagcttgtacaacccgcatccaacgcccctgccgcatcccgcgtccctgccgcagcccccgcgatccccttcccaagcatggcgtccctgccgcagcacctgcgatcccgcctgccaagcatggcgtcgccgcggccgttgcccctgcagcccccgtga

SEQ ID NO: 36175 - DNA, 957 bp, Zea mays
  Peptide Sequence Number=SeqID_77954
atggcgtcgccgcggccgttgcccccacagccccgccgccgtttaccccgccgtctctctcgccccgcaggcgttccactctacatggaaggcacgccacaacaaccaaagaccattccccagtgctctcccataatctacctgcgctctgccaatcattctcggcgctctgccaggcgttcacagccaaccgtggtgcacgttctgccgcatccggagcgtccaacccgcatccaacgcccctgccgcgctcgttccagcgttcctgccgcagcgttcctgccgcagccccgcgattcatcaagagcgtcccagcgttcctgccgcagccccgcgatcccgcctgccaagcatggcgtcgccgcggccattgcccccgcagccccgccgtcgtttaccccactgtctctctcgccccgcaggcgttccactctacatggaaggcatgccacaacaaccaaagatcattccccggcgctctcccataatctacctgtgctctgccaatcattctcggcgctctgccagcgttttctactggcatggttatggttggttaaggaaatagtctgctttacaaaggataaagtagatgctggcgttgtcactgacataggcaatgagcaatttgtttactcttggcatttaccttgtggcatgtgggttgtagagttggatttcctgagttgtcgtggcaagaagattgacagcgatcagcaagcaatgactcctctaaccaaggctaagaagagagagcctgatagttggaagaatgggtgtcagaagagtgagggctgtgggatacatgattccatttgcgatgatggtcacattgaaactgataaaaccaagaagaagatggaggaatccttggagccaagtgaggagaataataactgtgagcaagctgagatttctgaagttgaagttgtattacaagccaaacagttcttataa

SEQ ID NO: 36176 - DNA, 126 bp, Zea mays
  Peptide Sequence Number=SeqID_77955
atggctgcagggacggactcttggttcacggcgaatagaggccgtgtaagacgtcgcaaacatccaactgaggctaccacagatgggaatagagctaatggacaaccattgcttgtcaatgattag

SEQ ID NO: 36177 - DNA, 342 bp, Zea mays
  Peptide Sequence Number=SeqID_77956
atggctgcagggtgcagggacagactcctgttccccgtggtactcaaggcctgtgattgcgtgcatggctgcagggaggactcttggttcccggcgaatagaggccgtgtaagacgtcgcaaacatccaactaaggctaccacagatgggaatagagctaatggacaaccattgcttgtcaatgatcagaacaaatataaatcaatgcttacccatacgtattctacaatgccaaccattaggcatgattcgattctagaagatcctgatggtgacacctcacaaccacaacacatctcgaactactaccatgtcaatctcaagaatgtgatgataacatga

SEQ ID NO: 36178 - DNA, 717 bp, Zea mays
  Peptide Sequence Number=SeqID_77957
atggcctcgccgctggagtatctccccagcgagcacatctgcagccgcccgctcgggctctgtttcaataagattggggacctgtacatcgtcgacgcctacttcggtttgctcaaagtcggccccgagggcggctggccacaccgctcgcaacggaggccgaggtcgtgcgcttcaacttcaccaacgaccccgacctcgacgacgagggaaacatctacttcactgactccagaatccactaccagagacgtggatgaaggatgtttggggcaaccaagagctaaatttatatgctctttcctacaagagcttaatgacgctgttaaggccaagtttgttgatgagtctccagcgcatttgatagatactaatccttcattcttttcccagtttactgttgttattgctacccagggtgcagggacagactcctgttccccgtggtactcaaggcctgtgattgcgtgcatggctgcagggaggactcttggttcacggcgaatagaggctaccacagatgggaatagagctaatggacaaccattgcttgtcaatgatcagaacaaatataaatcaatgcttacccatacatattctacaatgccaaccattaggcatgattcgattctagaagatcctgatggtgacacctcacaaccacaacacatctcggactactaccatgtcaatctcaagaatgtgatgataacatga

SEQ ID NO: 36179 - DNA, 294 bp, Zea mays
  Peptide Sequence Number=SeqID_77958
atggaaggggaagcttcggggaggagctcggttggaggagtgggaggccgcggcgcgcaggagcttacgtgcgcagactgggcgagctccatgctggggccagagacgtgcgcagaagctccagggaagaagaagacgcgagggagggaaagaagtccagggcgctcgcgcacgaagcttggcgagccattggcaattttgccattattatttgtgggcttcgccaatacgttatcggacccacaaatcatagacacagacggtcccaccagtcataaacaagggatggcataa

SEQ ID NO: 36180 - DNA, 513 bp, Zea mays
  Peptide Sequence Number=SeqID_77959
atgggcgagcaccatggggagctcggcggggaagatacaatcaccagggagcagggcgcgactggtccaaatctgagctggagctcgcggcaccggaggagcaggggaaaagcaccgcagcgagcgcagggagggttcaggccgggcgcgcaggaagcaaggcgcgacgtccatggtgagcacagggagatggggaaaagcggcttggtccgagcgccatggaaggggaagcttcggggaggagctcggttggaggagtgggaggccgcggcgcgcaggagcttacgtgcgcagactgggcgagctccatgctggggccagagacgtgcgcagaagctccagggaagaagaagacgcgagggaggggaaagaagtccagggcgctcgcgcacgaagcttggcgagccattggcaattttgccattattatttgtgggcttcgccaatacgttatcggacccacaaatcatagacacagacggtcccaccagtcataaacaagggatggcataa

SEQ ID NO: 36181 - DNA, 369 bp, Zea mays
  Peptide Sequence Number=SeqID_77960
atgggcgagcaccatggggagctcggcggggaagatacaatcaccagggagcagggcgcgactggtccaaatctgagctggagctcgcggcaccggaggagcaggggaaaagcaccgcagcgagcgcagggagggttcaggccgggcgcgcaggaagcaaggcgcgacgtccatggtgagcacagggagatggggaaaagcggcttggtccgagcgccatggaaggggaagcttcggggaggagctcggttggaggagtgggaggccgcggcgcgcaggagcttacgtgcgcagactgggcgagctccatgctggggccagagacggaggcttgcgctgaagataaggccgctggccgtcacgcgatga

SEQ ID NO: 36182 - DNA, 573 bp, Zea mays
  Peptide Sequence Number=SeqID_77961
atggcccaagggcacatttccctttcacagaggaccgggacacttcaggtggtatcaaagctgttaggttggccgcacgacataacccttagcctgatccaaaaaagtcagatggaggtccgctgccaaaccagcttttgccagaatgaagatggtttccccaagttgctaagagcatgcacagtttgcttcggaataaggagccagccagagtatgatggtcatgaattcgtcgagcatggcacagagaagatgcgtgcattggaagggaagcagctgcttgaggatgaccccacaatcatgtacctcactgcatacctgctcaccctggatgcacagtatgatttcttggctcggcaccaccgtcagatgattgcccgagcagaagatgcagagaagcgcaaccgtaagctctatgtggatctcaccacatctcaagcccgtgtagctgccttggaaagtcgtgaagtcattgctgttgaagccctgaagcaagccaaggatgagcacgtccagaagatgatggaggcctacttggtaacccataaccaacgtagagccctgtggatctaa

SEQ ID NO: 36183 - DNA, 153 bp, Zea mays
  Peptide Sequence Number=SeqID_77962
atgaggttgatggttcttggtaatgactctagtaatgaaaaaggagatcggcctcctgagactagtaattgtatcacatttgagtcccagaggatcgggggcgcttcaggtggtatcagagctgttaggttggtagcaggacgtaacccttag
